United States Patent Application Publication US 2019/0348154 A1 - sequence listing, part 13

SEQ ID NO: 47340 - DNA, 2682 bp, Acinetobacter baumannii
atggaacttttagcagatgacgaacttgcgttaatgcaagatgacccacggtataagcctaaaaaccaacgaggaagcgttcttgatgttgttttaggggcagcgtccggtgttgctatgggtactgtcgaagtggcaactgcaccagatgcattaattcgcggggataaaaaggccgcagctttacgtgcacaaaacctaacaatctttaagcctgaagatcttggtacagcgggtgaacttacattcggtttaacaaaggattttactagaattgcttgggacgttggtttgacggcacctttagggggccttgtaggcgctggcgcaaaaggatttgcggtacgcaaagccgcatcagagggattggttggtactagcgtaaacgttgggaaaacggtcgcccaagcaacgaatgcaacgaatgtggctactcaggcatcgctattcggcttccagtcatacgaaactgaaaaagcagatttaatcaataaaggcgcagatattgacactgctagaacaggtggtgcaattcgaggtttaactgatgtggccggctttgcgttaccggttcatggtatagcaaaaaatgctattgccgatgctgttgctacaacgggtttagcaacagcgggaggaatcgcgggggattatgtagagggagactatcttaagaacaacaaaaataaaaaagtagcagaatacggagaattgctacaggaaaatgctacaagtccgcttgttctcggttcaaacgctactatggctttaatgctcaatgtttttgcgaataaggctaaacttagacctgagcaaggtacagaacatgatgcagctgatgctttaaatgatgcagcccaagtacaagcaaatattgatcatgctgaaggcctaaacccatttgaaccaactaatgcaaaagacgccaatgaccattttgacgcacttgattttgctcaagaacaagcattaaacgatgagcttgtatctcttggtcgtcctgtgagtggtacacccaaaaatattccagtacccgcgaaggtaacacgtcctttatcctttaaaggtaagtctgcaactatccagcaaaaaatttatgatacggcgttatcaagtggactaagtgattcagaagcaagagccgccttggcaatagcacactttgagagcggcgggagctttgatccaaacgttaccaacccaagcagtaaatacaaaggtatttatcaatttaagccaagtacatggcgcgctgaaggtggtacagatgctaactacactgatcttgataaacagattgaattaggtattaagcatacaaaggggaacatcgcctatattaaaaaagaaacaggcgtaactttgaccggttctcaaatttacttgccgcatcttttaggccgcggcggtgcaaaagcagttatacgggcgataaagaatacgcctgatgcgcgtgctgaagatgtgttgcgtaaagtttatggtaaagacactgatgttgtattaaaaggtaatgctattaatcctgatgattcaattcaggcggctatgggtaagtttacttctaaaatcgataacctaatagcaactcaatatggtggggatataaaaaaaggaaatttagctattaggggtagtgactctgattttccagaattcgaatcgtcagttgctcagatacctgaatataaacgcgaaggtgatgttttaattgatgcttcgccaaatttatttgtaaatcgattaaatagtgaacctgaaaaattacttgaacttgaggaagactttcaccgtctgtcagaaccccttaattcagaagatattgagtacttaagagaaacagcacactaccagccatatgatggcaatgtgaatagagttgccttcgaagagccccaaattaatctatcgggcgatagtcgtagtgcgcaacgtggattggatgagttaagcagccaattacaacggactgattttcagggcagtgaggtaaatacctctccgataaaagttttaaaaaatgttgatgaagagccgcgtcaaccacgtttagatgagggtcaatcagaagtagatacggcaagtacctcacaaattcaggcgccaatagaaggtgttgaaaattggcaggctacacgatcagcagattatataaaacgtgaaaaagctcaatccgacggtgtcacagttcaagaactttataacaataaaactggcacattatttcaaagaagcatcaacgaagatggcagtgtttcccctgtaaaaatttctcgttctggaaaagagttttttgcaaaaagttcaacggatggggagagcaacacccctttgagcaatcttcagagtaaagcggctcaagctattgaacgggagttttggaaacctaagaaagaggatgtttctggcgctcctaatcttaacgctcaaggtcaaactgagttcggggcatttactgaaacacctgacggacgtgaagcggtaaaggccatgattgataatcctgatatggaggttaccgtaaatcgtttggatgataatggtaatgaagaaaccatctcaatgactgctcgagattggcttgactacattcgtgagcaagaagaaattgctaaagatgaaattcaagctgtacgggccttagcaagttgcgcattaaaatttgggagtgaagcagcatga

SEQ ID NO: 47341 - DNA, 2208 bp, Acinetobacter baumannii
atgcgtattccacaatttaatcgacaagtttctgacaatagcgttccaaatgtacaagtcaacgggggcatgtcagcaggcgaagcggcaagcctagttggtaataaaactgatagcttaatcggcgcacttaattcaggtttgaatgcgtaccaagcgtaccaagatgaagcggacaaagctcgagtatcgcaggttattgcagaagtacaaaatagcgttaatgattacctatataaccctaaaacagggttattaaatattaaaggcgaagcagctttaaaaagggagtctgggcaatctctaattgatgaggctaacgagtggcttgtaaatttatctagtgagaaaacaaatactttatctaatcctagtcagcgtaaattatttaataaaaacttggttaatgtacgtggacagcttaaccgtatcacgtcccagcacttatttactgaatctcaaaaatttcaaaagacagcttttgaggcagaaatagatgctaattcgagctcagtaaatcttaattattcagacttagaaacgacaaatcaatctcttgcaaaaataaacagtgcttcgcaaaactatggcaaaactcaagggtggaatcaacaacaaatagatttatttgttaaagaacagcaagacaaagctttgttgggtgcaattaatttaatgcaaacaaacggggattcttcagcaataccattgtactttaagcagtacaaagattacatgtcaccacaaactcaagcaaaagtaggtaagttagttcaggataacaatgccgatgtttttatgacagaaattataaaatataaagaggacccagaagagcttgataagtacattgtggcattacaggaccccaatagtaatttttcacaaagtgttggggcaagacatatcccaactctacttggtagagcaatcggctaccgtgacgcttatgatagaaatttggttgctgaggcgaaaaggaaagatgaagacgggaaaaaggctctaggtgattttagaaaagatattgaaagtggtattcctttttcagcacagaggcttagtgagttatcttctaaggttgaaggcacggcatctcaaagtgagttcgacagaataaatagaagcttgccagtatttcagcttttatactcaatgcctgcggatgcaagggagtctttcatcaattcttatgagtctgatgcgaaaacaaaaaaatctgaccatccacaggatgttaagttcgttacagatcaaatgcgggcgattcacacaggattattagataaagaaaaaaatgatccggcattagcttattcaataaaaactggtaacccattaactcaggcacctacgactttaattatccaaggggatagtaaagcattaaacattgttagtagtaatatccaaaaaatggttgctacaaatcaagctagcggatcaactacgggttctataaatccgctttctaagcagcaacaggaagaaatgaaaactttttggaagtctgcgcctcccaatcaaaaacttcaattggtctctaacctgcaaaaagcagctcaaggcaatgctaatgcctctcgtgaaatgattcagtcaatcacaggcacaaataataatacttttagatgggcggctgccttgaacaaccgaggactaaaagacattgcgaatcaaatggcgattgggcaggatttaattgataaaggggatgttaaagttgatgaagcactattaactcaaaaaacaactgaatatttaagaggcattactgcacctggtaaacctgattttaatatctacaaagatgcagtcagagccaactatgcatatcttttgcagaagtctgaaaaaatcccaaataaaacagaaaaatctaattctaaaaaattagatgaagacctaattaatttggcgttattaaataccacaggtggaaaatttactaacggtagttttagacgagaatcttcagtactacgcccccatactgtaggtgaagcgtcatttcgacaacaactcgaacaatttaattctagaaatgcccggacttatggcggatcggaccgtgagtattttctagatttaccgttagaacaagatactaaaaatccttataaatattattttaaaaatggtagcggatacgtaatggattctagcgacccgaaacgcaaaaccagattaacttttaccgtgagatga

SEQ ID NO: 47342 - DNA, 447 bp, Acinetobacter baumannii
atgcataaagttcataccttaaaaaccgattcagaagtttttcaagcggtatctgatggccgtaaaacatttgagattcgtttcaatgatcgagatttcaaagttggtgatgatttgattttacttgagacgatttactcaggtgaacaaattaagcaaggcaagccacttctgtattcaggtaatgaaattcacaaaacagtttcatacgtattgagcggctatggactgaaagaaggatgggtaatattggggattcaaggcccaaaccacaacacatcatgcacatatcaatttgaacttgcatttcacaacctgcaagacacgcctgagctacgcaagatttattggtctgcattaggccaattgcaatttgattctaacgatcaggttattccaccagagcttgaagagtgcccatgttgtaaggggaatcaagatgcgtga

SEQ ID NO: 47343 - DNA, 267 bp, Acinetobacter baumannii
atgacaaatccgatcaatatttttggccctaaagaatgctcaaaacatttttgggcgcatgactcaaatggcattggcaaaacttgtgtacgttgtggcgctactgaaaacgttttatatcaaacaccccctcaatttacctacaaggttttaactggtgcacaagctgtttcagtgcttcagctcacgccacaaattgatgacatgggcgacgatagcaatttagatcatcacgtttcacctttctgtgaggtgcgtgacgtatga

SEQ ID NO: 47344 - DNA, 471 bp, Acinetobacter baumannii
atgacaacagatattcatacatggcgcagcctaatctgccaagaccttatcaaagcgggtttaacaaactcaaaagatatcgttgcacaagcttcaaacatcgaagtttatgtatttggtgataccaaaacggcagaagcaaagccagaaattaaaaacgcagaagttaaaacttctaaccctgcaaaaactcaaacggttaaagaaaccaaagcagaaaaggttgaagaagtacaagaaaccaaatctgaaactacaccagttgaagagccaaaagatgaagttgttgaagaaacaactaaatcagaaatcactgaaaaagaagtgaaagacgcttgtttagcagtagctaaaaaagaccgtgctgcacttttagccattttaagtgctgtaggcgcttcaactgttgcaaccatccctgcggataaatacgcagaagtaatcgcagcttgtgaatcagcacttgcataa

SEQ ID NO: 47345 - DNA, 489 bp, Acinetobacter baumannii
atgtttggtatcgactgtaaccgtaaggtttccccagaaaaaggacaatggtttcaactgcgtttattgccaaatttccatcagggtcaagtggtctggctcaaagattttggctttgtacaattatttaagactcagttaaaagaacagcagaggttttatattgtgcatcaagatgaagatgatttattgtcctttgagggttttcatgaattacattcaagtcattggaaaatagagcaatatcaccgggtgattaaacaggtttgtcatattgaaaagtttcaagtaagacgatctaaactgattttgaatcatattttttcagccttgatggcctacgtcgagatacaaaagaaccagtttgagcggatctttgaaaatgtatatcgttggcagaagaaattatttagaccagttatcaaaaacttcattgatgactttattctcgataaaaatcatctgctaccacagagaatctataaataa

SEQ ID NO: 47346 - DNA, 510 bp, Acinetobacter baumannii
atgccaattccgaagcattcaaaagagttaaaattaaaagtcattcaagcttatttagatggaagtaaaggatataaaatcctttcacaagaatttaatgttgatctccaaaccatccgcttatggattgaaaactataaggcacaaggtgaagatggcctgaatgttaaaactaaaaaaacctactactcttccgaatttaaaatcaaggctgtacaaatgcttcttgataagataccggtaagagaagttagaagacggttaaatctgagcgggacatcaattttaagaaggtggctcgctcagtatcataaagaagggattgccgggtttaatactacgaggatttataccaatatggttaaacaagataaaaccaaaataactaagcctataaaagaagacaaagataaatctcaacaggaactcattgatgaagtgaccgctttacgagcggaggttgcctttttaaaaaagctaaaagccttaaaactgaagcaacgtacttaa

SEQ ID NO: 47347 - DNA, 762 bp, Acinetobacter baumannii
atgaaagctgtacgctctaatgacaaatatactgagttaaaacagcagattaagtccatatatcacaagcataagggatgctatggctatcgtagaattactcttgccctgaaaagtacaggaataataatcaaccataaatgtgtatatcgccttatgaaaaccatgggacttaaatcacgtatcagagcattgaaatatcgctcatataaaagtggttgtgtcgggacggtggctgataacattatgcaacggcaatttaaagcgaaccatcccaaccagaaatgggcaactgatgtgacggaatttaatgttaacggtgaaaaactttatttatcaccaattatagatttgtttaatggggaaattattaccttccgaatccaacgtaaactcaattatgagttagtgaaagatatgctcattcatgctttagctaaacttaagcgacatgagaaaccaattctccattcagatcaaggatggcaatatcaaatggctcattaccaacagcaattaaagcaacatggtttaattcaaagtatgtctcgtaaaggaaattgcttagataatgctgtaatagaaagcttctttggaatattaaaatcggaatgctttcatggagaaaaatttcaatcaattgatgaattagagaaaacgatacgagaatacattcattattataatcatgagagaatcaaggtgaaactacaaggtttatcccctgtacaatatagaaaccagtttataaaaactgcttaa

SEQ ID NO: 47348 - DNA, 651 bp, Acinetobacter baumannii
atgaagtcagtaatagaaagcgatgatacacattacaaagtgaaaattgaaatgtttgaaacacaccataattatttaagtgcaattatgttgaatcaagcccaacaagctaagaaagaagggattggacataaatttcgatggatcattcctgcaatgtcttttgctgtatttaacgttgaatctgtatgtaacttatatggatctcaattaataaaaaattgggaactattagaaagtgctagttttttaggtaaagtttctttagtcagtgaacatcttggccttgaggtagattggtctaaagaaccttggcaaactataaataagatgaagaactttagaaatgctttagttcatttaaaacctaaaaaaactgcgccagtatatacatacgttgaaaaaactatagctattgaacgtattcatcgttatgccttattaatgaacggttatccaaagaccaaaaataatataatgagttactctaatttagaaactatggaaaaatttattagcgtagcctctgatttggagcgaatgtggatgtggagttgtcatcagaaaggaataaaagtttatcactatacaacacctattacagaaattatgaatccgccagtgggtaatgaggaatctgaatatatttaa

SEQ ID NO: 47349 - DNA, 783 bp, Acinetobacter baumannii
atgcctcaaattggtaatcagactttaactgagtcagatatgtggggtgcgacgccgtttgatcagctcatgtgccgtattaactttaagtcaatgcgttacgaaggtttatttactgcaccaggtactgatgtttcattaagcttccctggttctttaggtggcatgaactggggtagtattgcttttgacccgacacatcgttacatgttcgtaaacgatatgcgtcttggtttatgggttcaactcattaaacaaacacctgaagatattaagattcaggcgagtggtggcgaaaaagtaaatacaggtatgggtgctgtaccaatgaaaggtacaccatataaagtgaataaaaaccgctttatgtccgctttaagtattccttgtcaaaaaccaccgtttggtaccatgacggcaattgacatgaaaactcgtcaggttgcatggcaagtaccacttggtacagttgaggacactggaccacttggtattaagatgggcttgaaagcaccgattggtatgccaactattggtgggccaatggcaactcaaggtggcttagtcttctttgctgcaactcaagattattacttgcgtgcttttgattcatctacaggtaaagagctgtggaagtcacgtatgccagtaggtagtcaaggtacaccaatcagctatgtttcacctaaaacaggtaaacaatatgttgtggttaccgcgggtggtgcacgacagtctccagaccatggtgattatgtgatcgcatatagtttagataagtaa

SEQ ID NO: 47350 - DNA, 2277 bp, Acinetobacter baumannii
atgctcagtcgtcaattagaagtatcattacgtttggctgttagcatggctcgtcaaaagagacatgagtttcttacagttgaacatttactattagccttactcgataacgattcggctgtgaatgcattaaaagcatgcggagctgatattgtttctttacgtaaagaattagaagaatatgtagaacaacatactcctaagcttggcgaaaatagcgagcaagctccacatccaacagaaagtttcgaccgcattttgcaacgtgcaattttccacgttcaatcgagtggtggtgaccgtactgttgaaggcgcggatgttttagtcgcaatgtattcagagcgtgattcttttgctgtctatctgcttaaacgtcatcaaattaatcgattgactttaactcaatacttgtctcatgggacacgtaaagacgaagttcaggttgaagaagaagttgaagacattgagggtgaaagcaattcaggcaatgcgggaccattagaactttatacgctcaatttaaatgttgaagcgcaaaaaggtaaaactgatccactcattggtcgtgagaaagaaattgagcgtacagcacaaattctttgccgtcgtcgtaaaaacaatccattgttagtaggcgacccaggtgtaggtaaaacttcaattccagaaggccttgcttggctcattgtaaatggtaaagcaccaaaaccgctaagccatgcagaaatttacagccttgatattggtgcattagttgcaggtacaaaatatcgtggtgactttgaaaaacgtttaaaacaattgttaaacgctttgaagaaaaatccgaatgcgattttattcattgatgaaattcatatgatcattggtgcaggctcaagtatgggcagtacgatggatgcttcgaatctcatcaaaccagctttagcaaatggtactttacgctgcattggatcaaccacgttccaagaatatcgtcaggtatttgaaaaggatcatgcgttatctcgtcgtttccaaaaaattgacgtaaatgaaccgagcatttctgaaactattgatattttacgtggcttgaaaacgaagtttgaagatttccaccatgtacagtatgacgacaaagctttagtttctgcggttgagctttctgcgaaatttattaatgatcgtttcttgccggataaagcgattgatgtcattgatgaagcaggtgcacagcgccgtctaaaagcagaaagtgaagacagcttaattactgtagagaacatcgaagatatcgtttctaagattgcgcgtattccgcctaaaactgtatctaaagatgataaatctgtacttgaaaatcttgagcgtgacctaaaacgtgttgtatttggtcaagatgaggcaattactgcattagcttctgcaatcaagttgtcacgtgctggtttgaaatcaccggataaacctgttggtagctttgtgtttgctggtcctaccggtgtaggtaaaactgaggttacgaagcaattagcaaaacttttaggtgtagagcttgttcgtttcgatatgtctgagtatatggagcgtcatgctgtttctcgcttaattggtgctcctccaggatatgtaggttatgaccaaggtggcttactcacagatgcgattcataaaaatccgcactgtgtattgttactagatgaaattgagaaagcacatcctgatgtgtttaacctgttattacaaatcatggatcatggtgcattaacagacaataatggccgtaagtcagactttagaaatgtcattattgtgttgacgacgaacattggtgcagaaagtatttctcgtgcaagcattggatttacagagcaagaccatagttcggacaaccaagaagccatgaaacgtgcattctcacctgaattccgtaaccgtctagatggcgttattcagttcaaagccttaccaaccacagtgattgaatctgtagttgataagttcttgacagaattgcaagcgcagctagatgaaaagcgcgtagttttagatgtcgatcaaagtgcacgcgactggttagcgacaaatggttatgatcgcttaatgggtgctcgcccaatgcaacgtctcattcaagaacacttgaagaaaccattagctgaaatgattttgtttggtgaacttgcagatcatggcggtaatgtggcggtatcagtgaagaaagaagatggtaaagcagtgggtctaaaacttgaagtgtttgaagatcaccatacggcagaaccagcttaa

SEQ ID NO: 47351 - DNA, 753 bp, Acinetobacter baumannii
atgcaaaactcggaacagacgacttctgtagaaagttcgttgcaaaagaaaaaatttttaaacaccaataaaccattatttattggtgccgctattttaatgagtggttgttttgcgctcggctatacaattgggcaccgtcaaggtttaactgttgttggttacgatgcagatgcagagcaattggttgaggtagtgcaaaaacaaaaaacagcattagatgcagttaacaaaagtttgaatgctgctgtacaagagcgtgatgttgctgttacaaatgccaatgatttgtttgaagcacttaatcaagccaatgctgataaaacgcagcaagaaggtatgagtaacatctaccgtgaaattttaagacaacgtggtggtttaagcttaacaattcagaatttggcgattaaaccgttaccggaaaatgcttatgaatatcagcttgatctggtacaagttagcccgagtaaacgccgtgctgcaggttcagttgaaataagactgattaaagatacagaagttttagtggtaccacttgaagataagaactttaacttcactgattttgagcgtttgactggccgttggacgatgcctaagggcttcacacctcaatttattgaagtgcgtctaacaggcggttctgatacaccggttattaagcgttttagttggcagcgtggtaaacctgtcgaaacaccttctgcttttgttgcagaaattcctcaagctgaagcaaattcacaatag

SEQ ID NO: 47352 - DNA, 123 bp, Acinetobacter baumannii
atgaccaaatattttaaaaatcgccataaaaaaagcgactctagcgagtcgcttttttgttcaagaactcaaattattgagcttgttgaccaggttgaactactacagtacggctaccagtga

SEQ ID NO: 47353 - DNA, 1131 bp, Acinetobacter baumannii
atgccaatttatgggttaccagaatggtatattagagaaaaattagtttttgctctgcattatcctcacgatgtagtggataatgctgggcgaccactaatggagtgggctagtttattaggcattgaaactaaaagagtgaagtgtccttttagtgattcaagaaaagatatagatcatttaatcaatatatctacaatgcagctaatgaataagcaaaaggaagatataaatttcttgttggaaaaatttatatatgaagcatcagatgtaatattacatttacctactcatttgaaaatttggtatatatcaatgtgtttcataagtaaattaaataaagatatactacgtagctttgttcgacaagaaaattacttggctcatgcagcggaagcgtcattatacaaattatctaggggatttatcgcgaccatagaaatatggatggaaagatatcgtgatgaagagcctgatgtatttttaaatggcgaaaatctatataaattttgtgatagtcatggccttttaattggaagaaaagaggcgtgcgcagcatctccacaagctataataaaatttctaagcttttttatagataaactttcagttacagaaagtgttaagagtgatgtccgatctaatctctttgatagagactttttatttgcatgggcttttggaaagtttgcttttacgctttacgatataattagaatcagttcaaatattgaggctcttaagaaagaaagaaaaaatattcttaacgaacaagatcattatgttacatttagacataattataatccaatattgagccttgagcagattaatccaaaaaatgtccatagcaaaattaaagttatcaaagagctattattgtcagtatcctgctatggtgctgaacatgaaaagctatctcttaaatttttatctgaatttttaaaaatttatactagtgaagaaaactataatattggagttaaaaggtttaatgctgttgctgttgatgtatttaatgaggttaatagtataatttatcaatcgttagaatttggttgcccaaataaattatatattgatgaaaaagatatgaacatattttttggtaaatctttggttttttgctag

SEQ ID NO: 47354 - DNA, 156 bp, Acinetobacter baumannii
atgactaagcaaacttcatactcaactgaattaaaagctgatgaagtagaaacctctcaagctttagatcctcgtgatactatcatgatgcgcacacttactgaagaagagctggaattggtaagtggggggaatgttgtaaaagcagcacagtaa

SEQ ID NO: 47355 - DNA, 363 bp, Acinetobacter baumannii
atgattaaaacggatcgaatgaagcagagtattaaagatggaagtgctggctatgcccccttgtactggggcaaacggctggaaccgctagtggctgagtactacagtatgcataccaataataaggtccgtcgggtcaatgccgtgttacgtcaccctgacgaggacaaagcctttatgttggctaatctggattatactgttgttggaagtgatgacgtacagatactggaatgtaaaaccgtcggtgaatatggggctaaactttggcgagatggggttccactttatatactttgtcaggtacagcatcaacatcagtggtcaaggtattacaagcattttactttaaataataagtaa

SEQ ID NO: 47356 - DNA, 1050 bp, Acinetobacter baumannii
atggcacatcaaatagaaacaatggcttttgttggtcaaaccccttggcatggtctgggtaatcaacttcctcaaaatcaaccaatagaaatctgggcacagcaggcgggtatggactggcgaatagaatcatctaatgtcagttatatggcaaagaatgaacggggacaaaatatcctgatgccttatgaagagcaacgagtgctttatcgttcagatactcatgcaccgctctcagtggtgagtcagcgctatcaggaagtgcaaccaatggagatattaaacttctataaagaccttaccgagcaatcaggttttgaactggaaacggcgggtatactcaaaggtggtcgtaaattctgggcattggcaagaacggggcaatcggcagcattaaaaagtaaagatgttagtaatggctatattttgctggcaacagcatgtgacggcacgttagcgaccacggcgcaattcaccagtgttcgagtggtatgtaataacactctggcgattgctttacgtgggcagaatagcagtgctagtgtagttaaagttccacacagtaccaaatttgatgccgagaagatcaagcaacaattgggtatttcagttcgtgcatgggatgaacatatgtatgaaatgaagcaactcagtcagcgtaaagtgacccagcaggaagcagcagcttactttgatgctgtgttcaataacacgaatctgagtattgccgaacaggatgatagtatcattcagttctaccgtaatgtagctacgcctaaacagatcaactcatccagagccgataataaaactgaacccaatggtcgcgccatgtctaaggttatgaccatgtttaacggacatggacgtggggccgagttagcttcagctaaagatacggcgtatggtttgctttgtagtattaccgagttttgtgatcacgagcgacgtgcgatttcaacggatcaccggatggattcagcatggtttggggcaggagctaatcttaaacaacgtggactggaacatgcattaagaatggtgtcttaa

SEQ ID NO: 47357 - DNA, 414 bp, Acinetobacter baumannii
atgaaaaaactatttctgggtatgggagttgcagctataagtatttcaacttatgcattagatttacagtcacatgaagtaccagcctatttaattcaacaacaaggctattcagggcaagtgaactgtacgtatcgtggtgttctaaaaagtggagtccaaagaacctttaaagtatctatgttcaatgagtgtgaacaggttttggcattgagtaatgctactgtccataatgcaatgagtgaggcaaggattccatatagtagccatcgaacttttgtccgatttattggggtaaaacctcgaaagtttggaggtatttatatccctgggcgaagtaatccttgtcacccgagtttacgttctattccacaagctgttgctgactgtaaaaataaacagcgttctcattaa

SEQ ID NO: 47358 - DNA, 615 bp, Acinetobacter baumannii
atgatgacaacacaacctaagaatactcagacttttattattggagttttatctgcacttgtcgtagtacttgcaggctggctaggctatgacaagttgcttaaaccaaaatctgaaacaatagttaccgcatctgtttctgaaccggctactacttctgaacctatgggtatggcaactagtgagtctgccttagccgtgcaagaaaaagaaacgagtcctgttaaaaagtccgatggaaatcctaaaggtgaataccttggaagcgggctttatacctcagacatggaaagtggcaagtgtctaaattcagctaaagttacttgcggtttgtttgaaatgaagaagctgccgaaagaatgggaaaatattgttgaagcgacttctgagaagaaccttgaaaactggtttgcaacgactgatccgaatacggtgacttcaatcccacatgattggtcaggctggcaagttatggaatacggtgaagacaataaaaaggtgatggccttcttcgatagtgcttataccaatacaggtgaatgtttattaactcaaactgtatatgacatcaaaactaaaaaagaaattgatagcgttgatcttgcctgcaactaa

SEQ ID NO: 47359 - DNA, 249 bp, Acinetobacter baumannii
atgatgatcaatacccaacgactcaaacggcgttggaagtggtatgtcgcttatatcgtaatttttatgctgtcttttgtcttgttttatgcctatgaccgtactcaggatcaatcaacagagcagatgcttgaagatgtccgagaccatgcaatcagtccagatgataccgccgtaaccagtatgcatagtgaacaggaagtccctgcttttgatcaaccttatcttaatcaggaaaatcataaataa

SEQ ID NO: 47360 - DNA, 1074 bp, Acinetobacter baumannii
atgagcatacaggaacgaattcagcaaagtcagtgggtgcctttactgcgagctagcgacaatatttatttttctccagtcattcccaataaaaagctgcaaggtgctatgagctatttacctcatggtgtaaacaccaatgatgtcttgatgttgattgacgataccgtattcggtagtgccaaggctgggatgtgcctcacgtcaaaggggcttttctatagagaaagttttgaagatgaacaagcttatctttttgagcatatccagcaggtagaggctgatattggcatgattaccagttcgattttgattaacggtcaggatgaactgagctttagccaactcgataaaggtgcgattcgtgctttggcggcattcttaaatgaatgttgtcagggcaagcaagaaaccaagcagactagtgtaaaaattaatgctgagttacggatcataattgatctgtttgcctattttattacgtttaacgcgggtcaatggaacgcccgatcaaaagaagcgatatccgatcattttactaaattgaatgataaggcagtgcatcagtatgttgataaactattgaatgaacagacgcgctttgattatgaagacttattacatcgtctggcagacctgaaagatgaccttgcctataacttccgtagagaaatgattgaacaactggtctatgctatggcactcggtcaggttgagcagaatcaagctgatctgttcatgactcatttgtgccgtgtatccaacgtctctagggctgtctttccagacctcgtcaaaattgtttatcaatgtatggcaggggaaatgaaccagacaaaagtttctgatctgactgaagagcaattacaagcctgcaagcttcttgagattcagccggaagcattgagcgaacaaacccttcaagctgcctaccgaaaaaagatggccgatttccaccccgataaataccagagcttacccgaatcagtccgccaattgattgagcaacaagcccagcaactcaatcaggctagagctgtattaaaatctatcttggagtgtagcagccgatga

SEQ ID NO: 47361 - DNA, 150 bp, Acinetobacter baumannii
atgaaacatccattttttacgttctattttacgattgtgattggttactggctgtattgcatttgggaatatccaggacattactctggtgcttatttactcggtcgcgctttagtctggccttttatatttatacgttggttcttctag

SEQ ID NO: 47362 - DNA, 165 bp, Acinetobacter baumannii
atgccaatcccaatgaaccctcatgaacaagcagactttaatcaattcgaagaagatagagaagaacaaattgagcaaatcatgattgaaaaagaatgctcaaaagtggaagctgaggcaacatgggaaaaagaatatgctgaagcaaaatcacaagatgactag

SEQ ID NO: 47363 - DNA, 924 bp, Acinetobacter baumannii
atgcacccaattactctaactcactatgaacatcaggttgctccgcgtttggaacaggatatccataaactctatttgagtatctgctttaaacgcggtggtgagtatgatgcccagttctggcgctctcattttttcgagtactttttagactggtcgcagatttgtctgatgcctacaatagaatgtggatactggataaattatttcagaatgtgcttccacgcgagccaacgagagctaaatgtggttggtttaaacctcactcttaatcagcaagaggctgaacagttaatcgatctgatcttggttaaattacgaaaaatattttctgcaccgtcctttctggaaatgattgaagataaaaatgtaaaacatgccaagagagtggagcattatcaaaaggcctaccaacaagcgacgaagcatcatcatgcattaaataagattaatctgtttctaggatacttgcccggttatacgtctgtaacctctatttttaatgttgccaaagatatacgccagtttgaactattgttgggtcaatatggctattttccctttgattatctctttcagtatcagcgtgttgttcagcttgctgaaaacggggagtacgggatgctcttctcattaacgctaaatggctatatttatcaggacaattctgcgctattgatgcaaatcgcccgcttatggaactttgtaacgaagtaccgagggatggtggtgaacttgaatgaagcgattacagagcatagccatccgtttactgagatgtttgcagcatttaatgatgtgagtgattttgatcgactcttacatcaagattttttaaatgtagatgcagactcaatgaatgtcagaatctggccgcaaggtttcagacgtttccacggaaagggatcacgtcaaccttcgtaa

SEQ ID NO: 47364 - DNA, 231 bp, Acinetobacter baumannii
atgaatgcgtctttcactcaaacaacctttgtgatgaacaaaatcatcaacattaaacaagtgatagaatttactggcctcagtcgcgccacgatctacaatttgttagaccctaaatcagaatactatgattctactttccctaaacaggtacgtctaaccaccaatcgtgttggttggtcagcctttgaaatcaatgaatggattgagtctaaactggcccaacgttaa

SEQ ID NO: 47365 - DNA, 972 bp, Acinetobacter baumannii
atgttgaatgaaacagaaatacttatggctatagaacgcctgataagagaagtgagtcaggtattagagaaaggtgatcaaacgaaacgaagtaccatacaaaaacttagggcatatgcacggcaaggatgtgatttggttcctgcatttaaacagatgttcacccgtaatcttcaactgatgtttccagtcaatcaatttattcgagtcattgaggtcgtagatcgtctgaaccagcaatatggctggccacacactgaaattccctatacggatgaatatatccaaatttgtagagccttgtacgtatcacaagcggcatggcgtcgagatcagaataatttttacagacaagaatatgacaatcggttcaaactggaacaatacctgagaaacattatccaaaagcatcgtaaaactttatgggttcgggaagaacttaaatactatacagagtgtctggatgagctttctattgcagatgttgaacgtcacttaaagactttacggaaacggatttcagataaggatacctgctttaaagatttggttggctatgcatgggctttagagcagggcggtgaaacgggtgcttaccatatccatttactcctgatttataacggctcaataagagaggctgattggtggcatgcggatttagtcggtgatttatgggagaaaattacgggtgtttttgggaaggggttcaacaagcatactgcaaaggagagacagtcttacaaagaaaagggtttagatggattggggatggtgaagcgaaaagatgtagcgaaagtgaacaatgcgattcgactcggtttatatctcgctgatccgactaagtatgaacaacggttacgagtaaaagtgtttgggatgaaaacattcggtcatggccagtttataccgagtttgtacatgctccgtcaatccagagaggcagatgacgatatcaaattaccattttaa

SEQ ID NO: 47366 - DNA, 2337 bp, Acinetobacter baumannii
atgaaactatcaaatattgagtatccacagcgtacccaagagctagcaattcttttgaatttttatctgatgcagatcaagccgattgacatgaaaccgataggtctgcgtgatgaatattatcctgtaatggcttatctaaaaatcgtttcacagctggaaaaactcattttaagttttgtgtataacgggaaattagaacggaatgaagagcaaaatttgctcgacctactgcacgaaatatataaacaaggaaaaggacgttttaagctagaagaaattcctgctttggagatggagctgacagagtcccaaattcaggcgataaacgttgtattatttggtcagcttcatggcatagctcaggtctggctcgactctgattatacgacagcgctttttcaactctatcgggtagggcacaacaaatttaaaagggtgtctcacaaagaaagctattctgatttccttaaaaaaagaaataatattattttgcagaatagttttcctgttcttgagaagtttacatcagatttttgggtgtcacgtgatcaacggatcacgaagttgcaatctacgtttgatcaaatgttcgcttcaaaaaacagtgtaaaagtactgtgtattaatttatttgcaccccaatttaatggcgaagctcaaattgtttttttaaatgaggctttaaaaaaactccgtagtgagatgaggaagcaggagcactacctcggtctattttataaacttgaatatggcgttgatgggcaatttttttacttttgtgttgtggtttttgaaaatttaaaaagcttggcgattcgtgatttatataaaaatgttgctactgtctggcaagcgatatatacggaagactatcctttggaccctcaagtcaaacttcgtttgacagagttcctcaatagcaagctttaccgtacttcgactttacaagccggagtcatttctagaagtgggccaagttatgcacagtttgtaagaacaacacttgcttatattgccaatgcacaacatctcttacaaatactttatagggagattgtctggactgaagaaaagccgtatgaccgtgccgataagcctagagaaatccctaaaaaggccattacgccaagaaaaccaaaaaaactggaacatcatcaggaaaaccagtctctcctacaagcattaaaattaaaaaatgtttttaagcctttgcaaaaggatattctggatattgggctgtgttatgaacacatcccctatattgatcggtcatacagtcagaatattctggactttacccctgcaatgatccggatggaagttgcggtgcttttagctcctgtctggataagagacccggttacgaatgaggggatggagatcaaacaaaatgattggggcggtttactacaggatgagccacaagaacaaaagaatattgaaatttttcttcagtatactgagtttatggggccaagggttctatgctttattgctgcttttttaatgtttccaagacaacaatattctcctgtctatggttatagcttatataaaaccgcattgcatcagaagatacgggaactcatggcattaccgcttaaactgtttaaagagcaaataaagggattggtagacaagcagttgatgcccgctgctgcttttaccaaactagaaaccttgttgacaagccaacggtttcatacagaatcattacaagactggttaaaggtgcaggagcgagtcaaaaaaagatcatttctcagagttgatagctacgtcaaaaaactggaaaacgaacagaatgtttatcgagatgtagaatttacgattaccgttctaaagactcaatctttaaaaccaatcgatacccttttgaaaaacattattgatcattttaataaaactcatccgcagcttatggggtacgttggatattggagttttcagcaagtagatgagcaaaagattcaatatattgcgaccctcacattttatctggatgaacgctatatagaatcaacaggaaccgaaagctggtttgaaaagctcaagtatcaggcggagttacgtctggataaaaagaccgaagctttgaatatttatgaaatcaaggtgaaacaaattgacaacctcatggaatacgtcgggtcttttcaatccaagtttaataaaaaacctcatccgcgacgttatacatcaagtcttttatttgccttaatgcatcgtgatttatactggatgcatacagccgtacttcagaaacaaatgttgattcgcgggcgaactgactacaaaaaaagaaccagaaaaaagacaaaaaaacaggcgtaa

SEQ ID NO: 47367 - DNA, 813 bp, Acinetobacter baumannii
atggaaaaattaactgtacttcagctaagcaaacgaactggactctccagaacacagatttatcatctacaaacaaaaaataaaattaaaataatcaatggaaaaatagattttgaagcagccttgccagctattatcgagttactcgataaaaaatcaaataaagatattgaagttaattttaaacagattttaaacatactcatttcacaaaatatctcgctacaaacgcagctaaacctagcccatgaacgtgaaaaagcataccttattgagcttgcaagctatcgccagaatttggcccaagaaaccatccttctgtcatcaactgatgaaagcaatacacaggctgagctagagaatgatggagttgatacggacgagaacgctctaaacaaaatggaagctgaaagtgaaactcagactccaacggagtcatgccaaagcatcaataaagaaacgaaatcgggtaatgaggcagaaagcgaccctaccgctagagaatttatttacaatgaaatgaccttacccgaatcagaaagcagggatactggactcaccagatcagaaaaagaaatgactgagcagaataaggatgcgctcattggcacatccataccgaatcaagataatagcgaaccattactaaatttaaaaagacgcacactctcttcagcccaagttgtaaaacgggtatataaaaacgtttcaataccgcttactgctcgcaaccctaaccataaacccacaaatgaaacaattgcagatcaagaggagcttaataaagaagatcatcatgatcctgagcaataa

SEQ ID NO: 47368 - DNA, 1320 bp, Acinetobacter baumannii
atggttgatcaaccttctaccgcaacaactccacattctaatttagatacaaaaacccgtctaaaatcaattttgggcggttctgccggtaaccttgtcgaatggtacgactggtatgtatatgccgcatttacgctctattttgctcatgcatttttcccaaaaggaagtcaaaccgcccaacttcttcaagctgccgctatttttgcagtgggtttccttatgcgtcccattggcgcatggatcatggggatctattctgaccgtaaaggacgtaaagcaggccttacgctttccgttactttaatgtgtatcggttcgctaatgattgctgttacaccttcctacgaaagtattggcgtatttgctccattgcttttggttattgcacgtttaattcaaggcttaagtgtaggcggtgaatatggcgcaagtgcaacgtatttaagtgaaatggcagaaaaagatcgacgtggttttttctcaagctttcaatatgtcactttaattgcaggacagcttacagctttatgcgtactactcatcttgcaaatgatacttaccgaagaacaactgcatgactggggatggcgtgttccgtttttcatcggagcccttttagctattgtagtgttccgtattcgtcgtggcttattggaaactcaatcctttaaaaacgctcaagcagaaacagatcagccgaaatcaggaatgtttgctttatttaaacattatcctaaagaggccttcactgtattattcctaactgctggtggtactttagctttttatacttacaccacctatttacagaaatatttagtgaatacttctggttttaccaagcctgaggctactcaaattaccactttagccttattcatctttatgtgcttacagccattggcaggtgccttatcagatcgaattggccgtaaaccgcttatgatcgccttcggggtcacaggtgttttattcacttatattttgtttgatacacttgcaaacacgcataactactggactgctttctggctatgtttaggtggactggttatggtaaccggctacacatcaattaatgctgtagtgaaagctgaacttttccctgcacatattcgagctttaggtgtcgcattaccttatgcaattgcgaatactttatttggtggtacagccgagttttttgcattaagttttaaagaagccgggcacgaatcttggttctttatttacgtcagtatcatgattttcatttcattgctgatttatatcttcatgaaagacaccaagcatcattcaaaaattaaagaacattaa

SEQ ID NO: 47369 - DNA, 384 bp, Acinetobacter baumannii
atggtgcttgatgcattagagcaagcattgcatgatcgaggcatgccaaagaatgtgattcatcattccgacagaggtgtgcaatatctttctattcgctataccaatcgtttagaagcagcaaatttacgagcatcagtcggtacaacgggtgattcatacgataatgctctggctgaaacggtgaatggcttatacaaaacagaggtgattgaatatttaaaagcagattggcaaggtttagcagatgtacaacttgcgacactaaactgggtagattggttcaataaaaagcgtgtacacagtgcactgggttatgtatcgccttttgagtttgaagcaatgtactatgataagattaacccgttaggtcaggtggcctaa

SEQ ID NO: 47370 - DNA, 198 bp, Acinetobacter baumannii
gtgctgctcattgtagctgagactatttcagcacaagcaggtattggctatatgactatgaatgcacgagagtttttgcaaactgatgtggtcctggtcggtattcttctttatgccctattaggcaaattagccgatgttctagcgcaacttttagaacgttatttactacgctggcatgccggttatcaaaaataa

SEQ ID NO: 47371 - DNA, 1176 bp, Acinetobacter baumannii
atgaaaattttctggtttattcctacccacggtgatagtcgctatttaggtacaagtaaaggcgctcgtcaggttgaccatgcctatatgaagcaaattgctgtggcagtagataacttgggttacgaaggagtacttattccaacaggtcgttcatgtgaagatccttggattacggcggctagcctaatcgatgcaactcaacaccttaagtttttagttgcattacgtccaggggtaacaacaccagcgttggcagctcgtatggctgcaacatttgaccgcttgtcgaatggccgtgttctactcaacttagtgactggtggtgatgaagcagaactacgtggggatggtttatatgaagatcactcaacgcgttatcaaacagccaatgaatacgtaaaaatctggcgtgaaattttgacgcgttcacatacgggtgaagcttttacattccacggtgaacgcttacaagtagatgatgcaaagctactttacccacctgtacaaaagccttatccacctctttggttcggtggttcttcagatgttgctgttgaactcgcggctgagcaagtcgacacctacctgacttggggtgaaccacctgcagccgtgaaagaaaagatcgaacatgttcgtgccaaagctgaggctaagggccgtaaattaacttatggcattcgtttgcatgtcattgttcgtgaaaccaatgaacaagcatgggcagcagctaacgagcttatccaatatctggatgatgcaactattgctgcagcacagaaaaaatttgcacaaatggactcagtgggtcagcaacgcatggcggctctacacggcggtaatcgagacaaacttgaagtatccccaaatctttgggcaggtatcggtctagtccgcggtggtgcaggtacagcacttgtcggcgatcctgaaaccgttgctgcacgtattcaggaatatgcggatttaggtatcgatacctttattttctcaggctatccacaccttgaagagtcaatccgttttgcagagttagtattcccattattaccaatcgagacccgagctaaacttgctcagccaaatttaaccggtccattcggtgaaatcattgccaacaactatgttccagacgagaagaaacaaaatagttccgtcaaggagcctgcatga

SEQ ID NO: 47372 - DNA, 1527 bp, Acinetobacter baumannii
ttgaaaaaagaagttgttgttgtaaaaaatactatatttatgtttttaagaatgttttttgtaatgttcttaacacttttttcaactagattattgttagaagagcttgggcttgaaaaatatggaatttatgatttagtatttggagtggtactactatttaatattttaggtggagcattagcgacagctttacagcgtttttataatatatcgtataataataaagataaactctctattatttatagtgtttcattaaaattattttttatagtcagcttcttagtattaactttagggttgattttttctagtgcaattgttggggcattaaatatacccacttatagtttaattgagacagaattttttttccgattatgcacgcttaatcttgtatttattatattaagattaccttttactgctcttattctttctaatgaaaaaatggggctatattctatattatctatccttgatactatatttaagtttttaagtgttttgctactgacatatttacatttctcagaatctaagttaattgattttggctatctaatagacttttttagcttttttataacagtattgtatgtggtagtttgttattcgaaattagatatgcctagtctaaaatgggataatggaaaaactacttataaagaaattttatctttttcaggttggactttatttggtagtgctgcatcattatactctcaacaaggattatcaatattaattaataaattttttagcgtaatagtgaatgcagctaatgcagtttctcagcaagtttatacagctgtttatcaatttgttagtagttttcagacagcctttactccttatcttatgaaaaattatatagaaggagataaagaaaaaataagtaaaattttgatatttttttctcgactttcggtttttttatatttattaattgcagttcctctatttattttttctaagcaaataatagtgttgtggttaggacaagagcctcaatatgcggtaatttttgtacgtttaactttgattatagtcttttttgaagtgttatcagcacctttatggataactatacaggcttctgggaaaatagaaaaatatcaaataattatatctggaattttaatagctaatttacctctagcttatttgttctttttaatttggaataatccaatatgggcttttctagccaaaattttaactggatttttcgcctatatatataggttatatatgatggttgagattattgagttaagttataaaaagtatatttattcagtagtattcaaggtgttactattgttgggatgtatgactccagttttttggtactttatgtctaaagcaatggaaatgagcatattaatactattttcaaaaatagtttttatagttctatttttttctattttatcttatctgcttttaattggtaaagatgagaaaaaagaaataaatattattattcttaattttattaataggataaagtctatatga

SEQ ID NO: 47373 - DNA, 978 bp, Acinetobacter baumannii
atgaatgctgatgagctaagattgcatttgaagtcaattattgaaagtaatttaactcctttaatcaattctgattatgtttattgggatttgccttatcatataaatattggtgacaccctaatttggcaagggacgttggattacctatccgagttagattataaaatgctagattttggatcttatggaacaatagcatttccagaaatagacaaaaatattgttatactaatgcacgggggggggaattttggagatatctatactactagtcaagatcttagaaaagatgtagtagaaaaatataaagaaaataaaataattattttgccacaaaccattcacttttatgataaagaaaaagaaaaagaggatttaatatacttctcaaaacataaaaatttatttttatgtgttcgggataaattgtcatatgagatagctatacgttacttagataaaagtaaagtcctattgctcccagatatggctttctgtatcaagcctgaacgtttgatttctcaaaagaaagctcctacaagtagtagaagcttattaatgcgacgtattgatgtagaagcgaaaaaagttgatgataatttgtataaattgacagatgttcactcagactggccaacatttgaaaatattccatatagtatgcttacaattatgagattatgtaaccttagtaaaaaaatattaaaatcaaagaatggaaataaaacatttttgtcaaaaattattgataaaattgctatcacctatatgaaggataaattatttaagcaaggagtagattttattggagagtatgaagttatttacactacaagacttcatggttgtattttagcattattattaaataagaaagttattctcttagataattcatatggtaagaatgctggtttttataatgcttggttaagtgagtgctctaatatagttgaggtgaaaagtgttaattag

SEQ ID NO: 47374 - DNA, 948 bp, Acinetobacter baumannii
gtgttaattagtgttatattgccagcctataatgcggaaaaatatataaaagaagctattgatagtgttttggcacaatctctaaaagattttgaatttatcattattaatgatggttctattgataaaacagaagaaattgttttgtcgtattcagatgagcgaatagtttatgtaaaaaatcacaagaatttaggccttataaaaactttaaataaaggtattggtcttgctgtaggtaagtatattattagaatggacgccgatgatatatgtatgccgcaacgatttgaaatgcagataaattttttagaaaaaaatttagaatacggtgtggtaggaagttgtgcattaattcatggtacaaaagatctgtatatagtgccagaaagtgacgaagatataaaaaattatatgtttatagactcaccatttattcatccctcagtttgtataagggcacgattattaaaagagaacctctatagtgaagattttttccgaatcgaagactatgaactatgggtaagattagcacaaaaaactaaattttataatattcaagaaactctattaaaatatagagttatagatgggagtgagagtcacttactaaaaaaacaaattgaaagaaagaatgaaatgatgggtcgtgttttaagaattctatttgaacataataaaatagatttaactgataaagaattaattaactatatatatttgttgaataaaaataatttttcaaaaattgaatatgtttatttaaactctgcaatgaaaaaaattgaattaaataataaaaagatagtaggaactcttagtataagatggttaggtagttttgctttacataaacaaaatatatttaataacttatattatttgtttttttctaagtggacctactgggggggtgtgagatattttaataaggttttaaaatga

SEQ ID NO: 47375 - DNA, 258 bp, Acinetobacter baumannii
atgatggatgtgcatagccaactcctgattttgggagttctgccagagcatttatttggaattatggtggcagaacgaaagagggttgacagactggctcaagacccagcacacccgaaggtgtcccccttccgtcctaccgctacaaaaagggagacgaacgggtctacattaaaaaaaacgagttttttcaatgttcttgagcgcggcctgtcaaagccggctggcaatgtggccagcacgcaaagcataatctga

SEQ ID NO: 47376 - DNA, 150 bp, Acinetobacter baumannii
atgagatttaaaggtgtccttcgtagaaaatgtgatgccttgtttccagttcaaactacacatctatgtttcgataaacagaaaaccacttatcattcgaaggaaaatgtaatcttaaaaaagcaggagggagtgagaggagaaaattaa

SEQ ID NO: 47377 - DNA, 693 bp, Acinetobacter baumannii
atggatatctataagataactccagcaagttatctttcaaaggatatctttagaacctcaaaaaatgtaagcgtgggccaaacttatattttcccgttatacgccactttaaatattaaatttgatacagctggaatttccccaatcgatctgggtattgtgattgatgaaaatggagatattcgaactgatattaaacctaatgcaacaccaacagatatgtctggccattgtggcattgtttcagataatactctggttgataataatggtgttcaacagtatcgcataggaacaacgggtggcactgaatctgcttcaaatgataaatcaattacagtaaaaatgatttttgctgaacctaaactcggtaatctaaatggtattatggctgggttaaactcgaatgttgttcaagctactaccgagacaggcggtcaaacattaattgtaagtggagcaaaaattaacgttgctaacttgttacaagggcaagtaaatggaattaatcttacgacctatgataacaaaacagtctcatggttaaatccatatgccttttatcaacgagtatataataatattaaggatgtaagtccagctcctacagaagatgataaagctttagctgagcgaatgagtgggactgtaacgattagaaccgctgattgttatcaaattaagacaaaataa

SEQ ID NO: 47378 - DNA, 1212 bp, Acinetobacter baumannii
atgcaggtttattatttttatcgtcatcaaagcgacggctatgtttttataagccgtgaaaagcacactgaacatattctggagtttttctggattgatagtgtgagatcggatgttgtgagccagaatgaagaatggcaacaaaaaattcagcaacttgcagatgtatccattaatgagtttcatatgcgagatattgcgaatatcgaacatccttgtgcatttgatacgcttgaagaatacgacctgcttatttttagaaaactcgtaacgccggatgatgaaattaaaaatggcgaatcacatgagagtgtatttggtttagccaccacaccgatcagttttatttttacgcctaaagtacttattagcgtacgtgagcagggcaacaagtccattgaaaattatattcagcgccttgaaaatattttatgtaaaactctcgaagagcaaaataaaacccgtaagctgcctaattcacctgtagatctgtgtttacgtctgctcaatagtatggtggatggttaccttgatattcgttcacctttgaccagaagggtcgaacattggcaacaacagctattacaagggaatcggcgttttaagcagtggcatcaactgtttcatgaaaatatggcctttcaacaggttgaaaatctatgcgaagaacaaatcgaaaccttacaagagtttcgtgatgaaattgtagaaaactatcatcatgttattggagagaagacacatagttctcaagaccttttattagtgcgtttaaacgatttaatgagtcatgtcgaacgtattcaaaaacatactttacgtttacgtagtgcgattcaatcggcaatagatttgcatttctcggcaattgctaaccagaccaatgagaacatgcgtattcttgccattattactgctgtgtttgcgcctcttacgcttttaacgggtatttatggaatgaactttgaatttattcccgggcttaaatcaccagtaggtttttggattatgcttggggttatgctgctaagtaccattttattgctctactatttttatagacagcatttggtggggcgtggtgaaaaaagtgtgattgatttactggcgcagcagcaccgacaagatcgtatgaatttgttctggtttttggaatatgaaccgattaagcagactttaaaggaagtggaaaagattactcggttgaagtaa

SEQ ID NO: 47379 - DNA, 759 bp, Acinetobacter baumannii
atgaaacttgaatctatccaatttaaacatattgctctgtttcatgacctaaaaatacagtttcaatatgacaaacaaccgattactttaattttaggtgagcaagcaactggcaaaagtatgctactcaagcatatttatcatgctttaacgtggtttcctgcgcgccttaaagatgcacgcaccccaggcattgtcatgccagatcaggacattagccattctcgtttgcaatctaaaatagaagtcagcatccagattccaccagaatttggacagctccctgaaaccacttcaacccagcaaaccgaaacatctctttgtagctggaaactgttcaagaccttaaattcaagtggtgtagggattagtcaagttgaaactcagcagctcgatcaaaccattaccctttatcatcaagtcacaagaaaagacccacttcaaggtcttcccttactcgcttattatccgtcagagcgatttgttaacgatataaatttactgaataaaaatttaccaggtattactcagtctatttctgcttatgacattagcttcattccatttaccacctttgcccgcttttttgagtggttacgtgaaattagtgatattgaaaatgcgcaagcggctcatgttgtgcagcgcatatttcaaaacaatccaattcacaagatcaggaagaaattttacgtcagctacaacttgaattggcaggacaccctaaacagcttccttcacctaatttgtacgcattaa

SEQ ID NO: 47380 - DNA, 678 bp, Acinetobacter baumannii
atggttggactatttcagcatttaggacgtagtgtacaaaaccgccctcacttctttattgctttaatttttggagtgattgttgcaagtttattagcatggctcacttcatggaaatggtctaccattttattagcaagctggaatggctcgatcagtttatatttactccatgtctggaaactgatgagaagtgccgaccattcacaaatgcaacagcaagccaaaaaacaggacgaaagtaaatgggtcattatgctcattgttttattggccatcacaatgagtctagttgcgattttggtacaactttcccagctcccttctgggcattatgaaaagttaggacatgtagcgttagctttacttaccattatttcagcatggcttttcatgcataccgttttcgcattgcattacgcccatgacttttatatggctctatccagaaatgaagagaacggtgggttagacttcccgggtaccgaacatccgacctaccctgacttcttatattttagctatatcattggcacctcagcacaaaccgccgatgtttcaattaccaacaaacatatgcgtcttttaaacttatttcatgctgtattatcttttggcttcaacacgaccattttagcgatttgtattaacgttgctgctggctttcttactaactag

SEQ ID NO: 47381 - DNA, 1404 bp, Acinetobacter baumannii
atgttggagactttacaagttagtgagttttctcaacatatcaacaatgcaattgctcgatataaatatttaaatcgcgaaggtctatccgatgccgaaagctttgctgaattagataaagtgctggagcaaggacaaaaaatgcatcagcaaatgaatccttccgatcctaattacttacggttttattacgattatttatatggattagattttagagggcattcaaaagtagttatagagaatttcacccagttgaatattccactcgaaaaattaccggcatatgtacgtcatgcaattgctgatagttatttggcggagcaaaaaccgaaacaggccgagtttgcttataaaacgcttttaaccgaaaagaattatccggatatgaccgtttatacgggactgtattattcttatattgaacaagaaaaatataaggaagctgaacaacttctcgctgaagttgatcggcttattccgacttataaatatagtcaggctaagggtgtagataaaaccagtcatcctgatcgtgatgattatattgctttacaaggaatgcatttagcctacgctaatcatctggatcaagctgaaaagcattttcaaaaaaaagtagagcaggcgcctgcgaatgagagcctgattaataatcttgcgcgtgtagaacgttggagagaaaaaccgctagaggcaaaaaaaacaatttcccggttaaatggtatagatccgattgctaaagacacccgcattaatgaaatgcaaaatgctcaagctttaggtgatattccgacatggcgaaaaatcacacaaaacttagtgcaatattaccctgatgatagtggggtcattaaaagtcgaaaagaattagaagatcgtaatagagccacaatttcacattcaaccacttgggggcaaagtaaggccgacggtcgcgatactgtaagtgggcagaatggtttaaaagaccgtgaaatggaaacgcgtcttaatagcccttggattaatgataattatcgtttattcgcttggcatcaagatcgttatggggagtaccgttttggtgatgtgcatgaccagcgttatggggtcggagcagaatggcaggcgaaccgtaaggcgttgtcggcaattgtgtcgcaaagtacggatggtggacaagcaggagtccgtcttgattggtcccaatggctaaacgaccactggcagtatcaattgcaatataacagtcaggctgacattcctttacaagcccttgatgcaggggaagatggtcaatcttaccgagctgctgtcacatggcaaaaagatgaatctcgccagattggcgcgagttacggtttaactgatattagtgatggtaacaaacaacaagaattttcaacattgggactgttctaa

SEQ ID NO: 47382 - DNA, 870 bp, Acinetobacter baumannii
atgttcaatagtaccgaattattctgcgtaattgatgatttttttcttaaatttgaatcaacttattgggagtttctcaaacaaaactgtggttccttaagaatcagaactgctcaactcacaatttcagaaatctgctttattgccatttggtacaaatgctctcatttcaataatttcaaagcctttttcacctggttaaaagaagataaaagccatttatttaagtacttgccttgctatcaaaggatgattcatctgatcaatatgcaccaattggccctacacgctttacatgtggcgctgatgaaagaccaagctacacaatatttatggattgattcaacaactctgccagtttgtaaaaatcaacgtattcagcgtcataaatcattagtccaaattgcatcacgtggtagaagctcaatgggctggttttatggctgtaaattacatattgcgatgaatcaatttggtgaaattgcctgttctgctttatcaaatggacatgttgctgacataaaaatggttgagcaattggttgctggtatagaagcaaaactttacggggatcgaggttacatcagccaagaattaaaaatcagattgaaagatcaaggtattgatttaattacttatcatcgaaagaatatgcaggctattcaattctgtgcatcagatgaatatcacctaagacaacgcaataagatagaaacattattcagtttattgaaggggcaatacaatttagtgacgagtaaagcacgtagtcttcatggatttctgagtggaatttacgcctcactatgtgcatatcaattaacccatcaaaataagccaacaattcaaattaaggaatcatcggcttaa

SEQ ID NO: 47383 - DNA, 627 bp, Acinetobacter baumannii
atgttaaaaatcttagggcgtgataattctattaatgttcgcaaagtcttatggctatgtgacgaattaaatcttacatatgagagagaagattggggtataggcttccgctccgctcaatctcctgaatttttggaattaaatccaaatggacaaattccagtgattttagatggcgacttagtcctttggcagtcgaatagcattatacgttatctagcaaatgcttatgataaaaatcatatactctacccaactcaagctaaacaaagagctattattgaccagtgggttgattggcaagctatagaactgaataacagttggacttatgcatttatgtcgctcattcgacattcagcccttcatcaggacccgaatttgttacaacaaggtattgatcagtggaataaacaaatgcagattctcgatcaacaacttgcaaaaactcaagcctatgttgcaggtactgagtttaccctagctgatataccaattgggctgtctgtacaacgctggaaagcaactccttttgaccatccagcgcttaaacatgtcgaccaatattttgaacgtttaaatcagcgtaaaggctttttaaaatggggcaataacggtcaaccttaa

SEQ ID NO: 47384 - DNA, 417 bp, Acinetobacter baumannii
atggacttgtttaatggggaaattattgccttccaaacccaccgtagaccaatgtatgagttagtaaaaaatatgttgaaagatgcacttacgaagcttgcagatcatgaaaagcctatcatccattcagatcagggatggcaatatcaaatgcgtcattatcagcgagaactagcagaaaatggtttaacccaaagtatgtctcgtaaaggaaattgcttagataatgcatcaatggagagtttctttggaatacttaaatcagaatatttctacggtgaaaaatttaattctgttgaggaattagagaaaactgtgaaagaatacattcattattacaaccatgaaagaatcaaggttaaattaaaaggactaagccctgtacaatacagaactcagtccttagaagctgcttaa

SEQ ID NO: 47385 - DNA, 2172 bp, Acinetobacter baumannii
atggaaaataaaaaacgaatgatttctgaatcgaaagggtggaaaagttcttttaaagctttcttggatcgccgtgcaatcattatgttgtttttgggtttttcatcgggaattccaatttttctaattttttcaactctatcattttggttgactgaggctggaattaaccgaagtactattacaatgttctcttgggcagctttggcttattcatttaagtttatttgggcgccgctaatagacaagttacccttgccatatctaaccagaagaatgggcctaagacgtagttggttgttggtatcacaacttttggtaatttgtgcaatttgtatgatggcatttacaaatccattacccaacacatctgatttcggttcattgtcaaatttaacgattatggcaggggctgctatttttcttggcttctcatcagcaacacaagatattattgtggatgcttaccgtatcgaattaactgaagacccaaatatacaaactgttttagcttcaacttataatgcagggtatcgcactgctacaattattactcaattaggtgcactattatttgctgcatctttgggaacagcagttggtaattatatttatgaagcatggcgaaccacctatttattaatggctggtttgatgattgtaggaattattacaactttactcatccatgaacctgtagttaagcgcctacaacatcattatcatgcaaaagattatgtccagttatttgcagtttttgttatttcaaccatagtttttggaattagtttttatcaaatcggtttaatttttgattcattttctatcgaagatgcttttttaaattttatacttttagttattaagtttttaattagtatatcaattgctgttattgttattctgggtttaattaaatttggtttaattaataaaaaaattgttgtagaaacatggttatcacctttactagacttttttaagcgatatggattaaaagtagctttagcaattttattattaataggtttctatcgtatttcagatgtcgttgctggggtaatggctaatctgttttatttagatttaaattttgataaagaagaaattgcttggtttaataagttttttgcgattttctttgtaatattaggtggatttctcggagggatgttagctcagcgttataacgtcatgaaaatgatgttgttaggagcaattttagcgagcacaactaatttaatttttgttggtttagtcaaatctggtgcttctatgcaagaggtccgggttaatattggcgatcaagtatataccgcaaaccctgatgaggtaggaaactggtctttaaaatttccaagtaatactttaacaacccaagcagaagtttctattgcctcgcaacctaaagggtatattgaacctttaaaaataactattccactaaaactatacaaaaatgagccaaaaccggagatttatatccaagctatagggggcgataatcttgtatataaagatgagttagcaaaagatataatccttcatggcactttgctaaatttgccgaaaaatagtcaaataaaatctgtaaatattttcttaaatccacaagttaaagtagatggtaaaattaaaaatagtgactggaatgcagttatttcagggacagaacttgctaagcttgatgcaataagagtgcaggcaaattatgaggttaatgggcaaacaaagactttagttcagactcatacctatcaaaaaaatttatcagaaagccaacctagatatcgtatgagtttatccgatatcccagcgattccgattgataaaaatattgatatcgaattgaaaggaaaagtagttgtaccttacagtaagacatggcttgttatgggaatcatatttgataatctagcttcgggtctggcaggagcggtttttattgcatttctttcaagtctaacaagtgtatcttttacagctatgcaatacgctatttttagttcattaatgttattactgcctaaaactattggcggatactcaggtacaatagtaaatcatataggctattctggcttttttacggttacgttcttgatgggattaccaattttactacttgtaatttgggtaagtaagttattggctaaacaagcatcagaatga

SEQ ID NO: 47386 - DNA, 489 bp, Acinetobacter baumannii; identical to SEQ ID NO: 47345

SEQ ID NO: 47387 - DNA, 1272 bp, Acinetobacter baumannii
atggcaaagttaaattttgagttagaacaggatttttatattttatttgaacagcttaaagctctattcccaaatgcgattctgtttttagtggacacatctactcaagcaattcactataaatttaatacagatgacatttctgtagagagcatggcagcgcttactcaagaccatcacaatcaatatcttgagatcaatactcctaaaatgagaaggcgatttatctatcaagaacatgatatttacatcgcagagcatcgaattatcgggaaattgcatattctacagcccgttagcatagagaatgatattgttgatggagtagagctaacagaacaattgcaagacttggctaaagttttcaatagttgttcaccagaaatgactcgtatgttttcaattattcaaagagtggcaattactgagtttccagtgctcgtacgcggtgaatctggtagcggtaaagaacttgtggcaaaagcaattcatgattatagccagcgtaaaaataagatctttgttgccattaactgtgcagctttaaattctaatattttagaaagtgaactctttgggcatgtgaaaggtgcttttacgggagcaattcgtgaccataaaggtgtgtttgaacgtgccgctggtggaacgctgtttctggatgaaattgccgagattcctttagagcttcaagctaaattattacgggtgttagaaacaggtgaatttactcctgtaggcggtgaaaaaccaattcaggctaatgtccgcattattacagcaacacataaagctttacgcgaagaagctaaggctgggcgtttccgtcatgatctactctaccgtctacgcgtaattccaattttcataccaccactcagagagagaaaagtcgatattcctcttattgtcgatcagattttaaaagagagctcaacccaactcgatacaatgcctcgccatgttaatcaaaaagccatgcaagttttattgaattatgactggccgggaaatgttcgtgagcttaaaaacacccttctttatgctttaaccatggcaaatggtaaggatgaaattgaagtcgaagacttaccaaatgaactcttaaatgcagatgattacgttaaattacccgagacaaatgcagagcttagtccagaaaatgtgcaagcagctttagaaaaatataaccataacctgaatatggtagcgaatatttttggaattagccgcactactctttggcgatacagacaaaagcataagctttag

SEQ ID NO: 47388 - DNA, 204 bp, Acinetobacter baumannii
gtgtacaaagatccgggacacgattataaaggtcgtttgtcttcaacaattggttatgaacgcttaaataactcacgtctaggtcagaatcgctcgcgtgaagattttattgaattaatgaataacttaaatctgccatatccaaaacaaatcgataaagcacttcctgctaatcaggcctgcggctcaatttcacaattataa

SEQ ID NO: 47389 - DNA, 1005 bp, Acinetobacter baumannii
atgaagcgaattaacgtggcaatttgtggttttggacggattgggcaacaaattgcagagcttcttttaaatcgatcgacatactataaacaaaaatatcaaattgatgcccgtttagtgagtgtctgtaactcatcatcaggcttaattgaccaagaaggtttacaagcttcaaagtggctagataaaacacaatatcaagcaggcctaacagagcaaaagtttttaaaacaggttcaagcagatgtcattattgaaactggaccaagtgattatgttaccggtgggaaaggcctattttatttaaattatgctttaacacatagtatgaatgcgatagcagtatctaaaggtgctttagtcgtagaaggtaaaaaactaattaacttggcacatcagcacaataaaaaactattttttagcggtgccactgctgcagctttaccgactgttgatttgtttgaatataacttggctggctgtcaaattttagaaatagaaagtgtgtttacaggcaccacgaattttattttgaatgatatgttgcaacatgaatgcgcatttacagaatctcttgaaaaagctcaagcaagaggtattgctgaaccgaatagttctttcgatgtagatggatgggatactgctgcaaaaattacgatactagccaatactgttttaggagttgatgtaaaaattcaagatattccacggcaaggaatcagccatgttacgactgaacatattcgtgattggaaaaaagaaaatataattcctcgtctggttggttttatccatattaaaaatcagcaaattcaaacaggtgttgaattaaggttagtcccagcaaatcatccgtttgctcatctgcaaggttctaataaatgtattcgggtgttaacgcaagaaatgggggaatttgttgtcagtggaggggcatctgcgccattagccacagcagccgcggctttaaaagattttgagttgatgctaaaaacgggctgctaa

SEQ ID NO: 47390 - DNA, 834 bp, Acinetobacter baumannii
atggctaactttaagaacacacaaaatcatgaactcaaaattcaaaaatggattaaagaaggacgaggacagggttttggaaataactataagccttggctcacaattagagatgtgagttcagaaggtcgatctcatcgagtttttggtcataaaagccaaagaacccatcatcttctgtctgatctagaactttctacttttctattactagaatggcattcaacgactatcgatattcgagaacaatatcccttagacctcgaacaaactctagaaattgcgaagacaattggaatccctcaccctaaatttgggaaatactatcaaatcatgacaagcgattttttagtggatacacataattcaataacacctaagtttgtactccaagttaaatattcaaatgctctcaatgacccacgcacaatagaaaaaatagaaattgaacgacaatattggaaacagcaaaacatacctttttatatttttaccgagcaccaagttcctaaaactgtcagccagaacattcaatggttgtacagttcaataaataccatggaactgagtgaacaagatacgttagataaacttaacttttattcagatattttcattaaacataaatctaaaaagattaatgaattagcgagaaccattgatcaaaaatatcattttgagttaggacaatcgttaagagaaattagagacttacttgctcaaaggtatttcatatttgatcttaatatttcttttaaggatttgaacacagatcatattcaattgggcgagcttaatatttggaacgaggtacttcatgctgaaaatcaatga

SEQ ID NO: 47391 - DNA, 588 bp, Acinetobacter baumannii
atgctgaaaatcaatgaagtattaagttttgaaagctctttatttaggattttaacgatcctacctgactctgtgatttggattagtcttggtcttgaaaatgcttttccaattgaagttagtagaactgaaatattaaaaggtttagaagatggcaatattgaaagagcaatagacccacatgaggcacttgctttcattcagccggagaaggaatcaatacaagaaataaaacgtgaccaaaattattctcttatttaccctctgatctctcatgaattattttatattccagctcaaagaggaaaaataattagtgaaatcatgaatcaacatgaagtcaccaaacaaactatttatcgcttagcacgaagatattggcaaagaggacaaactcctaatgcattactccctgattacagaaatagcggagctaaaggtcaaaaaagaacagctaaagataaaaaattaggtcgacctcgtatctataatagtgaacaaggcattaatgttaatgaagacattgaaaagcttttctatcgcacgattaaattatgggactgttctaaattttgtgtaagtacttaa

SEQ ID NO: 47392 - DNA, 1032 bp, Acinetobacter baumannii
gtggatctatttcatgccatgagagtattcaacaacgttgttgaaacaaatagtttcagtttagcagctgatagtttgggtttaccgcgtgcttctgtgaccacaaccattcaggctttagagaagcatttgcaagttcgattgcttaatcggacaacacgaaaaattagtctcacaccggatggcgccgtatattatgatcggacagcccgtattttagcggatgttgccgatattgaatcttcttttcatgatgcagagcgggggccaagaggtcagcttcgtattgatgtgcctgtatcgattggacgtttaattttaattccaaggctccgcgattttcatgcacgctatcctgatattgatttagtgattggtctgaatgaccgacctgtagatttagttggagaagcggttgattgtgcaattcgggtgggtgaattaaaagattcaagcttaattgcgcgtcgtatcggaactttccagtgtgcaactgctgcttcaccgatttatttagaaaaatatggcgaacctacctcaattgaagatttgcaaaaaaatcataaagcgattcacttcttttcaagccgtaccggacgcaacttcgattgggactttgtggttgatgatttaattaaaagtgtgtcagtacgtggacgtgtttcggtaaatgacggtgatgcttatatcgacttggctttgcaaggttttggtataattcaaggcccacgttatatgctcaccaaccatttagaatcaggtttgttaaaagaggtattgcctcagtggacgccagcaccgatgccgatttcagcagtttatcttcaaaatcgtcatttatcgcttaaagtaaaagtgtttgtagattgggtcgctgaactttttgcaggctgtccattacttggcggtacagctttacctttcgaccagaaatgtgaatttgcctgtgataaagaaactggtcatgaatatacaattcgtactttggtcgagcagcataatattgctgaagcttatacgctcaaaacttaa

SEQ ID NO: 47393 - DNA, 1758 bp, Acinetobacter baumannii
atgaatatacatgtagaaatagacacacattggtgtctagaacaactattacaagaaggccgtatcactgaacgagataagttacttgtacaaaccacaaataggcaaaaagatcagttgaaatggcatccattacagtggattgcgcattttaatttaaaagaccaacatcatgtacaagcacatttaagtttaaaccgtctgtgccaatggtttgcagatcgggcgcaattacctttatttgtgattgatcctttaaaggcagatgtgagtgctttaactcaagtcatgtcacaagagtttgcgatccgtaatcatattttagctgtagaagtccatgcggaccgaattgtgataggaacagaccagccttttcaaacagactggctaaataatttagagaagagtttagcacccaaaaaaattgaacgtgtatttctcaaccccgagcaattacaacgttatttacgagaatattatcaagtcagccgagcagtaaactcagctcaaaaagatgcggctcatgaccgtgataacaaaggtgtagaggcgcttttacaacttggtgatagccaaaaccctgatgccaatgatcagcatattgtgaaattggtcgactggatattgcaatttgcatttgaacagagcgccagtgacattcacatggaaccgcgtaaagacaatggcaaagttcggttccgtatcgatggtgttttacataccatttataacatgccttcaaatacgctgaccgccgtgatttctcggattaaaattttagggcggctaaatgtagcagaaaagcgtaaaccgcaagatggtcgattaaaaacacgtacgccgaaaggccaagaaacagaactacgtctatctaccttaccaacagcgtttggtgaaaaactggttatgcgtatttttgatccagatgtgttagtacgttcctttcagcaattgggttttgaccagtctttattacagcaatggcagcgtattacgcaaaatagtcacggcattattttggttacggggccaacaggttctggtaaaactacaacgttatattcttctttaaaacagcttgcaaccgagcaggtcaatgtctgtaccattgaagatccgattgaaatgctagagcctagttttaaccaaatgcaggtcaatcatgcaattgaactgggctttgcagatggtgtgcgtgcgcttatgcgacaagacccagacattattatgattggggaaattcgtgaccaagatactgcgaatatggccattcaggctgcactcacaggccacttggtattatcaactttacacaccaatgatgcgccgtctagtttgacccgtttacatgatttaggtgtacaaccatttttaacagccgcgactattttaggtgtattggcacagcgcttagtgcgtaagctttgcccaaactgcaaacaacaaactcatattaatgaagatgaatggcagcacctaacatttgactacattatggaaatgccagaaaaagtttatcgggcagtaggttgtgaagagtgccggcatacgggttataaaggtcgaatcggcatttatgagtttatgccagttagtcttgagcttaagcatcttattagcagtcatgcgacattaaatgaattaagaagccaaactaaaaaagaaagtgtagagcctttaagaattgcaggagcacgcaaagttattgaaggtttgaccaccttggaagaggtattgcgggttgttccattaaattaa

SEQ ID NO: 47394 - DNA, 552 bp, Acinetobacter baumannii
atgttaaagaaaggtgttttttatattggtgctgtacttatggtcggctgtacaactttaccagatcattcagctccaaaagagaaaacacctcctgtttctgaaaagaagaagtccgagtcctcatctggtgtaaaaattacaccttatgatcatccggaaattcaacgtaaaagcttacaagtgattgttcctcagcagaaaaagccgcaacgctttaatgatgatggaagccagttacccgcttttaaaactttaatgcaaaaaaccgagcaggcttacaaaaaccaacaatggtccgaggctgagcgctacgctcttcaagcacagcgtttagcgccacaggcagccgagacctatttatttctggcattaactgcaaatcataaacagcaatattctaacgctgagtctcttgcaagacgtggtttaagctttgcacagagtcaagccatgaaaaaacaactttggttggtcattttaaaagctggacaacagcgcaataacccaaaaactgttcaagaagcacaacaagcattgaaagctttctag

SEQ ID NO: 47395 - DNA, 441 bp, Acinetobacter baumannii
atgcaagaattaccgcgtgaacgtacggctatcgcatcgacagcggttggcgctattcgtggtgcaattgatttggcaaccgcttatgtaaaagaacgtcatgcatttggtcaacctatttcacagttccaaaatactcgttttgttttagcacaagcaaaaattgatgagcttgcgacaacggctttctatgagcgaaatgttgctttatatcaagaaggtaaacttgatgttgagacggctgcagcactgaaaagttttagtacagatatgcaaatgaaggtggcggataacctattacaactgtttggtggttatggttatatgactgaatatccaatttcacgcttctttgtagatgcccgtattcaacgtatttacggcggtacaaatgaaattatgaaagaaatcgtagcacgtggattaatcggcaaagcttaa

SEQ ID NO: 47396 - DNA, 945 bp, Acinetobacter baumannii
atgcttaaatcttttttctttttatcttctaatttccttctaggctctttaataagtagttccgttttggctcaagcccctgtaaaaaatcaatcaaaaatcgattttcacaacaatcaggcccagttccaaatcaaatctaaaaatactggacatgaatatcttattcaaatttataaaccacctgttgccccaccccaacatggttatccggtactttacatattagatggtaatgcaacatttccaagcgcaatgaatattgcccagtcgattggagcaggctctgcaaaattaggtttagatccgctcattattgtagctgtgggctatcctcagcaaaaaacctttgatgtgcaaaaacgagcttatgattacaccccaaaaccttctgccgagtttcaagcgcaaggtaaatataaatatggtggtgctgaccagtttattgcttttttaaatagcgaactcaagcctgaaatcgctaaacaatttccaattaatagccaacagcaaagtctctatgggcattcttttggagggttgtttgtgctttatcatttttttcaaaagcctactgcattccaacgttactttgctgcaagcccttctctctggtttgatcaaggcatgttatttcgagaattagaacaatggcaaagtcaaaagcaaaccgtattcccaatgctaatgacgacagtcggtacaaatgaacaaggcgggccacatacccagtttaatcaaagaattaataaagacgatttctttaaagtcttagaaaataagcattcagaccaatttagttattggcatttcaataatcctgctgaacagcatatcaccaatttgtatgcgagcttacctaaagcgcttatgtttgcttcatgccaaaatctagaaagctgtaaatctttattcgatgaaccatcgcagaaaacagctaaataa

SEQ ID NO: 47397 - DNA, 1116 bp, Acinetobacter baumannii
atgcgtaattataaaatagatattcttcgaggaatttctatccttttggttcttttacaccattttaatattccctataaacttaaagatacatgcttaggttttgatttcttaggtgaagcatttagcacagtcatcgcaagaaacggaaattatggcgtgaccatgttttttgtaatttcgggttttttaattacccatcacactttaaaacgagacaaacaattttctgcaattaacctcaagcatttttatatccgacgagcagcgcgtattttaccgtgtctggtattactcattttaggtgtaagcatacttggttcatttgacttaaaaccctttatgaaccaagcaccgaatggcattgaggtctcttatcctttaaccatatttgcagccttaaccttctggatgaatatcctgattattaaatttggttgggtaaactacgctttgggcgtgttgtggtcgctctctgtagaagaagttttttactttgtttttccattattgtgtctactcacccgtagtaataaggtctttattgctgtacttgttggagtgattttatatgggccttattttaggtctctccattttggagaagaaagcggcgcttatttatatcattatttttcaagttttgatggtatagcggtgggctgtttaacggcgattttttctcataaatatcagccaaattcgccgacctataaaaaacctctttcatggttgattattttgagtatgaccgctctatatttatatgcgcccattaaagaagtcagtacatggggtattagcttatttgctcttgccacaggtttactcattctgtgtttccaacatccttccgaaacacaagcacatagtctatttaccaaagtaatggtctggttggggcaaaggagttatgaaacttatttgtttcatctggttgtgctgggccttatgaaggttgcttttattccagcccaaaccgactctagcattaaaattatacttttaattggctatctgattctaactttcatcattagcgcagcaattgaaaaatattattccacaccacttaacagctacattcgaaaggtttttattaaagataaatcataa

SEQ ID NO: 47398 - DNA, 1389 bp, Acinetobacter baumannii
atgtcaacacaagagcaaggaaacctgaaacatggtttgagtaatcgtcacatccagctgattgcgttgggtggagcgattggtacagggctgtttcttggtatatcacaatcgattaaattggcaggtccatcggtaatcttgggttatgcgattgcaggatttattgcttttttaatgatgcgccagctcggtgaaatggtcgtagaagaacctgtaagtggttcttttagccacttcgcttacaaatattggggaccttttgcaggcttcatgtcaggatggaattactgggtactcaatgtacttgtgtgtatggcggagttaagtgcaattggtctttatattcaatattggtggccgcaaatcccaacgtgggcatctgctctaacgttctttattctcattaatggtatcaatttactgcatgttaagttttttggcgaaatggaattttggttttccattgtcaaaatcttagcaattttagccatgatcggtttcggttcatatttacttgcaaccggcacagcagggcctcaggccagtatttctaacctttgggcattgggtggtttcttcccatttggtattgaaggcttggttatggcaatggctgtgattatttttgcttttggcggtattgagcttttcggtattactgctgctgaagcgcgtgatccagacaaaactttacctaaagctgtaaaccagattatctatcgtattttgattttctatattgcgacactttttgttttattctcattatttccatggaatcaaatggcagaaggtggcagtccttttgtgatggtctttgcctctttagacagccaaggtgttgcgacattattaaatttcgttattttgacagctgcagtttccgtctataacggaaccagttattgcagtagccgtatgcttttaggtcttgcccagcaaggtaatgcaccgaaagctcttgcccgtattaataaacgcggtattccaaccaatgcggttctagtctctgcatttgtgacggtattgtgtgttttactcaattatattttccctgaaaaagcattcggtttactcatgatgcttgtcgtagcagcgattgtaattaactgggttgtgatttcatggacacatttaaaattccgtaaatttatgcaacgccaaggtcaaacgactaaattcccaagcttcatgtatccatttagcaactatctttgcatggcattcatgcttggaattttagttgtgatgtctttaacgccagacatgcgtgtggcagttatgatgattccaggatggattttgtgtttgatggtggcttatcaatttaagcgccgtaaaataaaagctgagcagcctgtacatgctttagaagccgatatgtaa

SEQ ID NO: 47399 - DNA, 198 bp, Acinetobacter baumannii
atgaatatcccacgttttggtctaggaactttccgccttaaagaacaagctgtgattgattctgttaaaaatgcgttagatgtcggttatcgtgcaattgatactgctcaaatctatgaaaatgaagcagcaattggtcaagcgattgctgaaagtggcgtatcacgtcaggacttgtttttaactacaaaaatctag

SEQ ID NO: 47400 - DNA, 1176 bp, Acinetobacter baumannii
atgaactttacgttaaattcccagaactcattaccagatgatgcaactcaaggatgcttaattggccgtgcgtggattccaagtcaaatttcgggtccatcccctattattttaaggggaaatcaagtttttgatatctcggaaaaatttcatactatttccgagttacttgaaagtgctgatcctttaaaagctttatctgaaattgaaggaagacgagttggttcaattgatgaattatttgccaatactgtcgccgagccagataccaacaaggcatattttttagcccctattgatttacaagtaattaaagcggcaggtgttacctttgctgcaagcatgttagaacgagtgattgaagaacaagctggtggcgatgcacaaaaagctcaatcgattcgtgaagttgtacaaggcgtaattggcgataatttaaaaacaatcgaacccggttctgaaaaagcgctacaactcaaagaatatttaatcgaacaaaaaatgtggtctcaatatcttgaggtgggtattggtacagatgccgagatttttactaaagcccctgttttagcagctgtaggcacaggacaaaatattggtattcacccaaagtctgagtggaataatccagagccggaagtcgtattagttgccaacagccaaggtaagattttaggtgcgactttaggtaacgatgtgaatttacgggactttgaaggccgtagcgctttactgttgagtaaagcgaaagataacaatgcatcttctgcgattggcccatttattcgcctttttgatcatacttttactttaaatgatattcgtacttgcgatgttgaactgcaaattcaaggcaccgataactttgtgttaaatggggtgagttctatgtcgcaaattagccgagatcctgaagatttaattcaacaaactcttaatgaaaaccatcaatatccagacggttttgttttgttcttaggtactttatttgcaccgactcaagatcgagaacaagctggggctggctttacccataaagtcggagatgtcgtccgtattcattcacctaaacttggtactttgtacaacacggttatgaccagtgataaagcaacaccgtggaattttggaataaatgctttgatgcgtaatttgaagcagcgtgaattactataa

SEQ ID NO: 47401 - DNA, 1578 bp, Acinetobacter baumannii
atgaccattatcggacacaactttattggcggttcacgcagcgcacaaagtacaaccttattaaaaagtattcatgctacgactggtgaggctttaccttatgagtttcactatgcaaccgagcaagaggttaatcaggcttgtgaagcagccagtcaagcgtttaagacttaccgccatacctctcctgaacagcgtgctgtttttttagaaaatattgccgatgagctcgatgctttgggtatagattttcttgaaatcgtctcacaggaaaccgctttgccacttgcacgtttacaaggtgaacgtgctcgtaccagtggacaaatgcgtttatttgccaaagtgctgcgccgtggtgattttttaggtgcccgtattgatactgctttgcctgagcgtcagcctttacctcgcccagacttacgtcagattaaaatcggtgttggccctgtggcagtctttggggcaagtaactttcctttagcattctcaactgcgggtggtgacactgcttcggcactggcagcaggttgctctgtagtggtgaaagcccatagtgggcatatggcgacagcagattttgtagctcaggcaattgagcgtgccgtagaaaaatcaaatatgccaaaaggtgtatttaacatgatctacggtaatggtgtgggcgagcctttagtgaagcatcctttaattcaggctgtgggttttacaggttcattacgtggtggtcgtgctttatgtgatatggccgcagcccgtccacaaccgattcctgtgtttgctgaaatgagcagtattaacccgatgttgatgttgccagaagccttaaaaaaccgtggtgaaaaaattgcacaggacttagctgattcagtggttttaggctgtggtcagttctgtactaatccgggtttaatcttgggaattaaatcagctgaatttagtcagctcattagcaacctgactgaaattatgggggctaagcctgcgcaaactatgctcaatgccggaaccttaaaaagttataccgctggtcttgagcacttaacccagcatcaaggtattaagcatttggcaggtcaaacccaacaaggcaatcaggcgcagccacaactgtttaaagctgatgttgagcttttactggcgggtgaccagcttttacaagaagaaatctttgggccaaccacagtcatcattgaagttgaagataaagcccaactcattcaggcactacaaagcatgaatggacaactgactgcgactttaattgccgatgaagctgacttaaccgagtttgcagatgtagttcctgtgctagaggaaaaagccggtcgattactcataaacggctacccaacaggtgttgaggtctgtgatgccatggttcatggtgggccatacccagccacttcagatgcacgaggtacttcagtcggaaccttggccattgaccgttacttgcgccctgtgtgttaccagaactatccgcaaagtttattgccggaagccttaaaagacagcaacccgttgcagattttaagactggtcaatggtgagatgaccagagaagcgatctaa

SEQ ID NO: 47402 - DNA, 1578 bp, Acinetobacter baumannii
atgaatatacgaccactcatcggtttggcaggtgcaatttttgcagccatgactgtcgaatttaataaccgaattagcagcattaccttggtcgatattcgcggtgagatgggtattagtgtcgactctggttattgggtcagcagtatttatgccagtgccatgattattgggatgatactgtccaccagttgggccgttattttttctatgcgtcgggttcttctttttgcgataggactttgcctcttctctagcgttttaattccttttagcccaaatatcgaaatattttatttattacggggcttacaaggactcgccaatggtttaactattcctttattaatggcatgtgcacttagattcctaggacctgaaattcgtctatggggcttggcctgctatgcattaacagcaacttttttcccaaacttaagcgctgcgcttgctgccttttatttagatgtgattggttggaagatgatatttttccaaaccattcctttttgtgctttaagtgctgcgttagtttacttcggtattccgcaagatccgttaaattactcaagaataaaaacttacgattggactggcacgattctagccattattggtttggcaagccttagtaccatgcttttgcatggcaatcatttggactggttccattcaaaattgatttgtgttttggctttaatgagtgccattaccctacctttatttttaatacatgaatggcgctatccaacaccattaattaaaccgcaaatgctcgaaatacgaaattttggttatgctgttattgcgttgttctgctttgtggttattggtatgtcaaccagtacattaccccttaattacttaagcgctgtgcatggttataagcctactcaaaccatgtggattggcttacaaattgccgcattacaatttatctatatcccgattgttattaaagttttgaaccaagcttgggttgatagccgatatgtacatggatttggtttacttttggttatggttggctgcttaggtgcaagtcaacttgatacgacttggaaccaagaccaattctatttttggcatgcaatctcatgtttaggacaaacctgtgtagtgctttcgctcctcatgatgggtacaaatagtgtccacccaactatggcaatctatgcttctcctatgattaacaccccgcgtgctatcagcggcgtacttggtgtgtgccttttggactgggtcaatcgagtacgtggtgaataccattcaacacggctgattgaaaataccgcacaacatgtttttcaaaatattcaaggtcctgttattaatcctcttaccccgcctgtgctgagtgcagatggtaccgaacgtgtttccggtggtttatctgccttaaattctgcgattcaggcacagcaatcggtgttagtcattagtgatcaatatctgattttagcgggacttactgcaattttatttatcgttatgctgattttgccagttagaacttatccaccacgcattgctctcattaagttaatgaatagtcataactcaggaaaatctttatga

SEQ ID NO: 47403 - DNA, 267 bp, Acinetobacter baumannii
atgaaacgatctattgcatatcgccagatatttcatcaatgtttcaatgcaacatgtatttttacaaatgcaacatcaggcctaaactttgttaacagattgagaacaatcaatcgttctattctcttgaaatatcaagcaattatgttgctttaccctgttggcactttacttgctaagaatatttatcacagaagtaagcctaattgccaaagtacttttttgcctgaaattaagtatttaaatcatttaatcatcatcagctag

SEQ ID NO: 47404 - DNA, 1296 bp, Acinetobacter baumannii
atgacaaatttaaattttgaacatcatctcggttcattaactcacgctgcactgagtcaggcttcaatcatttcgcgggtatggggtgaaggaccttctgaacggtatgatgaattggcaagtaacttcagaccgacttttgcccgtattaaagaaggggctttaatccgtgagcagcagcatattttgccgtatgagcaacttcagtggctcaaagatattggttttacacggttacgacttcctaaagctcatggtggttttgatgcaactattcctgaactatttgcattgctcattgaacttgcagaggccgactcaaacttaccgcaagctttgcgtgtgcattttggttttactgaagatgtcttggtgagtaaagataaggcgtttcaacagcgttggcttaaccgaattgccaatggcgaaacagtgggtagtgcatggtctgaaggcgggaaagagtcaatcgatcagtttgaaacgcacttatatcgagatagtgacggaaaaattcgcgttaaaggcaaaaaatactacaccacagggagcctatatgcagactgggtggatgttggggtaacagatttaaaaggagagtctggctcagttgttgttcgccgtgaagatgaaggtgtcgaaattgtcgatgactggaatggctttggacagcagcttactgcaagtggtacggcatatttccacgatgtattggttgatgaagctgaaattttacctgacgatgaccgttttaaatattcggcggcttactatcaactggtccaactggcaatcattacaggtctaggacgtgctgcaacctatgatgtttctcaagctgttgctaaacgtacccgaaactacacgcatgcgaattccctgtttgtaaaacaggatccgcaaattttacaagtagtaggacaaattcgtggcgcggcttatagtgcaggagcgattgttgaaaaagttgcacaaagcttacagcgtgcttacttggctgcatttcaaaataatgagcagcttgaagaagaacaaaatgcacttgccgagcttgaaagtgcgcagtctcaaacggtcattaccgatctaattttaaatacttccacgattttatttgacgctttaggtgcttctgcaacagacaaagatttaggtctagatcgatattggcgtaatgtaagaactttatcttcacataacccaagagtatttaaaaatcgaattctaggtgattttagtgtgaacggcacattaccaccatatcaatggcgaatagggaatgttgctaaacaataa

SEQ ID NO: 47405 - DNA, 714 bp, Acinetobacter baumannii
atgaaaaagattattttattaggtttggtggttttactaggtgggtgcaaagaagctaatactggggttgataaaaaagtattcaattcaacttatgataagtgtgttgattatctaaccaactcattaaaaagcccatccagcctaaagattggagaggcaaatatctctacagttattccgccagctgaggatattactaatgtatttggtgatctaattactaaagatggaatagtaaaagacagtatcaaggaagagaaagctaggttccgagaattaacagttgatattgattatgaggcccacaactcatatggagcgtcaataagaggatattatcaatgtagctttatttatcgattgaataaagatgaggcaagccctgagccattgaatacttatctatacaagttgaaaagtgatggtgaagatattgggttgtctgcacatattcctcttgctgagtttcaaggttcaaacttttatttaaataaagctattaaaagagttgttggtgtcaaagatagtccattcaatgaaattgacaacaagcgctataaagaaattgaaacaatctatagaaatcaaaagcacgaaagagaagctgagaagttgcgtgaaagttgggatgaatctatgcctagtgtagaggtggcagcagcagctgccgcggctgatattgcagccgtagctgatgaatctgatagatag

SEQ ID NO: 47406 - DNA, 717 bp, Acinetobacter baumannii
atgagtaatgttgctagcattatccagtcattgggctctgagtgctttgataaagacaaggagtggctgggagtaactacaccacacttttttgctgatggtcgaccttcaacctattatattaagacctctaaagatcgtgtttggattcgtgatgttggtttaaacatgagaatgtttgcagataatttgccaatgccagacaaggcaagggaaattataaaacgtcaaatcaaccaaacttcagacagcattctgtttaatggaactgaattgcagatcgaggcttctatcgcggaactcaaaccagcgataagtgctatgcttggcctattatctcgaattacatcatattgccctagctcttctgaagaacaatcttttgatgaggttgtgactaagattaagggcttcttatttttgcaatatggaagcgccttggagcaaaatattgatgtacttggtgcctcaggagctaaacaccattttgcttttaaagcaggatcaaaatttattgatgtgtgtgaaccaacctctgaaaatacagggaagctactgagaaaaggtttagacctctccaattttgtggaaaatctatcattacaagtttttatggatgatagagaaaagagtaaagcctttaaaagagaagcagagatattgtcaaatctgtacgctgtaacgccgatcagtagagttttgaacctaacctcctaa

SEQ ID NO: 47407 - DNA, 483 bp, Acinetobacter baumannii
atggctaaacaaagaaggcttcttaaaactccgccagaaaaattgcatgaacttctacaaatgcaaaaatttattgatgaagaaatcatcatggagttaagtgcggaccggacaacagcatcctacagaacaagggtggtcatggatgaactgatgacaactatccctgggttggagttgaaactaatatccaacagaagcccaaatggattcgtttatcacagtttttctttaatatttaatgttatcaaccactcagatgtttttgcacaacttgagattgaacccagcgacaagttgagtcatcgcaatgaggatggttcagaaatttatggtgctcattggtatataattggagaaacgaccaaagttaaggatgatgaatcgtttgattggtataattggtttaaagaatttagaattaagaccaatttaactatttttggtcagtgtcatcaaccatttgaaggagagcttatatga

SEQ ID NO: 47408 - DNA, 237 bp, Acinetobacter baumannii
atgtctagagcagacccgcaaatcaatattcgagtgcctatagagttgaagaaagaaatagagcatgcagctattgaaaatagtaggtcgcttaatgcagaagttgttcataggctgcaagacagtttgagtagagtgaaggttaataaatctgaactcactactgaggaacttatggaagagctttctaaaaggtttggtgggttgaatgtaaaaattactcctagtgaagaataa

SEQ ID NO: 47409 - DNA, 156 bp, Acinetobacter baumannii
atggctagaaaagaccctcagattaatatccgcgttccagaagatactctagataaattaaaaattgaaactgaaaaagagcatcgaagcctaacagctcaagtaaaccttcttattgaagaatggttactaaagcgttcaaatcatcaagcttaa

SEQ ID NO: 47410 - DNA, 939 bp, Acinetobacter baumannii
atgacaagtttagcactaacctttaatgaagtgaacttttcacctgtacaacataataaccagatctggctttcggctagtgaattagctaaagcacttggttatgaaaaatcaaatgcggttactcaaatctatgaacgaaataaagatgagttcgcaagtgatatgacaacgaccctcaaagtgagtgttgttaattcaagctgttccgtcgagaacctcaatttgaggctctcgaagaaaaccgaaaatctagaaaaaactattcgtgttttttcgcttcgtggttgccatttaatcaccttctttgcacgtacttctgtagcaaagcagtttcgaaaatgggttcttgatgttcttgataaagaaattggcgcaccagttgccaaaactcacaaatcagagcgtgaacctttaaccaatgcagtaaatcttttagtagctaaaactaagcatttgaattacagcgatgcttataaattagttcatcagcgtttcaatgttcagcatattgatgaaattccatacgatgtaatacctgtggctgtggagtatgttcaccacttaattgctatgtacagcaaggctgaaaaacaaggttctttgtttaatgaagatcaatttaaactccttaagaaccttattgatgcaattattacccaaaactttgcgactagtcgaatctatcgagcagtacatatgcttaacaacgagcaaggacactacttagctgaatatgcttttaaaactaatattgcagttctaaaacttactcgggcaatggatttaagagggccacttaatagaaaaatcattagtgatgatttaaaaaccataagctacacaacaggcaatcaacattatagcgaccgttggtttcatccattgatggaatcgggaatgctagctggtgctttgcgaatttctggtggttggtag

SEQ ID NO: 47411 - DNA, 423 bp, Acinetobacter baumannii
atgaactgggaaggtaaagttggggatgctttttttcgtccagatggcttaaaggaccatctgaatgttgtactatttgacccaagtaaatacactcaacttggttatggtaataaaatttgcattgtaagagttaacatcacaacactctatgtggataagtattacgattcagcctgtatagttaaaaaaggcgaacatccttttgttcagcatgacagttatgtgctttatcgaaaacttgaaatagaagattttgaacatgtgataaaatgtgttaacgatggtccttggcgtccagccgatccggtaagtgcagaattgttattaagaatgcaacggggtgtaaacatctctggagacactcctagaaaatacaaagttcaccttcctgaagttgatgcaaataatcaaactgaataa

SEQ ID NO: 47412 - DNA, 582 bp, Acinetobacter baumannii
atggataatctttttttatttgatgaaaaaaagttgacccaagcagcagctttttttctgtttaaagctaatggacatttgccaattcttaagctcatgaaattactttatatttctgaaagagagtcttttagaaaatttcatcgcccatttattggagatagtttagtttccatgaggcatggtcctgttttatcaataacatataatgttatgaatggggctgttcgtcatcaagagttttggaatgagtggatatctgatcgctcaaataatgaagttgcattaagagataagagtatgattcgaagcgaagatgatttgcttgaattgagtgataatgatatctctttattaaataatgtatggcaacaatttgggcacttatcaagatgggatttagttgattggactcatactcattgtccagagtggagtgatcctggtgcaagtagcactccaattcgctatgatgatttattctctgcattgggatttaatcaagaacttcagaagcatattattgaagatatggaatctgaagttagaatgaatcaggaaaatgaaaacttatgttgttag

SEQ ID NO: 47413 - DNA, 516 bp, Acinetobacter baumannii
atggctttaaaagtcggaattattaaaagctcagacgtatcaaaatggtgtgaatacaagggggctgatggagaggtacaggcagagttcaaagtccgtggtatcgcttataagccttttcaggtagcgattgaacgagcaggtaaccagatctcttctaaaggctatgatgtgatggtcaaagatgaagatgccaagctttatcacgaattgttaatggatgcatgtgctgcccacttaattgaagactggaaaggtgtggtatttgccgaaatcgtggatggtaaaactgttgagtctgaaaagccatatacccctgagaatgcctcaaagcttcttaatcttggtgatattggtatttcgatctggctatttattaaagaacaggcccagaagattcaggaagacgcagacaaggacaaggctttaattctgggaaagtcatcgagctctacaaataccaaaaaacctatgcgtcaaaaacgccgcacgaaatcgaacaaatcaagttcttag

SEQ ID NO: 47414 - DNA, 1131 bp, Acinetobacter baumannii
atggcaaatcttgtttttaaatttagttgggatcaccggccgttcccgtataactcggctcagggaaaacggcaattcatgctgccattcgcttcaggcattcctaatctggcaccaaacttttcgcaggtccaaggtactgctgtagtctctcaaggtggtactggggcgacaactgcactagatgctcgaaataatctcggagcagcagaaaaaggggtgaatagtgacattacagagctaaaaggattaaccaaggctattgcaatttctcaaggtggtaccggtgcaacaactccatccgatgctcgaactaacttagggcttggttccgcagcaacacaaaatagatcaagaacatttattggtgtaggcccatctttaacaggaaatgcttatacaaatgcaaatgatgatgggcagtatgttatggctagctctattaatgaaccctcaaacccaaatcttggagtcatagggtactttgttccgctaaatgatcttggtgcaaatacgggcacaaggtacagacttttttatggcgcgcacaaggatggcttgcaatatcagtattctactaacactggaacgacttggagcccctggtattatcatcgaacaacagcaaacactactgtcgatgcaaacggatttattaaagcagcttcacctgttggtaaactctttgctgattcaattgagttaaacgatgacgcacaaaaacagccaatcactttagaaaaattaggtgttggtgattacttaattaagggttcactcggttttgctcaggaaggctggtatatcgaagtaccgaaagatgcaaacggcaacacaatcgttgcagtagtgtatgacaccctagaaaatggtgacatctcaattaaaacttacaagcgtaagtttgattttgaacttgctgctgttgtggcagatcacgagaacccaatggacattccagaaggccgctggattgatatacgtctgcatgaagaacctgagccggagccagaagaacctttgagtgaaacaccagtggatttccagccgactaacttatctcaggcagttgctgcagccatgaatggcgtggaaccgccagaaatctcagacacagacgaaacactttaa

SEQ ID NO: 47415 - DNA, 522 bp, Acinetobacter baumannii
atgaaaaaatcaactttaggctggggtgccgcaggattagtagctttagggatttttggttcaggcaatgataactctccaaaacaaacttcagactcagaaaatgcgcagagtgcagtagaggaagttatcgaatcaaaatatatcaacactaattctttaaatattagagataaaccaaacggtcacgtagtaggaaagttaggacgtggagaaaaagttgatatttatgagacgaaaggaaactgggcacgtatttccttaaattcctcatcacctcagtggttatcaacaaagctattatgtgaaacggatggttgctttaaacaaaagtctcgatcaaccacgtcaaataattatcaggccttaaaatctcatcctcatcattctgaaagaaaacagaaaaaaacctactacgatagtgattgttcatgtgctgtggtggattattgcgtgggtcctagaggtgggcactactgtattacgagtggaggaaacaagagatataaacctagatattaa

SEQ ID NO: 47416 - DNA, 369 bp, Acinetobacter baumannii
atgggatggaaggggaaaaagccgactagttttagtcttgatgtgtctaaagcagcagaagaccatgtgaagcatattgttatggatactgtgcaatctttagttaatttaagtcccgtcgatactggtgcataccgtgcttctcatattgtttcgattggatctggtgactatggcatacgtgaacctgaaacaaacgccacgcaagatgctgctattcaagctgtaaagattaaattgggcaatttggtctatatacagaacaaccagccttatgctgagcgcttagaaaatgggtggtctgatcaagcaccacaaggaatttacaacaccacctttacctttatttctcagaagtatggcggctaa

SEQ ID NO: 47417 - DNA, 405 bp, Acinetobacter baumannii
atggttaataccgaatatgttccagagtggtacatcacaccttttcagcatgtgcattacacgcttgctcgaaatcaactacacatggatttgttatttgaagatatggataaagccgatcaatttctggatatgggagcggatgcacaggttagtactttttctaatggtgcatatgcgattgtccaaatcggggatacgtcagagaaagatcaaattcaagtttacggattgcttttacatgaagcggttcatgtctggcaaatagtaaaacggagaatgggtgagcgagagcctagtgtggaatttgaagcttattcaattcaggcaatcgctcaagacctatttgaaatgttcgaagctagtgaggtaaatcatgggatggaaggggaaaaagccgactag

SEQ ID NO: 47418 - DNA, 381 bp, Acinetobacter baumannii
atgagctttatcactgaacaagaagcgatagaacatgttgaaggctttgatgctttatctgccagtgataaggctcaataccttcagatgtcagaagcttatctattagcacgtaatgttaagccttacgaggatgctacccaagtacctgaacctctaaaaactgcctcatatcaaataatcaagggcattatgaaaggtgatctatatcaagggcaggaacaggcactaaaacgtaagaaagtcaaagctgatacggttgaaactgaaaaagaatatcaggacggatcagtaaagcttagtgcaatcgagcaattcattcttgatttgataaaaccgtattgcaaacggaaatccgtcttttttgtcaggaaaatctaa

SEQ ID NO: 47419 - DNA, 1347 bp, Acinetobacter baumannii
atggcagttactgataaacatccgcagtatattgctgcacaaaaaagctggttgattatgcgtgacgccgttgctggtgaagagcagatcaaacaggcacaaacaaagtacctagctaaatcggccggaatgattgaggctgaaaagcaaggtgatacgactggagagatttataaggcctatctaagtcgagctcagtatccgctatgggttcaggacgcattacgcacaatgatcgggttagtttcaaagcttgagccgaatattgtgattgaaagttctctacttaaaggattgatagagaatgcaacaaatgacggttttgggcttaaacagctctttattcgcatttgttcagagttgctagagtttgggcgctgtgggctgcttgttgatgttgatgctaaaggagtgccatatttcgccttatatgatgcgttatctattatcaactggaaggaaaacagtatcggtggtcgaaaggatttaaaactgttagtgctcgaggagcaatttgataatagtgaagatgaattcggacacgaaactagaacggttcaccgcgttctatctatggatgatggagcattagcggtccgattgttcgatggttcaaatgtggaggataaaactcctgatctcggcggtaatcaacttcctttcacaccatttgttttctgcggtgccactagtaattctccggatgtaggtaccataccgcttttgacaatggccaaggctgctctgaagtattaccagctcagtgcagattattaccagtctcttcaccatacggcccatccgcaaccttggattagtggccttgatgatgacgatgatgatgatattagcgttactggtgttatggctgtctggagccttcctccaaattcacaatgtggttatttagaaatttcaggtaacggcattgaactcactaaaaaggaaatggatgcgcaaaagaattcagcattagaagctggggctaaagtagttgataccaatacacaagaatcaggtgaggcacgccgtgcacgtcaggatgaccagcaagcaagtcttcacagtatcgtgatgtgtgcagctgcagcaattgaacaagccattaagtatgcagcgcagtggttaaagctggattcgacaaaatattcatttacggttgaacctgagtttattgtgcaggtcacggatattaatcttgcaaaacagctttatgagggtgctatttcagggaaaaactctttccgcacatattgggaatacctgatgacaggtaaattaccagctcacgactatcaggaagaagtgaagcgggttgaaggtgaacgggacagtatgccgttgtag

SEQ ID NO: 47420 - DNA, 1218 bp, Acinetobacter baumannii
gtggcgggatttggatctggcaagacttgggtaggatgctccagtttatgcaacaaagcttgggaattccctaaagtacctttgggttattttgctccaacttacccacaaatccgtgacatcttctttcccactattgatgaagttgctttcgattgggggcttaaaactaaggtttatgaaaccaataaagaggtggatatctattatggtcggcaatatcgaacgacaatcatttgccggtctatggagaaaccagcaacaattgtaggttttaaaatcggacatgccttgattgatgagctagatgtcatggcgatgactaaagcacaacaagcttggcgtaaaatcattgctcgtatgcgctttaaacaagctggattgctcaatggtattgatgtggcaacaacgccagaaggctttaaattcacttatgagcaatttgtaaaagaagctaattcatcccctgagaaacgggcactttacggcatgattcaggcatcgacttatgataacgaagccaatctgccagacgattatatttcatcactgtatgaatcctacccacctcaattgatatcagcctatttgaaagggcagttcgtcaacttaactagtggagcggtttatccagactttgaccgggttttaaatcatacggatgaggaaattaagcaaggtgagcctttactcattggaatagactttaacgtacttaaaatggctgctgtggtttatgtcattagagaaggtaagccgagagctttagatgaactggttggagtaagagatacaccaactatgtgttatctgatcaaagagcgttttcctgatcatgatattaccgtgataccagacgcttcagggcaagcaacttcatcaaagggatttagcgaatccgatcatgcaattttaaagaaaaatggctttaaggttgaagtgaatggtgtgaacccgggcattaaagaccgtatcaatgcagttaatgcccagatcctgaatgccgatggggaaagacacctcaaagtaaacacaaataagtgccctaactttacggctactttagaacagcaagtctatgatgattttggaatgccagataaaagcgctggtttagaccacgttggcgatgctggtggatatccaatagccaagagattcccgatcatcattcagaaagtatttaaacggcgcacaatcgctggtttttcccgttaa

SEQ ID NO: 47421 - DNA, 3489 bp, Acinetobacter baumannii
gtgcttgatacatcactcgttacgcaattagaaaatgccattaaaagagaaatcgcagacatttttaaagaaatttctcagctgatcactgctacatacacaaatgtaaattctgaccttgctcaaattgattttaagtggcttgatcagcaaattctggacaagttcaatatccatagagcagttttagagcagctctgccaaacatccaaatttaaggacaatgctgcagattaccttcaattctgttttaaacaagtgaaacagatttgtaaggagaaaaaccagcagtggcaaaaggattacccttcctatgccgagagctatgagattaagttgcccgattggatcgtctacacacctaaacgtctggacaatattttttctgtttacaaactacagcagggcactatgctcgccaaggtaaaagaagaactttatttaaattggggggattatctcgcacaacaaacccaaggcatccttttagaatctacagataaagagcaacaaaaattagtgaataccttgtttgaatgtatgtgtatttcattaatttttgatcaaggatgtattcaatctgaacggttgctggcgattcatgatgcaatttttaaaatgaacctcgatagtggcttgctccctatctattcaaattataataatgcttatgttttttcttacacattgctctcaacaaagtatggcaacatctatcgtcaggatggcgaagaagagacggagttatggcaaactcagcatatctatttcaatgcctttgtgatgctatgttatagacggattcagcaactactcaatggaccacaagcgtatatattacaaaacacgtcaccattacaatgctgggaaaaggaacgcagtgaaaccgaagttccgattcagcgcgaagacctattgttagaaaaactcaagacgcatttcgacagtgtgcttaatctgaagaaggaggataaagcctctaaaaaattgcctgaggaagtacaatttgatcatcatattcaactatttttaaaagatctggaaaaaaaaggttttactgtttttaaacatatggattatgttttatggcaggagattcctaatctggatgtgttaagtaccagtgtactgaacaatcagatcatcacttcgcctttaatctatgagcagtatacacagctctatgatcaacccgattgctggaaaactattcaagctagaatcaaaaatcttgaaaaaaagcctcaagtcttagacttggatatgcctacagttacagtcaaaacatttcatgatcgacgaaccggtcaacgtcatgagctgaaatcctggcttttatcttttcatcaggatatcaaacccaaacagcttgcggatcaactccaaaaaagcatccaaaaatctgaggactataaatctgcgtatgaggctggaaatggcgagtacctagattatgtagtggctattgcacatttacgcgtgtgtcagtggttagaaaacgaatttgcttatcatgggaaagcagcgattaaagtctcaacaatcaagcgttactatagtagttttgtgcttgacctactttgttatgttctagaacagcagatcaatctagatacagccactgaagagcagtttgaggaaatgtatcgcacgattgttgaagaaaaactgctgaatgatcagaaaaatcataaaacgaccgcacaaaccaacaacaataaaaaatacaatacctcgggttatgcctttgatcggctgaaagcctttcaccaatacttagtcaagaatcatcgtgcaccgattgtgcaatatttatatgaacgtcaaagtgacggtttatttttaaaaaccagactcattagtccgcagatgtttcaattgatgatacggattcttagagaatacccagaagctttgggtctgactgagcaggatgcaacctgtctagaatgggtctatacattggcatttagactgggcttgcgtattgatgaagctgccgggatctgtatcgatgattttgtatctccgcagttacgaaaacatcctgacaatcgacagctctattatgtgtttgaatccgctttagatcagcagaaagacgatcgatctcaccataaaatgagaaaaacaatgggtgatattgatgatctcacccttaggattcgtctaaattctgagcgtgatctgaaaagtgataatgccacgcgtcagtttgatttagcttattttttagcaccggacgagttcacaggattttgtcgcttttatcaaaaccagttacctggctctaaagcgactgcagcagtctgcaatagaaaaatcaaacagctctttatgctgggtgaacaacctttatccagtacaaatttatcaaaaattacccagttgctgtttaatactgtattagggacaaacgatcatcaatatacctttcacgctttcaggcatagtaccgcttcacatttggctatccttttaaaaggcagcatagcactggtacgttgttttactgactatgattccgagtttgggcgtaagcttaaaaagcacattttacccaatatgaaggatgcttcatcgcgtagtgcccaagcctggtctcgacttgcgcatctgatggggcatgaagacattcggatcactgcaagacattatctgcatcatctgaatatcctgattgctgacatgttttatcaagcaaaccgtgaatattcacctcaattgatcaaggcattattaggcgatagtcagttgatgcatcgcgatttcaaggttaaatttcagtcgaatgaaagagatattttaaaattgatgaagaagattcattcacacacagaaaataattctcaaactgctgcattaaagagcaagaaaaagcagaagcagcctcaacaacaggacgtatttttataccgtgaaacgtttttagacgaataccggaagtggcgggaaaaaaaagaaaaagcaacgatcgatcctgaagtattgaaattcattcaatcgatcagccagccgttttctctctatacaagtcacgtcaaaaatgatgctaatcatgcggatcttatcggttttacttggaataaaatggtgaaatggtctactctctatgagattgagcaaccttttaacttaaataaaaatgtaacccgaaaagatcttaaacatttttttgattgtttagaaaataaaatttcacttgaaaaagatcgtcctattttgaactttaaggcatcatctaaaaatgacttgattgactatcaaagattcttagattttatcaataaactttattcaaaagattcagataatttttcaaaagattcagataattttgaatgggatgaatataatccgggtgaatttaataatgtaaaaaagggcgaggtgaaaataaaaaaatataaaatatggaataaaaaagataataattttgttcaaaagatgctgttgcaaagcgtcttttacaagatgaaagagtgctga

SEQ ID NO: 47422 - DNA, 2307 bp, Acinetobacter baumannii
atgagtcgaaatgataaatcttcagagttagacgaagaaaccaaattattggaagaatgggtcaatcagtccctgagcgaaaaaaaacaaattttgaatcagctccttgcgcaagatcagcaggcacaggaactgtatgctgctgctcacaaaatacatgtggtgattaaaaataatcggatagtgacacaacagaaattattagcaggcttaacgcaatggactaaaagtgcatctataggacaactaagcgaccaacaaaaagcagcattcatctattcctatcttttgactgcagtcttgtgcgaaatgctgaagggaatcatcttgttagagcctcagattacaagggatgaaaagggtgaaaaaaaggttattctaaataattgtaaaaacaacaataaaatcaatacagtatcttataatttaaaacttcttttgcaaaagcagttatcgaatactgagaaaaataaactgttgtataaaaaagttacacgaaaactccaagctatggatgaatttgatgccaacgagttaaaaattcttttagagcgtaaaacaataaaaaatgattttgaacagcttaatcttggccgctatattcaacaatttatgattgttttcaacgagattgccaatagtagattaaattcaacagtaattaatgttcaggctttaattaacgatattaaaaagggcatgacctataaatctgattcaggcacatcatcgttggatgtagagaatgaggatactggacaagatacagacgtcaatatttctgatcctgaacaggatgagatcgccaagcgggtgaaggggagtttctctgacgacaaacagaaacagcttgaaaagcaagctaagcgaattcagcgacgtgacttagcctgtaaaactaatccgctttatctgaaacccagtttattaactgaggtatatcagcgattgcacgagtgttatcaagaaaatacgagaaatgatgcatatcaatcggctctagctgtgtgtggtctgatgtgtctcttgaccggtctgagtccaacggtctttcaaaagatcaagtatttgattggtattggtagaattaaaaaaaaatcagtcaaaaaagtcatccattattattgggtgatcgatcccaagctgaatgccaatcattccggtgccatgcaagataaagcacagcgttataatcgggccttaaccctagaatggcgcataccagcaccctggatcaccagtttagaggctttagaggaacctgaattttgtgtgattgagtacaataattttttgcgggaagtctttaaagagcatcagattggtgaaatcacctgcgggatgttagagcgacaaatctatttccatctggatatggagactggtgataacctagtcgcacacttgttggctaatcgagatactcatcatatcgtgcaatggaactatgaagggcgtcagatcgatcaaatcgaccagcattttcaaggctatattaatgttctattagaccgtagaaaaggtgatccatggattgagaatgaacaccctggtcatatttttcatcgtgaggaacgtattggtagtcagcgatgctggactgtagaggccgcgagtgaattttttaatcagctttatcattttgtcaaaaacacattagccaatactcaagcgaatctgatcgagaagctgaatgcttacagcatttggatgtggcatctttccttaatctgcctgacggtacgtccaatagtcggcatgccggggttactcaaacattacgatcctaaggcacaactgctttatgtgcatgataaaaaaactgattcacgaaaagtaggacgtcctgttcctgttacaggctactggcaggatcatttcaatgcatatcgaaaatatctgacgcaaaccatcgagacactcgggataactagttttaaagtgaaattggaaaatgatggttttatgctctatgtcatctcacatcctcggatcaagtcccaaaaaggtcaggtgaatcttgcggaagtcgtggagcatttggagttacagcccatgtctgctgattttgtcacgaattaccttaaagagaccgtgcagatttataaaaactggccaaggcatttcactaaaaatcatctcgccttgagtgctgacattcacaatacgctatatacccatgataagcaaagcatgggattcagtcacatttctggattaagcccttatttctacaaacacgacattcagcagcaagttaaaagcttgctcaacaaactagaaatcgcaaagcttgaagtgctttaa

SEQ ID NO: 47423 - DNA, 453 bp, Acinetobacter baumannii
atgcaaaaaaaatcatttgaagttctgatcaaactcagagcagttttgatattagatttaccagactttattcgaggttttatcttgaatcttaaaaacaaactggatgctgacatcaaaagaactcttaacacgggggcgaaatcgaataaagccgttgatgaatttgaggtcctaaaatggttaatccataaaattcctctagatctgcaacaggtcgacaagcacaaacagaaacatgtccatgctgtgctgtttacctatttttttactcaattatccgaagccttaggtctgcggttatcacagcatatgcaatcggattcaaatctgcagcgtcatgttcaattgagtgccagcacttataaaaaatacttcaagttgcataaagacttgaacctcaagatagagcaaaacctaactttcaatttttaccctaaaaaattatggtga

SEQ ID NO: 47424 - DNA, 210 bp, Acinetobacter baumannii
atgtcatttaagcataaacataggccgattacagatgatcgacttgtactaactactaaagagacagctaggctcttagggtatgcagaacaaactttacgtaagtgggctttatatgaaaatggcccaattaatcctattagatatggacgtactcttcgctggagtaaggcagaagtctataaatttgcccgggtgaaagaagactaa

SEQ ID NO: 47425 - DNA, 795 bp, Acinetobacter baumannii
atgggccgcccgcgaagaactaggttagattttgcaaaaacaataagttggtatgactttttttataatcagttagtaagctttgggaaatataaaaatgattatgatatggagaaatttttttatggataccacaaagattacaaggtacagaacttatttacaaagtataaatgtgggttatccacaccacaaaaataccagataaataatgttgaatctaaatgtattggctcatctaatattattaaccatcctctatggaaaatcttgaaatatcaaacatttgatgaagatcttatattatcagtattagctactttacctcaccatatcgtagagttcatttcatccaatggacgtattaaagactttgataagagttgcttaaaacatatagcaagctatggctcactcgacagcctatgtgcattgtatttattgcatcactggggagtaaccattaatagtaccgctctttctaatgattgctgttcactcctcatcaattcattagagttattactaaaaagaaatcctcacttccatcgttcacatgtctttttatttgatgaattatgtgatcagatcttccttatagaattaaaaggatacagtcgaccactcaaaattaaattaaattggcgagaatacagaaggaaaaactggtctagtgaagttaaagagatatctacaaaagccgaagcagatttccgcattcacccgaaacttcaagacttcattccaagcacagatccaaacctagaagaactatacaaaaaactgtttgtttaa

SEQ ID NO: 47426 - DNA, 1173 bp, Acinetobacter baumannii
atgagcaatcacaacgaaccagaagaattagaacatctaccttattgtattggtagcattcgacataatggagtagtcagcactagtaaccgtctgattagaccaattgaattatcatctaatgagtataaagctcttctttatgcaatggctgttgcgaattatggtgagaagaataatcaagatcgtgaaattacagagcaaacttatatttatttgcataaagatgatttaggagaattattaggattagataaaaagaattccattaatgttgctattgatcgtatttataaagaattatcatcacgagtagctcattttgtaattgaagagcccgtggatgataataagcgtaaagttaaaaaagtacactcagtagtaccaattattcgtgaactccgttgggaagatgatgctaaaaatgctttgcagatacgtttcaccagtgaagtacttccgtattttactcgtttagcaaatggaaattttacgacctatcaattgaaagatttatttgctttgaactctgtaaccagtatgagtttgtattcatactttatcaaaaatgaatttaagtatgctaatcaagattcttatgaggttgaactttcacttgagaatatcaaagcattaattgatattggggagaaaaaatacgatcgttgggttgattttagacgatacgttttagacaagattattgaagaaattaatgaaaagactagtcttcaattagagtacgataccatcaagaaaggtcgacctattgtcggagttcgatttaaaattcttaataggcatgccactgaagttgttgtatctaaaactaatgataagactcaaatctatttagatgtcaattttgaggataatgcgcttgttaaagaattaggtgcgaagttcgatatgactgtaaggtcttggtacatctatgcaaacgacccaaattataaacagtttagtaagtggtttaagacagaagggtgcttaactgaatctcaagcaaatgtgatagttaatgatattatgttccaaatggattttgctgtagctggcagttcaatgagtgaatttaagaaagaaatgaaatataaattaaaaaataatccaaattttgtaaaagaaaatagaaaacgattgaatgaaatctttggaaaagacgttatatga

SEQ ID NO: 47427 - DNA, 777 bp, Acinetobacter baumannii
atgtcaactaaaatcattgctgtcgctaatcataaaggtggttgcgggaaaacaactactgtagtacatcttgcttcagaacttgctgaattaggaaataaggtcttagtaattgatctggatccacaagcaaatgcaagtttacatataggattaagacaccctagcgaagttgaaactacatcagctgaattacttattggtgatataagtctattatcggaagcattagaagaagaaacaaaatttaaaaatgtttccttaatatatggctcattaactcttggtaaaactgaagatcaattgaaagatgatgcaccaagaccatccgaggaactttcaaataaattggaaattctagaaggattatatgactacattcttattgattgccctcctagcttaaaattactaaccagcaatgctttagccgcttcgacacatgttattgttccaattgaatctggttcacaatacggtctctatggtgttactgatttaattaatcatttaagtaaaattagaagagttaaccctgaattagaactcttaggtgctttattaattaaacatgatgagcgtcagaatgtatgtaaattaataaaagatgaagcatttaatcaagttggagaattattgcataccacaattccaatgagcactaaggttaatcaagctgcaattttgcaacaacctttattatctgttgataaaaactcaaaagttcgaaaagcttttgaaactttagcacaagaaattgttcagcgtgtcgaataa

SEQ ID NO: 47428 - DNA, 900 bp, Acinetobacter baumannii
atggtaagtaataaagagctattggctaaacgtcttcagcaaaatactcaaaagcatcaacatgcccaaaaggagcatattaacgatgtcaaagagctaagacgtaatgtacaaattacagatattcaggctagccctaaccagcctcgaaaactctttaatcaacaagatattgaagatttagcagcatcaattgaagaaattgggctattacaaccaattgcagttcgtagaataaatgataaatatgagttgattgctggtgaaagacgattgaaagcccaccaatttctcaataagaataccattgaagtaatcattattgatgcatcggatgaagaagttgctttattaacattagctgaaaatttaaagcgagaagatctgacagattatgaaatatatgttggattaacttctttggatgaaaaattaaaaaaaaataagcagaagttagcaaagtcattaggtatgaatcgtgaagatatgtataaatatttatcttttgaaaaattacctggagagttgattgaagatttggagaaacagccgtcattattagcacggaccgctgctacagcagtgaaaaagtttctatcagatcatgatgaaaaccatgaaaaagctaaagaagcattattcgaagcatggtcaaaattgcttaaaaaagaagttgaacagacaaaactggcatcactagctgaaaaaatctttaagtcaagagaaacgaaagaagtaattcaaacttcaattgtacataaaattgaatatgatgggaaagttgctggtaatatcaaatttgaccataatacattaaaggtatctttaaaaatgggccaattcgatgatcaaaatttacaagaattagaagctttcctaaaacgaatgttagaaaaataa

SEQ ID NO: 47429 - DNA, 258 bp, Acinetobacter baumannii
atgccatattcacctttaattgctctgattttgggctttgttttgactccaatcatgggtttaattacgaaaggaaaatattatattaaagctacagatgatggggtaaaagaatcacgttatgatgctactgggctacctatagcaacagtttatcattgtgtgtcatgtgatgaagattatgaaagacctgatattatgtattcacataagcacaaaggtgttatttgttctctatgtaagactttggaaaaataa

SEQ ID NO: 47430 - DNA, 483 bp, Acinetobacter baumannii
atggaaatttatactcaacgattagaagtagttacagaaaattgtgactttgatgtcattgagctgactttcgatacgcgccaaaagagccgttttcgtgcaactttaaaaaatggggtagatattggtgcagatttgccgcgtacaggcattttacgcagtggatcatatatttcgacggagagcggaaatattcttaaagttgaagcgaaaccagaaaaattgatgaaagtttcggctcagcaagagtttgatttattaaaagctgcatatcatctcggcaatcgtcacgttcccttaatgttgacgccaacagcattatatttcgaaccagatcatgtactggctgaaatggtagtgggtttgggattaaacgttgcagaggtagatcatccttttgaacctgaaagcggtgcctatgcacaacatcaacatgatcatcgcttaagcccaatcaagactttacatcatgtccatcactaa

SEQ ID NO: 47431 - DNA, 666 bp, Acinetobacter baumannii
atgtccatcactaatctatcgcaactactcagcctgttgaccttgtcatcaactgcgttaccgataggagcctattgctattcacaaggtgtggaaagtgctattgatcgagggctgattcatgatgaagcctccagcattgcttattttgaagaagtgttggaaatgctcttggttcgttttgagttacctgtgttgaaacgtttaatgcaatacagtgatgacgaagaaaattttacttactgggcaaacttttaccgcgccagccgtgagagtaaagagttactggcggaatcgaagcagttggcattttctttaaatgcatggattagagacgtattaaagcaacccattaaagtgaaaaaacagctgggctttgttccagtgtatggaagcctgtgtggcaccttggggctaaatcaatccgaagtacttacagcgtatacctttaccgttttagaaaatcaggtcttggcggcagtcaaaaccctaccacttgggcaaatgagtggtcagcgtattttgtggcatttacatgcgcttattcccgaagcaattgcgcgtgcactggagctgcaagacactgaaatcagtagtgccttaccgcaatatgccatgctaagtatgcaccacgagacccaatattcaagactattcagatcataa

SEQ ID NO: 47432 - DNA, 615 bp, Acinetobacter baumannii
atgtcacaacgtagcccattacgtgtaggaattggtggaccagtcgggtcaggtaaaacggcacttaccttgaatttatgtcaggccttacgtgaaaaatataatatggcggtcgtcaccaatgacatttataccaaagaagattcaaactttttaacccgcaatgaagccatgtctccagagcgtattgtcggggtagaaacgggtggttgcccgcataccgccattcgtgaagatgcgtctattaacctcgcggcaattgatgatttatgtgaaaagtttgatggacttgagctgattattattgaaagtggtggggataatttggcggcgacgtttagtcctgagctttcagatctaaccttgtatgtgattgatgtggcagggggagaaaagattccacgtaaaggtggtccgggcattaccaaatctgatttgttgattatcaataaaacagacttggcacctatggtcggagcaaatttaagtgtaatggacaaagatgctaaacgcatgcgtggggataagccgttcttgtttagcaatatgaaaaccaaagaaggtctggaaattattatttcgttcattgaaaaacaaggtctattcaaagcgtaa

SEQ ID NO: 47433 - DNA, 567 bp, Acinetobacter baumannii
atgacttatttaaaaagaactttagccactttcgccgcagcttttccaatgtgggcaatggcacatcctggtcatgaacaacagaatagttttttaacgggctttattcatccctttactggaattgatcacctcacgatggcgatcgcttttggtgtgctgctgtggtcagcggctaatcgttggaaagtaggtggattgttgggtttagttattgccatgattgcaggttttagccttggacaattgcatatggtttctgcgaatattgctgaatacggcattgttttctccttatctgttcttgccattgccctatggaccaaagccaatcgactgtttgcagttgcgactatggttttagcaagttttcatggtatggcgcatggtgccgaattgagtcattcaggtcatgtgatcggtttagtcttcggcatagttgttgctatgtcttgtatctacgcaggtggcttgggtttaggtgcattggtacaaaaatatgtgccacatggtaagaaaattgtcggtggaattgccgcagttgttgcattgattggtttggcttaa

SEQ ID NO: 47434 - DNA, 879 bp, Acinetobacter baumannii
atgcaggatttaaccgtcagtcgaacgcatgatgctcaattatggtttgccaagttggaactcggttttcaggctcaaaaagagcctgaatgcacggtgttacatcaccgcaaacattatggtcctgttcgggtacaaaaaatgctttggcctgaaaaaacaggggtttgccatgccattattgtgcatccacctgcgggcattgcgggtggggatcacctgacttttgatatgtctgtcgatgcgcaggctcatgccttagtgaccaccccgggcgcaggtaaatggtacaaaaccaatggtaaaaaggcctatcagcatatcaatatttgtttgaatgctgatgctatttttgaatggctgccacaagaaaccatgctgtttaatggtgcgaatgcgcattcagaaaccatcattcatttggatcatgcagccagttttattggttgggacatgttggtcattggtcgccaagcacgtgaagagcaatttagtgatggtgcctatagcaaccagttcaaattgttccgtaatcaaactttgttggtggcagatactttaagttttaagggcaatgaccgctggttaagttcatgcctaggcatgcatggtcaatctgtgatggggagtttctgggccgtgccccccatgcaatatcgtgccagtttagatttagaacagtatttggatttaatccgtgaactgatgatgcgtatggatgtacctgtcaccttaacggttttggatgatgtgatttgtgcgcgctatttggggaatgatgttcggcaatgtcatgatgcctttgctgccatcagagctagattaagacgctattggtacgatctggatgaagaatttccacgtatttggagaacttaa

SEQ ID NO: 47435 - DNA, 303 bp, Acinetobacter baumannii
atggaattaaatccaacagaaaaagacaaacttttaatttttactgcgggcttggttgcagagcgccgtaaagcacgtggtttaaagctgaattatcctgaagcgattgcgtatatttctgctgccttgcttgaaggtgcacgcgatggcatgagcgtaagcgagttgatgcactacggcacgactttactgagccgcaatgatgtgatggatggcattgcagaaatgattgttgaagtccaagttgaagcaacctttccagatggctcaaaactggtgactgtacatcaaccgattatgtaa

SEQ ID NO: 47436 - DNA, 309 bp, Acinetobacter baumannii
atgattccaggtgaagtaattacgccagatcgcgatattgagttaaatgttggacgtgaaaccctaaaaataacggttgcgaatactggggatcgaccgattcaaattggttcacattttcacttttatgaagccaatgatgctttgcaatttgagcgcgagcgtgccaaaggctaccgtttgaatattgcagcaggcaccgcagtacgttttgagccaggtcagagccgagatgtcgagttggtggcactagctggaaagcgtgaagtgtatggcttttcgggtcgagtgatggggaaacttgactaa

SEQ ID NO: 47437 - DNA, 1704 bp, Acinetobacter baumannii
atgatgaaaatgtcacgtcgtgcatatgcggaaatgttcggaccaacagtaggagatcgtgttcgcttggcggacacggaactgtttattgaagtcgaacaagacctgaccacttatggtgaagaagttaaattcggtggtggtaaagtcattcgagatggcatgggacagtcccaattgttggcagatgatgttgctgataccgttattaccaatgcacttattgtcgattggtggggcattgtgaaagctgatgtcggtataaagaatggtcgtatctggaaaattggcaaggctgggaatccagatatacaacccaatattaccattccgttgggagctgccacggaagtgattgcaggggaaggtcaaattctcactgcaggtggcatcgatacgcatattcactggatttgcccgcagcaagtggaaactgcactcatgtcaggtacaaccaccatgattggtggtggaacaggtccagcagcgggaacatccgccaccacggtaacaccgggaccatggcatattgcgaccatgttgcaagccatcgatgatttacccatgaatattggactattgggcaaaggaaatttgagtttaccggatcctgtccgcgagcagattgaagcgggtgtggtgggtttgaaattgcacgaagactggggttccacacccgctgccatcgataactgtttaacggttgccgatgaatacgatgttcaggttgccattcataccgatactttaaatgaaagtggcttcttggaagaaacgctggcggcatttaaacagcgtaccattcacacctatcataccgaaggtgcaggtggtgggcatgcccctgatattttaaaagccattggtcaagccaatgtgttaccatcttcaaccaatcccacccgtccttataccgtcaataccattgatgagcatttggacatgctgatggtgtgtcatcatttagatcctgcaatctcagaagatgttgcgtttgccgaaagccgaattcgccgtgaaaccattgccgcggaagatattttgcaagatttgggcgcaatttccatgatgtcgtccgattcacaggcaatgggacgtgtaggagaagtgattattcgtacatggcaaacggcacataaaatgaaagtgcagcgcggaccactagaaggtgatacgccacataccgataatcaacgggttaaacgttatattgcgaaatatacaattaatccagcgattacccatggtttaagtcatgaagtcggctcggtcgaagaaggcaagctggcagacttggtgctgtggaaacctgcattttttggtgttaaacctgccatgattattaaaggcggtatgattgcagcagcgccaatgggtgacatcaatgcgtccattccaacaccacagcctgtgcattaccgtccaatgtttggcgcaaatgcgcgcggtgcacataacacctgtattaccttcttgtctcaggcaggaattaacaatggcgtagcggaaaaattaggtctgaagaaaatcatttctgcatgtaaaaacacgcgtaatatttccaaagctgacatgaagcacaacacctatacaccagtgatggaagttgatccagaaatttacgaagtacgggcagatggcgtgcatttaacttgtgagccagcagaggtattaccaatggctcagcgttattttttattttaa

SEQ ID NO: 47438 - DNA, 969 bp, Acinetobacter baumannii
atgaagacttcatttcaagcaaagcgtattggttttttacttcttgatggattttcaatgatagcattttcaaatgctgttgaggtctttagaatggcaaattatgttgaaaaaagtcatttatatcaatggaatgtgacaggtttagatgggcatcatacttgtgctagcaatggtttgcaggtgcagcatacttgcaaaatacagcatctttttgaaatggatattgtgtttatttgcggtggttttcagctttttaagttgaataacccattacataaaatttttttgaagcgtttagatcaggcgaatatagctttaggtgggatttgtactggtgcatatgtgttggcaagtgcagatctattgaatggttatcaagcgagtttacattgggaaaactctttagctgcacaagaagaatttccgcaagttaattttaatccacatatttttagtttggatcggaaccgatttacctgctcgggggggcttgcatccatagatatgtgttcgcaactcgtggagcaacattacaatgccaatttagccaagagaatttgtgaacaatttattgtacatcacttgcgtgaaaatacggatattcaacaccaacccatctcgaagcagggtaaagatattcatcctcttgtcaaagaggcaattcgtttaatggaaaataatattaatgaaccattaaatattttagaaatttgtcatttgattcatagtcaaacacgaacgttagaacgctcatttcaaatgcatttcgactgttctcccaaagaatattatttaaatatacgcttaacacatgcacaaaatttattgaaacaatcttctatgagcgtctctaatgtagcattagcctgcggttttgctaatgcgtctagttttaataaagcctataaaaaccaatttaattattctccgaaaaatgaacgtggcattttggaattagctttttaa

SEQ ID NO: 47439 - DNA, 1239 bp, Acinetobacter baumannii
atgaatattcaagcaaatatggtgaaagatacgttacctgcacttttaacgattgaaaatggtaaaaaagtgcagtcaactttctcaaaacaagaatatgaaaaccgtcatagaaaattacgtcaaatgatggcggatcaacaagttgattcagttttattcagctctatgcataacatcaactattacgttgatttcctgtattgctcatttggtcgcttttttggtgtagtagttacagatcaaaaagtggtgagtatttctgcaaatattgatggtggtcaaccttggcgtcgtacagtaggtgactacaatgtggtctataccgattggcagcgtgataactatttccgtgctgttgcacaagaaattcccaacaaaggtcgtgtaggggttgagtttgaccatctgccgattgagcgattaaacaagctgaaagcattcttgccaaatgttgagtttgtcgatattagtgccacttgtatgaagctgcgtatggtgaaatctctcgaagaaattgcgcacattaaacaaggcgcagccgtatgtgatattggcggttttgcattaactgcggctatcaaagaaggtgtgcacgagcacgaagtcgcgttggcatcgacacaagcgatggtgcgtgaaattgctaaacgttttccgcattcagaattaatggatacttggacttggttccaatcaggcattaatactgatggtgcacacaatcctgtgactactcgtcaagtgcaaaaaggcgatattttaagtctgaactgcttctcaatgatcgcgggttattacactgcacttgaacggactcagttctttgaccactgtgatgatgcttcattaaaaatttggcaagcgaatgtcaaagtgcatgaggcaggtttgaaactgattcaacctggtgcacggtgctgcgatattgctaacgaattaaatgaaatttaccttgaagaaggtttgcttcaataccgtacttttggttatggacattcattcggcgtactttcccactactatggtcgtgaagctggtttagagcttcgtgaagatattgataccgtgattgaacctggaatggtgatttcaatggaacctatgcttatgttgccacaaggtatggcaggtgcgggcggttatcgtgaacacgacattttggtggtgactgaatcaggcactgaaaatatcactaaattcccttatggccctgagcacaacattatcaaggcataa

SEQ ID NO: 47440 - DNA, 1284 bp, Acinetobacter baumannii
atgaatgaaaaagctaaatctgatcaaaacactttaaaacgcgttgctactgcaagttttattggtaactttgttgaatggtttgattatgctgcttatggttttttagccactgtgattgctttggttttctttccaagtagtgatcctgtagttgcattaatgtcaacctacgccatctttgctttgtcctttattgttcggccttttggtggaattttctggggatatattggtgataaatatgggcgaaaacatgcactgtcttggtcaattatgattatgacattggcaactatgtgtattgcgctcttaccaaattatgcttctattggaatatttgcaccacttttattgcttttctttcggatgattcaaggcttttccgcttcaggtgagtatgctggtgcatctaactttttagctgaatacgcccctaaaaataaaaagggcttatatactagcttagtgccagccagtacagccgcaggtttattgttgggttcattgatgtcagctgccatgtttgcatggatgtcagaatcattcttatatgaatacggctggagaataccattcttattggctgcgccactgggtttaattggtcgtttcattcgtctaaaacttgaagatacccccgaatttctggcacatcaaaaaacgagccataaagaaactttcccgattaaagcattatttacagaataccgtcagccattatttaaagcgtttgcaatcacatctttaaatgcgactgcgttctacttaatttttagctatatgccaaattatttgtcgactgaattaggggtaaataaaaccgaatcttttatttcaggcgctatttctttagcattttacatcggcattgtatttatgatgggtaaatattctgaccgtatgggccgcaataaaatgttagctatggcatgtataggctttataattttaactttcccactgttctacttcttatctgatacatcatttattggcatgattatcattcaattggttttctgtagcctacttgcgatgaatgatggcagtttgcctgcatacctcactgagcttttccctgtgcatgtgcgttataccggttttgcatttagttttaatacagcgaatgcactgctgggcggtacgattccactacttgcaacatggttgattcatagtacaggcagtactttagcaccagcctttattttaattgtgattgccttatttagcatgagcgtattggttcagagcaataaagcgaaacttgtcacggtctaa

SEQ ID NO: 47441 - DNA, 915 bp, Acinetobacter baumannii
atgaatacacaatcacaatggcttggtgctttattggtcattatgggggcagttggttgggggactttaggcattgccagtacccaattggcaaatgcaggcttgagtaatagttcagtaacaggattgcggattgtcggtacatttatttgtttattggcctttttaccttttctttataaggttttacgaacactgcaatttcaagatattcctaaattggtcattcaatcattactcggtatgcttggaatgactttctgttattttaatgcggtacaacatgtaggaccagctatagcagtagcattgctttatactgctcctatttggagtgtggtactttcttttatttttttgaaagagcgaataacgttaaagtcaatgatgctcactcttgtggctgtgagtggtgttgcatgtatgatgcttggtgataatcagctcaatatgacgggggttctatttggtttagcctcaggcatttgttatgctgcttatggggtgattggtaaagatattattgaccactatagcccgacttttttattgttcagttcaatgatggttagtgcgcttgcgatttttccctttattcacttccaagaaattgaaagtctggtctcgaatatagacttcaatattgtgattgcctgtatcttattaattgtgtttgggacgttattaccttttgctttatatacctatggattgaagtatttaaaggcatcacaagcttctatttatactatttttgaaccattaacagcagtcattcttgccagcctgttcgccaatgtacagctttccaatgcgcagatatttggagtaattttgattattagcgtgtcattgctcaatgtgattttaggtaaagccgatctcaatcccgaaaaagtttattccactcattaa

SEQ ID NO: 47442 - DNA, 423 bp, Acinetobacter baumannii
atggggcaatttatattgcccttttgctttggtcgaaaaaatgttcaacttgagatagtaaaaatcaactcagaattactgaaaatcagaaagattaaacagagtcagaaagccgtagtacaagcaaagttcaaagcaatctacgtcaaaatttggcaaaaaatcttgctattgatgcaaacggagcctggcttacgtgtgcattctaattatgttgcaatcttacagttaatacataatcttgatgattttatcgaaaaatcacagcaacacttgtgctttgaaaggaaaactcagaaagagctggatgctaaattttttgctcgattttttaagctaacaaagaattcaataaaagatcaacttttacaaaattgttcagatcgtaatgaatttagacaatgcaatgtgataaaaaattaa

SEQ ID NO: 47443 - DNA, 2343 bp, Acinetobacter baumannii
atgccgaagattgacgcagaagagcactttttagatttagcagaaaaattccaaaaagattattgtctgttacgtgatcttgttgtgaatacacaatttattgatctatcagatgatttgtataaagaagtctacgcgctatacaaattagcacaacaaatttatagctatatatcaggctccagacagatcggtaagtattcttttttggctgctttgagttatttttcatgtccgaatattagtaatactcaagagttgtcgtctgtacgttatttgattctacaagcgagttttttaacatatcggcagtatcaagaatttgcaaaaattgataaagctgagaataagcaaaaacatgtttgtgacctattacgctatgtctcacgatatgtgctggattctaataatgctgaattatttcatgagtgtagtaagctgctaaattgttatgtcacgtacgaacgtaatttgaaaaaagaggatcgtaatcaactttttaatattaaagatttcaaacaagtacaagtcatagagtatttatcggctctattaataatttttaaaagactagatgatcgtcgtgttgttcatcgtcagcgtaagtcaaaaaaaagtaaagttttgcaatggccgacgaaaaatgaactcaaaaaatttcgtgaaattaaaacgggtaagcaagtagatattggacataacgcaaagatcagtatttatgatgccgctcttcacaaagatgaagagggtgaagttgatctattagatcctgaaatggagttttattcagaagatgaaaagtctaaaaatttaaattatatactcagcgataatgcgacgcatctaatgcggcatcgccagcgccgtcatgctccttttgttacaaatccacattatttggcgccagatatactgaagcaaattgtttatgtgttgagaaccgagttatccgggcactggagggatgctgcaatcgctgcagcatgtttattgtcacttttgacgggattatcacccgtcgcactgatggattttaacgagcttattcaagatggaattttgatccagaatggttcaagtagacgtcgcgaatatttactcaaattaaatcttaaaattacagagcagaagattaagagcttaaatcatgtgcggtggaatgaagtgatgacacatcaactacatttaccttctgcttggtttgactatatagaacaagcatcgaatccactaatttcatcaacacacattaataagaaacttaagaattggcttgataatcggtttgtaggttcgatcactgttgaaaaactgcaggctcaattatattttcatatatattatgaaacatataatgaatatctagctcatgtaattgctgggcgggatagtcagcatcacatgcctggtatctattatggagggctaccgaaagctcaactcagtagcacatatctagcctttgtagaaacagcacttacaccacattcctcggaatttactgaagaactcaaaatattgcgacaacaattcaaagtgcaatctgccttagctctaggaaggatagggagccaactggcacttgaacccagttttgtgaaagagcaatttgcttttttacataaacattgccaagaaaatattcaaaaagatcaacatatcattaatcaactgaatgcatacgcgtgttggatgtggcatatcagcttgttgagtttggcaagtcggcctaaagaaaacctgttggggaatttggatgattattgtgttgagctcaagcttttatatgtgaatgataaaaaaaatagtaaagcaagaaaagatggtcgttttatcccattatctgattttttcataaaaacactgcaaaattacacagtctttttagaacaaattattgaagcgtacggttcgttttttagacaagtctttgcaaagaaaattactgtaaatgatctttttggcaaggtcattgatagtaaagatatcttgccgataactgtcaaagagtggcagagcagaaaaattaagttaatccctttatcgagaaactgggtaaatttatatatggaaggaatctttccaaagaatatgtattcgaattggttacgtcattttgatatgaattttttgatgtatgcagaagaaaaagaagaaaaaaaagaagaaaaaactgctttagcattccatttaatacaggctctttatggtcatgaccaacgtgaccgagaggcttttcatccgcattcttcacttattccgaatgtctatgtacagcaagcccgccagcaattgcaagataatgtcaaatttttatcgattaaacacttagagcgaaaatag

SEQ ID NO: 47444 - DNA, 384 bp, Acinetobacter baumannii
atgactacaaatcaccagacatccatcgcatctcttgcgaaaaaacgaagaacatacagtgctgaatttaaacagcagatcgttcaggcttgtaaagcaccggacgtttcaattgcttcggtcgctttgcaacatggattgaatacaaatcttgtatccaaatggattcgcttaattgatgctaagccagggaatgatcgctcaccactaccgaataaacctgcatttattgccttatcttgctctgcaccattagatcctactcctactgacatgttaaaggttcaaattactttaccccactcaaaagcagaaattggcttgaaatggcaagtatcagaaatatctgctttagcagaattactcaaggcacttgcaacatga

SEQ ID NO: 47445 - DNA, 336 bp, Acinetobacter baumannii
atgatccgcattgatgaaatctggctttctacccaacctctggatatgcgagcagggatggatattgtcatggctcaggtggtgagagcctttggctacatcaaaccgcattgtgcttacctgttctgtaataaacgtggccatcgcatgaaagtgctggtacatgatggactgggcatctggctgtgtgcccggcggctggaacagggaaaattccactgggcgcaggttcaccagggtgaaagcatggcgataagtccggaacagttacaggcactgatccagggtttaccttggcagcgcattggacgacagcaggtggtgacgatgctttaa

SEQ ID NO: 47446 - DNA, 1722 bp, Acinetobacter baumannii
ttggcagcgcattggacgacagcaggtggtgacgatgctttaaaccagactgttccattctgctattctccaaacgttctatttcattcttctcatgacctcaggcatactgcggtcatgaatacgctgcctgacttaagccaactgacccatgaacaactgctggaattcaccagacagttggcaatgcagcatcagtctctggcagaatcaaatcaagagttagaaaaatcaaaccagcaattggatgccaaagttcaacatctttctattctcactcaaaaatacgagcatgaactggcgctgtttaaaaagcacaaattcgcccaaaagaatgaacacttaacggcaaaacaaatccatctgtgggatgaagcggttgaagaagatattgccgcggttgatctagaactggagcggctgaatgcagataaaaccgatgcagtgacacacaaagccacagtcaataaacctaaacgtcgaccactgccagatcatctacacaccatccgtattgagcatgaacctgcatcaacccaatgtgcttgtggatgccaactccggcgtatcggcgaagatgtcagtgaaaaactgcatttcagaccggcacagttctataaggaacagcatatccgtggcaaatgggtctgtgatcagtgcgacaccctgactcagcaagcgatgccagcctatgtgattgataaaggcattgcttcacctgaactgctcagccatgtgttggtatcgaagtatgccgatcatttaccgctgtaccgtcagcgcctgatctatcagcgggcgggcattgatctgtccagatccacgttatctgactggattggtcgctgcggtgtggaactggaacctctggccaatgccttaaaacaggtggtgctgcaacagcgggtgatccatgccgatgaaacgccggtcaccattatgcggatgggtgagaatgagaaaaaaccgaagaaaggttatgtctgggcctatgccaccacacagtacaatccagttcaagcggtgatctatgactttcaggatagccgttcaggtcagcatgcagaagagttcctgaatggctggcagggccatctggtctgtgatgattacagtggttataaagcacgctttaaatcaggcgatgtcattgaggtgggctgcatggcacatgcacgtcgtaaatttcatgaactgcatgtgaccgggaaaagtcagatcgctgaacaggcattagtgctgattcagaaactgtatgccatagaagcagaactcaggaaaaagaccgatagtacagcagaacaccgccgcgaataccgacaacagcacagccaaccggtgaggcaacaactgtatgaatggctcaaccaacatgatctgacggtgccatcgagttctccaaccgccaaggcgatcaattacagtctgaagcgttggccagccttaagccgctatctggatgatggcaatctacccattgacaataactgggcagagaactcaatgcgtccctgggcattgggccgtaagaactggttgtttgcaggttcgctgcgcagtggacagcgagcggcaaatatcatgactttaatccagtcagcaaagctgaatggcttggatccgtatgcctatttaagtgatgtgctgaaaaagctaccgacacataaagtgacccagattgaagagttactgccacactgctggaaacctaaatcgaattaa

SEQ ID NO: 47447 - DNA, 138 bp, Acinetobacter baumannii
atgtcccaagttgaaaaacaaatacccaagtatttagattgggcgggtcacttttatggcaatgaccttgatttagaacattacgaaattctcaccattcagtacattcccaagaaagagcggaagctagaaacgtag

SEQ ID NO: 47448 - DNA, 1245 bp, Acinetobacter baumannii
atggcagataaggttcggctttcattgcatccaaagcaaatggaagtctatctttcaaatgctcgatttcgcgtagtggttgctggtcgccgatggggtaagaccagcctttcgcgtactctgattatcagtaaaagtagaaagccaagacaaagaatctggtacgtagcgccaacttaccgaatggcaaaacaaatcatgtggaaggatttgattgaagccattcctcggaagtgggtagttaagattaaccattcaagtctatctattgaacttgttaatggcaccctgattgaacttaaaggcgctgatgacccagactctttgcgtggtgtgggtatcgatttcttggtattggacgaattccaagacattagcgaagaggcatggacacaatgtttgcgtcctacccttgcctctacaggtggtcatgccatctttatcggcacacctaaagcatataaccagttatataccgtctatatgcagggacaagacccgaaaaaggtcgaagctggccaatggcagtcatggcagttcccaaccattacatctccatttattcctgaatcggaaattgaagcggctagagccgatatggatgagaaatcattcaagcaggaatttttggcttccttcgaaaccatgtctggacgtgtttattacccgtttgatcgtaaggaacatgtcgggaaatatccttttgatccaaaactgccaatctggatcggcatggactttaacatcgacccaatgagtaccgtcatcatgcagccgcaaccaaatggcgaagtttgggtggttgatgagattgtccagttcggctctaacacggaagagatttgtgaagagattgaacggaaatactggcggtatatgaaacagattgtcattttccccgatcctgctggcggtcaacgccaacatgctcgtggtgagtccgacttggacatcatgcgcgagaagggatttaagaaaattctttacagaagaaagcaccctgcaattgccgacagggtaaatgcagttaaccgcatgttgagaactgcggatggaacagttgcattaagggttgatgaaaaatgtaagcatttgatcaattcatttgaacagaccatctacaaaccaggtggacgtgatgttgataaatcaggtggtgtagaacacagtgccgatgccattggatatgcaatcgagcaccaattcccacttcgtaagattgaaattaaaggcgtttcaatttaa

SEQ ID NO: 47449 - DNA, 147 bp, Acinetobacter baumannii
atgaaacatccattgattggcctttatttcaccattgtgattggttattggctgtatttgatttggcagtaccctatttattctggttcatattctttgggtcgggcacttgtttggcctgctgattttctacgttggttgttttag

SEQ ID NO: 47450 - DNA, 861 bp, Acinetobacter baumannii
atgacaatcatatcgagagaatcactccagaaaagccgttggatgttgatgttaagagcgagtgacaatatttattttgcacccgctattccttataaaaaattgcaaggggctatgagttatctccctcaaggaattcatccagatgaaatccttatgctaattgacgatacggtatttggcagtgctaaagctggactttgtgtgacggcgacaggactcttttataaagaaagctttggagatgaagcggtttatctctttaaaagtattcatcatgtcgaggcagatattggcgtcattaatcatggcatcgtactgaatcgtatagaaaccctgacctttacccaactggataagggcacagtacgaacattggcttcatttctaaatgaagtttgtcagggtgaaacagaaaccgatcgggctccaccacagattgatgcagaactgaaggtaattattgatctgtttgcttatttcatcacattcaatatgggtaagtggaatcctgaatctagtcatgcaatatctaaacattttgtaaagctgaatgatgaagcatcacagcactatattaaaaggttactgactgaacatcccaactttgaatatgaagaattattacatcgctttgcagaactgaaagatgtgctggcttacaagcttcgtacggagatgatcgaacaactggtttatgccatggcactgggtcaggttgagcagaatcaggcggatctcttcatgacccatttatgtcgtgtatccaatgtttctaaagccgtatttcctgatctggtcaaaattatctatcaatgtctggctgatgaaatgaatcagtcagttctgggcattggctag

SEQ ID NO: 47451 - DNA, 318 bp, Acinetobacter baumannii
atgaaaactctattccgtcgtagctttactgcttttatgtgtgttgggactttaattgctggaacccaatcttgggctgcggatgctcaacagaaaaatactgtaagtacagaagttaaagtaaattcaaaagcacaagagaaatgcaaaaagccttgtgatatgaaagatggcaaggaaaatcaacaaaaccatagtcagcatgatcacagccaaatgtctgatatgtcccaaatggatcattctaaaatgatgaacatggatcattctcaaatgagtgagatggaccattctaaaatgaatatgccaaataaataa

SEQ ID NO: 47452 - DNA, 1878 bp, Acinetobacter baumannii
atgtctagaaaattaagtcatgtccttttaataggagtcggattgttttcgtcgacttgggttatggcagcggttaaagaatatgatttaacaattgctgaacagacggtgaatattacaggaaagcctctaaaacgaattactgtaaatggtaagtttgttgcacctcttcttgagtttgaggaaggtgatgatgccgttattcgcgtacacaacaagttgaaaaaccaagattcatctattcattggcatggtttaattttacctggcattatggacggagtacctgggttcaacaagtttgatggtattgcaccaaataaaacctatgaatataaattcaaggttcgtcagaatggaacctattggtatcactcgcatagtaaaggccaagagcaagatggcttgtatggtcctctagttatttatcccaaaaataaagttcctttaacggctggagaaaaagctgatagagattacgtagtcttactctctgattttcacaattctactagtggtcagattatgagtaatctcaagaaagaagctgattattaccagaatcgaagagaaacggtttttgatgttttcaagcagattaaaagagatggtttaaaagcaacatggaaagatcgttccatgtggaatcagatgcgaatgcttaagacagatatgtctgatgtaacaaactatacgtttttaatgaatggtaagactccagaacaaaattggactggaaattttaaagctggagaaaaagtacgtcttcgttttatcaatgcttcggcaatgtctttgttcgatgtaagaattcctaatctgaaaatgacagtagtcagcgcggatggacaaccagtaaaacccgtgccagtggatgagttccggataggaaccgctgagacttatgatgttattgtagaaccgaaacaagcaagttatcagattgaagctgaatctattgatcgaagtggtttttctatcggtacattacatgatgaaaatacttcacctgtaaaaaatataatgatgccgacacctcgtccccgtgctttactgacgatggaagatatgggaatgaaccatgacatgtcttcaatgaaaggtatgaatcacgacatgtcttcgatgaaaggcatggatcacgacatgtcttcgatgaaaggcatggatcacgacatgtcttcgatggaaggtatggatcatgacatgtcttcgatgaaaggtatggatcacgacatgtcttcaatgaaaggtatgaatcatgacatgacttcgatgaaaggcatggatcacgacatgtcttcaaaaacaatgagctcttctggatcagatgaggtggtttacggatgggcgaatgcctcaaccccagctggactaaaagcacttcaatatagtgatctacaatctttaacccctcaaaaagatactcgtgctccagaacgtgaaattgaaatccgtttagggggaaatatggagcgctatatttggacaattaatggtaagaagtttaatgaaactgaaccatttaaagtgaaatatggtgagcgtatacgcttgaaatttgttaacgacagtatgatggctcatccaatgcatttacacggcatgtttatgcaactggaaaatggccaagatccaagtaatatgccgaataaacatacagtaattgttccaccaggtaaaacagttacaactttattaactgctgatgagttaggtgaatgggccatccattgtcatttgctctatcacatgtctgctggaatgatgaataaacttattgtggcaaatgtcgatagtaatagtacatcttcgaaagatgttgttactcaacctaatactaatgataagggggtaaatcaacatgcgcaccactaa

SEQ ID NO: 47453 - DNA, 393 bp, Acinetobacter baumannii
atgcagtggttaaagacatgcttatcgctgtttttatcgtttgctatcctattagtaggatcggctgctgctgcttcgtctgtacataagcgatgtttaatgccatctgaacagatatccatgcaaatggaaatgtcttcaaatcagggcatgatgcatactgactgtatgaaaaccgaggtgaagataaaaaaagatgtacatgatccatcatgtatgtctgagcaagattgtattatgtcttttgccaagattgcttatgccaacattgctcaagatatttcgcactcaattgtgttctctccaatagaacgatctattttttattctccagatcaagaccttccttctccatacccttctggtttatggaaacccccacgctctaactaa

SEQ ID NO: 47454 - DNA, 1491 bp, Acinetobacter baumannii
atgttaagaaataaattagcagttactgtcatgggcgttgcggtaattagtctggctgcgggtggtggtgctggatactggattgcacatcagaaatacaatcctcaatcaggtccgcaacaggctgccaaagtgttgtattggtacgacccaatgaagcctgaacagcattttgataaaccggggaaatcgccatttatggacatgcaactggttcctaaatatgcagatgaaaatactacgatgactgaagacagttatcctgcggttaagattgatccatccctccaacaaaatttagcaattcgttatgcttcagtcgaacaagctgtgatgggaaatactttgttaaccaatggtatattgcagaccaatgaacgacaggtagctattttacaaacaagagcaagtggtttcgtccaacgagtgtacggacatgctgttggggatatggtgacgcaaggcagtcccatagctgatatttcaatacctgaatggacaggagaacaaactgaatttctagctgtactccgaacaagagatcgttctcttattcaggcaagccgacaacgtttacagcttttaggaatcccacaaaatgtgattaatcaagtcgagcggacacatcgagtgcaatccaatatgactttaagtgcacctgtaagtggatttattgattcgttagaagtccgcaatggaatggctttagctatggggcaaacgcttgtcaccatcaaggggataagcccaatctggttagaagcatctgttccagaagcacaaattgccgggataaaacggggaatgaaagttgaagctacttttgttgcatatcctcaaatagtgtccggtaaagtcattgatattttaccaactttggatagcacgagtagaaccataaaagttcgtattgagttgcccaatagagagggattgctcaagccgggaatgtttgcttccgttaaattctccaacaacccacaaagcaatttagttataccagagcaagctgttatacgtacaggtactcggaacgttgtcattgtgggacatgagcaagggcgttttgaacctgttgtagtacagttaggtcaaagtgatggcaataaaattgcaattctaaaagggttgaaagctggtcagaaggtggtaatttcagggcaattcctgattgattctgaagcaaatttacaaggtgtattggataagctgaacactggacaatcgaagacttcatctcaagtggttaagacatcaatatatcaaggcattggtaaagttgaaaaagtcacagctcaagacattaccatttcacatcaggcgattcctgagttgggttggggggctatgactatgagctttaaacaaccagtgcaaccatttacccaaattcagcaaggcgatcaggtccgttttagttttacacatgctagagatacttacgttatttctgacatttccaagatgtctatgacatctatgaagaactaa

SEQ ID NO: 47455 - DNA, 3147 bp, Acinetobacter baumannii
atgattgcccgtattattcgtttttcaattgcaaatcgtgtatttgtcctgttggccgctttaattctggctgcttggggaacttgggccgtaaagaatactccggtcgatgcattaccagatttgtctgatgtacaagtaattattcgaactaatttttctggtcaggcaccacaaattgttgaaaatcaggtgacctaccctttaacaacaaccatgttatcggtgcccggtgttaaaactgttcgcggttattctttttttggtgactcatttgtttatgtcatctttgatgaacatactgacctttactgggcccgttctcgtgtattggagtatctaaatcaaattcaagggaaaatgcctgcaaatgcgaaatcttcattgggaccagatgccactggcgttggttgggtttatgaatatgcattagtagacccaacaggacagcatgatctttcggagctgagaagcatacaagactggtttttaaagtatgaactgaagacattacctaacgtggctgaagttgccacaattgggggaatggttaagcaatatcaggttgtcttagacccaagcaagatggctactttaggtgtcacacaaaacaatgtcattgaggcgattcaaaaagctaatcaggaaactggtggttcagttctggaaatggctgaaacggaatatatggtgcgggcttctggttatttaaaaactttagatgattttcgccaaattcctttacgaacaaatagtttcggtgttcctgtttctttaggtgatgttgcaactattcaacttggtccagaaatgcgtcgtggcatcagtgaattgaatgggcaaggtgaaacggttgggggtgtcgtgattttacgagcaggtaaaaatgcacgtgaaacgattactgctgtgaaagcgaagctagctgaattacaacaaagtctaccgaaaggtgtacaagttgttcctgtatatgatcgcagtcaattgattgatagagcagtagaaaatctcagccataaattaattgaagagtttattgtggtggctttagtctgtggactattcctctggcatttacgttcagcaatggtggctattgtttctttgccgcttgggattttatctgctttcttggtgatgcattatcaagggctaaatgccaatatcatgtcgttgggtggtattgctatcgcgattggcgctatggtcgatgccgcaattgtaatggttgaaaatgcacataagcatatcgaaacttggcaacacgaacatcctgagcaagtcttggaagcacaagtccgttggaacatcattacacgttctgccagtgaggtcgggccaactttatttttctgtctactcatcattaccttatccttcattcctatttttactttacaggcacaagaaggtcgcttgttctcaccactggcatttactaaaacctatgcaatggcagcagcagcaggtttatccattaccttgattcccgttttaatgggttattggattcgagggaaattaccttctgaacagcgtaatccactgaaccgttttctgatcaaaatatacagccctatgttggataaggttttagctcatccaaagacaattttacttggtgcattgctaattttccttattagtcttttccctttaacacggttaggtggggagtttctacccaatatggatgaaggtgatttactgtatatgccttcagctttaccgggattgtccgcagcaaaagcttctgagctactccaacagactgatcgaatgattaaaaccgttcctgaagttgcaacagtattcggtaaagctggtcgcgcagagtcagccacagattctgcaccattagaaatgtttgaaaccacgattcagttcaaaccacggtctgaatggcgttcaggtatgacacctgacaaattgataaaagaactagataaggcagtccaagtaccgggtttaacaaacatttgggtgccacctatccgtaaccggattgatatgttggcaactggggtgaaaagtccaatcgggattaaggtttcagcaaatgatctgcaagatattgatcgggtagcacagcaaattgaacaagtggctaaacaggtgcccggtgttagttcagctttagctgaacggctcacaggtggtcgatatgttgatgttgatattaaccgtatgcaggctgcgcgatatggtctcaatattaaagatgtacagcaaatcgtctcatcagcgattggcggggaaaatattggtgaaactgttgaaggcttggcacggtatcccattaatgtacgttacccacgagagattcgagattcactggaagccttaagaaatttaccgattctaactgaatctggtcaacaaatagtcttgagtagtgttgctaatattcaaattacagatgggccgccaatgcttaaaagtgagaatgcccgtccaagtggttggatctatgtcgatgtacaaggacgtgacttagcttcggttgtacaagatttgaagcaggccatagaccaaaaagtaaaacgttcttctgccatgagcattagctattcaggacagtttgagttcatggagcgtgcgaatgctcgcttaaaagttgttattccaattactttgatgatcatttttctattgctctatttgatttttaggcaagtacaagatgctgttctgattatggcaacactaccttttgccttgattggtggtatttgggctatgtacttgagtgattatcacttttcggttgcgattgctgttggttttattgcacttgctggtgttgccgcagagtttggtgtagtcatgttgttctatttaaagcaagcaattgagcatgcacagcaaagcctatcttcttcaacggcatccttaacagagcaacaactcaataaggcaattcatacaggagccgtgctacgtgttcgccctaaagcaatgacagtcgctgtcattttggcggggttaatccctattctgttggggactggaacaggttctgaattaatgagtcgtattgctttacctatggttggggggatgatttcagcccctctcttatctatgtttgttatccctgcggcatatcagcttttaatcaaaagaaaactatcaaagaattga

SEQ ID NO: 47456 - DNA, 1830 bp, Acinetobacter baumannii
atgaacagtaaaaatattgcacttattggtaacccaaattgtgggaaaacatctctctttaatactttaacaggtactcgtcaaaaagtagctaattatgctggtgttactgttgagcggaaagaaggtttttttaaactaccttctggtgaatcagttcgagttttagatttgcccggcacatacagcttaaagcctacgagtctagatgaagaggtaacaagggctgtatgcttaggtgagcttgagggtgaggttctacctgatatatatgtatgtgtggttgatgccactaatttacatttacatttaagtcttgtgcttgaaataagggcattgaatcgaccaatgcttcttgttttaaatatgatggatgaggtcaaaaagcgtggtatttcgatagatattaataagctatcagaattgttgggtatccctgttattgaggctgttgccgttaaaactaaaggcgtgcaagaactactaaatcaattagatcaaaaaaatctatttgtcactccttatcattctgatctgaatcattttgatcagattaaaaatattactaaacaggtaattttaaaaaatgataacggtgatgcaagaacagctttcttggataaaattttcttacatcctgtacttggtttagtcatcctaacgcttaccatgtttgtcatgttccaagccgtttttatctgggcacaaccttttatctcattaattgaaaatgcaattgcttggttaggtaatacaattggcccgcttattactcatccattacttagaagtcttattgttgatggggtaatcgctggatcgggtagtgttttggcttatatgccgcagatccttatcttattcttctttattttaattttagaagaatcaggttatttgccacgagcagcattccttttggataaattaatgtccaaagctggtttaagtggacgttcctttattccactattgtctagttttgcctgtgctattcctggtgtcatggcaacacgaagcattagttcggaaagagatcgtctagcaaccattatgattgcgccattaatgacttgttctgcaagattacctgtttatgctttgctaattgcggcattcattccaaacaaattagtttatggttggttgagcctacaaggtttagttctttttggactatatatggctggaattgtttcagcattatgtgtttctttatttttgaaactagttagaaaagataaaacagaaagtatttttatctttgagttgcctacttatcgattgccagatattcgaaacgttgcattaggactttatgatcgagctacgatctttctaaaaagagttggtggtattatcgtagcattatctatattgctttgggtgttggttacgttccctcaaccacctgagcatgccacgatgcctgctatcaactatagtttagctggacaacttggacacattattcagcctatatttgcacctattggctttacttgggaaatctgtatcgcattaattcctgctatggctgcaagggaagttgtcattgctgctttaggtgtaatttatgctatgtctggagatgaagatactgtaactcaaacattgttgagtcaaatctctggtcctgatggttgggggctagctacagggatgtcattattagtttggtacattttcgcaccacattgtcttgcaacattagcgaccattcgtcgtgaaactggtagctggaaacagcctgttattatggcgacttacttatttgggcttgcgtatttctttgccttcattacatatcagcttattagtagactttaa

SEQ ID NO: 47457 - DNA, 435 bp, Acinetobacter baumannii
atgacaacttcattagatgtaaagatttatcacaatcctgcttgtggcacctctcggaatactttggctttgattcgcaatacaggaattgaaccaaccgttattgaatatctcattacaccacctagtcatgacgaattagttaaattgattcaggatgcaaacttaacagtaagagaggctattcgtcagaatgtagatccttatcgggatttacagcttgatcgtagtgatttgagtgatgaacaactactcagttttatgcttgaacatcctattttgattaatcgaccatttgttgttactgaattaggtactcgcttaagtcgtccttcagaagctgtcttagatattctgccattaccacaaaaaggtgctttcactaaagaagatggtgaacaagtgatcgacgaaaatggtcagagagtaaattaa

SEQ ID NO: 47458 - DNA, 324 bp, Acinetobacter baumannii
atggatcaagttaatttttttaaatgcttatcagatgaaacccgtctcaatattgtcactttaattgctgagaataaagaactctgtgtttgtgatctgacagaaaagctacaactgagtcaaccaaagatttctaggcatttagctttattacgctcttctggtctcttacaagacagacgacaaagccaatgggtgtactacagcattaatcaacaacttccagcatggtgttttgaaattctagatactttaaaaaaaacatcatctagtcaagttgtaagcaataccaacacgctttctataaatagttattgtgagtaa

SEQ ID NO: 47459 - DNA, 474 bp, Acinetobacter baumannii
atgaaattcctttttttgtgtactggaaatagttgtcgtagcattttgtctgaagtgctttttaacagtcgtgctcctcatgactggaaagcatacagtgcaggaagtaagccatcaggacaggtgcatccattgactattgaaactttggaaaaccttggtctttcaacagaaggtttatggagtaaaacaattgatgactgtgagcaatataaacctgaagtagtgattactgtgtgtgattcagcagctcaagaagcttgtcctctttatttagggggagcgatcaaggcacattggggcttggctgatccatcacatttagacttgcctaaagaggaaaaattaaaagctttcctagtgacagtagaccatatcaaccgtcgtttagatgctttatttgcacttgatacagcaaatatgtctcgtcctgaattaattgctgcaatcaatcacatatcagatattgaatga

SEQ ID NO: 47460 - DNA, 1041 bp, Acinetobacter baumannii
atggctcaacaaagactgtcatttttagatcgtaaccttacgctatggattttcattgcgatgggggtggggattgcgataggtgtcttcttacctcaagcttctgttactttagacaaaatgagtgtggattctgtcaatattccaattgcgattggtttgattctgatgatgtatccaccgttagccaaagtggactatgcagctctaccacaagtatttaaagacaaaagaacattaactttgtctttagtacagaactggattattgctcctgtattaatgtttgcattagcaattatttttttgcatagctatccagagtatatgactggactaatcctgatcggattagctcgttgtattgcaatggttttagtttggaatggtttagcctgcggcgataaccaatatgtagcagcattggttgcattcaatagtatctttcagattttgttctttagtacttatgcttggttatttcttaccttcttaccaccttattttggtattgctgggcaagtaatcaatgtggatttttggacgattacccacgcggtattgatttacttgggtattcctttttttcttggtttcttgacccgtttgatcttagtcaacgccaaaggcttagagtggtaccaaaatgtctttttaccgaagatcagtccattaagtctattggcattactgtttactattgttgctatgtttagtctcaaaggtggagatgtagtgagtctgcctttggatgtaattcgaattgcgattccattaacaatttactttatcgtaatgttcttcattagtttctttatgagtaagtggatgggtaatgactacccaaaaactacagcaatttcatttactgctgcgggtaataattttgagttagcactggctgtagccattgcaacctttggtttagcatcgcctgtggcatttactacagtcattgggccattagttgaagtaccagttttgattgctttggtcagtgtctctttatggctaagaaaaaagtattttgaatcggtgtaa

SEQ ID NO: 47461 - DNA, 318 bp, Acinetobacter baumannii
atgacaaaaccaaactatacccccgaaattagagaaagagcggttcaattactaattgaatctgaaaaagattatccttctacttgggcagcaatcacagctattgctcctaaaatcggttgtactcctgaaacattgcgtgtttggtatttaaagcatctggatcaactaaatcctgccaaagtacaacagatatctgaccaagaaaaaatgaagcaaatggaacgtgaaattaaagaattaaaacgtgccaatgaaattctacgcaaagcagccgcttttttcgcccaggcggagctcgaccgcccacacaaataa

SEQ ID NO: 47462 - DNA, 285 bp, Acinetobacter baumannii
atgagcaaagttattggtgaagttaatttgagccctagcagtattgaaggtactccggatcaggtagctgttcatatttttgaaaaaatcatttgtccaagtactgaggagcttctcaaaaataatcctgaggctgcaaaggtttttgcatatcacatttttggtttagcactgtctcaactagcagagtttcattcaaccaaaagtctagataaagctgtaaccgttactttgcataaccttttgcgccaactgaacaaagaacgtaatgaattgaaaaattaa

SEQ ID NO: 47463 - DNA, 669 bp, Acinetobacter baumannii
atgaataaagaagctgattacacaattattggatgtaaagatgaagttgaatttataaagctactgggtaatccatatgtatatgaagatattataaatagttcaattgataacctagatccagacaattttttaaatattgaagaatattattcacgaatggctgattttcaatgcttgaaattgagatataaaaatgaatttattcaaaaaaactctggtgcagaatttcactggtactttatcgaaggtcttgaagcctatataaatggacattttcttcctgctttattaagcctaatatgtggaatagagtcttctttaagatcgacacttcatttgatgagtgatggtgaagaagatagattgtatgtaaataaaattatgaataaagagatgattattgatgctaaaaataaaggtttacctatttcagcactagcttttagtaatgaacaagattttcataaaaaaataacaaatgatgaaaagatcaatctaattaagctaagaaatgatcttatgcatggaaatattcgtgaattcacagaatattttgaagagcaaagaatattttatcctgaacacttaattgattccctagttgaaataatcttgatatcaaaaaaatggataaaagagttaagtgaatttaaaaatacgatttaa

SEQ ID NO: 47464 - DNA, 6045 bp, Acinetobacter baumannii
atgaataaaaatctttatcgaattgtttttaacaaagcgcgtaacatgtttatggcagttgctgagaatgtcaggagtcagagcaaggcgacaggacaatccacatcctcagaaatagtgagttctgggcaattactggtacaagaaaaatcatttcatcaactgtggcatgtcaaggcattagtaacaagtatgagcttaatggtaccttttgctccagtctatgctgatatcattgcagatagtgcagcaaatgctgcaaaccgagctgtcattgctgctggcaagaactcagcaggcacaacagttccagtggttaatatccagactcctaaaaatggtatttcccacaatatctataaacagtttgatgtgttggctgaaggcgctgttttaaataatagccgaacaggagctatcaccaaaacggtagggggcgtgggggcgaacccatttttagcgactggtgaagctcgtgtcatcctcaatgaagtaaattcaacagtcgcttcacgctttgaagggaatttggaagttgcagggcaaatggcagatgtgattattgccaacccgtctggtattaatattaaaggcggtggctttattaatgccaataaagcaatttttactacaggtaagccccagttaaatgctgatggcagtatcaaacagttcacagttgatcaaggaagaattacggtttcagcaaatcctaactcgaagtttggattagggggaaataataatgatgcaaactatgtggacctctatgctcgtgcattagaacttagtgctgaactacgtgccaaaaatgatattcaggtgattgccggggcaaataatgtcagtgcagatttgcaggatgttacagctaaaacaggtactggaactgcaccgacattggctgtggatgttaaagctctaggtgggatgtatgccaataacatatatctgatgggtacagaaaagggcttgggcgttaccaatgcggggacacttcaagcagtcaacaatctggtgattaccagtgcagggaaaattgagcatagcggtactatcagttcaaccagtaaaacccaaggtttagtcagtgtgcaaacaacgggtgttggtgtagctgcagatatcaattcatcaggtagtatcaatagtaatggcatgctcaatattgattcaggtaataatctgaatgtaaatgctaaagaaattattattaataatggtagcttggcttcctctcctttaatcatcaatactaaagggaatttaaatttagcagcaaatagtcgaatttttaatgatgcgcagagtggggagttatatgttgatgcagcgaacatcaatctggcaactaacgcaggcataaccagtaatcgtggttctgcttatattcagtcacaaaaagatgtggttgcagcacaaggtgcaaaattaatagcagcacaaaatttaaatgtatctgggcgaggtaagctctcactaaacgaaaatcagatacaggcatccttgggttcaataaacctacaagtagattcttcaaatacagatggtttaattgatattcgaggtgggactatttatgggggtaaagatttaaacttatatagttcaggagatgtaaatttacagaatcttggatttgcacttgaaaattctgtaacacgagtcaagaacattaatgctcacagtgggcgtaacttggtctggaacaatgcaacaaaagttctaccccagattacagggaaagttgcattggatgccgagaataatttaagtctttcatcacaagggttctctagtaaaggtggtattcagctacaagcagatcaattaacattaaatactgctcttacttctcaaaacaatattagtttaaccgcagaaattgctgatttggttttagataatgcattgactgctcaaaatgatattaacgttacagctctagcgggtaatttaaaaactttcagcttaaaagctaattcaatagctggaaagatttcactgcttgcgaacaaagatgttaacttatcatctatgcaacattttgattcaatggcttcttatgatataatcactactgataaaactaatattaacggagctaaaggcgttgttgttggttcaacaggtgaaggtgctttaagtatctcagcaacagatataatggccaatcaaggtgatgttcaacttataagtaataatggccttaaaatcttggcgaataatgatgtaagtatgcataatgatgataatggccgatcagttttaagtcctacgactattacagcacagaatattaatatcaataataagaagaatgatttagttgttgataatggaacaagttttatagctgctaatgagttgaaaattaatagcgaaggaaaattaaattttaaaaatagtattttaaactctaaaggtaacactgaaatatcgtctaaagatcatttaactttgttaggtgttacagctaattctgataagcatctagccttaagtagcaagaaaaatatttatattaatggtgaatatggtacaactacagtttggacaccctatgttgaaagtaatttaacagccaagggtattttgtcaatgacaagtggcggtagccacgctgctcaaaatactacctatactggtggggcaatatcattagaggctggcaatgttttgactacaccttctaatgcaacattaaccttaaatgcagttgatagtgcttttctcagaagtgatcctgctctcaaagatttaaatggtgatcttaccatccagaccaatggtgctttaacgattgacccaaagatccacacgttgaatgctaaaggtgatgtccagcttatttcaaaaaatggagcattaaacctgaatgggtatggaggaaaaaatggaaatggatcagagcaagttgtaaaaatacaaacgactgatggcaatattaatttaattggaacaaaagtgcatattaatggagcaaagttacaagctagctccagtaacgcttttataccaagagatattaacattatagcaacagatggtgatgttgtcattagtggtgttaagaatacggcagttgattacgttacacaaaaacgtattcaagaaattggcatagaactgtctgctttagatgcgcaaattgaacgatataaacaagatcaagctaattataaagcacaaacttttgagtctatggtgcagcaaagaaatatcatgtctcaaggtttagaaatgttaaaaaccaaagggaaggcaatcgagcattcatatgcagaaatattaccatggacaaaggctgcggctatcggtacaggtactccctattgggcgaaaggtaatgtcaatatattgtctaatggcggtatcaaactggaggggactcaagttgatggacttagtgtattaataagggcaaaaggactgttatcccaagatccagatgttggaaataaaacagaaattttacccaatagtgtcgttatacaaaaatcgcctaccagtatttatattgctggactgttagatgagtttgaatatggagtggctggagcaaataattatgggtatgccagttttaatactccaagttatattaatggttcaaaatcggtaaaaatagaaacgcttgggggaaataatggcttaacaatagtttcttcttccttaaatggtggaattgatggagtaaatttagctgcttctggagatttacgtttagaagcaactcaagaagaattatataaatactccacaaaaacttataaaactggcaattggtataaacgtaaaacggttacagaaacggaaacttataataccaatacacctacacctacttctataatttcaaatagggatattaaaatctcttcgaatggaagcctcacattggtatccacagatttacagagtcatgatggaaatattaacttaaatgcagggggttatttaaggctctggactaaaccgacaagccagttcagtcaaattgacgtgtccaaaaagtctaagctttttggggtgaaatataatacaagtacagtgagttcaactcgttctgttgaatctgagttgccagctgtattggttgctcagcgaaataccaatttaagttcaggaaataccacatggattagaggatccgagtttgaaaataaacttggtcatgctgaaattaaagctggtgtcggtgaaaatgcagttgagggggcgcaaattattctacaagatattgttactaagataaccgaaactaaaaaaagagattctaactcagttgtctggcaatctatgcaggataaaggctctattacagaaacagccaaacttccaagttttaatggtcccacaccaccgatctttaaagccactggtgggctgagcgtacaaataccgataagcgaaaaagatgccaataaaatagtacttcgggatgaaattttaaaattagcaaaccaatctggaaatacttaccttaaagatttagtcaatcgtaatgatgtggattggcagaaggttctccttactcaaaaggattgggattataaatcacaaggtttaactggagcaggggcagcgattattgctattatcgtcgtagcagcaactgctggagcgggggcgacagtagtcggtgcactaggtggaacagcatcgactctaggtggctctgctgttgcaatgagtcaagcagcaattacgactatagcttctcaggctagtatcagtttgatcaataatgggggagatattggtaaaactctaaacgatttgggtagtaaagagtcgatccgaaatttagcagcaagtgttgtaactgctggattattaagtcaggtaagtacggcattgaatcttaaacctgatagtactttatttcctgatcgtttaatgaataattttaccacctctgtaggatccaccttggtacaaactgccattaatggtgggaatcttggcgataatttacaggttgctttactagcaggtctagcgggggcattacaaggagagttagctagtcagattggaacaagtttagataaagttgatccgaatatatttgaatatacaattcataaaattgctcacgccgctgttggatgtgcaacagcagctgcaacgaagtctagctgtgaggcaggtgcgattggcgctggcgtaggtgaaatagtggcagggttaatgccagaaccagccaatggtattgaatatactgatgcagaaaaactaaaaatccggaatattggtaaattagtttctggaacggttgcagcatatacaggttatgatgttaatactgctgcgaacagtgctgatactgcaatccagaataactctttagttcgattagcaacaactacaggcaaagttttagtgaaaactttggataaatataatgctttaagaaaaacagggaaacaagtcacaaaagatgacatcgtagcatccttaaaggagcagagtgctgatgagctaataggtattgctgatgatttattgactgtatttggccgaagcacctctccatttgatcgggcaatggctgcaatagatttggttgttggcactgatttaaaaccaggcaagggagagtcattaaaacttgcaaagagtgagctagataaattaaaaatagatcgctcttatgttcaaacagtttatcaaaatagagtagatgttgttacacgcaataggatgaatggaaaggagtttgaaaccagtgttgcaagtaaattgggagtaaagcgaaataccgatcgacaaatgattactataaaaacagagagagatgggcaaattaatattattccagatgcattcggtaatggcggcacattagttgagttcaagaatgttcaatatcttacagatactaaacagcttagaggctatgctgcaacaggaaaaccagttagtttggttgtgaatatgaacacaaaaatatccgaaacagtaaagaataatattttatctaataagggaacaattcaaagatttgatcctattaaacagacactccacccatattag

SEQ ID NO: 47465 - DNA, 1401 bp, Acinetobacter baumannii
atgaagtttaaacgccctattcatagtaaaatttttactccaaatatgttgagagagccccaagatttttttaaaagagtacataattactgtaactttttcccagaaatgcttccagagaagtgtggtttttgggaaccattaaaaaccccattttcacctgagataatagaaaaattagttcctaatgacaaagggggagccgctgatcgattattgtgccaacgtttaaaaaagcctcgttatcaaggaagtttttggccttcattgcatggagagacgcatagtgaggaatatcttacctcagagtttactcaaattgatcagcataaattgataaattatctgaaaactactaccttacaatttaatgcggacttagcaattattgatgcaaatcgtcattcggaaccacagttaggaattaaagaaggatggcgtggggtaacacctttttcccatgaactaaaacattggttaccagatatgtattggggaacggtatttggtaaaccttatgtcgatttatttggcttagagtgtttattgtctacccccgcgtataaagtagaaaagttatcagatgatgctgtttacattcaattaactgagcaagtacaagatatatttgaaaaaacagaacatgtggatgaacagcgtgaaatagttaaacatcatttgggttctgatgccttttggtcaccagaaaaggcttatgtaataaacacggattatagagttttaaaaggcttatctgaacataatgtaattcatattcctttgcagactaattatactgatgtcttccgtgtgcctcattttaatttaatatcagatgcttatatgcaagcagaagtaccgccggaaaatatttatacatatttgaaggaaataaaggaatttggtaccgatcaatggattattcaattgtctcaagcatggttattacgcatgtttgatcctatagcacttggttatggtgttgaggatgtttatagtcatggtgaggtaagtgaaatagagtttttttataaaccagatggatatgacgctcctatagaaaaggaactatttattggagcgtgggatcgaccagagcaagaaacaatgagccgtcagaagtatgctgaatccatacttcaagtattagctagtaattacccattagcgcaatcagaatggtcaaatgtagaaagtaaagttgatcattttgaggaatattcagaagtttatttagaccaaatcgatcaacaagagtttaatttgtttcgtatagcaattaaagtaattgtatttgagcggttttttgttaaggtcactttcatggattattggtgtaatgacttgagtgaatctcaagaaatttctaacccaatttttaactcgtttaaagcgaagtaa

SEQ ID NO: 47466 - DNA, 345 bp, Acinetobacter baumannii
atgcgcctaaataaagacaatgtaattaactctatctgtatatttgcaatggtaactgcaatatgttttatgttgatagtaatgctcaaatctttttacggacaagtgatagagattacgtttattaaagatatattctctataggagctacgctgtttgcagctttaattgcaatatcactatttaatgattggaaggttcaagaaacttttaatcgaacccaacgactccatgacgaaggtgttgatataattttaaagacaacaaaaaaacttaacaatttgaaagctcaaatacagattaataaattactttttactgaaggtaggcgaattcaaacatga

SEQ ID NO: 47467 - DNA, 525 bp, Acinetobacter baumannii
atgaatcatttcattaatgcattagaaacatcaattcaaacagaaaactggtattcagtattatttatttcgctttctttaccagatatttgtgggaaaatagatgaacctaacgaaaaatcttcaaaaaagagaatgattaattggtttaataaatatcttaaatctgtttacacacgcaaaattggagctgatcagacggaatatacctttctaagtggtgcagatttttatgcattaagatgcgcatatcttcacgaaggtagtgatgaaataacaggacaaaatgcacaagaaaccttagaaaagtttaagtttattcaacctagttcaaataatttcagcatgcacaggaatgtaatgaataaaacacttcaacttcaggttagcgagtttggtaaagagattctggcagctttaaggcaatggacagaagacaataaggacgatcaagttaaacaagaacaaatcagcaaacttttaaatattcaaattctagatttatctaaaggtttttctttttaa

SEQ ID NO: 47468 - DNA, 1671 bp, Acinetobacter baumannii
atggctcgagtaaaatacgatacaacgggacgatacgcagatcatccgcaagaaattcatgatttgctgtctaaactgcactttgatactgcccacggccaaatctggtttgatgaatatcgaatgctgcttttacacaccagcattatgggatatttgcgtaaagacttagcgcacatgattgggcttgagcggaccaagcgtttctttattcgtttagggtatcaagctgggttaaaagatgcagaagttacaacaaaaatgcgtcccgatttaaatgaacacgatgcttttatggcgggtccacaaatgcacgccattcgtggaatggtgcaagtacaggccaaccagctcaatttaagccacgataaaaaacagttttatgccgatttaaattggctcaattcttttgaagccgatgcgcatttagagcattttggcccaagtgatgaacctgcgtgctggatgcttctgggttatgcgtgcggctacagtagttttgcgacgggcatgaccattatttatcaagaaatagagtgtaaagcttgcggcgatgagcattgccgtattattggtaagcctttagaagagtgggaaaatgctgatgaactgattcagttcatgtctcccgaacccatggaaaaagaactgattgcgttgcaggctgaactttttgaacttaaaaaatcaatttatagcgacagtgaagccgattaccaattatttagttctgtgggtaagtcagcatcttataaacaggtctgtgcattattaacaaaagcagcaggttcgaaagtttctattttgctacaaggcgaaaccggcgttggtaaagaagcttttgctcgaggagttcatgaaaatagccaaagaaaagagcaaccttttattgcagtaaactgtgcagcgattccaccagagttaattgagtctgagttatttggggtagaaaaaggggcttatacaggagcgcatcaatctcgcttggggaagtttgaacgagccaatggtggtacgatttttttagatgaagtgattgagctttctcctcgtgcacaagcagcactattacgcattttgcaggaaggtgaatttgagcgagtaggagattcacagacacgtattttagatgtccgtgtaattacagcaaccaatgaagatcttgagcaggctgtaaaaacagggcgatttcgcgcagatttatattatcgcttaaatattttcccagtgcagatcccgcctttgcgagagcgccgtgaagatattcctttattggttgaacactttcttcatcgctttgaaaaaatgtacggcaaaaccattcagggtgtaagtgaaaagaccaaagtttttatgcagcaatatgaatggccgggaaatattcgtgagttggaaaacttattagaaagggctgttttattaacggatgatcagcagctgattaagttaaatgccattttcccacagatcaagcatgaccctgagcaggttgtagctgttgaaactgactttgagcaattattaaaggcagagtttaatttagaagaacatgagaagcagttaattttaacggctttaaaaaaagctaatcataacgtgtctgaagcagcacgtttattgggaataactcgggcggcactggattatcgaattaaaaaatttcagatttga

SEQ ID NO: 47469 - DNA, 288 bp, Acinetobacter baumannii
atgacgcaacctcaagtcgaagcattaaccaaatatattcgggtcactggtgacttaaacgcagagtttatcgaattcgattttgccattcacgacccaagtctatttgtagaactggttttgcctaaacatgcatttaatgatttttgtaagaccaatcaagtagttgaaatgacccaagagcaacaagcttttaatgatgctcaggaagaaaaatggcgctatggcactgaagcaaccttagtcggcacgcaacgtaatagcaacgatcaagatgatctgatgtaa

SEQ ID NO: 47470 - DNA, 1002 bp, Acinetobacter baumannii
atgactttagaaatcaaaacttcaaatgtcgaacccatccgccagaactatgcctatatcgaaagacgatttggcagtaagccagcaactcgatatcaagaagtaagtttcgatgtacaggcagaaactaactttcactatcgtcctttgtggaaacctgaaaagactttaaatgacaaaacccatactgccctgcaaatgcaagactggtatgcatttaaagatccacgtcaattctattatggaacttatgttcagcaccgtgcacgtttacaagacactgcagaaagtaattttgctttttttgaaaaacgtcagcttgcagaacatctgtctgatgaagtcaaagctaaggtcattgagtgcttattgccatttcgccacgttgaacaaactgcaaacttacacatgatgtctggcagtgcctatggatatggcacggtacttacccaagcttgtatttatgcggcaatggatcatttagggatagcgcagtacatctcacgcattggtctagctttagatggtaatagcggcaattcattacaacaggcaaaactggcttggatgcaacatcctgcatggcaaggcttacgccgtctgtgtgaagaaagtctcaccgagcaagattacttcaaacttttcttattacagaaccttgtgattgacggctttgtgacagagcttgtttatcaacagtttgatcagtggttagtcactcaaaatgctcgtgacttagccatgttgaccgagtttatgaaagatactttaggtgatttacgtaagtggtcagacaccgtcattaaaactgcggcagcagaatccgatcacaacaaacagctattaaatgaatggttcactcagtctttggctgatgtcaaagctgcctttacaccatgggcaacagcagccttaacagcagatgcagtcgatcaagcagaacaagccgttattgaacgtgcaaaaaaactaggcctacaaccagaacttgcaaatgcttaa

SEQ ID NO: 47471 - DNA, 267 bp, Acinetobacter baumannii
atgtctaaagtctatctcgcattacaagacaacgatacttcacgctatatcctcgaagcgattgaagaagataaccctgaagcttcaattcagtatttaccagccatgattcgaattgaaagtgaaactgatttggtcattaaagctgaaaccgtatctgaaaaactaggccaagattgggacatccaatcattacaactcaacatgattacgctgggcggcaacgtcgaagaagatgacgatactttccgccttcactggaattaa

SEQ ID NO: 47472 - DNA, 1527 bp, Acinetobacter baumannii
atgacaactcaaacgaaagaaaccagtaaaaaattaaatgcgaaagatcgttaccgtgcattaacccgtgatctggactgggacttttcctatgctgaccgtaaagatgccttcccttatgaagagtttgaaggtaccaaaattacggactggtctaaatgggaagatccattccgtttaactatggatgcttactggaaatatcaggcagaaaaagagaaaaaactgtatgccatttttgatgcctttgctcaaaacaatggtcagatgaatgtcagcaatgaacgctacttaaatgcgatcaaactctttttaacggcggttaccccacttgaatatcaggcttatcaaggctatgcccatgtaggtcgccagtttagtggtattggagcacgtattgcttctcagatgcagtcgattgatgagctgcgtcatgtacagactcaaattcatgccatgagccattacaacaagttctttgatggctttcaggactgggcgcacatgcatgaccgcgtttggtatttgtctgtacctaaatcattttttgaagatgcccgttctgctggccctttcgaatttttattagccattagttttgcttttgaatatgtacttaccaacttgctgtttgttccgtttatgtcgggagcagcttataacggcgatatggcaacagtaacctttggttttagtgcgcagtcagatgaagctcgccacatgacgcttggtcttgaaatcgtgaaattcttgctcgaacaacatgaggacaatgtgccgattgtgcaggaatggattgataaatggttctggcgtgggacgcgtttgctttcaattgtgggcatgatgatggattacatgctgccaaacaaagtgatgtcttggaaagaagcttgggaagtttattttgaacaagcaggcggtgcgctatttaaagatttaagtcgttatggcattcgcatgccgaaatatagcgatgtcattgtgaaagaaaaagagcatgtctcacatcaggcatggtggattttctataactttggtcatgctgctggtttccatacttggattccaaccgacgaagaaatggattggttatctgctaaatatccagacactttcgataaatactaccgtccaaaatgggagttggctcgcaaaatggaagccgaaggtaaacgcttctatagcgcaggtttaccacagctttgtcaggtttgtcagattccaatgacctttaccgaaatgggcgatgacccgactcagtttagttatcgccatagcatctaccaaggcgaacgctaccacacctgttcagatggctgtcatgacattttcgagcgtgagcctgagaaatatatacaagcatggctacctgtaaatcaaattttgcaaggcaactgtggtggcggtgacctcgaaaccatgctccgtgattattaccgcatgaatgtcggcgccgacaatctggatattgaaggctcaccagaccaacaacgctggaaaaaatggaaaggcaacgcagcttaa

SEQ ID NO: 47473 - DNA, 363 bp, Acinetobacter baumannii
atgactgttcacgcgatacacaacaactatcaatttgaaccacttgatttgcaaaaaaattatggcgatcaattcttactttacgtgggttgggatcatcacacacttttttgctcggcacatgccatgcttgcctcgcctcaacaaacttttggacagttgattgagcaacaaattacaggtggttttgcccaacatccagattttgccaaaattgattggtcaaaagtgcaatacaccttagatggtcaaacaatcaatccagagaatacacaaagcttggcagagcttggttttgggcataagtcattacttcgtttcgttacgccagagttaaatggctataacgacagctacgtttaa

SEQ ID NO: 47474 - DNA, 1062 bp, Acinetobacter baumannii
atgagttatcaagtcaccattgaaccgatcggaacaacgattgaagtagaagaagaccaaaccgttttagatgccgctttacgtcaaggcgtttggttaccctttgcctgtggtcatggcacttgcgggacatgtaaggttcaagtcagcgacggtttttacgatgttggtgaagcctctccatttgcactcatggatattgaacgtgatgaaaataaggtgcttgcctgctgctgcaaaccacaatccgacatggttattgaagccgatgttgatgaagatccagatttcttaggtcatttggttcaagactatcaagcgacagtcattgaaataaaagacctgtcgccaaccattaaaggaatccgactacaactagatcggccaatcgaattccaagctggccaatatatcaatgtccagttcccagatattgaaggaactcgagcgttttcaattgccaattcaccaagtgaagtcggcatcgttgaactgcatattcgtaaagttgaaggcggtgcagcgaccacttatgtacatgaacaacttgccacaggtgatcagctcgatatttcaggcccttatggacaattttttgtacgcaagtcagatgatcaaaatgccattttcattgcaggtggctcaggtctttcaagtccacaatcgatgattttagatttacttgagtctggagatagtcgcacgatttacctcttccaaggagcacgagacttggcagagctgtacaaccgagaattgtttgaacaactcgtaaaagactatccaaacttccgctatatccctgccctgaatgcaccagaaccagaagaccaatggactggatttaccggattcgtgcatgaggctgttgccgattactttgaaaatcgatgtggtggacacaaagcgtatttgtgtggcccacccatcatgatcgactcggcaatttcaacactcatgcaaagtcgcttattcgaacgggacattcacactgaacgcttcttaagtgcagccgatggtgctgccggacaatcgcgttcagctttattcaaacatatttaa

SEQ ID NO: 47475 - DNA, 882 bp, Acinetobacter baumannii
atgaataacaaaatctctgcaatcatatgtggtgtaatcagctccctttaccttccgtctgcatttgcgacagaaaatggctcagactcttttgctttaggtgccgaaggtatgatggcaggtgctctaccacctgctggcgtctacttactcagttattatcaaaattaccacgcatcagagtttcaaaacggtcccaatcagttccatgttgatgtcaacgctgtggttccgcggttggtttggatgaccgatcaaaaaattatggatggacaactcggtttttatgcagcccaaccattggtttatcaaaggcttaaaataaatggaatggctgactcaaaccaaggtctcggagacttgattttgggtggcatgctcggctggcatcaaggaaatcatcactggattgcagccctagaaactgtgctcgggacaggtgaatatgacactccaagtgcgacacatccagttgaagccaatctcgggaaaaactatcacaccattcgaccaattattgcctatagttatgccaacgcggcaggtttagatctatctactaaattgtcttatagctggaatacgcgtaatgacgcgaccgactaccagtctggacaatacattgcgggtgactatagcttgggttatcgcattaacccaaaactcaaagttgcagttgaaggctatgcctttaaacaaaccacagatgacaaagtaaacggaagtgacattgggtttaaaggacaggcttttgcaattgggccaggcattcaatatgccgataagaattggtctattgaagccaaatttctaaaagaaaccgaagtcgaatatcgccccgaaggccataccagctggctaaaattaatttgggctttctaa

SEQ ID NO: 47476 - DNA, 960 bp, Acinetobacter baumannii
atggaactaagacatttacggtattttgtggctgttgtagaagaacagagcttcaccaaggcagccgaaaaactatttattgctcaaccgcctttgagtcggcaaatccaaaatttggaaagtgagcttggaattcaactctttgagcgaggaagccgccctttacagaccacgccagcagggcatttcttttatcagcacgctgttaaacttttgtcgaatgctgaagaaataaaaagtatgaccaagcgtattggtctcatcgaaagaagcatgaccattggttttgtcggttctttactttatgggttgctgcctcgaatcatttatttatttcgtcagcagcagccgcatctaaatattcagctcatggaattaagtacaaccgaacagttacaggcattaaaagaaggtcgtattgatgtcgggtttgggcgtttaagaattagtgatcctgccgtgagacgaattcttttacgtaaagagcgtttggtcgttgccgcgcataccagtcatccaattgcacagcgcacagaaggggtatatctggccgatttgattgatgaaaagatgtttatgtatcccacttcaccgaaacccaatttttcgacccagcttttgaatatttttgccgaacatagtttggttcccaaaaatatgcatgagatacgggaaattcaattggctttgggcttagtcgcagcgggggaagggatctgcattattccagcaagtgctgataccattcgatttccacacttaaactatattccgattttagataacggcgcggtcagcccaatttttattactgcacgggcaatggaccgaagtgaagacttacaatcattgttcgattgtatttatcaggtttatgacttggaagggataccttatcagcgaactgtttttacacttgaccagaacccgatagatgattcaaatggtatcgactcttaa

SEQ ID NO: 47477 - DNA, 1383 bp, Acinetobacter baumannii
atgccacgtattcctgtaatcaataccagccatcttgaccgtattgatgaattacttgtagacaatattgatacaggtgaatttaaacttcaccgctcagtttttactgatgaagccttatttgacctcgaaatgaaatacatcttcgaaggtaattgggtttacttggcacacgaaagccaaattccaaataataatgactactatacgacttatattggtcgtcagccgattatcattgcccgtaaccgtaacggtgaacttaatgccatgatcaatgcatgttcacaccgcggagcacaactttgccgttacaagcgtggtaacaaagcaacgtatacttgccctttccacggctggacttttaataactcaggtaaattactcaaagtaaaagacccaactgacgcaggttactctgactgttttaaccaagacggttcacatgaccttaaaaaggtagctcgttttgagagctacaaaggcttcttatttggtagcttaaatcccgatgtttcttcgcttgaagaatttttgggtgaaaccaccaaaatcattgacatgattgttgaccagtctgaacatggtttggaagttttacgtggttcatctacctatacctacgaaggcaactggaaactaactgctgaaaatggcgccgatggttatcacgtttctgctgttcactggaattacgcagcaacaactcaacaccgtaaagaaactcaagctgccgataacattcgtgcgatgagtgcaggttcttggggtaaacaaggcggtggctcgtatggctttgaaaatggtcacatgttgctgtggacacaatgggcaaacccagaagaccgtcctaacttcccaaaagcagacgaatacaccgaaaaatacggtgaagcgatgtcgaaatggatgattgagcgttcacgtaatctttgtctgtatccaaatgtttatttgatggatcaattcggttcgcaaattcgtgtacttcgcccactttcagttaatcgaactgaagtcaccatttactgtatcgcgcctaaaggtgaagcacctgaagctcgtgcacgccgtatccgtcaatatgaggatttctttaatgcttcaggcatggcaacaccagacgatttagaagagttccgcgcttgtcaggcaggctacgcaggtattgcccttgaatggaatgacatgtgccgtggttcaaaacactggatttatggaccggacgatgcagcaaacgagattggtttaaaacccatgttaagtggaattaaaactgaagatgaaggcctgtatctggcccagcatcaatattggttaaagaccatgaaacacgcgattgcatcagagaaagaaattgctgaacagggagaaacagcatga

SEQ ID NO: 47478 - DNA, 231 bp, Acinetobacter baumannii
atggatggtaaaggtcgatgggttgataatgtgatggttgaacgattatggcggagcgttaaatatgaagaggtgtatctcaaagcctacagcaatgttttggatgcgaagaagcaattaaacgcatattttgaattttataatttgaaacgacctcattcgagtctggacaaaatgactccagatgagttttactatgaccagctaccacaacaaaataaggtagcttaa

SEQ ID NO: 47479 - DNA, 1956 bp, Acinetobacter baumannii
atgaaaattaagtttttaacagtttcattgatgcttattctgccattttctgtttttgcagcaaatactgtagtagaaaaagcggtcattgaatcaaataatacatataaggcgaagtataacttagaggatatgactgagtttaatcaggctcaaaagggctttattgccaagccaacaggtcaaattaaaagtgagaaaggcaatgttatctgggattttgatgcatttagttttttacaagatcaagcaccaaataccgttaatcccactctatggcgacaagcaaaattaaacaacaatgttgggctatttaaagtaacagatcgagtttggcaaattcgtggttttgatttggcaaatatgaccatcattcagggtgatactggctggattattgtggatacattaacctctaaagaaacggctgaagcagcacttaaatttgctagacagcatttaggtgagcaaaaaatttcagccattatctttacccatagccatatcgatcattttggtggtgcattaggcgttctttctagcgaagaaattaacgctagaaaaactccaattattgcgccaaaaggctttatggaagaagcgaccagtgaaaatgtgatggcaggttcagccatgatacgtcgtgcgacttatatgtatggaacttttctacctaaaaatgcggaaggattggtggatacaggtttaggtaaggctgttgctgtgggaaaaatgggcatccttgagcctacacaactgatcactcaaccagaacagaaaatgacggttgatggcttggattttgtgttttataacgtgccgggttcagaagcaccagcagaattaacgttctctatcccatcattgaaactttataacggcgcagaaattctatctcataccatgcataatctttatacccttcggggtgctaaagtccgtgatgccttaaaatgggtgggctatctagaccaagcaatgcagcatgccaaagcatccgatgtattgattgcacagcatcattggcctgtctggggcaatgacaatattcaagattttattaaaacccagcgagatgtttataagttcacgcatgatcagacggtgagatatatgaactctggttttaatggcgctgaaattgccgaaaaaattaagcttccagcggcacttgatcaaaaactatatgctcatggctattatggaaccctaaaacataatgtaaaagcagtataccaatattatatgggatggttcgatgcccatccttccaatttagatccattaccccctaaagctgttgcaaaaaaatatattgagttagcaggtggggagaacaatgcattgaaaaatgcgcgggatgcctacgctcaagctgactatagatgggctgccgagattttaaaacatattgtgttgaataaccctcaaaaccaacaagcaaaagacttattggcgaatacttatcgtcaattgggctatgctgctgaggcttcaacttggcgtaatttctttttggtgggcgctcaagagctacaaaataatgtacccctacaaaatacttctgatccgagtgatttattgattcatacaccaactgaaagatttcttgaagctatggcgacaaatttagatgtggaaaatttaaaaaatgaaaaccagtgtatcaatctggttttgtcggataccaaagagcatttttcattatgggttgaaaactcagtcatgcagtttaagcgttatgatgaaagtaaagatttggcattggattgccctacattaaccttaaccaagcccttatatctaaaaatgattacaggtcaaatagaaggggtaaaagtcctgctttctaaagacagtaaagtcaaaggtaatccactgaaaattggaaaattctttgcaatgtttaaacgtccagattcaattttcccgattgtgactcgaccaaatggctaa

SEQ ID NO: 47480 - DNA, 915 bp, Acinetobacter baumannii
atgtctccccgtacgcaaggttatttttttgtattggtgaccatgtgtatttggggcgggtttacgctttttgcccgcttaaatgcacaatggcacatcagtgcttgggatattgccgcactacgctttgctatagccttcctaattttgatgcctatcttaatttataaaaaagatctcgcttttttatggagtaagcatgcggttattttggcattgattggtggagtcatttactgccttacggtttatacagcttttctttatgcaccagctgcacatgctgcaatatttttaaatggctgtattcctatctgtaccgctatagctgcttatattttatttagacagccatttgataaacatacatgggtgagtctggcaattatgattactgccttggccctcatgagcgcattgatgttacaaagtagtacctctgcttttggaattggagatttacttctgtttatcagtgcgatttggtgggggatttttactgtactacttaaacagtggaagctctctgcttggcattctatggcaagcgtcgcaatctggtctgcgattatttatttgccgatttatctgttgttcttacctaagcactttatggatgtagctcctttgcacttagctgtacaaagtattttccatggcgtgtttgtcgttattattgcgacattaacctatgttgctgctattcagcgtcttggcgcatttaaaacgggaagtattgtaactttggcaccgtttattgctgctattttagctgtacctttacttggtgagtcattaagcccatcaattgtagtgggcttagtcggtatgggaataggcgctttacagccttggcgctggtttagacaagatagcctgacacaaaagattaagcagcaaaatacacgaaattag

SEQ ID NO: 47481 - DNA, 1203 bp, Acinetobacter baumannii
atgcaaattccttcgtcattgcaatcatcgctgctaggtcaaaaccagaaaggtgatttagcagggcatttactgtcgtcattaacgacctataaatatcctgaacatggtccgtcggttttagaagtggtggatatacaaaaaaagttccaacactttcaggccataacgcatattaatttagacctgaaagctggcgagttcgtgagctttttagggccttcagggtgcggtaaaaccactttactacgcatcattgcgggtctagaaaaacctgattatggaaaggttataaaaaagggcgtagacattacgttgcttagtgctgaaaagcgtcactgtggcattgtgtttcagaactatgcgttatttccaaacttaaacgtcgaagaaaatattgctttcggcttagagaaaaaaaagtgggataaggcgcagcgtagccaacgagttcagcagttattagaactgattgaattaccagatattgcaaaaaaatatccaaaccaattgtcgggtgggcagcagcaacgtgttgcgcttgctcgtgcaattgcaccaaagcctgatattttactgcttgatgaaccattgtctgcacttgatgctcaggtacgtctaaaattaagacaaaagattcgctcaattcaatcacagcttaatttgccaaccattatggtcacgcacgatcaagaagaagcgttaagcatttctgaccgtgtggttgtcatgaatcatggcgtcattgagcagattgatacaccgcacaatatttactacaagccacaaacccaattcgttgccaagtttattggcaccatgaactttttaagagccacttgttcgatagttaatcagctcgaggttctaggttttattcctctaaatttggaacagcaaaaacttaaagcagggcaaagctacaacattggttttagacccgaagctgtcgaattggttgatgattttggtagtgataaagagtcgttgtatttgccagtcaaagtattaagcacagaatttttaggtgccaaacgtcgtttgttttgcactattcatatcgatggaattgagcaagcaaaacacctgttgcaaattgaaattgaaaataccaagttcaaatctttgcaagaactgatgtttataaaagtgcctaatcagctcattcatgtctttgacgaacaagggtacgcactatgttaa

SEQ ID NO: 47482 - DNA, 1038 bp, Acinetobacter baumannii
atgaaacagtacgttcaacagacaattaaacttggcactgcatcagttttaggtgtggtggtcgctattcaaatgggatgttcatcagcaacatcaaaacaatcagaagaaattacagtctatacggcagtggaagccgatcagcttaagcaataccaagaagaattacacaaagcctatccagaactcaaagtaaaatgggtacgtgattcaacaggggtgatcaccgctaaacttttggcagagcagaaaaatcctcaagcggatgtggtttttggtgtggctttaaccagtttgctggtcatggaaaagaaagacatgcttgagccttttaaacctgaaggcattcaaaatttaaaaccagaatttgtcagccaaaaaactgtaccgacttggacgggtatggacgcatgggaatctgcaatttgtgttaataaagtcgaattagaaaaacgtaagctaccgattccaaaaacttggaaagatttaaccaacccgatttataaaaacttaattgtgatgccaaatccagcctcaagtggtacaggttattttgatgtcacagcttggatgcaaatttggggtgaaaagcaggcatgggactatatgcaggctttaaataaaaacatttcacaatatcctcactctggttcaaaaccttgcaagatggcggcacaaggtgaaattccaattggtgtttcttttggttatccagcatttaaattaaaagccgagggtgcacctttagaagtggtttatccaactgaaggtttaggctgggaaatggaagcttcagcgattgtgaaaggaacgaagaagctaagtactgcacagaaatttataaactggtcggtaagcaaagcggcaaatgaagcctatgcacacaacttttcaatggtggcctataaaggcattgaaaatacgacggtgagcttcccgaaaaaccttcctcaaatgctcgtaaaaaatgatttttattgggcggccgagcagcgtgaacgtattttggctgaatggtcaaagcgttttgaaaagtga

SEQ ID NO: 47483 - DNA, 597 bp, Acinetobacter baumannii
atggttaaaatattagtattaaaatccagcattatgggtgagagttctgaaacgaatcgtttgattgatttaatgcttgagcatcgaaaagaacaaggtttgcaagatgacatcaccatacgcaatttagctgaaatgaacctgcctatactagatttggaaatttttcaggcgcttcgtggtgctgaaaatatgaatgaagaaattaaagaaatcgtcggtttatctgatgagttaattgctgaattaaaaagtgctgatttagtggttattggtgcgccaatgtacaatctaaatgtcccgactcaactcaaaaactggtttgatttggtggcacgagcaagacacactttccgctacaccgaaacgtctcttcaaggtttggttgaaggcgtgaaagctgtggttgtaagtagtcggggtggtcttcatttgagtcaagaaactgatgcggtaacactttatctcaaagctgtgttagggctaatgggggttcatgacgttaagttcatttatgctgaaggtttaaatattccagaatatcgtaaaaattcattagatagagcagaccagcaaataaagcaatttgcgatttaa

SEQ ID NO: 47484 - DNA, 1416 bp, Acinetobacter baumannii
atgaaagagtctgaattaagcgtagatgttggtgctctacaacaggacgcagagtattttgcaaaacgtcagttaaaaaagggggcagtaggttggttacttttagtggggctgggtgtctcttacgtcatttcgggtgactttgcgggttggaattttgggctggctcaaggcggctggggaggactctttattgcaacagtcatcgtcgcgtttatgtatctctgcatgagctttgtaatgtctgagatgtcgacgatgttgcccactgctggcggtggctatagttttgcccgcgttgcatttggtccttttggaggatacctcacagggactgcgattttaattgaatatgcaattgcacctgctgccattgccgtatttattgggtcatattgccaatcactctttggagttggcggctgggctgtttatttaatttgctatttagtttttatgggcattcatctcaaaggtgcaggtgaagcgcttaaaatcatgtttggaattaccgccgttgcttgtattgcactggttgtatttatcgttgcgatgcttccacattttgacagcgcacgtttgtttgatattccagtcagttctcatgcaggtgcaagtagctttttgccgtttggctatatgggaatatgggccgcagtaccttatgccatctggtttttccttgcagttgaaggggtcccactggcagccgaagaagcaaaagatccagtacgttctttaccacgtggcttgatcggttcaatgttgatattggcatcgtttgcacttttaattttatttttgggagcaggtgcagcgggttcaaatgctttaaaaaattcaggggcacctttagttgatgcacttattgcggtatatggtcagcacacatggttggcaagctttgttaactttgtcggtcttgcgggtcttgtcgcaagtttcttctcaattatttatgcatattcacgccagatttttgcattgtcacgtgcgggatatttaccaaaaaacttatcgcttaccaatgaaaataaagcaccatattgggccattatcattccgggcattattggtttcttactctctttaacaggtgagggtgacttactcattttaatggcagtatttggtgcaactatttcttatgtgttgatgatgctctcacatattaaattgcgtttgtctcgccctgaattaccacgcccttataaaacgcctggtggaatatggacgtcttgtattgctttgattcttgctgctgttgctgtagtggcaggtttaatggtgaatccaaaagtttggttattggccgcgctgatttatgtcggatttatactctattacttgttatatagccgtcatcatttggtgaaaggtacgcctgaacaagagttcgccatgattgatgactga

SEQ ID NO: 47485 - DNA, 1002 bp, Acinetobacter baumannii
atgtctgtagaacaaaatgaatttttaagccaagttcaattacaaatactggcagaacaagcaattaagcaatatccatcagactatcaaggacaggtcaaactactgtgtcagtctgaaaatgcaacgtttcaggtttcgactggttctgcccgatatgcacttcgaatccatcgtcccaactatcacagcaaactggatatacaaagtgagcttgaatggttagatgccttaaatgcgagtggaatccaagttcctgttgcgattgcagatcaatcgggtgaacgcgtaattacattgaaactatcgaatgatatttgtcgttatgcagtccttttcaactgggttgagggcgatatgccgactgttgaagttgaccccactgcatttgaacaattaggacaaattaccgcaaagttgcacgtacatagtaagacatggcaagcgcctgaaaactttcaacgtattgtgtggaaccatgaaactatggtcggtgcagatggacactggggaaactggaaaaatgcacctcatttaagaccacaagatcacggcgtgattgaagaagccattgcacagatttcgaaagatttaaatttctttggtaaaactcaagaacgttatggcctgattcatgccgatttgcgtttaaccaatttattactacaacaagaacgtatcggcgtgatcgattttgatgactgcggcatgagctggtttatgcatgacctcgccgctgcaattagcttcaatgaacattatgcaaatgcgccgcattgggttgattactggttaaaaggctacgagcgcgtaggtcatattcagtctgaagaatatgaaatgattccgacttttattatgcaacgccgcattcaaatgatggcttggaatggttctcacgcacaaacagaaatggctcaaagtcttggcgatcaatggtccaatgaaactgtgcgtctttgtaaaaaatatctaaacggacaaatgcctgtcggactttga

SEQ ID NO: 47486 - DNA, 1326 bp, Acinetobacter baumannii
atgcaagctacccatcaactgagcaaagttgccaaagcactattactcaccagtagtctggcaagcatgattgccctaagcgcatgtaactacaaccctgtacaaaacacatctcccccagtcgctattcaaaaaaaggaatatatacaaaaaggtcaatgggacgcttttaactttgaccaacttaaccaattaattgctacctatggaaaagatagcccaaactacaatcctgacaagcgcccgtatattgtcactgactttgacaatacctcggtatttttagacatcgaagaagcaactttaatttatcagcttgaacacttagcatttaatgtcacgccagagcagctaaatcagattattcgtaaaggaattagctcgaaaaattttgaagcggcctacaataaccagcaaggccaagccgtcaatattgataaaattgccccagatattattgccagctactcatggctttatcaccactatagcggtctaaaaggtaagcaaagtctcgatcaaattaaacaagatccgcattatctcgatttcattactaaaatgaggtatctatatgcggcgattggagacacctttgatcatgaagttgcatatccgtgggtcacttatttatttactgggcttaccgaacaacaagtccgtaatttggtgaaagcaacggtggcttggcaaatgcagcaaccgattggacctgtaacatggacctctcccgcagcgctttcaggccaagcaggtgttgtgaaaactacttgggaaaatggtttaagaccataccgagaaatgcaaaatctatttaaggcctttcaggacaatggcattgatgtctatgtctgctcggcatcttttattgatgtgattaaggaaattatttctaatccagagatcggctataacattaatgaaaaaaatgcctacgcgatggagttggaacgagatgcacaaaatcgaattttacccgagtttcgtcatggctatgcgcaaactcaaggtaaaggcaaaaccgcaaccatccagcgttttttagtctctaaatatggttacgggccaatttttatcgcaggtgacagtgaaggcgatcaaaatatgatgcaagattttgaggcgactcagaaggttctgattatcaatcgattgcgcagcccaagctctgatattggaaagttttctcagcaggctgtgcagggctatggtcaagccaatcctaaatttttactgcaaggccgcgatgccaatacaggtcaatttagaccttcaatggccagtttaagttatggcgcgcaaacggcaaaaactacaaaaaattaa

SEQ ID NO: 47487 - DNA, 1047 bp, Acinetobacter baumannii
atgagacttgacatgttacatctcaatccagctcatcacgtcgattcaaatatgtgtaatcaaggtgtattgtctgcggctgcatctggattaagcgagtttatttgtcaaaaaggtgccgatgttgatcgtgttttaggaattagtggtattaatcctgaacttttaatcagcccaactttgagcttacaactcccaaattattgcaaggtgcttgaacaggcagcactggtttctggttgtgataattttggtctgcattatggtcaacagtttcaaccgaaatcattagggctcattggttacattggtctttgctcaaatacattagagtctgcactgatgaacatgaccaataatttttatttgcatcagaaagataccctcaatcgaatggtcgatttaggagatagctggcgtatagattatcaagttcaacacggcgcaattttaacgcgccgccaagatgcagaactcaccatgggcatgtttatgaatgtgattcgtgaagtgatgggtcctcattattcaccacgtgccattcactttgagcatactcgacctgaattctggcaagaacacagcaaactatttaacgcgcctgtttattttgatcaaccttttaactccatcatcatttcaaaaaaagacgtccagcatactatgccggggcgtgattctattttattaacagtgattctagatacgttgcacctactcaatcgcgcgtcaccaagtcaaagtcttgcagatcaggttcgctctcacatccaacttgaactgagtgaaggtgaacccaaccttgaaaaaattgctcatgatattggtttaacgagttgcacccttacccgccgtttaaaaaatgaaggactcacctttacccatttagttgatcaagtgcgttgtgagttggccgaacattatattaaacagaaaaatattccaatttcagaaatggcattcctgctaggttactcagaagtaagtgctctatctcgtgcgtttaaacgctggtttggtgttacaccacgtcaattaagacactaa

SEQ ID NO: 47488 - DNA, 1341 bp, Acinetobacter baumannii
atgggtacgcgttcaaccattatggataccaatagctttcgtccagaacatgctgctgagctggaccatgctacccgcaaactgaccgataaaagaaataaaattttaggtgaatcctatcgcttgttttatcgtaatcccgtgcatctggtaaaaggacaggggcaatatttatgggatgcagcaggtcataaatatctagatgtttacaacaatgttgccagcattggtcattgtcatcctgcagtgattgaagcagtaaatgagcaaatgaaaatgctcaatacccatacccgttatttacatgaaaatattttggattataccgaagaacttttacaaaccactcccgatgaaattgaccgtgccatgtatatgtgtactggctcggaagcgaatgatttagcgattcgtattgcccgtgaatatagtggcggtacaggaattattgtgtctcaagagtcgtatcatggaaccagtagcttaacctcaggatgctctccggcacttggaactgagcagcctttagatgcgacaactcgtctagttccggcacccgattattatcgaatacaaactgatgatttgggcacatggttcgcgcagcaaatccaacagcaaattgacgatatgaatgcaaaaggcatcaagtttgcaggttttttagcggactcaatattttcttctgacggagtcatgcctaatcctgttgggttcttacaaaaagcagttgatgttgtgcatgccaatggcggtatttttattgccgatgaagtacaaccgggttttgcgcgcactggcgattctttctggggctttggtcgtcacaatgttgtgcctgatattattaccacaggtaagccaatgggtaacggagtgccagtgtcaggacttttagccaagagtgaagtccttgctgcttttagcgataaaattccatattttaatacttttggcggtaatcctgtttctatggcagcggcacaggctgtacttaaagttattcaggaagaagaattgcaaacccatagtaaatatgtgggagggctacttctcaaagaactcactaaacttatggacaaacatgagatggtcggcgatgtccgtggcgctggtctgtttatagggtttgaactggttaaagatagagccacaaaagagccgaataaagcattggctttgaaccttattgaagaactcagaaacactcatcgagttttaacctcagttgcaggtccttatggcaatgtattaaaactgcgcccacctttggctttccaaataaaagatatcgattggttagttggcgctttagatcaagccttaacaaaattaaagtaa

SEQ ID NO: 47489 - DNA, 585 bp, Acinetobacter baumannii
atgtctcatttagaaatctcttccaaaaaaatacaggttgttcaaaccgcaatccaactctttaccactcgtggctttcacactgtaggtgtagacctgattgctaaacaatcccaaatcactaaatctacgttttataaatattttggctcaaaagaacgcttagttgaaatgtgcatcgcctttcaaaaaagcctgctccgagagaaagtgctcgctattatttactcaagctgttattacgcgtcaaaatataaactcaaagaaattattatcttacataccaatttaaacagcctctataaccttttacttaaagctatttttgaaataaaactacttcatccgcaggcttaccgtatggcggttgagtaccgaaagtggctgcgccatgaaatttttgatctgatttttagcggagaaatccgtgagccacaattcgatgccaacatggtggtaaacctgatagatggtttactgtttcaggttttaggctcgcaaggtttggaagaaagagatgtagtattggattattttttaaattcttttgttagaaactctagcccacgattacgggaagtataa

SEQ ID NO: 47490 - DNA, 1347 bp, Acinetobacter baumannii
atgtcttcaaatattaatttagatgcaaaaaaagcgactgaaattaaattattcagtttttcaaccccagccatgcgtgctttccacatgacttggctcgcgttctttgtctgcttcttcgcatggtttgcttgcgctccattaatgcccgttattaaaggtgagttcggcttaaccaaagatcaaattgccaatattaatattgccgccgttgcaattacaattttagtgcggcttgctgtcggaccactttgtgataaatatggtccgcgtattacttacaccacccttctcttacttggcagtattcctgtatttggtgttgccgctgccaacagctatgaatcttttcttttcttccgtttactcatcggtgcaattggcgcaagctttgtcattacgcaatatcataccagtatcatgtttgcaccaaatgtcgtaggcacagcaaatgcagctgctgcgggttggggtaatgctggcggtggtgcaacacaagctctaatgcctttattactcggtgcaattgtaatgttcggtgtcgagcaaactatgggttggcgcgttgcattaatcgtaccaggcgtaatgatggtaattgttggggttctttactggaaacttactcaagactgtcctcaaggaaactttaaagaagttcgtgcacaaggtattgaggtgggtagcggtaaaaaaggtggcatggcaatcttaatgcaagcggctcgtaactaccgtgtctggattttattcctcgcttatggtgcttgctttggtattgaaattttcatccataatgttgcggcaatgtactatgttgaccaattcaaaatggatttaaaaacagcagggttaaccgcaggtatatttggtcttcttgccttatttgcacgtgcattaggcggtattatttccgataaagtcgcacttaaaaaaggtttagacggacgtactaaagtgcttgtactaatgattttaggcgaaggtttattcttaatactcttctctcaaatgaacgttgtagctcttgcaattatttccatgacaatttttgcattgtttacccatatggcttgcggagcaacatatgcactggtcccttttattgaccgaaatgcattaggcggcgtcgcaggcattattggcgcaggtggaaatgtgggcgcagtagcagctggtttcttactaaaaggcgtacttgatattcaaacttgtctatttattttaggtggactggttatggttgcaggctgtagtgtaattttgattcgcttcacaaccgagcacaaagaaaaagaaaaagtactttttgaacaggctctacttgaacgcaattccgcagcctaa

SEQ ID NO: 47491 - DNA, 1269 bp, Acinetobacter baumannii
ttgaatactgtattactagatttgtcctttcaagaattattgagagtcatggtatctgcattaggctgcggtttattaatcggtttagaacgggaaaggcataatcgtaaagaaagtgaacccagttttgccggactgcgttcatttaccatttgcgccttgcttggggcagtatgttttttactacatcttgcagtaggtatcttaggtgcattttcagtcacgactttttgtgtttatagcctgattaaacaaaaacaggatattggtgcgaccactgaactggcatttttgatgacctatttgattggtgcattatgtgtgtttaatgtgccgcttgctgcagggttagcggtagtgttgtgtctgattttaatgggcaagcagtcattgcattattttgctggcaattggattcagcattttgaactgcgtgacggtttgtttttactggcactgattttaattgccttgccactgatgccggatcaggcaatgtggggcacagtactcaatccatatgtgattctaaaactgctgatcatgattttaggcgtacagtccttggcacatattgctaaacgtctcttgccaaacaataaagccttgatgttgtcatctttggcatccggttttgtttctagcaccgcaactattgccagtttgggcatggaagtccgttcaggcaaagcagaagccaaatctaatgctggtgcaggcttaatttcctgtattgcgaccctgttacagctgctgattattgtcgcagggattaattttgcttggtttaaggttttattgttgccttgcagtattggcattgcagtgcttttgatcattgccttgatgttaattcattcatccaaagcgacgatgggtcaacaggctacaccacaaaatgatattacgcatatggacagtcggatgttcagcattaaggaagccttgatcattgtggtaacactgacagtgattcaagcagcggtatatggcttgaatgtagtgttgggtgatagcggtttgattattggggcattcttcgcttctttatttgaagtgcatgccgccatggcaacggtggtgatgcaaggaacaccacagcagatgacgttggtctacgctatgatgattggtttggctgcacatgcattttctaaaagcatcaatgcatttttaactggtggcgggaaatattttctatattttgcccccgcacaaatgctgcatatggcgattttaatggcggtactttggatggttattcagtaa

SEQ ID NO: 47492 - DNA, 1593 bp, Acinetobacter baumannii
gtgcttcaaattctctctgaactatgtggcggtgtcggtctatttttaattggtatgacgttactgactgatagccttaaagaaattgcaggtcagaccttgaaggagttactgacaaggtttacggcaacaccgtttaaagccatgctgtcaggtttgggtatgacattgctggtgcattcatctacagcaacaattgtcgccgccattggttttgtcggagcaggggtactcagtttcacgcaagccatgagtgtggtgattggtgccaatatcggcacaaccagtactggttggattgtggcatttttgggcatgaaattttccatttccatgttggcattaccgatgattgctttaggcgctctgcttaaactcatcgctaaaggccaaatggccttattgggccttgtgattgcaggctttggtctgattttctttggcatcgatgttttgcaaaaagccatggcggggtttgctgtacactcagatttatccttttttggttatgacagcttgtggtcacaattggttttggtgctgatcggcatcattatggcaatgctgctgcagtcctctagtgcatctattacagcgactatggctgccttagtcagtggtgcgattgacttgccgcaggcgctatatatggtgattgggcaaaatattggtgcagtcagcattaccgtgatttcggtgattggcgcttcgatcaatgccaaacgaacagttgctgtgaacgtgatttttaatctcgtgagtgcgattgctgcatttttcctgttagcaccgttttttctttggttgattaaacacagtgcatttttcagcagcattgatcaagtgattatgctcgcgatgtttcatacagcattcagtgtgttgggggcatgtatgtttatgccaagtctgaaatttttagaacagaaaattatccaatggttgccaagtaataatcctgccattttagacagtctggatgatgcaagtttgcaagtacctgccattgcagtacaggccgcggaaaaggcggtatatttcagcatatttgagatttttaaaattctacaaatggtttttcagaccggtacattacctagacatcaacagttgaatacgctgaatgagattattcagcatattgagcagtatttagaaaaaatagcgattcctgagcatcctgcactcaaacaaaaattcttatcattactgcgagtaatggtctatgtacgtgtcttacataatgatttagagcgtttagataatgccatattgctacgaacacagccggcaatttttcagttagcactagattattgcaatattttagaaagttacttttcacatatagaacagttagcagatcggtcagtcattgaaaatcttagagccgatttaaatcagttaaaaaaatggaccagtagccatcgtgccgaaacgcgtaaaaaagtcatggaatataccgaagtaaatcaattaagcgcatccaaaggggtggaattattagctgcacagcgttggatggatcgcttaattgcacatagctatcgtttctctaacgtgatgtatgagcgtcttttagaggagtcttga

SEQ ID NO: 47493 - DNA, 1125 bp, Acinetobacter baumannii
atgttcaaaaaagtacagaatatctatcagctcggatgtaaagaactttggagcctgtggcgtgatcctgccatgttggtgctgattatttacacctttaccatctcagtatataccgcatcaacagcggtcaaagataccttgaatatggcaccgattgcgattgtggatgaggatcactctaccttgtcggaacggatttcttcagccttttatccgcctaattttatcagtaaaaccaccacgcttggcacgatggatgcaggcatggacgcaggtgaatttacctttgcggtcaatattccgagtaatttccagtcggatgtactgtcgggtgatgcagcagaaattcaggttaatgtggatgcaacccgaatgacccaagccatgtctggcgcaggttatattcagcagatcattcaatctgaagtaaatgaatatgtacttcgcaatcgtgaaattagccagctaccgatagatttggcaatacgttcccgttttaacccgacactggaaaatatatggtttaacagtgtgatgcaaatcattaataacgtggcgatgctttcgattatcctcacgggggcagcactgattcgtgagcgtgaacatggcaccattgaacatctgatggtgatgccagtaacggtatttgaaatcatgatgtccaaagtctggtcaatgagtcttgtggtattgatcgcagtatttgttggcttaaaagtcgtgattcagggtgtattgcatgtcccgattgatggtagtttgccgctctttttctttggcgccttactcacactgtttgcaacaacttcaatgggtatttacatggcaactgtatctaaatctatgccgcagtttggtttgctcatgatgctcgtattgattccgatgcaaatgctatcaggcggctcaactccacgtgaaagtatgccggaaattgtacagcacgtgatgatgattgccccaacgacgcattttgtttccttagctcaagccattttataccgcaatgctggatttgatgtggtatggccatcttttgtatggctgttaggtattgcagtggtatttttctatatatcgtggaaacgctttaaagacacgattcataccatggcgtaa

SEQ ID NO: 47494 - DNA, 2757 bp, Acinetobacter baumannii
atgatgacacaacaatctgaaaaaggatcggttgttgcagaaattgaaaatgttagtctgaaatatggaaaaacggttgcactgaatcaagtgtcgctatccttaccagcaggctgcatgatcggtttaatcggtccagatggggtggggaaatccagtctattggctttgctgtcaggggcgaaaattgtacagcaaggtcgcttaaaggtgttgggcggtgatattgccgataaacaacaccgtacccgtgtttgcccacatattgcctatatgccgcagggtttagggaaaaacctatataaaactttatcggttgaagagaatttacagtttgtggcacgtctgtttgggcatgatgctgccgagcgacgcaaacggattgatgatctgaccaaaagcacaggcttgtacaattttctcgaccgtcctgcgggtaaattatcgggtgggatgaagcagaaattaagtctgtgctgttctttgattcatgatcccgattttctgattttagatgagccgaccacaggggttgaccctttggcgcgagcgcaattttgggaattaattaaccgcattcgcaaagttcgtccacagatgagtgttattgttgctactgcttatatggatgaagcacaaggctttgactggctggcgatgatggatgatgggcagattttaaaaactggcacaccacaagaattattgactgaaacgcaatgtaacagtttagaagatgcttttattcaactattgccagaagaaaaaaagctcggctatgagcctgtggtgattccgcctttacctgactacggttcagaaagctatgctcttgaagcgcaagatttaacagtgaaatttggtgattttactgcggtagatcatgttaattttaaaattaagcgtggtgaaatatttggtttcttaggctcgaatggttgtggtaaatccaccaccatgaaagtgctgacgggacttttagaagcctcagaaggtcaggcgtggctgtttggtgagcctgtagagggcaacaatattgaaactcgtcgccgtgtcggctatatgtcgcaggcattttccctatacagcgagctgaccattgtgcagaatttggtcttacatgccaaattatttcatgtaccaaaagaacagattgagccacgtgtacagctcatgctggagcgttttgacctggaagaagtcaaagaaaaactgcccgatgatttgcccttgggggttcgtcagcgtttatcgcttgcagtggcattggtgcataatcctgaaattttaattttggatgaaccaacttcgggggttgatccgattgctcgtgataatttttggcgatatttaatcaatttatcacgcaatgatggcgtgaccatcttcatttctacgcattttatgaatgaagctttgcgttgcgaccgtatgtcgatgatgcacgctgggcgggtactcgatagtgcatctcctgcacaattaattgaaaatcgtcaggctgaaacgcttgaagaagcctttattggttacttgattgatgcaggtgcaggcacgaaagatcagccaacagatgctgaagcaaatattagcgaagtttccgacaataaagaaattgacacaacaccgaaaaaatttagtttgctgcgtttattcagttttgcatggcgtgaaactttggaactggcacgagatcccattcgagcgaccatggcattaatggggtcactgattttgctgttggtgatgggttatggcatcaccatggatgtagaagatttaaaatttgcggtactggatcatgatcaaagcagtttgagtcagaattacagcatgagtattgcggggtcacgctattttattgaaaaaccaccgttgcaaagttatgacgatatcgatcggcgaatgcgtagcggtgaaatttccttagcgatagaaattccgcctaattttgctcgagatgtggcgcgtggcgaacaggtgcaagtcggggtgtggattgatggtgcaatgccacaacgtgcagaaaccgtacaaggttatgtacaggggattcacacttactggctcatgcaaaagacgttggaacaaagcggtgatgcaacatcaagtacagtgaatgtcgaaacgcgctatcgctataaccctgatattaaaagtttacctgcgatgacccccgcagtgatgcctttattgttgttactgattcctgccatgttgacggctttatcggtggtacgagagaaagaactcggttcaattgtcaatttatacgtcacgcctgtgacacgcagcgaatttttaatcggcaaacagattccgtatatcgtgttggcgatgttgaactactttatgatgtgtttgatcatcgtgactttatttgatgtacctgtcaaaggcagtttttttaccctcacagttgctgcatttctgtttgtgatttttgccacagggatgggtttattggcatccacagtgaccaaaagtcagattgcgtcaatgtttttggtgatgattgggacgttggtacctgtcatgcaatttgcagggattattaaccctgttacctccttagatggttttgggcgttggtttggtgaaatttatcctgcaacacacatggtcaatattagccgtggaattttcaataaaggtttgggctttgatgatttgaaacaggccatttggatcattgccatggctgttccggtagtaatgtttgctgctattgccttgctgaaaaaacaggagcaataa

SEQ ID NO: 47495 - DNA, 1059 bp, Acinetobacter baumannii
atgaattttaagaaaataaccattgctgggttcatcgttgttttagggttggtcgcttatctgatctggaaaaatatgaataagccagacactgatgccttagtcagtggcaatggacgtattgaagccactgaaattaacgtatctagtaagctatctggccagttagaagaaattttggttaaagaaggtgactttgtcgagcctggtcaaatcttggcgcgggttaaaatttcgactttagaagcccagttacgtgaattggaagcacaacagcgtcaagcccaggatgcgattgcgacagcggaagcacaagtggcgatgcggatcagcgaaaaagccgccgctgaagccatggtacaacagcgtgaaacagaactgatggcggctaaaaatcgtttagcgcgtaccgaagttttagccaaagaaggcgcatcgtccaagcaacaactggatgatgaacgtgccgcagcacagcaagccattgcggtattaagcgcagccaaagcacaggtacaaagtgcccaaggggcaattgttgcgtctaaaagccaagtgtcagccgcacattctcaagtcgatgccatcaaagcctcggtggaacggattaaatttgatatggatgatgcacagttacgtgcaccattaaaagcacgtgttcagttccgtgtcgcgcagccgggtgagttggtggcagcgggcgggcgtgtgctcaatctgattgatttatctgatgtgtatatgacgttctttttgcctgaaaccgttgcaggtaaaattgctattggaacagaagtacgtattgtattggatgctgcgaaaaatgtggtgattccagctacagtgtcttttgttgccgatactgcacagttcacaccaaaatcggtggaaacggaaagcgaacgtcaaaaactgatgttccgtgttaaagcgaaaattgatccaactttattgaacaaatatatcgaacaagtcaaaacaggtttgccaggtgtggcatatatcaaaattgatgatcaggcagcttggccgacatttttagagaacacagttaaatga

SEQ ID NO: 47496 - DNA, 1398 bp, Acinetobacter baumannii
atgcaatttacccaattaaaatatagtagttttttaattatattcagtattactggttgtcaacaaatagatccttatcagaagcctaaaatttctttatctcataattatccgattcaaactcagcactcttaccaagcactttcttggattgattatgtcaaagatcaacaacttattaatattgtcgatctggcactagtggcgaatcaggatttaaagattgcttcattacgtatgcatgaagcacaagcggcttataacattcaacgtgctgaactttttccgaatataggtggtactgcgagcatggaacgcagtcatgtgcctgccgacttatcttatgtcggtagagaagtgacatccagtcagtattctgtgggtcttggcatgaaccaatgggagctggatttgtggggtcgtatccgcagcttgaatgaagcggctttgcagcaatttcttgcagttgaaagcaatgtgcgtgcagcacgcaatagtattatgcagcaaactgttcaaagttatttaacgttatctgaactggataaacgcatccattttgctcagcgctctgtacagaattatgaaaaatcagtacgaatttttaagcgccgttttgaggtgggtgcaggctctaaagtggaatacatgcaagcaaaaacaatgctcagtaatggtcaagctttagtggctgaattacagaaatcccgtgcactgactgcaaactatttagtgcaattggtgggacagccgatttctttgcctaaaacagatttagatcaagtgacttttaaaacaagtatgctacaaacgggtttgccttcagacttattgttgaaccgtcctgatattcatgctgcggaagcaatgcttaaatctaagcatgccaatatctatgcggcacgcgcagcattttttccacgtatcgcactgacgggcagttttggaacagccagtgcagatttagacgatttatttaaatctggcagcagtgtttggtcgtttgctcctagtatcagtgtgcctatttttactgcgggtcgtctaaaaaataatttgaccttagcagaagtgcgtaaagagattgcagtggcagagtatgaaaagacggtacagaacgcattccgtgaagtctctgatgcactggttcaacagaaatatttagatcaacaattacggattcagaaacaaggactcagtgctttccaggaaactgcacggctggcacaactgcgttatgacaacggtgctgtgggatatttagacgttttggatgcacagcgcaatttacttagtgcagaacagcaattgattgaaacgcaaagtagcttaatgcagtcctatgtcagtctttattttgccttgggtggtgacaccgcatttgcaaaaaaaatttaa

SEQ ID NO: 47497 - DNA, 696 bp, Acinetobacter baumannii
gtgagtcttgagatttcaactgttttagaacataaagaaaacttgaataatgctttttttaagaaaaagacacaggttagagcaattgaatctgatttaaagatggtgaatcagactattaagcttctatcggaaggtggcgttaatgcagttacattagaggcagtaggtgtgaatgctggatacagtcgcggtttagtttctcggcgctatggttctaaggatcaattacttgttcgagttttaaattatttggaaaactggttaaatgagaaatctaaaattgcaactaataataaatatggtttagatgctattaattcattaattttaagtatttcagatgatttttatttgtatcgtgaaaaatatagagcatatttttggttgagattttatggtttagagcaaaataaaattttaaatgaatgtctggtaagatctcataatatgcgtgaggaaaacactattaaatggcttaaagaagcattagctctagaggaattatcaagaaatgtagatattgaaatggtacatgattttattaaaacatcattgatgggtttagttcataactggatggtagatcctaattttaatattgaaattagattgaagcagttagtttatattcatttaaaaaatatgttttcaaattctcatttttatcattctgttaatttttggggtgaataa

SEQ ID NO: 47498 - DNA, 1419 bp, Acinetobacter baumannii
atgaattatcaagacctctccattaaattaattcaagaacaatataaactcaagaattctaaatcaaaaagtatattagtaataattggcggaattgaactaacgcgaaaaaatcaatcaatcaaaaagctaagtgaattaatggatcctagatatttaaaaattaaggctgaaaccccaaatagagtcaaagaaaataaattaatttggcaaccatacataaatgacattccaaaaaatggacaaatcatgtttttttatgggaattggtatactgatttactagcgtcaactatattaaatgatgaaaaaatacaaaataatgtattcaacgaacacttaaagcgtatatatgaatttgaaagttacttaaaaaataataatgtagatattattaaagtttggtttgaagtttcatggagcaaagtaaaaattcgcacaaaaaatattgatattattgataaaatccaaagagttccacgttttacatgggatgattttccacaaaaaaaatggaaaactaaaaccttatacaatcaaattaaaactttaagaaatagattcacccacgattgggtaatcattaatagtgaaaacaatatagaaagaaatacacagttttctcaattaatacttaaacatctaaaactaccacctgtacaaattaagaataaattaaaatatcaggcggcacctattccttcaagtttaactcaaataaaaaaaagtgaaattagccacatagagtataaaaaaaccattaaacaactagaaaggaaagtcgcagatgttctacgttattcatcacataacgttgtattagtttttgaaggtatggatgccgcaggtaaaggcagttcaattaagcgcatcattaaatttctagggctacacgaatataatattcatagtatttcagcaccagaaaattttgaacgattacgtccttatttgtggcgtttttggaataagcattcaactaatggggcacttaatatttttgatcgcagctggtatggacgtgtacttgtagaacgtgtagaagatttaattaacccaatagaatggcaaaatgcttatgaagaaataaatcagtacgaaaaacaactgtctgatacaaatacaattgttataaaattttggctagcaatttcaaaagatgaacaattacgtcgtttttacaagcgaaaaaatacacctcaaaaaagcttcaaattaacagaagatgattggcgtaatagagaaaagtgggatgcctacttacaagcagcatcagatatgttcaaatatacgagcacagatatttctccttggcacatcattgccaatgatagtaaatatgctgcacgaattgaaattttgcaaactatccttcatagcgtacaaaataaaaatttaggtcacttagaaaacttataa

SEQ ID NO: 47499 - DNA, 678 bp, Acinetobacter baumannii
atggggactatggaaacggcttttgatttcaatgaaaaatttggcacacctaaaaaattgttgtgtaaaaattttaataaaatccaaatcagtgtacatccttatttttctggaatttatctttgctatcaagaggcttttaaatccttaaaaactgatttgtctacattaaatccaagtctcgaacttcacgtatggaaagatcctaatttctctggttttaccattacaaataattttcagtggtttctatattggtctcagcatataccaaaaaatattaacgtacttgttcattcttttcctcaagatgaggacaaaattgagctattaaaaaaagtggcaagttcagaattcataaaatttctgtccttttatcatgaactggaccgacttaaccctaaaaaaatgcaatcgctgattaatgcccatatttcatctgaagttatcctggctttaaacaaagaaaattctttcaaacctcaccgtactatgagcttggatctgcttgcagaactgctgtcatgcacacaaaatcaactgaattaccgcaataaagttataaaccggaaaagacagaatgtgcttgatcaactgcagcaaaccagtggaattgtgcagcagcttctaaacaatcccgacttcgttctcacgccagatcagctatggaaagcataa

SEQ ID NO: 47500 - DNA, 2328 bp, Acinetobacter baumannii
atgtcagaatctaacccaagccatcaaaatgctgctgatattacgcgggtatcattaaaacagacactggaaaaactctttggtgacgagcagctccaacgtaccaaacatattcaatatgttgctgatttactgatttcatatccaactgatcaatgtctggaagggctgaatctcgatctattagattttgatctagaaaccagttctgttgttgctagacccgctgccttggtctcctctcgaaaacatactgttcgcgcaacaccagtcacttggtatgtgaactcaattgcacaattagcaaagtcagaagaaaatgcgttaatctggaatatcctggtcttaaaagcagcagtttacctaattgcgcttccagacattcaacctgaactttttaaagatgatcacacagaacatttcaacactgtaaaacgtttattccagcgcttccgtaccgccaatcgggttctgagttccgaaaaagaatatcaaaatactcctgaatatatgcttctttggaaaaagtatcttaaagatccatccctttccttagttgaatttattcggtatttgaatgaggttattgatgaagaacgtgataaagagtcatctaatgattttatgcaaaacctgctcaaagtgatccgcatcacctttaattatgttttggaaaataaagcaaaaattgccaaagagagcatcgagactcaactgcaacatgaatttttagacgaagatcagctgattgtagaaagttcagaaattaaaaaagggcaaaaatctaaagctctcaatatagaaaaacaactagatgaccaagatacacgtcaaatacttgtagacccaaccatcgttacccctctggctgaatattcagaatccagccagagctatgtgctgcctctggttgccaaacatattcaacgaaaagaacatttgctgccatacagcagcctctttcctaatatcacaagtataagtgctctacttactgaactatataaaaattacattgttgaaattgaagaagactctaaagacaaggataaagaaaccaaaaaaaagaaggcatccttgatcctgatgctgtcatttctgaccggaaataaaatccaggagtggctacatctacaaagtaaacgtgctaaaaaattgaattctcgccaacagatcaagcaaagcaatgggcaatattttctgagaagtaaattttcaatttttgaaaataaggattttgcttatccagatggcttgctcaaccaaacagttcatctggacatcccgatcccgaattcatttattgcttcgctacgagatggtaacaccgttacggaagaggacattcagcaacatttgaaacagctgagagccaaactttatattccaaaattatcattaataagaattagctctcttttacatcagactattttgcaacgcactggaaataaacagcttgctgaccttctcaccggtattgatgcaaataagtcttcttctacttcttattgtcatcaaaatatcctgactttacagactgaatatgtctcaattttaaaagagctgtgtgagtcgttatccgatgactaccagaatatcgaatatgctgcagaaaaaaactttggtagccgcaaagcacctacttcaaatgtgattcaaaatatctttgccacactcaaattcagaataatttcacaaaaagaagacgactggatagcaattttcaatcattacaatctgtggatgtggcatttcttgttgctctttactgctgcacgacccgtcgctgaatttccaggttttttaaaaagctttaacctgaaaagaaaaatatgcatggtttctgataaagaggtgggtgggcgtcaaggctatggacgtttaattccactgggtcattttgtcgcacaagaactccagaaattcatagaatttttacattattttaaaactcaaattgctcctagtcagccagagattccacaatatattcaacatattttagagagcaagcttccacttttgaatatctttcaggatggtcaatggcacccattaaggccatcaattgtaaaaaactttcatcctgagttaggtttggagcatgaaaactggcaccggcatactgcccgtgcgtttctcagcaataaaattaacgaaattgaaattttagctttattcggtcatgaaccgatgcagcaagaagctgctcatccttattccagcttatctatttcacaatattcaagcattgctcatattcttgaacaaatgaaagatcattttaatattaccggtattgaactagatgtcctcactcaataa

SEQ ID NO: 47501 - DNA, 3216 bp, Acinetobacter baumannii
atgtcctcactcaataaacgtactaagcaaactcgaacactatatgccgaagcacgtagaaaacaagaccgactcgatcaggaaaaacagcttcgagcagatgtagaacaggagctaattcaatacttccaagaacaagatttggaacaaaaagggcatcttgaatccttctatccagcaatttatgagtttattaaacgcaaagctccaagcttggcctggaaaaaatatgcgcatgaattttttcggtcatatatcaagcaaatcaatttaaatcgtcgtgagactttgcccctaccaaatctgacatttgagatgcagcgtgatcagccggtttttacaatggactggatcgagaagggacatcaggttgatgaagttcttgataagctttgggactactggattctagcgaaagatagcaagacattttctgatgatgaaatcattggaaatattgttatttctgccctgctttactcaggcttaaatcaaaaatcctctttagaagctttgcttgaacacttaaaagatccggcaaaaatcagaaagatcgaagatctgaacattatatttttagaaccgctctccccctcttatggagatctctttattgatgaaaaaaccatccgtaaatcgcgtaattttattccggatcaaattacacgcttatggttaattcattttaatagcagaaatattcgtacagtaaaccagaatgtagaagactatctacagcttatttttaataagattaagttaccatttaatctcaaaacttataaattgttacgcgactacgccaactttaactggatgcaactcccgaaagttgacattgatcctgcactttcacaatgcctcattgagaatactgcaacctgtggcttatcagaaatagaatttgaaagatttcttcatccaaaatttaaatatcagcaggacactcttactgattcaaatgtagaaaaatcaccatctactgtgagggaatcctactctaatgatgacattcagcaagccttggatgatgttataaagattcacaaagaccttttacaactgattcgtacatcacaaactgatcaaagtatcgatgcattaatcattaaatattgcattgaaaatactaataaatttaatgagtatagtaaacgtgtcgccttatggctcatcagcctttataaaccagaattagaacagattcagccactggctgaacgttttaatttttgcgtaaaccaatttcaaaaatcgtttcagcagaataagcgtttaaaagacggttcgatttacacttattattcgcgtattgccgagccttggctaacccattctttacaatatctagatagcgaagatgatctgaatacgatactggctaatatctatcagcaaatcattacgaatacccgacttgcagatgaggcaggcgagcttaactttaaaaaatccagtggtcagaccgtcagaatgttgaaacgcttccatagctttcaacaaacagtttttgacgctgagtctctcgaattagagtcaattgccatacaaaacagaccgagagcacgtatcattggtcccatgacttatcaagctttcatgaacaagttagataccttattttcaggggctaatagtcaagaaaatacgtataagacattaaaaatcatctatattttagcttaccgtaccggtatgcgtattaatgaaattctgggcttacgtgtgcgggatatcgagggcttgagctgtttatccgtttggattcagccctacggctcaaaaaagaaaggaaacttacatcaacttaaaacagatagtgctgaacgcaaagtccctgtatattgcttattaaaaaccgatgaatatcaaatatttcataatcatgtagtcgagcaacgattactcaatcaggaaaacttatacctattcagcaactggaatgaaaatagcaagctgaacaaacatacggtgacaacacctttcagaatgattatgaacgagctttttaaaactcatgactattcttttcactcatttcgacacacggctgccaatcacttatccattctgctcaactgcgattatgctccactggtcaagaatcttacggattatactgcagaagaatatcagtccattcggacagagttactccgtaatacgcatggtcaaaatcattggtttatgattgcccatttactgggtcacattgaccctacggaaacctttaaaagctatattcatctgagctacctgatcgctggacataaaatactgcaatatcacccagacatagatactcaattagcaaagaaaatgatgggctacctgccttctttcaaatttttaaacacagtaaaagattctgctccattcaatttcgaaaaacatgctgtccatttaagtcagcagttactcaacgatcaaactgactggttaaaaagtaacgtagaagatattctagatgaggtttcatttaacgctcagcctcatgatttttttaaatattttgcaggaacaaaggaatccaaaatttcatttgcatggttttttaaatgcttaaatttactggaaattcatcatgatccagatctagtctcaaaggaaatgtgtttacctgtagaactggttaactactggtatgaaaatgcaaaacaactaggccagctcaagtctcaaaaaaataacccaagattatttgatctcaacaacacaaatcatctggataaacctttgaaacccgccatgatagataccgttgaagagcgcacagcaaggaactatttttttgaaaatattcaaaatatatttgaaaaaaagccagatcaaataaaagcggtgcttgagacatttttaagtcgtgttacagtttctcataccggcattcattatcgatggaataaaatcgatcaattggaatcattttattccaaggtaaaagacctgtttccccatcaattttggcatttgcttggacaagacttggtacaattgttagataaaaagaaacaacctttattactgaagctgactaaatcgagcacaacagagcatcctacgactcaagaagattatgttcgtctccagctttactcaacaaaagatgccaaagcactggcagcgtttaaattctgtttacatttagcctgtatcggtagacctcgatctcttgaactccaagttgcaggactagaaatcactacatgctgttaa

SEQ ID NO: 47502 - DNA, 726 bp, Acinetobacter baumannii
atgagcatcgaatttgtaggtatggttttccctaaccaatggtctgaaaccaaaggaacacgaattggccataaaattgaccttgaatatctacgttaccacgcacgggcacatgaatatgcgggttttgataaagtcttaattgctagcgggccaaccagcccagacaatgcacaaatcgcggcataccttgcccaacatacagaacgtcttggatttatgattgcccatcgtcctgcactcctcactccaaatcttgctgcacgttcttttgctacgcttgaccatactacaggtggtggaagaatccgattacatgcaattacgggaattacagcggagcctcaagaaggtgattatattgttgataaagttcagcgctatgaacggacgggtgaatatctagatatcatccagaaactttggaaaagcgatcaaccgattagttatgaaggtaaatactttaagttagataatgctttttgcctgttaaagcctgtcaacggtacaatcccgatttcattcggtggttcatcagacattgcttatgatattgcagtccgccatgcagatctctattcactatggggtgaaccactggctggagtaaaagagcaaattactaaattgaagctcgcagcagaaaaagccaataaaccacagcctcctgttagtttatctgtacgtcttattattggtgcaaccgaagaacttgcttggcaatga

SEQ ID NO: 47503 - DNA, 264 bp, Acinetobacter baumannii
ttggcagcagcccagcaaggtgatcgacatgaccgcgcattatggatgccaacagcaactgctgttggagcttatggcgatacgactgcccttgttggtacaccagacaccattattgcctcattacttgattatgtagatttaggggtgacgactttcttaaatcggggctacgatccgatctatgatacggtcgattatggtcgttatattatccccgctgtacgtgaagaggcagccaaaagattaaaacaaatcgcttaa

SEQ ID NO: 47504 - DNA, 1263 bp, Acinetobacter baumannii
atgcaacatacttttttatcaactttatgcaagttttctttaatcacagcgatgttaacttcaagttgtttggccaccgctcaaaaaactccaacgccagaagataaatatggagatggccgagtttccgagttttatacatggaaatcagctattcctgaacaggcaggaaaattattaaaaacagaagcgattcataatccttatattcgtttggcaaatgacagtcaggctattcggattctctacagttctaccagtggtaaagatagcaaaacacctatcgtggtttcaggaagtattcacttaccaaaaggaacgccgccgaaagaaggttggccagtggtgttatgggcacatggtactgtaggtttggccgatgcttgtgcgccgtcttggagtggacgatcataccgagatgtacaatatttaaatcgttggcttaaagaaggttttgctgtcgttgccacagattacgaagggttaggtgttgcaggaccacacttgttaattaataacccaatgctggcttatagtattttagatagtggtagagctgctttaaaaaccaagttaccacttgcgaataagtttgtgattgttggccaatcacaaggaggcgctggggctgttgcggcttcttcctactcggcaacgtacgcacctgacttaaatattaagggttcaattggtacgggcgtgatttatcaagatcctgaagcgacgcctgaaaaaaatcagttaaagttaaatccttacgaagtcagcccatcactggcttatggcatctatagttttttagtgacacaaagtttatatccagaaattaaaacagacgatattttcacgcctgaggctgctcctttagttgaacaagcaagaaatgcctgcttaacaagttttatgggagatattcaaaccgcagggctttcgccagcacaagcatataaacctaatccgccggcaagctataaaaaactgcaagagaaacagtcaaatgattatggttattaccctacattaaaaattagtcatccattatttattgggacaggggcaaatgaccgaactccagatgctcgttctcaaatgaagctggtggcagatgcttgtaaagcaggtacagtggtcgaaggtcatttgtatcatggcttaggacatagcgaaactgttaatgcttccttaaaagattcaattccgtttgctaaaaaggtgattgcgggagagaaaattcaggctatttgtaaacctgacttgcaataa

SEQ ID NO: 47505 - DNA, 2493 bp, Acinetobacter baumannii
atgcatacatatttttctcaattcattcttcactcctcaatttttgcactgagtacactcactgcctcaattactttggcaaatgatcaaaagaatttgccagataaagaggatgccatcacattacaatctgtggttgtcacaggctctagacgggcaattagtagctcacttgatgcacctgcacccgttgatattttaactgccaaagagttacaagagactggtgcaactgatcttgcagcagcattaacacgattgtctccttcggtgactttaccgagttctcctgcaggtgggtttggggcatcggttccgccaagtattgcacttagaggattatctgctgatcaaactctaattttaattaatggaaaacgtcgtcatacatccgcttatttcacccgccaagcctatgcaggtggaagaggcgcagcggtaactgacctaagtttaattccagtgagcgcgattgagcgtatagagatcttgcgggatggtgctgccgcacaatatgggtcagatgcaattgccggcgtcgttaatattattttgaaatcacgagatcatggaggtggcgtaagctatcaaacaggtggctacactcaaggagatggtgaacaacataaagttaatctttggaaaggttttgcacttcctaacgatggtgcattgacggttgcattagatttaggcaaacgtgaagctgcaagtaatacagcacctgatacgcgaactttttatgatggttcaaccaaggctcaatatacagaacaaaatacaccctatagaacgtggaaatttggctcccctgaacaaaaagatcaaatcaatgtgactgccaatctagatttgcctttgacagatgacgttgtactttatagttttagtagctatggccatcgtaaaacaataggggaaaacttttatgagcccccaacaaccaaaaccgtactgaatcaatccagctattttaaagaacgttatccagatggacgctcgccattgagcttggtcactgtagatgattttgcaacgacagttggagttaaaaaaggagagcagaagtcaggtaaatatgatctttatgcaacctatggacaaaataaagtcagcacagaacaaggcaatggcattaatccaagttacgggccaaattctccttcaaactatgacttgggcgaaaatattttttcacaattaaatacagggctagattatagccgtgatattgcaattgactggttcgcaagcccactcacgttgtctacaggggttttatatcgttgggagcaatataagcaaaatgctggtgatccgattgcctatacccgcggcccatatttcaatccaagcacaactttgggcgttggtgttccgggaatatatgccggaattacagaccaagatgaacgaaaaattagccgtgatgtctatggtatctatctagatttagaagcagatattattaaagacttgaatgtgggtgccgctgttcgaagtgaaaaatattcagactttggttcgaccacaaacggaaaattatttgctaaatatgatgtatcacctaaatttactgtacgtggttcagtaaatacaggctatagagcgccgtcattggcacagcagggctattcggcttatagcgtacaaacagtgcaaaccgcttcaggttggcaagatgttcaacaaagaactttagttgcaggaagtgaggcggctttactgattggcggaacttctcttaaacctgagaaatcgacgaattattctttaggttttgtttggaagccacttgttaatacatcggcaactttggacctttatcaaatcgatattaaaaatcgtattttgctttcagacaatattactggaagtgtaattaccaatgcttttgccaatacaccgtattcgaatattgccaatgtggcgttctttaataatttactagatacacgtactcaaggcttagagctcgcacttaaacatgatttaaaccttgaacaatatggtaagttaaatctgaatctcggtctggcatataacaaaaatgaaattaccgaaactcgagattctattaccgcaaaaggtgagcgaattcctgtttcaagtattgcaggacgaaatacacaaagcctgattgaatctgctgcgccgaaaacaaagttaacgcttggcgcactttggtcaaatcaagcatggagcgtgaatacggctgtccgtcgctacgataaatggactactttaaataataccaatactgcactagaccaaacctttgaccctcagtggattgcagatttggatattggctacaaagcggatgcattcgtgaaaggcctgaaattcaatttaggggcgatcaacttatttaatagccatcctgatcaagccaaagattcttcggtcggcaatattgtcaaatatagttttaatgcgcctgaaggagcatttggaacgtatttatatggccgcgtaagttacgaattttaa

SEQ ID NO: 47506 - DNA, 1833 bp, Acinetobacter baumannii
atgaataccagtgttaaaaatttccgcccatttgcaaaatcagctgatctacaaatcgaagaaaatttggcaaatgcctcaattcatagaggaatgctaaaaaaacttattcctttaatttatcccattcgatacttgctgcttgctttaattgcagtagaaattttacaagtgatgagcgtttttgttcggccttgggtggtgaaatatattttagattcgggctttcaacacattgctggaaaaatagtattgaatcagcctgttttattcattgcgattagcattttaatcttaagttggatttgtcgttttgctttagcgggcgtatcaaaatatctttcaggccgagcagctttgaaagtgattaatggtttaagacgttcgttatttcagcatatccaaagtttaaatattggttattttgatcgtactaaggctggcaggattatttcacgggccgatcgtgatgtcgaaacgctagagcctgttttaatacaagggccaccagagttactttcggcaattttgcgttgtggattagcttcagtactcctttggcatatctatccaccatttttctggtgtttatttgcgacgctacccattttatttggaatgactgcaatttttaaaaagtcatcacaaaaacattggggacgagttgcggaggaacgcagtcggtttactgctcatttggttgaaacagtaaatggagcaaaaatcattcagcaattaaattacaccgaaaccaatcaatctcgttatcaagaattattaaaagactttaataactctattatttatggcagcaagcggaccagttggtttgctccctttacaggtttactctcaactctagctactgccggattcattgtgattggtagttatgcgtatagtgatggcatgattagtatagggcagtttgcagagagtattttctatgtgtttttattcttagcccccttacaggaactgaccgatttatttgaacgttatgcaaatggagcagcatgtgcgcaacgaatatttttacttttagacactcagtctacgattcaagaacaaccgaatgctttgaagcttgaacacttgaacggtcatattcgatttcagtcggtagattttgcctatacccacaaacctgttttacaaaactttaatttggacattgaagctggaaaaataattgcgattgtagggccaacgggacatggcaaaagtaccatggttcagttactaacgagattttatgaaccccagcaaggtggaatttttctagaccgttatccaatacaaaatattcatcttgcaagtttaagacagcatgtgagtatcgttttacaagataatgttttatttagtggaacaattttagataacttacgtctagttcaacctgatgctacagaccagaaacttatccaggttattgaagacttgggagtggatgagatattgcaacaactgccgcaaggctatttcaccgaagtgggagcgcttggtaaaaatcttagtcatggacaaaggcaacttgtttgcttagttcgtgcttatttggcaaaccccaaaatattaattctagatgaagccacctctgcaatcgatatttataccgagcaaaaaatacaatatgcgctcagacgcttatgccaaaatagaacatgtattgtcattgcacatcggctgagtaccattcgtgaggctgacaaaattgttgtgattaaaaatggccatgtcgtagaagaaggttcacatgagcatttaatacagcagcagtcagcttactttcagttatatcagtcatatttacaaaaccaacttgtttaa

SEQ ID NO: 47507 - DNA, 1857 bp, Acinetobacter baumannii
atgaatctcgcaataaaacggaatcttaaatttttactatcttttatgtttaaaaattatccattattgcgaagtttggctttatatcgttttatgccatttcgttttgtattgacggcgaccttatttgttatcgcaaatatcgggttagcacttcaacagtattcaatcggtcatgcgattgataccttaaaacatagtgaacgagcaaccttatttcagcatgctatcactgatcctttaaatccttggttttggttcattctacttacgagtattgcaagtattagagctgttattcaatatttagcagggttaagtgctttaaccattggccagcaactgctaagtattttaagggaaagaatctttagccaagtacagcatttagatgtttcatggcactggaaacatgggctaggagaagtattatctcgtacaacacgtgattcagataaattaaaagaagcgctcatcaatttttggcgtcaagtatttgagtcaagcttggttgttaccgtaaccgttgggctcttgtgttggtatcatccttggcttggcctagttcctttattatttatttttttagggctttgggttctatttaaactgaccaatcaattggtggttctggaccatcaagttgcatctgcatatgaaaaagtcagcgatacattggcagaaagcgtcaatggaattcgggtagtcaaagcttttcaactcgaagagaaacttttacaacgttttaaccatgctgtagatctatttattcatcattctattcagaccatcaagacaagtgcaaaacggttacctattccgcaagtaattattgcgggttcttacttatgggtcattgcttttggtgcttatttaattggtcaaaatcagttgcaagtagggcaatttgttgctgccattctcatggcaaatttattggtgtttcgtattgaaagcattggtcaggtcttacatatttttgccgatgctcgctcgtctgcaacaagaatctggcaaatgctagatgagaagtccgcaattgaagatcaacaatatcctctaacgttgcaatggcgtgatgaattaagcattaaattagaaaatgtcagctttcaggataaaacaacaaaaaattttattttaaagcaatgcagtgttgaatttcgagcaggtgaaatcattactgttgtcggtaagacaggctcaggtaaaacgactttgatgaatttactcaatcggtttattgacccaacagaagggcaaattttaattggttctgagcaaatgggatggacgaatattaaagatttgagcctatttgaattacgacattgggttcagatcattcctcaagaaaatttcttttttagtggcacactggcagataacttaagagttgctaagcaagatgcaacggagcaagagatgaaagaggctttacatttagcttctgcatctgaactattacaacgacttgataatggtttagacacgttgattggggacaagggcgttaccttatctggaggacaaaaacaacgacttgccttggcccgttctattttaaaaaattcaccaattttagcactagatgattctaccagtgccttagatgccactacagaaaaacaagttttacagcgactatcaggacttcctgatgatggaaaccattttaagaaaacaatcattattaactctaataaacaaaccacgattgctttatctgatcgcgttattgtgcttgatcaggatcatattattgcccaaggcacacatgctgaattggttcaaaattgtttgttttatcgagagttgatgggttttcagttagagcagcaggagattgatgcatga

SEQ ID NO: 47508 - DNA, 1056 bp, Acinetobacter baumannii
atgatgacaacacttcaaactcaaccattaaacacactttggtatacacgctgccccgtaccaactggtctaggcatttcaattcaaaaagattggctcaaagaaaagtttaatgagcagcaaattgaaataaaatcaattcgagaatcaaactccaaagatattcgtaactctcattttaaccatacccttgccaactcagttcgacatggcgggagtatccctgcaatctgggcatatgcatcgggtcaaaaaaccaaagtaattggcttatcttgggcggatgaagttcaactattgttaacgcgctacgattcaaacatcaaaactgttgcagacttaaaaggcaaacgttttggtattccactgaatcaagatgcaattattgatttctcacgtgcacaggcgattcgtggtttagagaatgccttaaaaatagtggatttgaaggtgagcgatcttgagctggtcgattgtttacgagcagatattttagctgcacagcaacaacagcctgaagaaaatgattctagtttttatggtaatcgtaacaaaattaatgcaagtgcagaaatcgtggcattaattaaaggtgatgtcgatgctattttcctaaaaggtgcacacgctgcgcaaattgctcatgatttcgccctgcatactattattgatattggctcacatccagaccctattctacgctctaataatggaacaccaagaacgctcactgttgatgaagattttctaacgcaatatccagagcaagcccaagcgattgtcgatgctgttttacaagcagaacaatgggctcatgcccatcccgatgaaacccatcgttatttggcaaaagagtgtaatagcagtgaacaatgggttcatgcggcgtatggtgcagatgcgcatctgaaactcaacactaactttgatgagacttctattgttgctttacaagacctgagtgactttctataccgctggaactttattcctgcacagattaatgttcgtgaatggctggcgcaggatatttctattcaagttcaagtggcttaa

SEQ ID NO: 47509 - DNA, 1266 bp, Acinetobacter baumannii
atgaacgatattaaccaacacagttttttagaattaggtagcgtaagacatattcaaagcgagcaagaagcacttgagattgcaaatgaggtggcagatcaactgaatcaatttgctcgagatccaagttataacaagactgtcccttatgatcaggcgcgtttaatttcagaagctggtttaaccgcgattattgtgcccaagcaatttggaggcttaggtgccagtatttcaaccttggtcaatgtggtgaaaattatttcatctgccgatggtggtgtagggcagttattacagattcacttcactatgttccgaggaattttaactggctatgacgatgaaattcgtgatcaattacttgccgatgtattaagtggaaagcgtttaggcaatgcacttgcagaagtgggaggcaaagataagttccagcataaaacacgcgtagaaaggaatgcagaaggacaattaattctaaacggcagtaagttttattctacgggctctttacttgcagaatggatttctttatttgcgggtagtgatgatggaccagtctcgattttaattcatcgagatacagagggagtagagttgcttgatgactgggatgcaatgggacaaaataatagcgtcagtggcactgttaattttaaagatgtgattgttgatgaacgttatattgctaagcggaatactggtggtttaggcacggttttacgtacgggactcacttggcctcagattttacacgctgcaatggacacaggaattgccaaaggggcattacaaggcgggattgattatttacaacatcatgctcgaccttgggtagaaagtggggtcgattcacctacacatgaatctcatattattaaacaaattggtgagtttgctgttttggtccgttcggctgaggcattgttagatcgttcagcacaaatttttgaacagcatttggcaaatgtagaagatgaagacttacaaacggaactgattttatcggttgctgctacccgtagtcagtctgatcatgcatctttaaaaatttcgagtgaaatttttggattactcggcgcaagttcaaccttatcgaaatggaatctagaccgtttctggcgtaacgcacgaacccacaccacgcatgatccaattcgctggaggctatatcatgttggaaattattatttaaataatattccaccaggagaatacaactcagtacttctgaagaaacaggcggaaaatgtgactaaatttaattaa

SEQ ID NO: 47510 - DNA, 1818 bp, Acinetobacter baumannii
atggcaaatacatttaaaaatacagtattgaccgtaacagacttaaccgtggcattggtaaacaccggcaatcacatcgtttctaatatttcatttagcttgcgagaaggtgaagttttaggtctggtcggagagagtggttctggtaaaacgacattatcgagtgccttattgggctatgcacgacatggcgccaagattattcaaggaactattgaactggatgatgaagatattctcagtttagatgatcatgctttacgtcaggttcgtggctataaaattagtcatgtcgctcaagatcctggaacggcactcaacccagcattaagtattggtcaacatttatttgaattattagaagtccatcaggcccagttatcaagcgctgaaaaataccagaaagtagccaaaattttagatgaagtggggttacctcatgatgagctatttctcaagcgttatcctcatcaactttcaggtggacagcaacaacgaattttattggccttggcattcttattacagccacgtttgattgttttagatgagccaaccaccgccttagatgtgacgacacagacattggtgttgaacatcattcgtaaattatgccgtgaatataatgttgctgctatttatgtatcgcatgacttaacggttgtaaaagatattgcagatcgggtgattgttttatattcagggcgaattgctgaagatgcggtattaacccaactatttgaaacccctaaacacccttatacgcaaggtttacttaacgccattcccgatgtagccattcgtaaatatttatctccaattgaaggacacgcaccctcaccaaatgagcgtccagccggatgtgcttttgcagtacgttgtactttcgccacagacatatgccgtcaaaaacaacctgaattaactcaattaaaagatgagtttgacccgcattttgttgcttgtcaccattcggatcatgttggcgtgattaattttaaagagcttgatcatcaggttattgaacgagaaactgatcgagaagcactgctgaaagttgaacatattaatgcgtggtatgggcagcaacaggctctttttgatatctcatttcaactcaaaaaaggtgaatgtttagcattggttggtgaatctggctcaggtaagacaactttatcacgtgtgattgctggcctgaatgaaaatgcagatggacaaattacattagcagatgaagtcttgtcattgcgtggacaacagcgtcatttacggcaacgacataaactgcaatatatctttcaaaatccttataaagccttgaatccagcgcatacgattggacagaccttaattaaagttgtgcagcatttctttggagcatctcgacaagaagccatagaaaaagtcacacaggtacttaaacaagtctctctacctatacaagttcaggaactctatccaagagatttatcgggtggggagcgacaacgagtggcgatcgcgcgagctttattgtgccaacctgatgttttgatttgtgatgagattacctctgctttggatgtttcagttcaggcatctattttaaaactgttacaagaccttcagcagcaaggtgtgaccttactatttgtgactcataacctaggggttgttcgtgcaatcgcagatcgagtcgccgtattaaaaaatggacatattgttgaatacggtgaaacagatcaagtgcttagtcatcctcaacatatatataccaaaactttgcttacccatgcgccaagcttgtttaaaaacaacgtattagaagttagcgtataa

SEQ ID NO: 47511 - DNA, 849 bp, Acinetobacter baumannii
atgagctcacttcattggtaccaaagaaacttttttcaaacattaatccgtgaaagacaagtacgttttggatttgtagtcacagccctagttttgattttcgcattggttggaccgttatttgttgcatttgaacctacggcattggtcggcatgacttatggaccacccgaaggaaaatcatttttaggttatgactatattggtcatgatgtttggtcacgtgttcttgctggcggtgcttcaattatctggatgacgctagctgccagtttggtcgcattagttattggttctagtttaggcatattagctgcttttgcccgaaataagattgatcagttcgtaacttggctgactgatgtttttatggcctttcctgatcttattttggtcttacttatcgtttcgatgttaggtcgacagccttggctcatcgttttaacggtttcaattgcttttattccaggagtcgtgcgtcttgcacgaagcgttgcacttaatttagtggaacaggaatatatcgaagctgcccgaattcttggttattcaaaaacttatattttattccgtgaaattttacccaatatgttgacgccattactcattcatcttggtgtgatgctgacatgggcagtgggtatgttatctggtttggcttttctaggttatggcgtggcacctccagcagcagattgggggctcatgattaatgaaaatcgcgctggtttattagttcaaccatgggccgtgtttgctcctgtcatcttaattgccttgtttgcgctcggaacgaatgtattggctgagggcgttggacgtgcagcagctcggattgaggaaaaataa

SEQ ID NO: 47512 - DNA, 1152 bp, Acinetobacter baumannii
atgacaattcaatccagcaaaatagaagcatctattcaacaaccaacaattgccaagtcatttgaatttcctgcatggttaccttggtttttgacacgtttggtgtcaggggtattggttgtatttgttattagtctcattgtttttattgcaacacaagcacttccatctgacccggctcgcgtcattttaggaccagaagcacctgaagcgacggtacaaatacttcgtgaacaattgggattaaatgatccgatattgcttcaatactggcattggttgagtcaattgttacaaggtaattttggacgctcgattgattccaatgtgcctgttttagaaattattcagaattattttggtaatacagttgcactcacgaacctcgtgattgttgttactgtaccgatttcagtcgtgttaggtgtgtggctctcgcttcatcgcgatagcaaactcgatcgtattattgtctctagctctattgtgtttaaagcggtgccggggtttgttattgcgatttggttaatgatgtttttttcaacatcggttttacatatattaccagcggcctcgttactgattcctaatgagtctccttatagccaactagagtttttaattttaccaattttaactttagctttatcactcattccatatctgatgcgtttagtacgtggttccatgattgatgcgctagagtcggaatatgtgacctctgcacgactgcgtggtattcctgagcgccggattatttggaaacatgttttaccaaatgcattggttcctgtggtgcagggtacagcattgaccatacgagttttgctgagtggtgctctcattattgaggtggttttcagttaccccggtattggtaatgcacttaatgcagcaatcgaaatgagggatatcccgaccattcaagcaatcgttttattgctcaccatttgtgtggtcgttgttaatttaattgcagatttaatcacgactttactcacaccaaaaatacgaactgcaaaaagatataaagcacgttcaccagggcgacgtcaggcattacgtttatggaagtctggccgaccaattacggtaaaacctgtcgatcgtcgcaatgcgttaaagaatattcagcaaggaggtgggaaatga

SEQ ID NO: 47513 - DNA, 1575 bp, Acinetobacter baumannii
atgaataaaattacacgtagagaactcattaaacagacgggattaggtgttggcgcttttgctgcaattagccttataggatgttctaaacctgactcttcatcgtctgaaagcgctactgccgctaccccccaaaatgatacgccgaaaaaaggtggtgttatcaaaattggagtgatcaatggtaaccaagcaggcaatttagatgcacataaacctattggtatgtctagtgtgtttagaggctggcctttatatgcaaagttatgggaatggggcagagatattcagccaaaacttgcccttgctgaatttgctgaacctaataatgacggaacgaaatggaccattcgccttaaaaaaggactcgaatttcaccacggtaaaaccattacagctgatgatgttattttctctttacgccgtttgaccgacccaaaacttgcctcgccattcgcagcttatctttattctttgcaaagagatgcaattaaaaagcgcgatgaatacaccgttgaaattcctttttctcaaggaaagggattggttgctttaccagaagcatggatgagctggggtggtattgttcctaaagattatgacccagttaaaaatgtagttggtgctggtccctttaagcttgaaagttttacacccggccagcgttcacgttttgtacgttttgaaaattactggaaagaaaatcaaccttatgccgatgtaatagaaattattgattttaaagatcaaacagggcgtcttgctgctttgcaatctggtcaaattgatattgcatctggagtaagtgctgagcatatttctttaattcaatctaataaacggctaaatcttgtttcatcagaaaccgatgcttggcaatcatttgatatgaatacggctaaagcgccgttcaatgatcttcgggtacgacaagcttttagattgattgctaatagagacgatttggtcaaacgtgctttagctgggcaaggacgagttgcaaatgacctttattcgtttagtgatcctgtatatgaccacagtattgcgcagcgcaagcaagatttaaataaagcaaaagcgctactcaaagaagctggttttaataatagtttgactgtcgatttatatacaggcccagatagcaatgctgcattagtttttgctcaacatgctgctcaggcaggtgtcattattaatgttaaacaggttgaggctgctacctttgcggatgcagtaaaacaagattgggcatttagtacaggctcgaacgtttcacgtcctttcttattaacagttttgcaaattgatggaccaggtgcggcaaataataaaactcgttttaagaatgagcgttttacggaactagtgcatgcagcattgcaacaacccgatttggaaaaacgaaaagttcttgttcatgaagcacagcatattcaacatgagcaaggtggtttactcatttggggctttaataatgtccttgatgcacattcgaaccaaattggtggtgtaacccctgatcgcactggttttgctgcgtggcgtacagatgaattctggcgtagagggtaa

SEQ ID NO: 47514 - DNA, 1194 bp, Acinetobacter baumannii
atggctgtaaaacttttatggtatctcacttctccagatggaccatatccttggttggaatctgggcggtgggatactgattatgaacacttgcaacagattgcgattaccgcagatcgacttggtttttacggttcactcatgggtacaagtgagtatgaaacacttgctgttgctgcaagtttaattccatttactgaacgtttaaagtttctggttgctcaacatcccggagaagttcagccagcagttttggcaaaatatgcgcaaacgtttgatgcattttctaaagggcgtttgttatttaatgtcgttaatggaaatgataagggtttggcagctttaggcattcactatactcatgatgagcgttatgactttagtaaagaatactggaatgcatttcaacaaaactacttaggtgatacctctggatttgagggtgagtttattaaaattgctccacgcttagagggtagatctccaatgtccaaatggggcggtccaactcaaaaacaaggtgttcctttgtggggagcaggaacttctgccaaaggcgttcagcattctgttgaattgttagatgtgtatttaagttttgcgaatacaccgccgttacttggaaaaaagtttagcaaggttgcggctgaggcagcaaaaattggccgaactttagaatttgggactcgattacaaattattgttcgggaaacagaagaagaggcttggcaatatgctcagtcgttacttgacaagattgatgtaaattatgcaatcgaagctgttaaacgacagcttcctccaaatgaaagttttgagagttatcaaagcaaaaacccatctattcaaaagaacttagaacaattacgtcgaggtgatttgcctcaagctaaagattttgaaatttatcctaatgtttggactggcccatctttatttggtttcgatattttaaacccagccgcaggaactgccttagttggtagtgctgaaaatattgccaaacggattaaagaatacgaaagctattgtgtatcaacctttatcttgtctggtttccctttaattggagaagcctatcgggtagcagatttattgtttccattattagagctagatcatggttttgagttacctaagctaaataaaaattcatccattgattccctcttgaatcaagaagtcgtggtttaa

SEQ ID NO: 47515 - DNA, 711 bp, Acinetobacter baumannii
atgacaacacttattcaaacgccattgtctcgtgaactcaatgactttatcgaattgaaccgtgaaaaagctgaatttgcttttgaagtattccgtgaaacaagaacaattactgcaaacggaaccgttaattttgttgaacgtggacctgaaaataccttagtcacttttaactatgcagggccgtggtctaaagataaaaaaagcaaagtattggtggagaccattgatggtgaagttttactgggaagaaaaagtgcaggtgggcgctataacaagctttttaaagagcatgcagatgtcaccacaatatctcatgtacacgcgccgaatttaggcgcttgggctcaaacccatcgtacgttaccgattcgttatgtgcctgttcagcgctttcatttgtttaaagagttgccgatttacattgatcgacgtcaagctgaagtggattttattttagatcaactcaaagttgatattgaacatcgggccatcttggaagccaatggcggagcgactgtatggggacgccaagggctacaggaaactgctgaatttattttattgcttgaggaaggtgttcaaattcagctgttggctgaattaatcggtggcagccgagaatacgggcaaggggttttacatcagcaatggaaaatgagcggattgactgaaaaagcaaaatcgctgggcttacttcctctgaattag

SEQ ID NO: 47516 - DNA, 1059 bp, Acinetobacter baumannii
atgtcacttgtagtagataaaaaagaaaattctaaagaatttgtaaaaaacatcctgtctgaaatttgggtcactcgatgtccagtacccacagcaacaggtatttcattaaaacgtggtactttagttaaaaagtttgaaaaacacggcattgatgttgctgtcttgcaagatgcgcgtaaaggtttatcggtccatcattttgatcatcaattgccagctctgttccgagagggtggaaatgtacctgcgttagccgcacgctctgaaggcgcgccaagccgactcattggattgacttggattgatgagtggcaagtcattattgtgcgacctgattcagatattagccagccagagcatttaaaaaatgcgaaagtagctttaccagaatatgctgacaaacgtgctggcagtatttttagagccatgtcattgcaaggtattcgtggtgctttacaacttgccaatctcactttcagagatgtgaattttattgaagtacctgagcgtgcaggatctcaagagaatcgtgatgcgagcacgtattggtcaggtctagacgcattaattacaggtgaagttgatgctgtgtatgtaaaaggagcatctgctgttgaagctgcaactaaacgcggccttaaagttgggattgatttagataaatttgaagatgtgacttctcgtgttaataacggcacacctcgtcccattacggtccatgaagacctgttagaagatcattttgatgtggtcgtcgattttcttgaagaattgtttgataccgcagattgggcacaagatcacttagatgaggtcttggtcattttagaagatgaaacgattgcaggagcagaaagtgttgcgacagcctatcgaaataattttcataagtctttacatccatcattaagtgaagatcgtttagagcttttaaaacaacaaaaagattttctttggttgcatggcttcttagagcgcgatgttgatattgaaacatgggttgatcatcgtcctttactcgaagttttaaaacgccgtcaaaataaaaaattttaa

SEQ ID NO: 47517 - DNA, 1314 bp, Acinetobacter baumannii
ttgccggcggaagctcttacatctacgcatcgaacggttgatatagcgggacaggcttttaatttattgcttgaacctttacattcatctgccccagaaactggctttttaccaatttactatccaaagaataatattggtggtaagaatttagtagatgtagacccagaaggtagagatacatgtacttctatagatcaacgaggcctatcacgacttgctgatagtaagctctactatcaaccaaataaccgtaatagttgtgatattggttcaattgaactaatgaaactgactgctggtgatataaaaggtttagggaatacttcccttacagatctacttgcaaaatatcaatcccaatatgatacggttcagaaaaatatattaaatccagattatgcatatttattaaatgtattaaaaatcgattctgcaaattataaaaatctttttgatcaaaccaaagcaaatgcaaaatacagagctatctatatagatttgaaagctaatggcttacctttgccgaatgaagatagtaaccatttattaaagttctttaatgctactgattataatattaaccttgaagttgttggcacaggattgattgatgataaaactacaagcattaaaaaagacgatggattgttttgtgaatggaatcctgctctccaacaaataatcttctatcgttcagatgatattattacccaagctggtgattacaactattgtaaatatacaattagtagtaaggatggaattacgcaaacatctggtttattagaagctcgatttgataatattccaccagtagctggtgagggtactgtaacttttaaatatttagcaaatgagatcattcctttaaatctattacaatttgcgaatgatgaaggggatggacctactaatactcttaagacaaaatccaataaatctcaattttggataaatgatcaaggtgtggagttaccaatttatataccaaataaaacttcaacggatggtatttttaaggtagttaaagcagatcgtgaaggcccatgtcctaaagaagatagtggtaatatctgttatggtggtaatatttatattcaagctagtaatgtatttaataccttcaacgataccttaacttattatgtatatgatgctgatggtaaaatctcaaatgagggtactattaagttggtaagtacagcaaccacaactgatgattcacgtggcggtggaggtggcggaagtattggaattctttctatcgtatcgctactaagtttaattgcttatagacgttatcgtaagtga

SEQ ID NO: 47518 - DNA, 645 bp, Acinetobacter baumannii
atgaagtcaaaaatccatttccgtgagtttgcactgttgatggcattactcatgtctatcgtgtctttttcgatagatgcagtgttgcctgctttaggtgaggttggacgagtttttgaattaaagaataataatcagacccagtgggtcattattggtattttctccggcatgacaatagggcagttgattgcaggtccactttccgatgcgattggacgaaaacgtattttatttaccggtattatcatctactttttgggaagtttattgtgctttaccacacaaagttttgaatggtttttagtaggtcgctttattcagggtattggggtttcaggtccttatgttgcctcaatttccattgtgcgagataaatacagcggtgctcagatggcccgtattatgtccttaatcatgatggtatttatggtcgctcccgcgattgcaccaagtctgggacaactcattattcacttctttggttggcgtgatatttttgttttatacatgatctatgcaactgtcgttggagcgtgggtcgctttacgattagaagagactgaaccgtaccgggtttgtcggagagtcaatattctgagagactatcccgatgacaaaaccaaactatacccccgaaattag

SEQ ID NO: 47519 - DNA, 318 bp, Acinetobacter baumannii; identical to SEQ ID NO: 47461

SEQ ID NO: 47520 - DNA, 636 bp, Acinetobacter baumannii
atgtgggaacttgtgaaagcgggcggctggttaatgctgcctttaattttgtgttcaattttaatcgtcgcaattagtattgagcgttttgtacgtttaagacgttcacaagttttacctaaagtactaatgaatgatggcagtgcagatatttctgttgtcataacaaatttggaacaggatactaatgcgcaaagcacggcattgggcaatattctaaaagctggttttgagcatcaggaacatggcgaacaatttgctcgagcacaaatggaagctatggcttctcaagaaatttcttatttagaaaaaaatattaacttcttagggaccttaagtgctatagcgccgctactagggctgcttggaacagttgtgggaattattgagtcttttttggttattgattttggttcggcaggtagtcctagtttaatgattcccggtatttccaaggctttgatcacaacagcagttggtatgctcattgcaattcctgcactcatttcctatcgatattttcaaagagtagtgcaagattatattgctgagttagagcaacaatcgacgctatttcatgcctcattgttttacaaacgttcttcagtcatgcaagaacatcgccgcgttggttga

SEQ ID NO: 47521 - DNA, 981 bp, Acinetobacter baumannii
atgaatcagaatgtgacttctaaggtttatccgtggcaacagacaatgtgggaaacgttaacaacacgttttcctaatattgggcatggcttattattttatggtaaacaaggttgtggtaaacatgcttttgctaagcattttttagcgtgggtactttgtttaaataaacaacctcaaggtgcttgtggtgaatgtagtagctgtcaatggttaaaatcagatacgcatccaaactatgttcatatcacgacagatgaagaaaataaaaaacagaatgcaaaaattaaaatagaaaaaattcgagatttattgccatttgtacaacaaactggtgagggatggcgtgttgttgttattgagccagctgaagctttaaatcttgcgtcatcaaatgcgctgctaaaaaccttagaagagccaggtgaacgcgtcgttttaatcttgttggccgatcattatttgaaattaccggcaaccattcgaagtcgcttacagcattttgctttagaccgtatttcatatacagaagccacatcttatctaaatgaacatttagcggaaacagcatctgtaccacctgaattattgctaggcctttctaatgatatgcctttgcaagcagttgaaattgcgactagtgattggtttgctaaaagacagtattttttagaagattggactaaagttgtaaatcaaaaaaatatgcctttattttattcggctaaatggcaaaaagaactcaactttagtgattttatgatgcttctcgaatacttgttaggggatttaatttgtgtcaagctcaatcaaccacagaaaaatatagatttacagttcgatcaattggcgcaaaactataatttagaaagtttattcagtctttatgaggaattacagcaatctaaaagattggttgaacagaatgtacaaacacaactcatcatagatcaactttttataaaattaatggacgtttaa

SEQ ID NO: 47522 - DNA, 1605 bp, Acinetobacter baumannii
atgtctgaaatgaaaaaattagaattaccgaatattgatggccaagtggtagaaatagaaacagtacaaagtgttctttttattggggcaaacggagctggtaaaaccagattaggaacttggatagatataaactctcctcaaaaagaaaaagtacatcgcatctcagctcagaaatcattgcaattcccagatagtacgactcctcaggctattgataaagcagaaaaagatttgctttggggagggccgacttgggacaatccgggtatgaaaatacataaatgggagcaaagaccagctacctttttacagaatgattttcataaacttatggtttatttattttctgatgaaacggaggaaaacgccaaattcaaaagagcgtgtaaagagagcacaatcaaaattgatcctccactaactaaaattgatgagttaaaaagtttatgggaaaaaattttacctcatagagaattgattattggcggtttaagaatacagacatgcctaaaagggcaatctgagaaagtatataactcatcagaaatgagcgatggtgagcgtgtaatattttatttaattggacaatgcttagctgcaccaaaaaatggaattattgttattgatgaaccagaattacacttacataaatcagtacaaattccattatggaatgaaatagaaaagttacgaagtgactgtctatttgtttacttgacccatgatgtggattttgcatctgcaaaagaaaactcaaagaaaatatggctaaaatcctttgatggtaacaattgggattggaatgaaattgcggaagatgagaacctaccaaatgaattgcttttagaaattttaggcagcaggaagccaatagtttttgttgagggagagaatggtagctttgatgtgagtttgtatagagagatcctttcggactttttagtaataccgcgtggaagctgtacacaagtaatacagtccgtaaaagcattaaaagcaaataaccaacttcatcatttacaggtttatggaattattgatcgggatagaagacctcagcatgagattgatagattagagagggattctatttttgtacttaaagttgctgaagtagaaaatttgttttgtactcaagagatcttaaaaattgtaagtaaaaggttggggcggaattttacccaagatttcgaaaatgtatcaaatacacttttttctaggctaaatggggaaattcaaacgcaagtttcattgcatgtgaatgatgagatcaaatttttacttcaaatgtttgatacaagtaaaaagacagaggttgaaatacaaaatagtttgaatgatttaattagtaatattaatgtaaataagctttactcagaacggtatcagctcttaagtgatattatccaaaataaaaactatgcagaattattagctatttataatcgaaaatcattggcatctcaaattagcccttctttaggtttaactaatgggagcttaccagaaactgtagttagattatctaaatctgattgtggtaatgaaataagggcggctctaaaaccttattttggtaactttcagcaacttataaattaa

SEQ ID NO: 47523 - DNA, 396 bp, Acinetobacter baumannii
atgaataatagttttcgttacgatatcaatggtttaagagcatatgctgttatattagttgttctattccactttggaatattaggcttttctggaggatttattggtgtagatatattttttgttatttctggttttttaatgacaaaaattattgtttcaggaatagagaaaaattccttcaatattctaaaattttatctttctagagctcaccgaatcattcctgctttagccattctatgcctatttattacattaataggctggtttaccttaacacctcaagaattaaaggattattcaaaacatgcaatttctagtttgagttttatatctaatatacaatattttagagaagccggttattttgatgctgggcgaattcaaacatga

SEQ ID NO: 47524 - DNA, 2034 bp, Acinetobacter baumannii
atgaatacacaaactcatgtaaatagccacaaacaaaccatggcagtgccaaattttgaagtttggaaaaatgcatttgtgaaactgctaccacagcatgcaattaaaaaccctgtgatggcaattgtatggcttggaacagtggttacaggcattagtacaatcttaggttacaccacgctgatatttggtttagtggttacagcaattctgtttattaccattttatttgctaactatgccgaggctgttgcagaggctagaggccgtgggcaggcatcttcattacgtgcagcaagagaaaatttaacggctcgaagactcaactctttgacagaccgtcaagcgactcaagttgcagcgaccgaacttcatttaaatgattttattgaagtacatgcaggtgagcttgttccagccgacggtgagattgtagaaggctttgcaactattaatgaatcggctgttacaggtgagtcagcacctgtgctacgtgaagctggaacagaccgttcaggtgttattggtggaaccaaagtacttacagatcgtattgttgtgcaagtgactgctgaatctggtcaaagtttcttagaccgtatgattgctttggtcgaaggttcaaatcgtcaaaaaacaccgaatgagattgcgcttggcttcttgttaatggtgatgacaatcacgtttttaattgtcgtgattagcttgccatttattgccaagtatttgcatattgaacttgatccagtcgtgctcgtggcgttattggtctgcttgattcctacaaccattggtggcttgttacctgcgattgggattgcggggatgaaccgtgcacttaaagccaacgttttggcgaaatcaggtaaagctgtagaagtcgcgggtgacattgatgtgcttttactcgataaaacagggaccattacttatggtgaccgtcaagcgacctctttttatcctttaacttcggtaaccgagtctgagttgagagctgctgcttgggtaagttcacttgccgacccaacaccagaagggaaatcgattgttaagttagcaaaagagcaagggctaaaacagcaagaacctgagcaagccgaatttatctcttttagtgcttctacccgaatttctggcgtgaacttaccgaatggtgaccaaattcgtaaaggtgctttagatgcaatcttaaagtttgtagatgaagattattctcaagatttagagttaaaagcacgtgttgagcaagttgccaaaaagggtgcaacacctttagtcgtcgcaaatcaacatcatgtactgggcgtgattgagctttcagatgtgattaaacacggcattaaagaacgtttttctcgtttaagagaaatgggcatcaaaaccgtaatggttacaggtgataacccattaactgcggccgcgattgctgctgaagctggtgtagatgattatattgccgaagcaaaaccagaagacaaattggcttgtattcgcaccgaacaacaacaaggtcgtttagttgcaatggtcggtgacggaaccaatgacgcgccggcattagcacaagcagatattggtttagccatgaactcgggtacacaagctgcaaaagaagccggcaacatggttgatttagactcagatccaaccaaactactcgctgtggtcgagattgggaaacaacagctgattactcgtggtgctttaacaacattttcgttagcaaacgacgtctctaaatactttgccatcttgcctgcattgttcgctgctgcgattccacaaatgcaagtattgaatgtgatgcacttagcaagtccaaacagcgcgattttatctgcattaatttttaacgcgattattatcccgttattaattccaatcgcactccgaggcgtgaaatttaaaccttcaactgcaactcagttactacgtcgaaatgtgttgatttatggagtaggcggtgtggttctgccattcattgccattaaagcgattgatgtggtgattgttcaattatttggtttgtaa

SEQ ID NO: 47525 - DNA, 303 bp, Acinetobacter baumannii
atgatgttctttgtgtttatcctgactttactaggcatgtatttactattcatatcgactgaaaaatatcgctcaccgaaatcaactggtcatttcaaacctttagctcaaaaatattattcattgttgaggatattggcctttttattatttgcgttgagcgggtttattctcatcaagaaatatggtttttcaattggttttatcagttggtggatctttgcaacacccctaacctttttactgatactttggcttaacccactcaagccagcaaaaacttcatctaagtcatcaatttga

SEQ ID NO: 47526 - DNA, 2100 bp, Acinetobacter baumannii
atgaatatcccacctcgaccatttaagttgtctgtaatcgcctgcgcgatttgttatgccaatctcacctatgcccaagatgcacaggtacaagctttgcaaacgattcaagtcaaagcatcaaatgcagagcagtcttctgaacagaccaaggcatataatgttaaaaactcaagtagtgcaaccaagcttaatattgaggctaaggaaacaccccaaaccattaatgtcgttactcgtcagcaaattgaagattttggccttaccagtactcgtgatgttttaagtaatacaccaggtgtgacagtaactggattagaaacaaaccgaacaacttatactgctcgtggttttgatatttcaaatattttggttgacggaatcggtatccctcaagttgatagctacaattataataatagtgatgcagatagctatttctatgatcgcattgaaattgtaaaaggtgctgatgctctaacaaatgctctaggtgatcctggggctacaattaactatatccgtaaacgccctaccaaagaatttcaagcaaatgctggggtgagctatggttcatgggatacgcagcgctatgaagctgatatctcaggttctcttacacaagatgggcgagtacgaggacgtctcgtaggttatgagaaagtcggagattcttatcttgatcgctattcagaagaaaaaaacggttttcaaggaattttagaagctgacgttacagacactacaaatatttcagcaggatattcaaaaactcgtcaatacgctaatggttcgcaatggggtgcactacccttagttaactcaaaaggagaaccattaaattattcacgcaactataattatgcaccatcatggacatactacgattgggaaattgataattattttgccaatattgaacaaaatttatggggagactggaagctaaggttaggttataaccttaaaaaatcagaggttaaagataaaatgctttatctcaatggttctccttctgctacagacaatacatctggtatttcactattaccagaaatttataatcaaaaatttaaagaaactacagcaaatgcagatattcaaggtacgtttaatttattagggcagcaacacgaagcaaatattggttataactggtcaaagtataatgcacaaagtgtttattcgtatggtagtagtttaggcgttattactacagacttaccaagctggacacctgaagaaccgacttggggagactttacctatgctgacccagaagaaagaataatgaagtctgtttacggtgccacacgtcttcatttaggtgaggatctgaaatttatcttaggtgctaactatactgaaatcgaaactttggattataaaaagaataaagtttccccgtatgcgggtattacatataactttactcctgaatacacaggttatatgagttatacctctatttttaggccacaaacggttatcgatctttctactaaacaaaccgctgtaccagtagagggtgaaagttatgaagtaggtgtaaaaagctcttggttagatggtgctttaactggaaatatcgctatctttagaacagacgaagataactttgcactaaacccattatgggatccgctctataataaatactcgtcaccaataggaacgattagatcgcaaggggttgaagttggattaactggaaaattaactgataacttagatttagtttttggtttctcaacatttagtctaaaaaatatggaatcaggtgaaagaggtagaccaaatatcccaactcaaacacttaacgttttagcttcttatactgttccccaaattccaaaattgaaagttggtgcaagcattaaatggcaagatgatatacatgacacctcttattcaactgtaaaacaagatgcttacgcattgcttaatgttatggccagctatgatttaaacgaacatgtaatgttccaagtgaatggcaataatctaacaaatgaaaagtatttgacaggtttatctggtggtcagggttactatggtgccccagccaactatacagttgctgtaaagtttaaatattaa

SEQ ID NO: 47527 - DNA, 852 bp, Acinetobacter baumannii
atgcagttaatatctttaccaaagcagattttacagtgtggacagcttcaattagatttatctcagccccatgttatgggtatcttaaatgtcactcctgattctttcagtgatggtggcaaacataaccaattagaccaagcggttgaccatgcacttagtatgattgagcaaggcgcgactattattgatattgggggggagtctacccgacctggtgcttcagaagttgcagtagaggaagaagtgcgtcgtgtggtacctgtcgttgaagctttatctcaccataacgttattttgtcgatcgacacaagtcagccagaagttattcgcgcagcaaaagcagcaggggcacatatctggaatgatgtccgtgccttaacacgttccaatgctttaaaaactgccgtagaattagatatacctgtagtaattatgcatatgcgcggtgaaccaactacaatgaatcagttggatcagtacactgatgtaacactcgatgtgatgcaagagctgcaacagcgtattgatgaggctttggctgctggggtaaaaaagcacaatattattgttgatcctggatttggctttgcgaaaaatgctcagcaaaatttaaaactattaaaggaattttggaaacttaatgaacttggttatccaattttatctggcctttctcgtaaacgtttcataggtgaagctttacaaggcgctcctgcagatcaacgtgctgtgggaagtgtaactgggcatttgcttagtattcagcagggagcatccattgtaagagcgcatgatgtaaaggaaatgcatgaagcaattttagtttggaaagcgatgcagcaagtctga

SEQ ID NO: 47528 - DNA, 177 bp, Acinetobacter baumannii
atgaaagttgcggatgtagttcgagcgactggaatgagtaagacaacattgcataagttatataatggtcaatcgactcgaatagattttgagaccttagaaaaattgtgtgtattacttaatgttgaagtgggtgatttattaaaatttaagaaaaatgaagagcagaatgattga

SEQ ID NO: 47529 - DNA, 216 bp, Acinetobacter baumannii
atgaatcttacttatattactacaaaagaattggcggaacgaatccattataacgaacgtactatccgtaatcagttaaaagatagcgttttgatcgaaggcattcattacattcgcccttttggtggtcgcaaaattttatatgtatgggagcgtattgaagaagatatgactaaaacaactttaggctcgctacacagcctacaacttctgtaa

SEQ ID NO: 47530 - DNA, 1182 bp, Acinetobacter baumannii
atggctgctattcgtactagatacggtaagttatgtgtcgattttcgatacttaagtatccgttgccgtgaaaccaccgctcttgaagacaatgctcaaaatcgaaaaaagcttgaaaaagcgattgaacgaatggaggcagaaatcttattgggtatttttgactatgctaaatactttccaaaaagttctcgtttgaaagaaatcaaaaatgcagaaaacagagtaaatgaaatcagctcaaaaacacctctattttctaagttctgtgaaatctggttcactgataaagaaatagaatggcgtacaagctacaaggaaaaaattcaaattgtgatcagaaagtacttaattcctttttttggcacaattccggttattaatatcaaaaagtcagacattcttggattccgttcatccctcgccaaagtgactcacgggaaaaaccaagaatgcctttcaccatcaagaatcaaccagattatgatagcacttcgtatgatactcgatagtgctgccgaacgatatgactttgacagtccttataagaatatcaagaacttaaagcaagggaaaattgaagtcacgcctttttcattaaaggaagtacatgcaatcttggccacagttcgtgatgattttaagccttattacactgttcggtttttcacaggtatgcgcaccagtgaaattgatgggttgcaatggaaaaatgtggacttgcaacgtcgggaaatccatattcgtgaagccttggtgaatggggaactgggtggaaccaaaacctatggttctgaccgcacaatccagatgagtgaccgcgtttaccaagcctttctgcaacagaaaagcttaaataatggtaaatcagagtttgttttctgcaatcgtgatggtggacctctcgattaccgtttggtgaataaacgtgtctggcatccgatcttgcgctttctaggattaaagcctagaagagcctaccaaacacgtcatacagcagcaacgctctggctgtcggcaggagagaatccggaatggatcgcacgtcaattgggacattcaacgactgaaatgctattccgggtctatagccgttacatccccaatgttacccgtcgtgatggcagtgcatttgaagccatgctggaaaaactaaatacagaggagcttgcacatgaatag

SEQ ID NO: 47531 - DNA, 249 bp, Acinetobacter baumannii
atgaatagtaaagctttctttggtggtgtggtcgtcagtcctgaagcggatacggtcgctcgtgaattaatccatgagctacacattcccaaactgcacaatctggcgtttttgctggagatcaacaaatgcttcgatgatcaccaggcgttaagactgtggctacagcgactgctggatgatggacaagcccattacgatgacctagcccaacaggctcgcctccggttaataagcttagctccctga

SEQ ID NO: 47532 - DNA, 600 bp, Acinetobacter baumannii
atgaccttagccctctatacctataaaaaaggtgaacacatgcataaacatatttcaatttggatgccactctatattggcgacctacaggcgaaatttgcacgaatgacagcagaacaaattggtgcggcactgctgttaatgatggatttctggaaaaacggtgctattcctcatgacctagctacggtatgtagcatcacaaaattatcgcaacataccaaggctaaaactttgttgaatacgctaatagccctggaattgtttgaaatcgaatctgagcaaattcattcaagttttttaaccagtttaaaaagccaggcattgcaaaatcagcaaatgaaatctgataaagctaaaaatgcagctcaagcacgttggggaaaatccgcaactaatgctcaagcatcagccaagcaacgaaaagtaaatgctcaagcagctcctgagaagagcccgagtattactcaagtcatgcttgaaccatgcccttcatcttcatcttcatcttcatcttcatcttcatcttcatcttcatcttcatcttcaaattttgaagaaaaaaatgagagttttttagaaaattcaaaatggatttag

SEQ ID NO: 47533 - DNA, 747 bp, Acinetobacter baumannii
atgaataccatgcttaaaacgctccagtttcgcgcagaaacaacagaagcactctgccctacccatcatatacccctgatggaaatcgccggtcacaggctttgcaaattgtgtgcaaaagaaatggtccatcgctcacatgcagcctatgcagatgagctgcaacaacggttgctgcaacagaaaatcaaaaactcagggctcaataaacgctacctggaccgtggcttcaagaattatgtagttgcatgtcctgctcaagacaatgccataaaactatgtcaggcttttgcacagcaaattatttctgaccattatccaaacctgctgctcattggtacaccaggtacaggaaagactcatctgagtgcgtcaatcattcgcaacattctgcataacagtacaaaatctgcacgctactataccagtgcagaaattgctcaaaaaatgatggacacctggtcagatgcttcacgctctgaaaaggaagttatcgagcatttctccagttttgatttattggtgatagatgaatatggcctgcatgaccgacatgaaaaacgcctggagatggtgcataaggttttatatagtcgttatgacaatatgaaatctacactgctgatttccaatttcacaatccaaaatatgcagcgggatttaggtgcccgattatggtcacggttacatgagaacaatttgattgtagtgccatgttattgggatgatctaagatttaatcagtaa

SEQ ID NO: 47534 - DNA, 1278 bp, Acinetobacter baumannii
atgttaaaagatacccaagtcaaaaacttaaaaccacaagacaaaccctatcgtaaacttgatgcagatcggctttatatagaagtcagaccaagtgggaaaaaagtttggattcacaaattctctttaaataaaaaagaaggttctattacttatggagaatacccatcaatatctcttgctgaagcacgtgaatatcatgctagagatcgagccttactagctaaaggaataaaccctgtcgctcatcgtaatgaaaccactcgccttgctttagagacagaacaagagacttttaaaaaatacggagatgaatggaaagaaaaacataaaatggataaatcagaggattataaaaagcttattgagtatggattaaaaacagatatttacccagtaatcgggcatttacatccaaaagatgtaaccagcaaacatgttttactcattatcaataacaccatggaacgcatcagaacatcaactcggtcacaaaagctgaaaccaagtactggtgaaacaacggcaattgtaaataaaacttttattgggatgatcatgcggtcttgtattatgaaaggattagcagaggttgatcctacatatgcagttaaaggtgttataaaacgccaaaaaattaatcatgccagaccgttatcgatgaaggaaatacgggaactgaaagaaaaaatacctttatataatggagcacaaacaacaagaaatgctcttaattttctattttatacaatgttacgtactattgaagtaagaagattagaatgggcttgggttgattgggaaaataaaactattacatttccagagcgcacctttcaagaaatcattgaaggtaagcgtgccatgaaaaataataaaattcatctactacccttatctgatcaggcttttagcatactgaaagagcaatacacaatcactgcaaaatgtcagtttgtattctcttcgccaatgcaacttgcccttggcaaacctgaaaaaatgttaggccgctctactctaaattttgctcttgatgctttgaaaatgaatgatgtctccccccatgatgctagggctactgcatcaacatatttaaatgaattgggcagtgatgatagatggattgaaaaacagttatcacatactgataatgataaaacaagagcaacttataaccatgctaaatggctgagaaatagacgctctatgctgcaatggtatgcagactttttagatggaaaagttgaaatgcctgtgcatgaggatggctcttag

SEQ ID NO: 47535 - DNA, 387 bp, Acinetobacter baumannii
atgagtaccatcaattcgacatttgtaatcgctgttcatgatgaaattttgaggcaaacaggagttggtcgagaggggtgtcatcttgataaattagaaagcgtgttgagcagaattgatcaacaaatgtattacaatcaggttgaggatctttatgaaatagcagcttggtacggtattgcaatatcaaaaggacatgcatttgttgatgggaataaacgcacaggccttgctgtaatgcttacttttcttgaaattcaaggcgttagtattcaagataatacagggcttgatgatttaatggtggatattgttgaaagtcaggatgatcatgaaattcttgcacaaaaagtttcagatttcttgtatgagctctcagaaatatag

SEQ ID NO: 47536 - DNA, 180 bp, Acinetobacter baumannii
atgactaaacgtttaagtgattttaaaattgaaaatagaaagccacgttcagcgatggctggtcaaccattatcaattccttttgatgacaacgaggcaacaaagcgtgttgtaatgcatagtgcaaaacgtgtcattcaacaacataagaaagaaattcaagagttagcttataaatga

SEQ ID NO: 47537 - DNA, 843 bp, Acinetobacter baumannii
atgtctaaatacaaattaaaagataaagttgtcgtaattacaggttcaacaggtggactaggacttgcgattgcccaagcattacaagccaaaggcgcaaaattagcactcctagacttagaccttaacaaagttgaaagtcaggcaaaacagctaggtgggcaaagcattgccgcaggttgggtggccgatgtacgctctttggaaagcctagaaatggctatggcaaatgcagctcaacacttcggtaaaattgacgtggtgattgcaaatgcaggcatagctacaacagaagcactagaacatatggctcctgaaacctttgagcgaaccatcgatattaacctgactggagtatttcgtactttccgcgcagctataccgtatgtaaaacaaactcagggatacttactggctgtatcttcaatggcagctttcttccactccccgttaaacactcactatacttcgagtaaagcaggcgtttgggctttatgtgatagccttcgtctagaattaaaatatttaaatataggtgttggtagccttcatccaactttctttaaaacaccattaatggacaatattcaaaatgacccagcaggtaaagctgtgtggaaaggtaactcgggtatttggaaatatatctctattgaggaagttatctctggtgtagttgaaagtatagaacggcgtaaagatatgactgttgtacctaaaataaatactccgattgctaaagcacccgtactgtttagaaatgtgattgagtttttaggtttcaaccgtaaacagcttaaacagaccatgttcttggcagagaaaaaccataattcattttag

SEQ ID NO: 47538 - DNA, 1041 bp, Acinetobacter baumannii
atgactaaaaatacctgctcaatccaaattttggcgcaaagtgtcaagcaatatggcagctttcatcaagccctatctcattatttttcagaagatagtgttatagccaatattgagaaaaatacgatgggtaaaagtctaaataatgtgccccaagcgccactagatgttcaatttgattcaaatggcatgaaatgcagtgcctatttatatcgtccagcgaccgaggccactacaccaattattgtgatggcgcacggtctgggtggtactcgaagaatgcgtttaactgcttttgcagagcgctttgtggcagagggttatgcttgtttagtgtttgattatcgctattttggtgatagcgaaggacaacctcgacaattactagatataaaaagtcagctcgaagactggaaagccgctattgcctatgcacgtagcctagacaaaattgatccaaaccgcgtagttatatgggggacttctttcggtggaggccatgtgctggcaacagctgctgatgataaccgacttgctgctgttatatcacaatgccccttcactgatggtttctcatctagcatggcaatgaacccgataacgaccctcaagctcacgggactcgctttaaaagacaagattggatcaatgttcggcgccaagccagtcatggtgcctcttgcagctccaacaggacatacagcattaatgaatgcacctgatgcttattcaggctatctcgcactcatgccttcaggttcaaatattccaaactatgtcgctgcacgttttgtactcgacatcatacgctattacccgggccgtaagacatcacgtattcaagcgcccgtgttgttttgtgtctgcgataccgactctgttgcaccctcaaaaacaacattgcgtcatgcgagccatacacccaatcatgaaattaagcactacgccgatggtcattttgaaatttacgttggagaagcttttgagcgtgttgttcgtgatcagatcgactttcttaaacgcatcgttccagtcaagtaa

SEQ ID NO: 47539 - DNA, 414 bp, Acinetobacter baumannii
atgaagaaaaatacaaagcttgatcaagacaagctatttattaaattattatttaaatctacctctgaagtaacagatgaggaaattgagtactatcgtaagtatcccgaccaaattgaccaagtcactgcacccctaaacattcataaaatattcttgtgggcgggcgccttattgggagttgtggtggtagctgtagctaaatttcttaaattttcaggctcattagattttttgtcggagggagtgctcgagtttgttatagatattatttatgaaaccggtatagccttaattggcgctgcggttacagcttatatgttaggagtcctattaaacaaacaacaggaaaatgccacaaaatggcgagaagagattcgtagaagaataaaagagagtgagggggcactttaa

SEQ ID NO: 47540 - DNA, 303 bp, Acinetobacter baumannii
atgaaaagtaagttaggaattagtaagcaactttttattgccttaactattgtgaatttaagcgttacgctattttctgtagtactgggttatgtgatttataactatgcgattgaaaaaggctggattagtttaagctcatttcaacaagaagattggactagtttccattttgtagactggatctggttagccactgttatcttttgcggctgtattatttcattagtgattggcatgcgcctcgcaaagcgttttattgtgccaattaacttcttagccgaagcagcaaaaaaaaattag

SEQ ID NO: 47541 - DNA, 606 bp, Acinetobacter baumannii
atgtatctatttttacataatgtccgctatacgcttattccagcgattgtggcgcctattgccttactcggtacttttaccgtgatgttgcttgccggcttttcaattaacgtactcaccatgttcggtatggtacttgccatcgggattattgtcgacgatgccattgttgtcgttgaaaacgtagaaaggattatggcgacagaaggattatcgcctaaagatgcaacctctaaagcaatgaaagagattaccagcccgattattggtattacgctggtcttggctgcagtatttttacctatggcatttgcgagtggttctgtaggggtaatctataaacagtttaccatgaccatgtcggtatctattttattttcagcgttattggcacttattttaacaccagcactttgtaccacgattttaaagccaatcgatgggcatcatcagaagaagggcttctttgcatggtttgaccgtagtttcgataaagtcactaaaaagtatgaattgatgctgcttaaaatcatcaaacatacagttccaatgatggtgatcttttttgtaattaccggtattacctttgccggaatgaaatattga

SEQ ID NO: 47542 - DNA, 1428 bp, Acinetobacter baumannii
atgccagaggaagatcaaggttggttcatgacttcgttccagctaccttcagatgcaaccgcagagcgtactcggaatgtagtcaatcaatttgaaaataatttgaaaggtaatcccgatgtaaaaagtaataccaccattttgggatggggttttagtggcgcaggacaaaacgtagctgtggcttttacgacacttaaagacttcaaagagcggactagctctgcatctaagatgacaagcgccgttaatacttccatggcgaatagtacggaaggtgagaccatggccgtattaccacccgctattgatgagttaggtactttttcaggtttcagtttacgtttacaagaccgcgctaacttaggtatgcctgctttactggctgctcaagatgaacttatggcaatggcagccaagaataaaaagttctatatggtttggaatgaagggttgccacaaggtgacaatatttctttaaaaattgaccgtgaaaagcttagtgcacttggtgttaaattttctgatgtttcagacatcatttctacatcaatgggttcaatgtatattaatgacttccctaatcaaggacgtatgcaacaagtcattgtacaagttgaggctaaatcacgtatgcaattgaaagatatcttgaatctgaaagtcatgggttcaagcggtcaattagtctcgttatcagaagttgtaacaccacaatggaataaggcaccacaacaatataatcgttataatggacgaccatctttgagtattgctggtatccctaacttcgatacgtcatcgggtgaagcaatgcgtgaaatggaacaactgattgcgaaattaccgaaaggtattggctacgagtggacaggtatttccttacaggaaaagcagtctgaatcacaaatggcctttttacttggtttatccatgttagtggttttccttgtcttggctgcactctatgaaagctgggcaattccactttctgtgatgctggttgtgccactcggtatttttggagcaatcattgccattatgtctagagggttaatgaatgatgtgttcttcaaaatcgggctaattaccattattggtctatcggcaaagaatgcgattttgattgttgaatttgcgaaaatgctgaaagaagaaggcatgagtttgattgaagccactgttgccgcagccaaacttcgcttacggccaattctgatgacatcacttgcatttacgtgtggtgtaattcctttggtgattgcctcaggtgcaagttcagaaactcaacatgctttaggcacaggggtttttggtggcatgatttcagccaccattctggctattttctttgttcccgtgttttttatcttcattctgggtgcagtagaaaagctattttcctctaagaaaaaaatctcatcttaa

SEQ ID NO: 47543 - DNA, 2262 bp, Acinetobacter baumannii
atgactaaaagaactataaatatttatggtgtcagacaaaataaccttaaaaatatttcattgaagattcctaaacataaaatcgttgtctttactggagtctctggttcaggtaaatcttctttagttttcgagactattggcgcagaagctcaaagacaaattaatgaaactcaagatagttttgtacgtaatcgcttgcaacattttggtgttactgacgttgataaaattgaaaatttaaatgtacctgtgattattaatcaaaaacctttaacgggcaatattcgctcaactgttgcaacaattacagatatttatgccaatcttcgcttgttattttcacgtatgggtgagccgtttgttggatactccaatgtcttttcttttaatcacccaaatggcatgtgtccacaatgcgaaggtattggaatcgagcaaacaattgatatttacaaaatattagatttagataaatccttaaatgaagaaggtgctatagacttccctacttatcaacctacagcatggcgttggacgcgatatgcagattcaggttactttgatttagataaaaaattaaaagattatagtgaaaaagaatgggacttatttttgtatgctcctcagcacaagcctttaaacccgacaagtaaatggagaaaaaccgcactttatgaaggactaattcccagatttgagcgtaactttttaaaaggtgaagcacaggaaagaaatcgttatagaaataaacttgagcgaattattacaatcaaagaatgctccttatgtaagggacaacggctaaatcaaaaatccttatcttgtaagattaacggtaaaaatattgcggaatgtacggccctatccgtatcaaggcttttagagtttctcgaatcgataaaaagtgaaaaatttgaaaccgttttgcacgaaataaaaaataaactcaataacttaaatctcgttggactcagctatttaaaccttaaccgcgtcagcaatacattgtcgggaggagaatcacaacgaattaaaatggttaaacatttgggtaatagtctggttgacctactctatatttttgatgaaccaagtattggcctgcaccccaaagatttagataatattattaaaattattcaaaaaattagagataagggaaatagtgttttattggttgaacatgatcctgatcttattagaacagctgatcatgtcgttgatatggggcctctttctggtattaacggcggtgaaattatttaccaaggaacttttgaagaattaaaaaattcatcaggtttaacaggtgcgttttttagaaggccgaatacctataagaaagaaccacgtatgggtaatgaatggatttcaattaaaaatgctcatttattcaatttaaaaaatattgatgtcgacattcctaagaactgtctaaccgttattacaggagtcgctggttcaggaaaaagcacattaataagtaaagtattaccacaacaatatcctgaaacaaaagttgttgatcaatctgcaattactgcaagtattcgctcaaatttattgacctatcttgaccttcttgatccgattcgtcagctatttgcaaaaacaaataaagtaagtgccaagctctttagttttaatagtgaaggtgcttgccctcaatgtaaaggatctggtatcgaaagggttgaacttgcatttttagatgatattgaaatgacatgtgatgtttgtcatggttctggatatgcacctgaagttttaaaatatctttataaagataaaaatattgctgaaattttaaaaatgacggttgcagaagcaagcaacttttttgaagatcgaattttacagcaacaatttaattctttgatgagtttggggctagactacattgcaatcggccaacgcttaaatacattttcgggtggtgagcgtcaaaggttaaaactcactaaacaaattaatgaaacagataatatttttgtattggatgaaccgagtacaggtctacacccttctgacactgaaaaactaattagtttattaaataacttagttgagaaaggcaacacagtcattgtgattgaacacaacttagacatcataagtcaagccgactggattcttgatattggtcctttggcaggtgacaaaggtggtgaattggtattctcaggaactgttagcggtttgctttcagcaaaaaaatctttaacaggttattatttgaaaaaatatttagagctgtaa

SEQ ID NO: 47544 - DNA, 1002 bp, Acinetobacter baumannii
atgattgcagctgacttatggatgcctcgatccaagcgcttgaaacgcccgtatcagcctcgttacaaccgggattgctttggtgaactgatccaaattgatggctcacaccatgactggtttgaaggacgcgctgctaaatgctgtctgctggtgtttatcgatgatgctacaggaaaattgcagcatttacgcttctgtgagtcagaatcaacctttgactatatgatttcaacacgcttatatgtcgaacagcacggtaagcctttagcgttttacagcgacaaacattcagtctttagagtgaatcaaagcagcaagaaagacaccaagattacccagtttggacgtgtactcagcaccctgaatatcgatatcatcttcgctaattcaccgcaggccaaaggccgtgtggaacgggccaacagaacccttcaggaccgtctgatcaaggagatgcgcctgaaaggcatctgttcgattgagcaagctaatgtctggctaccctgcttcattgagcagttcaatcagaagttcgccaagatggcttttaatcctaagaatctacatcggcctatcactgaaacagccgaagagttagatgatatttttacttggcgtgaaccccgcagagtcacgaatagcctgacgattacttatgataaatgcgtatatctcctggaaaacaccgaagaaaatcaaaggttgatcggtaagtatcttgagttcctggaatacccggatggtactgtagccatcatgcataatagccgaaagatcaattacagcctcttcgataaattaagtcagctgaatcagcgagagattgttgagaataaacggttgggtgctgttctgaatcatatccaacaacagcatgaagaactggaacagcaaaacaaacgcaatcgttctcaaaagatgccaagcagacgtgcacagaaaacagcaattcaagaactaaatctaaatcctgtgcttgacttggaaatgtccatatag

SEQ ID NO: 47545 - DNA, 864 bp, Acinetobacter baumannii
atgaacctgattgaacaattacaaagcaaaattgagcaggcgagaactctttataaagagttccgtctgtatgatttggggagctttgctttaaaccgttttacgccaaaagatggttttgagcaggttttaaatgtgcgttatggcttaaagcctcgccatcgtctagatatttatcgttctactaagcgcttagctcatcgaccactcattgtttttgtacatggtggtgcttggcaacatggtaataaacgagactatttatttgtgggtgaagcgtttacgaaagaaggttatgacgttgctgtcattaactatcagctcgcaccgaagaatatttttccaagttatgtagatgacttaacgcaagcgttaaattatttacaccagaaccaagaaaaattggaaatctcgacagagaatattgtgcttatgggacattcggcaggtgcatttaatgtgatgtctgctgtttatcatccaaagccaaatacaattcaatgtttaggtaatattaaagcaatttttggtttggcaggtccttatcattttgattataaaggtgatccgcttgccgaagatgcttttgatcaaagcatttcttataaagaagtgatgccatattattttgtaaatcaaaatcatattaagcattatctgctcatggctgaaaatgatcagcttgtaaaaaaagaaaatacctttgatcttgatcaggcacttagacaaagcggaaatcacagtcatatcgctgtgattcctaaaacaggtcatattacaattttggcgagtttatcgagttttgtaagtcattacttccgaactaaacggaccattttgcactttctggatgaagtattctaa

SEQ ID NO: 47546 - DNA, 1206 bp, Acinetobacter baumannii
atgtcttcttttcatcaaattgagcaaagcacatatgaacattcaacacctgcctggggtgccgtctttgtaatgtcgctctgctgtgcagtattaattgcatctgagttcatgcctgtaagtttacttacccccatctctttagatttaaatatcagtgaaggccaagtgggtcaagcaatcgcaatttctggtatttttgctgttattaccagcttatcgattagccgtgtatttaaggcattggaccgacgtcatatcattttattactcaccctactgatgattgtctctggcatagtcattacatttgcccattctgcggttttgtttatgttgggacgtgcaatcttaggcgtagtgattggtggtttttgggccatgtcgacatcaattgttatgcgactcgttcctccgctttcagtacctaaagcactcggtttattaaatggcggaaatgctctagccaccacaattgcagcaccattaggaagttttttgggttcaattattggctggcgtggtgcttttttctgtattgtccccatcgcgattgttgcacttatttggcaatttaaaagtatgccttctcttcctgcaatattgtcggccgagaaatctaaaaatccatttggtttactaaaacgcccaattgtactttatgggatgaccggaattttattactctttatgggtcaatttgcgctatttacctatctacgcccatttctagaaaccgttactcatgtcgatgcgacaatgctatccattttattattaatattgggtttagcaggtttagtgggtacatttgtaattagtttaatcctccaccaacatgtttatcgttatctgattcttattccattcatcatggcagtgattgctggagcttttgtatttggtggtgagcatttatggtttgttgctatattgatgggtttatggggctttattggaacgtcggcacctgttgcatggaatacatggcttgcccaaacactacatcaagatgccgaaattggtgggggtttgatagttgcgattattcaatttgcaattaccctaggtgcaactataggtggattattatatgactcacatggctatagcgccacgttctatatgagcgcaactattttgctattaggcgcgatgactgcttatattacatggcggaatgctactcacgtagcacatcaataa

SEQ ID NO: 47547 - DNA, 891 bp, Acinetobacter baumannii
atgataaataaagaaaactataatgatctttatgcttttttaatggtggcaagagagggtagttttactaaggctgctgggaaaatgggaatttcacaatctgcgctgagccatacgattcggggtttagaagaacgtttgggaatgttgctcctgaccagaaccacacgtagtgtttcacctacagcagcaggcgaaaggttgaaacaaacaattagtgctagcttcgatcagattgataatgaattatcccttttaacttcatttcgagaccaacccgctggtacagttcggattaatgctagcagccatgcgatacgggaagtgctgattccaaaacttaaaaagattgccggtgattaccctgatgtacaagtagaagtgactgcctatagcggcatggtcgatattgtggcagaacgctttgatgctggcgttcgtttcggaagccgcgtagctgatggcatgattgcagtacgcattagtccagatgtcaaaatggcggtaatagcaacaccagcatattttgaacaatatggaattcctcatactcctaaagatttaatcaatcatcaatgtattggctatcgtttaaccacccaaggtagtgtttatgcgtgggaatttgtgaaagatggtcaagaaacaaaagttaaaattcaggggcaatggatatttaatgaaagttatgagattgcacaagctgttcgggccggatttggactagcttatattccagaagatttgattcgagaagatctaaaagaagggaagctgattcaagttttagcagagtacagtatccagtttcctggataccatttgtactatccacatcgcagacaactttcacctgcattacggttggttattgatgtgctacgtgagtag

SEQ ID NO: 47548 - DNA, 477 bp, Acinetobacter baumannii
atggctagttataagttttttaaaggcttagtcagcctatgtgttttgttctcagtgacttccacttcttatgcaataaagcctcaaggtaaaaatcaacaaaggggatcgatgatgaaaatccgtattgatattgatggaacacagcaaccactatttgccacattagctataacacctactgttgaagattttatcaaacagcttccactgacattaacacttaaagattatgacgctaccgaaaaaatagccgatctacccaccaagctaactacacaaaacgcgcctgatggttatgcgggcaaagctggtgatcttacctattatgctccgtggggtaatctggcttttttctataaagattctcatattggttatgccaatggcctcatttttcttgggaaacttgatgctattccccacacattcaagcaaaaacaacacatcaaaatttcaatttcccaaatcgaataa

SEQ ID NO: 47549 - DNA, 1071 bp, Acinetobacter baumannii
atgacgacatctcccttatttaaaaagcttaaaacccatacagtggttgcaatttgtgcggcaactattggtctattttcttcaacttcagctatggcggccgatatgtctaatggtgcaaataatttttatcaaagtcagcaagtgactattcaaaaagtgacttttaaaaatcaatacaatatggatattgtcggcaatctggttattcccaaaaatttgaataaaaagactaaagcctctgcaattgtaattggtcaccctatgggggctgtaaaagagcaaagctctatgctttatgcacaaaaactagctgaacaaggttttgtgaccttagcaatcgatcaatcattttggggtgaaagcgcgggccaaccaagaaatgtggtggcaccagacatttatgcagaagcgtttagtgccgctgtagattatttgggaacacaatctttcattgatcctaataatattggtgtattaggtatttgtggaagtgggagttttgtcattagtgcagcaaaaattgacccgcctatgaaagcgatagcaactgtcagcatgtatgatatgggcgcagcaaaccgcaatggcttacgtcactcacaaaccctagagcagagaaagcaaattgttgcagaagccgctgcacagcgttacattgaatttaaaggtggtgaaaccaaatataccagcggaactacgcatgagctaacagcagatacacaccctattcaacgtgaattttacgacttttatcgtactccacgcggagaatatacgcctaaaggctcatcgagagagcttacaactcacccaacgctcacaagtaatgtcaaatttttaaacttctacccatttaacgacattgaaacgatttcaccacgtccgatgttgtttattacaggtgatcaggctcattcaaaagagtttagtgaagaagcttataagctcgcaggccaacctaaagagctttattacgttaaaggcgctggacatgttgatttatatgatcgggtcgatctcattccatttaataaattaaccagtttctttaaacaaaacttgaagtaa

SEQ ID NO: 47550 - DNA, 471 bp, Acinetobacter baumannii
atgccacagaaattccaatacaaagacctaaaaaaacagaagaaaagctatagtggcaaaaagaagacacatactttcaaagtacaggccatcattcattatcaaactcgaaaaatcctaagtttatgcacgagtcgtggtgccgtacatgacttcgaactcttcaaacgcaacttgaatcagattcctacaggtgcctttatccttgctgataagggttatcaaggaatttatacagtgtatccaaacagcttgttgccattaaaagcaaagaagcgctgtaaaatggatcctgaactcaaaatttataatcaggaaattaataaaagaagaatagggattgagcatgtatttggccgtttgaaaaccttcaaaatccttgctgtgcgatatcgtaaccgtggcaaaagattgggcttaagattcaatttaattgcgggagtctataatatggaactgagtgaaaaatga

SEQ ID NO: 47551 - DNA, 297 bp, Acinetobacter baumannii
atgcatgtacccgccaaaggcagaccacctaaattgagcatagaggatcagattcttctatgcttaagttattggcgtgaataccgaacattgtttcatgtggcaacaagttatggcgtgtcagagcccactgcttcaagaattgtccgccatgtagaggattgcctgatcaattccaatctattcaatctactgaagcatttgcccgaaggtgaaggcattgactggaatgtggtgattgtagatgccacagaaattccaatacaaagacctaaaaaaacagaagaaaagctatag

SEQ ID NO: 47552 - DNA, 732 bp, Acinetobacter baumannii
ttgaaatatctattacgtgcatcacagatggctcgaagcacgtacttttatcatgagcagcgatcaaagcttaacgacaaatacagtgaccttaagcagcaaattaagatgatctatcataagcataaaggtcggtatggctatcgtagaattactcttgctttaaagaatatgggattaacaattaaccataaatgtgtacaaagactcatgcagtcaatgaaacttaaatcacgcattagaatcgcaaaatatcgttcttacaaaggggacatcgggcaagttgcagataatgtactacagcgccaatttaaagctgacaaaccaaatcagaaatgggtaacggatgtaaccgagtttaatattcgaggagataggctttacctatcaccaattatggacttgtttaatggggaaattattgccttccaaacccaccgtagaccaatgtatgagttagtaaaaaatatgttgaaagatgcacttacgaagcttgcagatcatgaaaagcctatcatccattcagatcagggatggcaatatcaaatgcgtcattatcagcgagaactagcagaaaatggtttaacccaaagtatgtctcgtaaaggaaattgcttagataatgcatcaatggagagtttctttggaatacttaaatcagaatgtttctacggtgaaaaatttaattctgttgaggaattagagaaaactgtgaaagaatacattcattga

SEQ ID NO: 47553 - DNA, 2943 bp, Acinetobacter baumannii
atgcaactggtaatcattttcatttgtttgtatgatgctgaaacaagattaatttgtcaaccgagttatcgttcaatgtgtgaattaacttcgatgcaagcggcctgctggtttggtcgctctggcaacgcaactttaggtggggttgctgcccatctctatgcagaatttgacggtcaatttattgatctacaaaaattacatttagcacttcaacgactttataaagaacaccctattttgagattaagtttgagtgccgatggcatcgcaaacatcatggctgagaaggctcaacagatattagaagtcgatgatttttcaaagcttagcgatcatgaaattgagcaaatgctcatgcaaaaacgggagcaatggacccatcaaaaacttgatttaagtcagggccaaactgcaagattttctgtaagtgttcttaaaaataatatttttcgttttcatatagatacggacatgattgctatagatccatccagcttcttgaatttaatggaagatctttctttgttttatgaagacccagaaatatcattctcccgtccgcctaatttttttgactggtatcaaaaagtacggacggatcctgacctaaaaaaattaaaccaacgagaccgcttatggtggaaacaacgtctgcctcagattagccctgctccgtctctacctttcattcatcaagaattcaaaacagcaaaaagtgatcgtttaagtacgtggttatcgccaaaagaacgaaaagcattacaacaacttgctagaaaacaacatattactgtaactaacctgatattaggtttatttgcctatacgcttggtcatgcaaccaaagatcacagctttcgattgaatattcctactttttggcgcgaaccagttttaaaaaatgtcgaaggcactattggtgattttgctaatctagtcatccttgatgtcgatatgaaaggaataacaaccttagctgcattctgcaaacaaatagcaaatcaaatgcttgagttattagagcattcacattattcgggtgtgaatgttctacgtgatctgtctcgttatcatggtagtgcacagattgctccagtggtatttacagcggcactcgacttagaaaacgataatttgctttctgaacgtgtccgtcgtgtttttggttcaatgaattgggtcatttcacaagggccgcaagttgcacttgatgcacaagttgctcatgtagatgacggtattttagttaattgggacatccgtttagatgccctacccaaagaatggatcacgaatttatttgaatctttcattcatttacttaaaaatcttgcagcacactctgagcaacttaatacacaaattataaactcagcaaaaaatactccatcagatcgtacgtctcaaacaccattaaatgcattacaacaagcctacctattaggccgaactcaagcccttcctttaggtggtgttgccatgcaagagtttaggcagtatcacggcaaaatggatattgtcttattaagacaacgtttgacagaaatggtacggcggcatgacagcttacgaacctatattgataaaaacaggttagtacaatatgtaagcgatcaagtgagtgtcaatttaaaagaaatagacctaactaaatgggaacctgaacgtgcttctcaccacatcgaatcctataaaaatagttatacgcatgagctatttgatttaaatcagtcgccttggaatatcaccgtatttttattaaaaaataatctattaacgatttttgtccgctttgatgcattaattttagatggccgatctatagcttcacttatgttagagctatttgatggacaacaacatgatatccaaacacaaatagaaaaaaatgaagttgaaaatagcttatctgttcatcacacagatatggcttactgggaaagaaaattttctaaattatcggctattcctgcgcttccgtggaaaacacccttacagcatttaccgacttcacgttaccaacgtaacagtctggttatagaaaaagatcaatttaaacagttgtctaaaattggcgcaaaacattcactgtttaaaaactcaattattatggcgattattttggaagtgctatctcattggagcacggacaaatctctatgcgttgctgttcctacacttcccctctatgccggcccattttccaatagctctacgtttattgctgttgagtggaaaacctcacatcaatttgctgaacaagcaaaccgcttgcaaactgaagttttagagggtttacagcatctttcattttcaggcgttgatctcgctcgactattatttgaaaaagttggcactgctccagtattaccgattgtaattacaaatggtttatcatggcctgtattatctgaatctcatcctattcagcaacaagatggccttactcaaacaccccaagttgcaattgatattcgctttagcacaagaaatgacggcgctttgattttcgatattgattatgcccaagaagcattttcatcccaaatgattgaagatttcttagatgcactgcaattagcaatcaagcaaattatttgttcagaaatattcagttttgatctcagcaattttttcagtgagcttcaaaataaacgactatattttaagaataatgagtccgatcatttgtctattccaattgataataatgctaaacagcaaaatcaactactcgacatttatttagaagtgataggccacacaccaaataaggaagtggacagctcaactcattttactcatctcgggctacgtccacatcatttaaaggccgtttcaaaacgtattaatgaaacatacgcgattcagctctcacctgttcaacttattcaatgtcgcaatattgctgatgtagagaaactactaacaccacattaa

SEQ ID NO: 47554 - DNA, 2412 bp, Acinetobacter baumannii
atgaacaaaaataaagaaagtcacggctcaaagtttattttaaatacattaacagccagtatgttgttagtgagcggacaggtttttgctttagaagcgttaacagatgccgatttgagtgcggtcaatggtcaagatggaatctcgatacaaacgactttcaacgaaatcaatattgataatgcttattgggacgaccatgcaggcacaccaacaagtgctgatcaaattttaagagctcaagcgagtggtgtaaaaatacaaaaaagcaatgcctctacacaagctttaggtacaaactaccgtttagacgtaggaagtaatgcgactacaggtaaagcaggggtcgatttttctatgcaaagtagcccctcgctcattactgtaaatagcgtcaaagtctgtaatagttcggctgcttgttcacctactttaggacagttggctatacaaacaacttcgcctttaaacttggctcttgctactcaagatggtttatttagcccgaatagtcagtcaagcatgacgcttggtctaaataatgcaaatatttatttagggcaattagatgcgcgtagtcagctaaatcaattgatattaaagaattttaactttaattttgttggtaaaggcgtcatgtttattgatcctacctgtggcatagtcttacaaactaatacagggaataatactgctgcggttgggcaaactccaaatagtacctatggctatgtcgattttaatcgtgtcgccgattctgcttctggtttaactgctggtacatatgtagacagtagtgggaaagtaaccaattcaggtctaaatattgaagtaatgcttagctcaaatgttgataaggcaaattcttatgccctagacacgacaaatagcccacagaattctaaaggcttgattcgtttaggtgctagcggccgtatggttaacagttacctacaagtccgtggtatggatggttcttcagataaaacaacattaggtactgccaatacggcttctggaacgggttcaagtaatagtattttaggtaactctagaattgcctttcgtatgaaaggggagttcactaaagataatgattcgatgttaggttcagatggtaaagcaactaccttggaaattggtggggcagggctgaatgcttatggttttgaattcggtaatttaacggggctgaactcggctacacgcggttattttgacagtggaaatatttatctaaatcttgctgatacaaaaactttattaatgccaaataacgcaacgttaaatgcaattcgtttaggatctggcactttaaccactgctgccgattatcaacataatattcatcgtgatacggtgactaatccatttagcttaattcttgccatgcgtggagcagagtttcaggcattttcaagacgcggtcgttttaccaccagtgcaaatgtcgctgctgccaatcaatttgcagataatggtttaaataaccagtggggtttggcattacctttttataatttaaatgcgaatgccgctgtctatggtgtagatgcgcctgcaaatagtgcttattactatacaaaagatgccaacggtaaaccgattcaaaatttagttgcaacatctggtacaacttcacgtttaggttttggtatagctgtcggaacgacaggtcgagatgcgggcggtactaaaacaacttcaattttattaattgatggttctccaaatgctaataatgcgggcaaccctaccgattattatatggggttacgtaatattgatatgttcctcaaaggcaatggcactattggtttagaaaatggcagtttaaatatcggtttaaaagatatgttacttgctttatcaaccaaaattgcagcaggttatttaccaggagctaaatataaaacttgtccggcagcaggatcttgtacttcgccaatcgataactttgccaaaaataatgatgtcttatttggtttaaaactacgtttaggcggcgatcttaatttatcgatagtgccgaatagttcaattgcagatggtagtgctttaactgtactcggcgattttacaatgcctgcgacagcaactggaaatactgtacaaattagtgacccgattgatggttctgcaattggttttgacaatattactggaaagctagcgtttaataccgctttagttgtgggcaaagataccgcaagtggtttaggtaaagttggcgtaaataccgcggtttattttaaccctgataagagtattgacggcgcattacgtgtgaaagatattaatttctatccaccttcaacaggtgcaggagcacgtttaggtgagcttgcaattacgggtggacgtctaaatagcagctttagcattgtgcctagaaatggcgcctttaactaa

SEQ ID NO: 47555 - DNA, 2136 bp, Acinetobacter baumannii
atgatgactacacttaattatacggtcggttttcaaaaaaccgttttagcaagcttaattggactctgtttaagtcaatctagctttgctcttgaagaactttctgatgccggtttaagtgaaactacaggcgaaggtattgcaatattaccccaaaatgcatttatggtatttcgtggtgctggtccaaatgaatctgtaaatcaaattattactgatcgtagtaaagatataggctctattaactatgtgcctgtaggacccttgagtgtggctgctgccgatactagtggtaatggcactgtggggccagaagaccgcgcagtaggtaaagctgatatctttctttatggtttagcactttccaaatcggacggtgatgcaaactcacgtattgccaatactgcaacagcagcagcgatttcgagttggggcacagcagccaatccttggatatttaaggtaaaaactgctacgaatgttcctaattttagtacaacggatagttctctttaccctgtaacatatttatctttagaggctcctttatatcaaccaacaattgatggtgcagaaggagctgatgcatataatttaaaattaggattatgggctgatgcctttgtacggaatcctaatattgtagcgactacagatggctctttagcacagttccagtatggcgatagtaatggattaattggtaccagtattgatacaaatcgggctaaccgattgcgcttacaaggtgttttaaatggctttagtctgaatggcagccagattagtatgtttcaaactttaggtggagcaactactacaggtggaatgagccccttttacaataatactttaggtatgtctggcctagtccgcttaaatacaggtgatagtaaaaataccagtatagtgactgaaaacgttacgagtcaaacccagacatatgcatcgagtaccaataatggttggcaaacggtacatgcaggcgcaaattctacattaagcacgagtagcactggagattgtggtaatagtggaacgggaagctttagcacattacgtggatgtcgttattacgtagaaaatcgcacaagaacagatacaagaacatcaagtaagacgcgtaattcctttaacgatacgagtaaagtcttacgatttagtacccgtgaaacttcagattcaccaaatacatcaaacaagttatatacaccagcattggattctactggtgctatagcaccgaaatttgctgatagtgagggtttatatttatacaatccaaatattaatttagtattaggtaatttatatcaacccgttattttagggactgatggtaaaaactttagtatagaaattgcgagaattgccaataagccagaaatatataaacaggtctatactgactatactggtgctgatacgacttataaaggttctacttgtaatgtttactcttgtgctaacccaacgcatagtagtatcgcaattggtacggtctatagtcctgataatggaaaaaccttgttagcaaatacaggtgaaggggcaataggcgtttcatttgggcgcttaatttcaacaggtacgcaagtttctggaacctccgctggtagtctagtgtcattgaacaattctgtgtctggaactacctcggcaactatgacagaagtccgttttaagcaaagacaacagaatactcaaacatgggttcaggaatatagttgtggtttatttaattcagactgtggttataaaactgctggttatttatatcagtgggaatataacaaaggaacaggcacttgggtaattacggatccaacagctaaaccagcagatgcaccacagtgttctagtctattaggatgcaccaacaaatcaggttcaaccccaatgtatggaactgttttaaaccgagattggaataattctgctattccatggctcacatcaagaaatgctgttgtcaatgatttaattggaagtagtaatggcaccacaggctatgtgattccaactgccaatcaggcacctgcattatccaatattagtcctctaaacaatttaggttcagctgttattgatggtgttttaattcaacatttaaagctcaccacaaaaggtttataa

SEQ ID NO: 47556 - DNA, 1308 bp, Acinetobacter baumannii
atgcgacagtttacgtctcttcaggttgcgatattagcactcggaagtttatgcttttctacagcctatgctgattctactttagttccaatgtcagatgctgagctatcagctactcgtggtcaggcattaatgagtatgtcttatatcgcgcctaccgatgctgcaagtaattctaatactaacggaaacatgggcttctatcgacttgctctagatgcccaattagaactgaatgccaatattaaaaaattacagttaggttgtggtggtgtcaatggagcaggggcctgtgatattgatatcgattatttaagcttaagtggtggtactgtagatagtaccagtgctgaacgtgctgcctcttcagcagttattactaatccatttttagagttcgctgttaagaacccgaattcagcgtctacacgtgaaatacaaggtttccgattaagtgctaaatcgctttcgggtttacttacctttggtttgcaaaatggcgatgctgcgagtggtattaattctttgagtggttacttaattactaaaccaacaggcgggactgtgacaacgaatccttactatggtattactcaagatgaaacaaacacagcaattactggtcgagcaactgttctaggacagggtgtcacggttccttttacatccactgcatataacttaaatttaggtgtaggtacgggtacattgtcgatgggggaacagattattacgggtaaacgtataaatacggctaatttaaaagcgacagctacagtcggcggtctggctattagtgggaccctaaatgctacagcttcagtacttggaattcctattcctatttctggtaatgtaacaggttctgtagataatctagatgttaatgtagcaattaaacaaagtctgggttatttccatgctgcacaattaaatggatccgcagggtatctttccgtacagggggtaaatattctatggcctgaagctgcttctactgcacagactgggtggtggctagaactcacaaatccaattgatatcggccaaattactcctacaggtagcgttgatattgcactttctacaattgttgatgcattagggcaagtaagtgcttacttaaatagtccaggtcacgcagtagaatgtggaattttagcagctaattgtttaatagtagggaatcttcctgtagggacagttgatttaacaggaaaaacgccagcctctatgaccttaactaatgttgtcttacaaaaacaaaatttctcagctaactgttatggctctttgaaattctgttag

SEQ ID NO: 47557 - DNA, 483 bp, Acinetobacter baumannii
ttgatttatggcaatcagacaattgatgattttaaaattgatcaatccaaactaagctttggcaatattgaaaataattttgtctttaactatttggatttcttgatttattgtgatgcagaaaatagcaatgataaggtaatcaaaaactttaaatttacgcaacggagttcggttgagcatttttatgcacaacagatagagggagagcgtgataaattagatcatgaaaatttacatcgctttgggaacttgtgtctcattagttcaagtaaaaattcaagcatagggaatcgcttgccaagcgctaaacgtgattattttatgcctgagataaggaagggtaaaattgatacccttaaattgtatttgatgattcaaacgcttgaagaagaaaaagtttggaaaaaagaacaaatcctagatcacgagaaaaagatgcttgatttgtttgagttagattaccaagactttgtgaaatga

SEQ ID NO: 47558 - DNA, 1152 bp, Acinetobacter baumannii
atgacctaccccgatctcaacagccgcccggcgccggaccgattcatccggcgctggctcgtcatcactggctgcatcgccgcactcatgctgctgtggcagttcttgcctgccatcgaagcctggttcagtccgcgcgaagcggccgagcgcacggtgacaccgcgtggtgatctggcggcagacgagcagaccaccatccaactgttcgagaaatcgcgcgggtcggtggtttacatcaccacggcgcaactggtgcgtgacgtctggtcgcgcaatgtcttttccgtgccgcgcggcaccggctccggcttcatctgggacgatgccggccacgtggtgaccaacttccacgtcatccagggggcatcgtctgccacggtcaaactggccgacggtcgagattatcaggctgcgctggtgggcgccagtcccgagcacgacatcgccgtgctcaagatcggcgtcggcttcaagcgcccgcccgctgtgccggtgggcaccagtgccgacctcaaggtcgggcagaaagtgttcgctatcggcaatcccttcggattggactggacgctcaccaccggcatcgtctcggcgctcgaccgcaccctcgacggcgaagggggcgggcctgccatcgatcacctgatccagaccgacgccgctatcaaccccggcaactccggcggcccgctgctcgattcggccgggcggctgatcggcatcaacaccgccatctacagcccttcgggcgcgtccgctggcatcggtttcgctgtgccggtggataccgtcatgcgcgtggtgccgcaactcataaagaccggcaagtacatccgtccggcgctgggcatcgaggtggatgagcagctcaacgcgcgtctgcaggcgctgaccggtagtaagggcgtattcgtattgcgcgtgacgccgggctcggtggcgcacagggccgggctcgtcggcgtcgaggtcaccgcaggcggcatcgtgcccggcgatcgcgttatcagcatcgacggtatcgccgtcgacgacgtcaccacattacaggcccggctagacgacaagaacgttggagatgttgtggtcttgttagtggagcgggccggcaagactcgcgagatgcttgtggaactacaaccgggagtttga

SEQ ID NO: 47559 - DNA, 594 bp, Acinetobacter baumannii
ttgccccaacaaggccagaagatgggtgagccggctgatggaatcggccaggcccatgacacgcaaatcctcgttcgcaatatgcgcgatttcgtggccgagcacgccggtcaactcgcggagcgtgagactacgcaccagccagtaagtcgccccgagggccagcatcgcgcctgcgagcgccgcgatcttggcggggctggtctccgggtcgaggatcacgaacttgcgcgccagggcgatcagcccgatcaggatcaccgtcttgacctggatgatgctatcgcggcgcaaggccacccgcacgatggaatgcttaaactccatggcgatgagcagcgtcatgatcatgccgaacacggtctggaagaccttgtgatcgagcggattgaacgcatcgatgaccagcaggctgaagacgatcgagatcagctgcagcagcgagaccacgatgatcagggcaatgattgcggacagcgcgagcgcgatcacctgttcgaagcgctcgtagaacgtcatcactgcccattgggcacgaaatgttttgatcgggtccagttgcttttccttcatcgccattcctctcaattctga

SEQ ID NO: 47560 - DNA, 249 bp, Acinetobacter baumannii
gtgttgttggaagcggcatcgattgaagacgcccaagtatgggcggagcgatttcgtcaagacgttgcgacgacagcggtggtgtgtggagaggtgtcgatcagctatagcgccagcatgggggtgggcccccttgacgtctgcttaaactcttccgagcaggtgatgcagcaggcggacagcgcgctctaccaggcaaaaagacaagggcgcaaccaagttgtgggcgcacaagtatttcagaattga

SEQ ID NO: 47561 - DNA, 237 bp, Acinetobacter baumannii
atgagctcaatacatgaccgaagatatattggtttaattcattgtttaatttctatacgtgaggaacaaaatataactcaggtagaagtagcttcatctttaaaaaaacatcagtcctatgtagccaaagtagaaaatttagatcgaagattggatataattgaattacatgattggttaaaagctcttaattttcaacttactgaatttagtaaaatttctcatctcgaaaaataa

SEQ ID NO: 47562 - DNA, 762 bp, Acinetobacter baumannii
atgccgactacgtcaaccgccggatcgaggaattacggcagacactcagtgagtcaggtggggatagaccatgaacgggccggccattgggttgatggtgtcgctacttgccaatattggcatggcggttgcgcgtggggttttgctcgtaccaatcgccagaggcgcgacgagctgaagcttcgccaacaagcgaaaatcgacgacaacgaacggatcgccatcgccctggaaggcgcagaattggggttctgggaatgggatatcgccaccgacagcttcaggctttctgcccgcagtctggcgatgttcggcttcacctccgacgacgagaagattggcgccacccatgccgcatggcaagcgcgtattcacccggaggatttaccggtcgttctggcaaaggtgcgcgcttatcaagaaaacccgtcggagcgattggagtgcgagtaccgcgttcgtcatcgatccagcgtttggatttgggttttggatctcggccgatggctgggtgacgcgggcaggcaactgatagtcggcactctgctcgacatctcttctcgcaaggaaatggagcagcagttgctgtgtatggcgatcaccgaccccttgaccggcttgtcgaaccggcgggcgtttaacgaacgattacagctggaatgggagcgcctcaaacgcagccccgagatacaagcagcacttgtgctctgcgacatctatcacttcaagcgcatcaatggcacctatagtcaaaccgtttaa

SEQ ID NO: 47563 - DNA, 462 bp, Acinetobacter baumannii
atgcccagcatcaacagcacctgctcggccagccccagtcccaaagccaggtacaacgggtacagcctgacattgggcagattacgcaaaagctgggcatccgttacgcggtcagtggccaccaccaagggcaaggtcgggcggcgttcgaggaccgctcgcgcaatgcgctcggccgtctgcggacgaacaagcgtcagcaccaccagacgggcatgggccaatccggcggcggccagggtgtcgagccgactggcatcgccatacgacaccggcgcccccatcgcacgacccgcttcgaccctttggcggtccgattccagcagcaaatgcggcacgcctgccagacgcagcgttcgactcagcagcagcccgacttcatccgccccacagatgatcacatggtcgcgcaacgaccgcgcccgctcggcgacttcgccttcttcggcctgcggtggctga

SEQ ID NO: 47564 - DNA, 1089 bp, Acinetobacter baumannii
ttgcagcctggcggcgatggcgacggcggcgttcagagtgcccgccttgctggggtatctctctgtcggcgttgtactgggcccctcagtcatcggcgtgatcgcgccgggggagacgctgagctttctgtccgagctgggcgtggcgctgctgttgttcatggtcggactggaattttccctcggacacttctggctcgcccgcaggacagtgctgatggcgggcgctctgcagatgatcgccgtggccccgccgctgatcctgctattgatgtggctggggcagcccggccagagcgccgtgctgctcggcactgcggcggccatgtcgtcgacggcgctggtcagccgacaactggccgaccaaggcgagctcaccacccgccacggccgcagtgccatcgccgtgctggtctttcaggacctggccagcgtgcccctgttggccttgctggcgatctgggcgcgcggcgagtcgccgaagatcgagcatgtgctgctcgaagtattcggtgtgctgctgctgttcgcggcagcggccctcgcctcgcgccgtctgttgcatggtctgctgggctgggtggcgcggcggggccacgaggaatcgttcgtgctcgtctccttgtgcgtggtggtggctgccgccgccgctgcgcacgcggtcggcgtatccgccgccctgggggccttcctcgccgggatggtgctgggcgagagcgacttccggcaccacatggaaagccacctcaggccgtttcgcgatgtgctgtcgggcctgttcttcgtgaccatcggcttgcagctggatgtcgcgcagatcgtggcagcaccgctggcggtactgggctggctgttggccttggtgcctctcaagatggggctgaactttctggcgctgcgcgcaacccgcctgtcggcgctcgacgcctggcgcacaggcatcgtgctggggcatggcggcgagtttgcgctgctactcctgggcatggtcatgcagcagcacttggttgccgccaacgtggtgcaaccgatgctgatcgcgctggtgctgagcatggggttggcgccgctcctgatccgacaccatga

SEQ ID NO: 47565 - DNA, 441 bp, Acinetobacter baumannii
atgaagaatgatcttcacctcgtctgcccgcattgccagtccatcaaccgcgtaccgactgcgaagctatcggaacatcccaactgtggccgctaccagcagcccttgttcacgggcgagcccatcgagttgaccacggcgacgttctcgcgccacgtggagcgcagcgatctgccgctgctggtcgatttctgggcgccatggtgcgggccgtgcaagatgatggcgccacagttccagcaagcggcgaaccagctcgaaccgaggatctggctggcgaaggtgaataccgaggctgagccccacctggccgcgcagttcggtatccgcagcatcccgacgctcgccctgttccagagtgggcgggagatcgcccgtcaggccggcgcgatgggcacgcaggacatcgtgcgctggacgtcgacgcaagtgggacgctga

SEQ ID NO: 47566 - DNA, 1146 bp, Acinetobacter baumannii
atgcagatgcaatatagctatcgagctatcgacaaagagtttcatgaaccttggcagagagctttgggaaatgtgatcgagcacgccctcaagccattgctcgacaaacacactaaagattcagcgcaacttcaaatcgtccttgatcgcgacaagatcaagcggcaatttctggccagtggctatatgcacctgcccggcaaaaagattgtcagcgttactgcatcacatgacgagctgacgcccctcgcgcagatgctcgcaaagtcgttgttccgtcaggccaagaagcattttgaccgactgcatgctcaggatcaaatcaagcgcaaagcacgacgcgagcgcttgcgcgagctcaaggtgcggattgccgcaaaacccgcatcagccgcccataaggccgaggtgacccgaatgcctctactgtcgaaacttgaggctgtcgcaaggcgtgagctggcttatctgcgggccgtcggcgatttaccgcgcgattatccgacgctacgcgacgtggtggatgaagcgattgtccgagctgaggtggaatggcaatccgtgccgggggaaaaaaaggcttacaccggtcttttgaagcatctgttcgccgtcctggataacgaagtggcaagcagccggcaatttggcgaattcgtttctctggacgcgccggtcgaaccggatgcccaagacgtggccgaggccatggtggaagaggaaatcttcgaattttatcagcccgatgacacactcaagctggccgatatcttcgctggcagtcagcatcccgatgtcgcaacgatcgcggaacaggaggagctgattgatcggtcgagcgagttcgcttttgcatttgacctgctgaaggacatgccgcgtttgtggcggcgcatttttctgcttatccgtgtggacgggctgaatgccagcagcgtctctgaaatcctgctgattcctaataaggaagatgctgtccgaaggtggctcatgcaggccgaagcattcatcgctgctcatctggaagaggccggagtaagcaaaaacgggaacgattggctccaaggcgttgattggtcggcattgtctgtgacccgaagcgaggcagcctcactgtggtccaaggaggcgaaccatgaagaatga

SEQ ID NO: 47567 - DNA, 612 bp, Acinetobacter baumannii
atgaacacagataccatcgccaattccaatgcggatgaccccaacaaagcactgtgttcgctgagccaaaattggtggctttttgtgctgcgcggtgtcttggcattgatttttgcagccctcgcgttctggatgccacaatcggctctgttggccatgaccatcatgttcggcgcattttccttggtcaatggcgcgttcaacttgtttgcagcggtgcgccatatccagaaaaaagagcgctggggctggctgctgttcagcggcattgtcggcatacttacgggcgtcgtcgtcctggttgctccttgggtcgccacgatagtcttggcttcttttttatgggctagcgtgggcttctgggcgattttcaccggtgtgctggagatatccgccgccgttcggctgcgtcgggaaatcaagggtgaaatctggcttgccctcagtggactgctctcgattatacttggcgctatcgtcttgtggatattttttacccgtccggtcgagtcattcgtggccgcaggctggctgttgggtttccatgcggcagtctatggcgtcacgcttttgttctttagttggagtcttcgcaaaacgcgcctggggtaa

SEQ ID NO: 47568 - DNA, 888 bp, Acinetobacter baumannii
atgaatgagcaaacaccgaatcccaatgcgacgaacgaaggaataaacgaacaggccgcggtaagcagccttcctgtcagtccagaggccaagcctgaagtcgtcacggaggtacagcctgaggttcagaaggaaacggactcgcaggcggcagacaaacgtaaacaagtcctcgatgaggccgtctcggccttgtcgctgaccaaatcagcgctggccgcacttgacggcaaggacactgcacgcgcattggcaacgctggccgaagtgacgggaaagctggagctgatcgtcgcgcgcgaacccacgctcgccctggccggcgttgatgtgcgcaccatcgtgcacgacttgttcgccaacacggaaaccattgaggcgatgaccgacgaggcgctggatgccctcaaacatggcgaggtgcaacgggctcgccacgtgctggctttgctggccagtgaaatcgtgatcacagtcaccaacatccctttggcgtcctatcccgcagccgtgaaggcagtcgtgccgctgatcgatcagggcaagatcgaagaagccaaagccgcgctgcagtcagcgctcagcacgctggtcgaggagcgcagcgtgcttccgctgcccgtcctgcgtgcgaagctgctcctgaagcgcgcagagcccctggtagaagatggtcagcgcagcgaagcatccaatgagcgcctggagacattgttgaacgaagcccggcagcagttggaaatggcagaactgctgggctatggtaaaaggaaggactttgagcccctatacgctgaactcaagaaaatcaaggaaaagacgggagggggaggctgcggaaaaggctggctcgatgaagtcaaggcaaaactgtccaagttgttctga

SEQ ID NO: 47569 - DNA, 690 bp, Acinetobacter baumannii
atgggggctgtcgtgtccgaccccaacgggctgacatgggcagccaccctcgtgccgctggcggtcactatccccacagcggggcacacggtcatcttcaagcgtgaccctcgatcggccacgctgtgggtgctgctgatcgcgctgttgccgctgggcggttcgctgctgtatgggctgttctgcatcaaccgttaccagcggcgggcgcggcggctgtttccgggggcagatcctgctgttcggcaggacctcacgcctacgatgccccagaccgtatcggcgccgtttgccggcctggcgcacctggtgggacgtgccaccggccagtcgctgaccagcggcaagatcgacaacgccaaagcggaactcgcccgagcactgaacaccctggtggtgacctcggtcgcctttcctctgaccgtgctacgggccgaagccgcgatcgcaaaagctgaaaagctggccgagaccgacaagcgcgatgccaagcagaacgaggagctcagcaccttgctgtcgtccgtgcgcacggagatcgagatggcgcagatcctgggttatggcaagaaggcagacttcaaacccatcttcgatcaggtgaagttcattgagcaaaagtcggctggtggcaaaagcggcaagggatggttcgacgagttgaagacgcgcatccaaaagctgttttga

SEQ ID NO: 47570 - DNA, 2850 bp, Acinetobacter baumannii
atggacagaaaacaatgccaggtctgcggccaacccgccaccgtgcgggtggaagccaatctcaacggtcgtcacagcaccatgctgttgtgtgacgaccattaccgtcaactggtgcgccagcaaaagcgcaccgtctcgccgctggaagccttgttcggctcgcgcagcggcctattcgaggacttcctcggcagtgacttcttccgcatcggcgacgacgcgacgccgatggccgccgataccgatgacgtggtcgatgcctcgttcggcgagcccgccgccgcaggttcgggtgcgccgcgccgtcgcggcagtggtttggccagccgcatcagcgaacagtcggaagccctgctgcaggaggccgccaaacacgctgccgaatttggccgcgccgaggtggataccgaacatctgctgctggcgctggccgacagcgacgtggtcaagaccatcctgggtcagttcaagatcaaggtcgatgacctcaagcggcagatcgagtccgaggccaagcgcggggacaagccgttcgagggcgagatcggcgtgtcgccgcgcgtgaaggatgcgctcagccgcgctttcgtgacctccaatgaactcggccattcctatgtcggtccggagcacttcctggtcggtctggccgaggaaggcgaagggctggccgccaacctgctgcgccgttacggcctgacgccgcaggcgctgcgccaacaggtcagcaaggtggtcggcaagggcgccgaggatggccgcgccgagacgccgaccaacacgccggaactcgacaagtactcacgtgacctgaccaagatggcgcatgacggcaagctcgacccggtgatcggccgtgcgcaggagatcgagaccaccatcgaggtgctggcccggcgcaagaagaacaacccggtgctgatcggcgagccgggcgtgggcaagaccgccatcgtcgaggggctggcgcagcgcatggtggccggtgaagtgcccgagaccttgcgcgacaagcgcctggtggaactcaatatcaacgccatggtggccggcgccaagtatcgcggcgagttcgaggagcgcgtgcaaaaggtgctgaaggagatctccgagcaccagggcgagctgattctgttcatcgacgaggtgcacaccatcgtcggtgccggccagggcggtggcgaaggcgggctggacgtggccaacgtcttcaagccgatgatggcgcgcggcgagctgaacctgatcggcgccaccacgctcaacgagtaccagaaatacatcgagaaggatgccgcgctggagcggcgcttccagccggtgacggtgcccgagccgacagtggcacaggccatcatgattctgcgcggcctgcgcgacaccttcgaggcgcaccacaaggtcagcatctctgaggacgcgatcatcgcggcggctgagttgtccgaccgctacatcaccgcccgctttttgcccgacaaggccatcgacctgctcgaccaggcggccgcgcgcgtgaagctgtcggccacggcccggccggtggccgtgcaggagctggagtccgaactgcaccagctgcggcgtgaacaggattacgtggccgcgcgcaagcagtacgacaaggccgccgagctcggcaagcgcatcgaggccaaggaggccgagctcaagaagctgatcgagggctgggagcgggagcgggcctccggcagtgccgaagtcaaggcagaacacgtggcccagatcgtttcgcgcctgaccggcatcccagtcaacgagttgacggtggaagagcgcgaaaagctgctgcacctggaacaacggctgcacgagcgcctagtgggacaagacgaggcggtccgtgccgtggccgatgccgtgcggctgtctcgcgcgggcttacgcgaaggtagcaaaccggtggctaccttcctgttcctgggcccgaccggggtgggcaagaccgagctcgccaaggcgctggccgagtccatctatggcgatgaaggtgcgctgctgcgcatcgacatgtccgagtacggggaacgccataccgtggcacgtctggtgggggcgcctccaggttacatcggttacgacgaaggcggtcagctcaccgagaaggtgcggcgcaagccctacagcgtgttgctgctggacgaaatcgagaaggctcaccccgacgtctacaacatcctactgcaggtgttcgacgacgggcggctcaccgacggtaagggccgggtggtggatttcaccaataccatcatcatcgccacctcgaacttgggctcggacatcatccagcgtcggctgaaggcccgtgacgccgccggcgaggaatacgagaagaccaagttcgaggtgatggacgtgctgcgcggacacttccgccccgagttcctcaaccgcatcgacgagatcatcgtcttccatgcgctgggcaaggaggagatccgccatatcgtcggcctgcagctcgatcgtgtggcccgcaacgccgccagccagggcgtgacgctcaccttcgatcagacgctgatcgaccatttcgcggaagaaggctacaagccggagttcggtgcgcgtgaactcaagcgcctgatccgcagcgaactggaaacgacgctggcgcgcgagatgctcggcggcggcattggcaagggcgatcacgccagcgcccgctgggacgacaaggccgaacgggtggtctgcgagcgccaggagccacccgcgaagccggccgagcctgagaagcccgatgccgcgaagccggccgagacgccgccgagcgacgcgagcaagcctgcgcgcaagaagaagtcagcgggcggcgaatcttga

SEQ ID NO: 47571 - DNA, 570 bp, Acinetobacter baumannii
atggacattgatttcaagaaattggctccctggaactggttcaaaaaggagcaggaagaacaacagagcactgcctcgctgctggtgcagcgcaatgacctgcaggtgtcgggtgggcccgtcagtcccatcctgcaattgcatcgcgagatcgaccgcctgttcgacgacgcgtttcgaggcttcggtttcccgacgctggccatgccacgctggccgtcggactggccgggcatgctgaagccggcgctggacatccaggagaccgacaagcagtacaagatcgccctggaagtacccggcgtcgacgaaaaagacatccagatcacgctcgataacgacgtgctgctggtgcgcggtgaaaagcgtcaggagcaggaaacgaaagacggcggtttccaccgggtggagcgctcctacggtagctttcagcgcgctctgaacctgccggccgatgccaaccaggacacgatcaaggccgctttcaagaacggcgtgctcacgatcacgatggaaaagcgcgaggccagtacgcccaagcaggggcgctcgatcccgatcaacggctga

SEQ ID NO: 47572 - DNA, 189 bp, Acinetobacter baumannii
atgcgatttaaaaaaatttcttgtctacttttatccccgctttttatttttaatacctcaatttatgcgggcaatacaccaaaagaccaagaaattaaaaaactggtagatcaaaattttaaaccattattagaaaaatatgatgtaccaggtatggctgtgggtgttattcaaaatagggtgtgttga

SEQ ID NO: 47573 - DNA, 1440 bp, Acinetobacter baumannii
atgacaacggctcgtcattcagatacggaaaattctcccgatcatctgcaacgaaaactgtctaaccgtcatttacaactgattgcaattggcggtgcaattggaactggcctatttatgggctcaggtaaaaccatctccctcgcaggtccttcaattctctttatttatatgattattggaggtatgttctttttcttaatgcgtgcaatgggtgaactactccttgcaaatctgcattacaaatcttttgttgatatggctcatgacctgattggtccttgggccggttattatttgggttggacctattggttaggttgggtgctggtcggtattgcggacctttcagcagtcattaactatttgagcttctggctacccgatggtgcaagcttctcaccaatacagcaggccatgattagtgcaggctgtgtgttgtttgtgatgggacttaacctccttacagtacgtctatttggtgaaattgaattctggtttgcccttattaagattctggcaattattggcctgatcggcgtgggtggctacatgattttcagccatttccaagctccgcaaggcgctgttgccagtattagtaatgtctggtcacatggtggtttattcccgaaaggtacagaaggcttcttggcaggattccagattgccgtttttgcatttgtcggggttgaattggttggtacgacagctgctgaaacgaaagacccagaaaagaacttaccgaaagcaattaacgcgattcctgtacgtattattttgttctatgtattggcgttatttattgtgatgtcggtaacaccgtgggatcacattcgtgcagataaaagcccgtttgttgagttattcttaaatgcaggtattccggtttctgcgatcatcatgaacttggtggtgctatcttcggtcatgtcttcaatgaacagcggtgtgttttcaaccagtcgtatgctgttcggtttatcaaaagacggtcaggcaccgggagcatttggacgtttatcaaaacgtgcagtcccatcaaatggtttgattttctcttgtactttcattatgggcggggcagtgcttcagtactttgttccaaacacaatggaggcatttacattagcaagttcactctgtgtgattctattcattagtgtgtggagtctcattatggtgtgctatttacgctatcgtaaattacgtcctgaattacatgaaaaatctacattcaaaatgccgggcggcatttggatgagttatgttgttttggcattcatgcttttcactttagtgatcttggcattagagcctgataccttaaaagcgctatatgtcagtccagtatggttgatcattttaggtgtgacttatcatgtgctgtataaaccgcgtatgaaaagactaggacgtgaactcgtcaacgaccattaa

SEQ ID NO: 47574 - DNA, 633 bp, Acinetobacter baumannii
atgaaaaagctaggtatacaaggtgtttggcgaggtaagaacaaacaaaccacccgtagccgagatgaccaaaaacgagcagatgatttagtgaaacgtaattttactgctgatcatcctgaccaactgtgggtcagtgactttacgtatattcaaactcattcaggctgggtctataccgcctttattattgatgtgttctcacgagcaattgttggatggaaagtatctacacggatgaatacagatatggtgcttgatgcattagagcaagcattgcatgatcgaggcatgccaaagaatgtgattcatcattccgacagaggtgtgcaatatctttccattcgctataccaatcgtttagaagcagcaaatttacgagcatcagtcggtacgactggtgattcatacgataatgctttggctgaaacagtgaatggcttatacaaaacagaggtgattgaatatttaaaagcagattggcaaggtttagcagatgtacaacttgcgacactaaactgggtagattggttcaataaaaagcgtgtacacagtgcactgggttatgtatcgccttttgagtttgaagcaatgtactatgataagattaacccgttaggtcaggtggcttaa

SEQ ID NO: 47575 - DNA, 306 bp, Acinetobacter baumannii
atgacacgaagaaaacgtcgtaatcattcagcagagtttaaagttaaagttgctctcgcagcaattaaaggcgaccacacactcgctgaactttctactcaattcgacttacatcaaaaccaaatcatcgattggaaaaatcaactgcttgagcaatcagtcaatattttttcacgaccaacagcacaacaagaaccagagattgacctcaaagctctacatgccaagataggacatcaggcattgcaaattgattttttagaaggtgcgctcagaaaaatagggcagctgagcggcaaaaaatga

SEQ ID NO: 47576 - DNA, 828 bp, Acinetobacter baumannii
atgatcgataagacccatcaactttcggtacgacaacaatcgcaattgattcaaatcaatcgcagtacgttgtattacaagcccaaagagatttcatcaactgatttgagttggatgcgtctaatcgatgaaattcatctcgactacccatttatgggcagtcgaatgatacgagatatgctacagcgtcaaggacatcaaataggtcggcgtaaagtccgacgtttaatgcgcttgatgggaatacatgccttgtatccaaaacccaataccagtaagcctaatcttgcacaccgtattttcccatatctgttgaaaaacatggtcatcgatcactctaatcaagtctggtgtacagatatcacgtacattcctatggctaaaggctttgtctatctgtgtgcaattatagattggcatagtcgtaaagtactggctcatcgagtatcgatcagtatggaaacagacttttgcatagatgcgttgcaagaagcaattgtgaaatatggttgtccagaggtgtttaatacagaccaaggcagtcaattcacaagcgaggcatttttgaatgagttaaaattgcgaaatatccgtatcagtatggatgggaaaggacgatggatggataatgtaatgattgagcgtttatggcgcagcgtgaagcatgaggaagtctatttgaaggcttacgatacggttaaacaagcgaaactatcaattgctgaatatttggatttttataacatgatacgtcctcattcaagtttgaataaggcaacaccaaatgaattttatgatcaacatttactaaaagtaatggcagcataa

SEQ ID NO: 47577 - DNA, 1353 bp, Acinetobacter baumannii
atgtctaaacactatgattatattgcgattggcggaggcagtggcggtattgcatcagtcaatcgtgctgccatgtatggtaagaaatgtgcactgatagaaatgggtgatattggtggaacctgtgtcaacgtaggatgtgttcctaaaaaagtgatgtggtattcagctcaaattgccgatgcgattcataaatatggtcctgactatggctttaatacagaattgaaatcctttaactggaagaaattagttgaaaacagacaagcctatatcagccgaatacatacatcgtatgacacaggactagctaaaaataatgttgatgtcattcgaggttttgcaaaatttttagatgctcaaacaattgaagtaaatggtgaaacgtacacagctgaccatattttaattgctacggggactcaagcattcaaacctgaaattgaaggtgctgaatatggtattgattccaatggtttcttcggattagaacacttaccgaagcggactgctattgttggttctggctatattgctgtggaattggcaggtgttcttaatgcattgggttcgaatgtacaattatttattcgtaaacatcagcctttgcgtggattagatcatttccttggtaaaacactattagagaatatgcgcagtgaaaatattaacgtgcatactcatagtcagattaacaaagtgactaaagttcaagataactcacttgtattacacctagaagatggtacagaacatagtgtagattgcttgatttgggcaattggtagaaaacctgcaactgaagcgatcaatcttaataagactcaagttcaattgaacgagaatcgctttattcatgttgatgcatatcaaaatacaacacagtctggcatttatgcagtgggtgatattacaggtaaagtcgagttaacacctgttgctgtggcagcgggtcgaagactgtctgaacgtttatttaacaataagccaaatgaacatttagattatgaaaatattccgactgtggtgtttagtcacccacctattggaacagttggattaaccgaagatcaagccatagaaaaatttggtaaagatgccatcaaaatttatagttcttcctttacatccatgtatacagcgataacagaacatcgacaactcacaaaaatgaaattaatttgtgtaggaactgatgagaaagtggtcggaattcatggtattggatacggtatggatgaaattctgcaaggctttgctgttgctttaaaaatgggagcaactaaaaaagacttcgataacactttagcaattcatccgacttctgctgaagaattcgtcacaatgcgttaa

SEQ ID NO: 47578 - DNA, 876 bp, Acinetobacter baumannii
atgggaattattaaaaaatatcatgataatccatatgaaattatcaccgttctatctactggtgcaaattttgcggtcgattcacgtcttgctttagctaaatatacaagccatattctaagtttcattcatctagtcaatgaatctacttcatccgctgatctacttgccaaaattagagttcctaaattagataaagacacaagaatgacatatttaaagttattcagaagatgtgtatgtagtagcttagataccgaactctcaaaaaaaatcactaaggtatccacggaagaattagtatccaatttttgcgatcatttccttgatattaatgaattaaagaaattctttaattcagaatttaatcaaagccatttaatgagcctgtcttgtctattagcagaatatgataaacggggagcttctggttatcagttaacagatttattatttgatgagctagaacgcttatacccaaacatagaagttcttggtcctagaggggctggtaaagatattgaattaaatacagtttatccttcatttatgggagggagatttccatgcgatttcgtgattcgagataagcaaagcaataagatattagctgttggatttagtcgctacgattcaactagaggcggggcacagtcagatgatagaactggggggaatgctcaaaaagttagtaaattgagagagcattgcattgcaactggggaaattattaaagttctatttgtatcagatgggcctggattagcccatagagatacatgggaagaaacattaagtctagatgagagttgggatgataatgtaagagtcacaactttaaaaaccttggaagaagtgactcttaattggttataa

SEQ ID NO: 47579 - DNA, 1293 bp, Acinetobacter baumannii
atggcaactggtattagtaaaaacgcttttgatgaagcgtcaacattggctttattgaagcataagaacccttatccgacagtacctaatgcaccaatagaacttagttataaaaataagttagctgaatttgaaattttgaaacctttgatttctgaatttatagatgttggtggtaacaagctaaaagtaaatattgagggatctgatttagtacttggagataatatttttgctttacatcagctgattaaacaaaatacaaaagtcgatcttatctatttagatcctccttacaatacaggaatggattttgaatcaagatctcaggaacatgcttataatgatagttttgcaatagcttcttatttggaagacatgagaatccgcttaattcttatgcgtgagatcctgtcagatcaaggtagcctttatctgcacattggtcatcagatgatgccttatttaaaagtaattttagatgaagtatttggagctaaaaactgtcgaaatattattactagaagaaaatgcagcagtaaaaactctacaaaaaatcaatatgcaaatttgaatgactatattcttttttatacaaagactagtaactacatttggaatcctcaaggtgaaaagcctagtgatgaatggattcaaaaggaatatccaaaagttgattcaaaagggcaatacaaattagttcctattcatgcacctggtaaaagaaatggatcaacaggtactgagtggcgcggaaagatgcctccagaaggcaaacattggcaatacaccccagacaaattagatgcacttgatgaagctggagaaatacattggtctaaaactggaaatcctagacgtaaagtatatttaaccaatgataaaaaattaccttataacgattattggcctgattttagagatgctcatcatcagagtgtaaaaattactggatatccaacagaaaaaaatcttcatatgttaaaaatgatagttgcttctagtagtaacccaagcagcttggttttagatcctttctgtggttctggtacaacacttcaagctagtgctgagttaggtcgtcaatggattggtatggatcaatcatttactgcaatgaagtattctattaatcgcttaaccaagggaacaaaagaaatgggagattatgttttatcaaaacaaacctcccaattgaatttaatagaaactgaaaaattacatagtttcaggctgttggtagataaagatgtctatgtagagtatcaagatcaagttgataatcttttataa

SEQ ID NO: 47580 - DNA, 531 bp, Acinetobacter baumannii
gtgttatatgaagcctattacccaagtgagggtagcgacaatcatccagttcaaattttctatggctttgtgcaagaaggttttgaaaaagactatcaactgacattggttgtcttttatccaaaactaacaggtacttcattatttaatttgagtgatgaaattaaagcaggtttagcaaattttctatttcagaagcatgtctatggggttaaagcatcgtttattagagttgcttttgtatgtccgcatctaaatgaacaagatttttatgctgaaagttggggagtagatgtctttgaaaattatgcacaagagcaaatcgagcaaagacctaagaaattcttggataagattttcaatagtggctttataaatatcagtatcaattcgcgtaatttaactattggattaactgaaaaaattacgcttattgatgaaaaaaaccttgatacagatgaaactgcgtatcttttaaatagactgaaagaagttaactatggtgacttcaataaagtttttggtgagtaa

SEQ ID NO: 47581 - DNA, 1818 bp, Acinetobacter baumannii
atggtgcatgattttcttatagcttattacacgtttttaataagcagcttgcacctcaaaccgctttttgttggctttgcgaatactcttttaattttagttgttattgcactttttctcatgatcgttgtgaacttaaagtcactttttaaggcgcataatccattacatgagtttttatacaatgttgtgcttcttggtttggcaattttagctcacacttatatgttgagctacatcacaaatttactcgcaagtaattatgttattgtttcaaaaaataattattttttatcatggttcattattgctggtatctatgcctttttttattttgcagatggaaagtcaaaacctcgtgcagaacgtataaaaaaagagtcggctgaaggatatggaacgttattaaatgaggtacatcgagggtttgaaaataaaactccgctcattgcatttacggatcagactttacctaaaaagcaaatcaaagagatggaacaaaaataccttgattggtcgttccatcgtgaaagtctaagggtgacaaatgaagatcgtggcattgtattgggcgcacctggatctggtaaaaccacgtttttaatttctcaaatcgtagaatggatgaaatcggggcgtagcttcgttgcaacagacgtaaaacctgaaatttgggcgattctgaaagcaaataatgtatttaaactctttggttataaagattgggtctttaacccgactgatgtggatagtgaccactacaatattttttcagaagtgaaagattcagcagaactcaatgagattttgaacattatcatcaaagatgatacagccgattcagtggtttttaatgaccttgctagacgtattcttaaagcagttcttatcgaactcggtgataaggcatcactggtgaatgctcaaaattatattaacagcatggatagtaatgatgagttgttaaaggcattaagacagtctgaaaaatcgagcgtttcaaatattgctaaagaagtttctcgaacagctcaaaatgatcgcttgcttgcatcggtgatgacggctgtttcaaaagcatttgagtttcttgatgatgaccgtattcgagcaaccacatcagacaatgcacaaggtttctacttaaaagaagttctaatgcagccaaaacaagccgtattcctacagtttgaccaacagtataagagttcaacagctacgttattcggggcgatggtggcgcatactatgcgtattttgcaagctaatcaaaatcgtgaggcggtattcattgccttagatgaaattattaattgtgcccctatcccaaaattcactgatttgctcaatacgatacgttctgcaaatatgcctacattcctctatctacaaagtttagagggcttaaatcggctatatggcgcaaatagcgacaaaattttcatgggttctagcaatttaaaaattgtttttagaattggggacattgagtcggctgaggaatgcagtcgattggtcggtcaaactgaaacgacatacatttctgaaacggcaggtacaagccagacgagtggtacaagttcatcaagtcgggcaagcagttcatcttctaacagatcgcaaaacgtaggtacaacaaagtccattaaattggaatccattattgagcctgctgagtttattaagttgccgatctgtacggccgttgtgatgtataacggctcttacggaacactggaaatgcctaaatattatgaatgctacaacatgccaaaacgcacaaatttaaaaacgattagggattttaaagtcgcctaa

SEQ ID NO: 47582 - DNA, 240 bp, Acinetobacter baumannii
atgggtattgcatccgaaataagatcaaaattgccgttatgtggtcgttgtattaattgcaaattgttgatttggagtgataaagcagaattaaaaccaactcaaaatttaattaaatttagaagctcggatgcctctttttattatacggttcgttgttcgtggctcaaaagtcctgtttctgaacctcaatttctagatacctgtgaaggtaaacaactgcaaaaaggggataattaa

SEQ ID NO: 47583 - DNA, 894 bp, Acinetobacter baumannii
atgaccttagagtatcaatttgatcagctctgcaataagttccgtgaaggttcacacgcaacacaagcaaataggcgagctatgcttaaactgtttacggaacagcttgccaagaatggttatgacgttaaaaccatgtcgcccaaagaccttaaagggcgacatgtgaataaattgcttgagcaatggcgtaaagatggtgtgtctacaggaacaataaaaaatcggatggtaactataagatggtgggctgaaaaagtcggcaatagtggtgctgtcaaagataatgcaacttataaaatagaaaatcgtgtctatgtgaccaatgaaaataaatctatttctttaaaagatttagatttgtctaaaaccgatgcaaacatagcgcaaagcttacgtttacaagatgctttcggattgagaagagaagaaagcatgaaattccaaccagagtatgctttggatggtcaaaaaattgaaaatgctaaatatatccgcttaaaagacagttggaccaaaggcggaagacctcgaactattccaataaccaatgaaaaacaacgtcaagaactcaaaaatgcttacgcccaagccgttaaaaatggcggttccatgattccaaaagaaaaaagctacaaatcccacaaagctaattttgaagcagtcacgcatgctctaggtgtgggacaaacacatggtttaaggcacggttacgctcagaccagataccgtgagttaatgggctttgattgccctgcggtaggcggttctcgtttgttgtctgctgacgagcaagtaaaagataaagaaatccgtatgttaattagtgaagaattgggacatagccgtatcaatattacgtccgtgtatctgggttcatggagtaaaaattag

SEQ ID NO: 47584 - DNA, 918 bp, Acinetobacter baumannii
atgacaaataccaataagttagttgtaaaggataatgctcttattgatgcctctttcaatttatccctaatagagcaacggattatgcttctagcaatagttggagctagagaatcaaataatctttccccagatacccctatagaagtatctgtgagcgactatatccatcaatttaaagtggatagcaataatgcttatgccttacttaaagatgcttctaaaacgttaaagcgaagagagtttagctatttagatagatataagggcatagaagcactttcaacggctaattgggttaataaagtgacgtatgttgataagagcggtttgattgttttatatcttagtcatgaagtaattagcttaattagtaaattaagtgaacaattcacaaaatactatatcgagcaagtttctgactttaaaagcaaatatagtattcgattatatgaacttattattaagtggttaagcgttgctaagactgaaaaatacagtatcaatgatttaagatcaaagcttggacttggtgttgaagagtattcaactatgtccaatttcaagtctaatgtattagacaaagcaattaatgaaatcaacaaacatactgatataactgtagattatcagcaattcaagaaaggaagagtgattactgatatccagttctctattaagtctaaagctcgaccatctaaacaaactagcaccatcaagcaatctttttatcaaatgaatgatgcacaaattaacttatttggaaatcaattatctcgtctacatgaactgtctcatttagcaaatcaaggtgaaagctatgacgagttagcgattaaaattaaagatatgctcagagatccaatacagcaaaaacaacttcttccacatcttaaaaatctaggttttaaggcttaa

SEQ ID NO: 47585 - DNA, 552 bp, Acinetobacter baumannii
atgcctaaatttactgttgcagaattagctaaaaaatatggaattgctcgtacatcaatttatgatcgtatgaagaatggttctatcagttatgaaattgatgcgaagaatcgaaaagtgattgattttagtgaaatgcaacgtgtttacggtacccctaacagtcaggctgacagtaagcctgatagtaaggaaatcgacaacactacagttgaactgtacaagcaattaattgaagagttaagacacgataagtcagttgccgaagagcgtgaaagacgtatgtacaaagagattgagcaactcaaagataagattgacaatctaaccttagcacttggttatacacctaaaactattcagcctgacagtaagcctgacagtacaaatgaacaagtccgtacaactacagaattacaagaaactgtacagccgtcacaagttatgccaatagaagataagcctattcagcaaataactactgctgtgccacaacctaaaaaacgaggtttgtttggccgagttctacatgctgttttaagtgatgactag

SEQ ID NO: 47586 - DNA, 567 bp, Acinetobacter baumannii
atgactatttcaacgtataatcaaatcttagaattggcgaacaaatatattcaaaaagttggttttaatgcttttagctattctgatttagctaatgaaattgggatcaaaaaggcgagtattcattatcattttcctagtaagacggatttgggaattgcctattgtcattttaaattgaatcagcttttagaactagagacccgtataaattctcatgcttctatagaagccaagttgtttgaatatcgtaatttttttatacaatgtgctgaaaaaaaagaaatgtgcggtattcattcaatgcttacagaaactgatagcttctctgaaactttacagagcgcagtctttcaattagttgaaagtgagttaagaattattgaacatatttttaaaaatgatttggatgaaaatatttcaatgataactaaagtaagtaattacgaattagctcttatggtaaattcgaccattaaaggggctcttttaatgaatcgactttcaaaaaaaaatatttatgaacattcattaaatgctttaatccagctgattttatcgaaataa

SEQ ID NO: 47587 - DNA, 432 bp, Acinetobacter baumannii
atgggtaaattgttaagtaatttcataaataagcaagcagatattttagtattaaaattaagtgtaatcttcatttttgttttatttggtacctataaatggttcgattttgaggttgttgctttagaaccaatactatcaaaatcttggttaagtattctatatacgctctttggtcattatggtgcaagttatttcctaggtgttgtggaaaatattacatttattgcgttaataattggtttttttaaacctaaaattggcttaattggtgaccttttagttatcttgactggtataacaacgcttagtattattccacaattaggtcatatagatagttttattattaaagatgtactgttagttggtgctggtttagtcctgttaaaatttgatttaaaacttatttatcataataaattattataa

SEQ ID NO: 47588 - DNA, 288 bp, Acinetobacter baumannii
atggcagaacataaaatacttgaagaagatttaggcatagatgtatatttctgtgacccacattcaccctggcaaaaaggcacatgcgaaaatatgaatggtttaattaggcaatatttacctaaagggattgatttaaatcaggcagatcagcattatttaaatcaagttgccatgtcactgaatactcgtcctagaaaagcgttagattggcttacaccattagagaaatttgctcagcttgttgattatcataagacttttcaaactgtcgcacctcatgtttga

SEQ ID NO: 47589 - DNA, 720 bp, Acinetobacter baumannii
ttgaatattaatgtcgctgttgcgccgtacgatgcaactgaaaaccctcgaattatgaatgcgattatgactccaaatgttttggtttggagtgcggtattggcttcttgtgctgtgccagttttatttccacctgtgcgtttaaccagtaagcgttatgatggtgaacataccccttatatggcaaatactaaatgggtagacggtagtgtacgtagcgatttcccacaagaaagaatggcaagactttataatttaaactacaccattgccagtcaagtgaatccgcatgttgtaccgtttatgcaagatgatgcgcgccgtttccgtaaagacgttttaagttggcctgaacgaattttaagacgccaaggtaaagtactttcaatggggctgatggactttacacgtcaaagattaggcgcgatttcacccgtaagaagactgctcgatcatggatatggcgtagtagggcagcgctattatggtgatgttaatattattgctaaatatagcttaaaacattatgcctatacgctacaaaacccacgcccacatttgtttaaacgtttacagcgagaaggcgagcgtgcgacttggccaaaaatctcttctattgaaacgcacgcgcgtattggtaaaacgattcagcactgtttagaagttttacgttttgaagaaaagaaacaacagccagaatcttattatgctgaagcatga

SEQ ID NO: 47590 - DNA, 987 bp, Acinetobacter baumannii
atggacttaaaaaggcaaatagagacaggtattaagttaagaggaatagataaagtttctcgtattcctattaaaattttacctaccgaagaactacctaaaaaacctgaatggattcgagcaaaaataactgatttcgaagaaattcaacgtatcaaaaatttattacgccaacaaaagctacatagtgtttgtgaagaggccgcatgtccaaatctacctgaatgttttgctggtggtacggcaacatttatgattatgggagatatttgtacaagacgttgccctttctgcgatgtagcacatggtcgtccaatgcctttagatgaaaatgaacctaaacatctagctgagacggtcgctaacctaaacttaaaatatgtagtcattacctctgtagaccgtgatgatctacacgatggtggtgcagcacattttgtgaagtgtattgaagaaatcagaaaccgttgtccagatacgctgattgaaattttagttcccgactttcgtggccgtttagaaacagcactctctacattaagcttatcaccaccagatgtgtttaatcataatattgagacagtgccgcgtttatataaagcgatgcgccccggttcggactatcagcattcgttaaatttattaaaacgttttaaaaaatactgtcctgatatcaaaactaaatgcggcctaatggtagggctaggagaaattgaagctgaggttattgctctactcaacgatttaaaagatcatgatgtagatttagtgactattggacaatatttacagccctctaaatcacatgcccctattcaccggtttgtgaatttacaagaatttgaaagatacactcagcatggccagcgtttaggctttaaaaatatctggagtgcgccaatggtccgttctagctattttgccgatcggcaatatttcggtgaatctgcaccaaagccattttcaagagaggatgttttgtcatag

SEQ ID NO: 47591 - DNA, 375 bp, Acinetobacter baumannii
gtgcaaggtgttcccggtggagctggggcaccgtttggtcgagttatgacaggacagcctatctacaatgatactcaggactggcggtggtatctggaaggtggttatttgatggttgtaaaagtcactgatgccgaagcttcggtacccggtaaaggttaccgaacccaaaatgatcgttatggatctccattatcaggtgatggcggaaattggggccaacgtggtaccaagtctactaatgatggaacacggaactggcaataccatggcacaactgaaggtcagccggggccgggtggaactgcaattgttggggtggcacctctaacaactcaattgattaatggagggaaaatcttacaaaccctttaa

SEQ ID NO: 47592 - DNA, 294 bp, Acinetobacter baumannii
atgaacggtcaaacaaatagcgtagtcgaagcagctgcaagtacggctgccgcgactgcaacaaaatttacttatggctatgtagtagggggcagcttgattggtgtagttggcaaaattgattgggctgttgtcttttcaatcttaatcggtttagcgacctattttactaatctctattttaagcgccgagatgaaaagcgtaagaacgagattcatgagcttcaaaccaagcaatatgagctaactaagaaacgcttagaaggggaaacagatgacaagcgaacagactag

SEQ ID NO: 47593 - DNA, 225 bp, Acinetobacter baumannii
atgacaagcgaacagactagagcatacctttcatttgctcttgtgggattaatgtttgtattggtgattgctttattttttgtggaaatgccacgggaaaatagcactcttttaaatacagcattgggttttattgcgggggcgatgtctatggcgtgtggctattacttcggaagttcagagctagaaaagaaaaagaaaaccgaagaaaccaagcaattgtaa

SEQ ID NO: 47594 - DNA, 546 bp, Acinetobacter baumannii
atgaacattgaacaatatcttgacgaactcattaagcgtgaaggcgggtatgtaaataatcccgcagatcggggtggtgcaaccaaatacggtattactcaatctgtagctcgtgaaaacggctatagaggcaatatgaaagatttacctcttgatgtggccaaagtaatttatcggaaacagtactggatagaaccacgttttgatcaggtgaataatcttagctctgctgtagctgaagaacttttagatactggtgtgaactgtggtatcaactttgcaaaaccacttttacagcgtgctttgaacttgcttaacaaccaaggtaaagctgggtacgccgatttgaaggttgatggtgtttatggttctaacactttaggagctttaaaaacctatctagccaaacgtgggaaagaaggtgagaaggttctagtgcgagtgctcaacattatgcaaggccagcgttacattgaaatctgtgagcgtaataaaagccaagagcagtttttctatggctggatcgctaatcgggttgttatatga

SEQ ID NO: 47595 - DNA, 618 bp, Acinetobacter baumannii
atgaactcatcagagcttgataaaacaattacacttttaaggaacaatccagaaagtatatgtcttcaatacttaattctaagtgatgatgaaagaaaaacagaatggactacatactcgcatgctttagccggtgttgacactttttttgtaataaccgttcaacaaattggctggttagatgctcgactagttttttttgacaagaaactactcgaaaatggaaaacaaaatacactaacagacatttatctaaatgaacaactagctcaatcttttatgtgggttttagctgcatatgagataattagaacgttaaatgatgacaagcgaccaagctacaatacctatattaattttcaacaacgcgtaatggatctaaaacataagtttgaaagaattagaattcctttagcaaagtttgagccttctcgaaagcacaaaacaaccgacagtagtgtagcttacccgactttttcattagaaaaaggtgtggcatggcaagtatctgattctacctatattactcgaagagaattatccgacgagatgctggaattatttaaagatattcacaaaggactttcagggataactttgacgaaccctcaaaaatga

SEQ ID NO: 47596 - DNA, 1299 bp, Acinetobacter baumannii
atgaaacatgagaacaaagtattttttctcatcgatgtaaataacatgtacgtttcatgtgagcgagtctttgatccgtctttgaatgatagaccggttattgttttgtcaaataacgatgggtgcgccgtggcacgtagcaatgagtcaaaagctctaaacataaaaatgggtgtgcctctttttcaagttaaagacattgttcagcaacataacgtaatcgttctttcaagcaactatgcaatgtatgcagaaatgtcacggcgctttcacaagattcttggctcatacgttactgaagaagaagttgaaccctattctattgatgagtgctttgttgatttcaccgcttatgagaagaactttgatttagaaaaagttggtcagcaaatgcgccaacaaatttggaaatggttaggcttacctgtctgtgtcggaatcggcagaagtaaaacagaagcaaagattgcaaatcatattgcaaagaaaaaccccggctttaacagcgtttgtgatttagtgaatatggatccgtgcaataaagaatactactttgctcaaatagatgtgagtgaagtctggggcgttggtcgtaagcactcaaaaaagttgcaaagcatgggagttaatacagtgcttgatctggcatgtgctgaaccacgtgaaatgcaaaagaaattttctattgtcatggctcgcacgatctatgaattacaaggtatctcatgcattgagatcgagcacaccccatcctcaaaaaagcaaatagttgcaagccggtctttcggtggtcgcgtaactgaactaacggatcttaaagaagctatctctatgtatgctcaagatgcatgtaaacgcttgcgtgatgaagggcttttatgcggatgtatgattgcttttgttcaatcaaatccatttgaccccaatgtaccgttctacaacaaatcaatcacaggttcattttctgaaccgactgactgcgcggtagattttgttagagctgcaacaaggatgttgaacgagatctataaagaaggaattaaatacaagaaatgcggcgtagtgctcacctgtctagagcccaagtctggccatacttatgacttgtttacggactttaaacacatagagaaaaaagaatctttaatgcaggctatggatggcatccatagtaaatttggaaagaaaaagattggggtcggaccatgctttgtacctggtcgcaactggtcgatgtcacgggataaattgagtagaaatccatttcgatgggatgaattattaattattaacagttag

SEQ ID NO: 47597 - DNA, 495 bp, Acinetobacter baumannii
atgagcactatcgaaccttttattattgaaataaagccacatctcaatcttggcaatgctttgactgatgtcgcctcaataaaattagttactccatcaacgcatttatcaataccattagctattgaaaaggtatcagctggctttccctctcctgctcaagattatattgatcgttcactcgatatgaatgaacacttaattaaaaatgagaccgcaacatttattgttagagtggcttctttatcaatgttgaacgcaggtattgatattgacgacgagttgattgtcgatcgcagtcttgatgctaagcacggcgatatcgttattgcactaattgacaatgaattcacagttaaacgtttaatgatcgatgaaaaaggtcaatggcttaaagctgaaaatcctgaatataaaaatatttatttagcggacggccaagaactgattatctggggcgttgtcactcatatcattaaaatgacacggcattaa

SEQ ID NO: 47598 - DNA, 636 bp, Acinetobacter baumannii
atgtgcgctaattatgaaccaatttcaaaagaccgggtgcacctgctagatctattcgagccaacattcgactataaagaagatgtttatcctggctacgactgccctcttattttttctaaagatggccagatagaatggcgccaagttaagtttggcatgattccaccttggaaccatgacttaaagttctcaaaatatacttacaacgctagaacagagacggttgataaaaagcctagttttcgacatgcatgggctaaaagccagtttgctttaatacctgtagaaaagatctatgaaccaagatatgtgaatggcaaagcggaaagatggggaatttatcgagaggatggcatgccattcactgtggctgccatttatgaatctacaataattgacggccagcaaattagatctatgtcgatgctaaccatcaatgcagacaatcatccttttatgaaccaattccacaaacctgaagatgagaaacgatcaattattgttatccctgaagaatatcgagaagactggttgaactgtaaaaaagaagatgctgatcaatttttctttgaaatgccgatcggcgaatttactgctgactacttcccaaaaccaaaaaaaagtgcaaattag

SEQ ID NO: 47599 - DNA, 729 bp, Acinetobacter baumannii
atggctacaatccgagaattataccaaaacgcaggtaacccaaacctaacgcactggaaagatataaaaatactttcaatagcagaggcaagccttttaacgtgtgctattaatccaattgattacgaatttgaccataacagcaatatagttttgcaactaaagcataagaagcctatcaattggatggattgcttaatgctgatgagggcattagttgaggcggtagccactcaagaattgaaatcacctttaatagttttagagcgtgaaaatgattttggttactacagcgaatctatcgaacaatcaagaactggaatagatgacattgataccatgtcttaccctaaaacaaaaatacacagggaagaattaaaagaatggttaaaaaagagagattattttgaacaacaattatcaataatcgatgttgaatcaacgcttgaaaaagctaaatccttttactcccataataacgaaatatcacttttacctgaaccaacgtacacaacgccagcacttgaagcggttaacggtgttattcgtgagttttggattagttacgaccctgataaaaatcaaccaccacctaagcaaaatgtcgtaaaagcatggattgcagaaaatcaccctgaactggatagtgattatattcaaacagcaatagataaaatttgccgtcaccccaacgcaaaaaatggaggaaatagaaaaattaacccataa

SEQ ID NO: 47600 - DNA, 219 bp, Acinetobacter baumannii
atgaacaacacccaattaaaacaagtcctagcacaccttaaacaaggcaaaaccatttcacaggctgaggctatcgacctattcaactgctaccgcctgagcgcaatcattcagcgtttacgcaatgcaggctatgacattgtgacccataacgaacgcaataagtcaggcattggcagacatgcacgttatgagcttatgaaagaggtggcagcatga

SEQ ID NO: 47601 - DNA, 507 bp, Acinetobacter baumannii
atgaacccagctatttttaacttcaatgaccacggcgttcgtgttgcccttgatgtaaacggacagcctttgttttgtcttgctgatgtttgtaatgctatgggaatgcaaagagctaatcctagtagatttaatttaaatccaaagggtgttgcaagcttgtgtacccttacaaatggcggtagtcagatgctcacttttattagtgaagaaaatctatatcgcatagtttttcgatctattaaacccgaagcaatcaatttccaaaactgggtatttgctgaggtattgccgagcatccgcaagactgggagttatgtagcacggcagaccgcttatgaagaattaaaccgcctatgtatgcaggaaaaggtatctaaggacaaaggtacatttcacagtttaggtatgcaccgccgtaaacacgaaaagcatttaaacgccgtccgcattgaaacatgcaaagcaaatttacagctaacttttgaaggggtagaccatgaataa

SEQ ID NO: 47602 - DNA, 333 bp, Acinetobacter baumannii
atgaaaaatgaatcattcgatattgctaacatgcctaagtatggttatgctgtagacctctcaaaatctgtaagcgtcaccccacagcgtcattgtggttttattgtgcctacgttttgcctagcctctcaagctgtgcaagaaacaagcgcaagcatttcagctatgcaaacaaggctgtactccctctatgaggggatgacacgacaaaataaggttttgccgaatatgtcgggcggttcttacagaccgagagtgaatcctctcaccataatttctcaagttgtggtgaatctcaaaactcagaactgtaaggaggcactccatgcctaa

SEQ ID NO: 47603 - DNA, 306 bp, Acinetobacter baumannii
atgcctaatcaaatcaattctaaaaatacacctaaaacttatgatgctggtgaaatggcagatgtttactcactcgctgaatctgatatgcaatggatgagtgtagcaatcaaagatattagaaaacgcctaaaagaaattaaaaccaaattaggtaataacaatgtgcttggtttttatgatttagagcacgttgtagatatgtaccagtacatcgctgaaaatcgtttacatcattattctgatgaaactgaagcgtatcaagcggaatgggagaaaatgaaagggggtagccacaatgcttga

SEQ ID NO: 47604 - DNA, 2301 bp, Acinetobacter baumannii
atgcttgactatgaccaccccaaagaactaataacacccaaagccattttaaacgaatgcacacagcttgtatcgtttaatgatgcctattcatcacatccattaatacagcgttttggcagtcctgagcagccgatctatattgatgatggcagtgtggatataaacggcgttatctatacacagcctttgattatgcctatctatgatgggcaaatggagcttgtacagtgtgcagtcatgcaagatggtcagcgtgtggccgtcatacctgatggactggctagaggctttgcaaggtatggtgattttgaccatgccaagccagtcattatcacgtacagcctagaggcattctttaaggtcgcacagactggctacgccgttgttttggttgtattgcctacactatgcaataaaggaatgacagcactcaaaccgtttgattttgagcaaatacagtacgtgattaatcagctttcaaagtcaggttttgacaggttgtatatgccagtcagacccgaacatatacagcttgagccatttcaacagcttgagcaaaacacggctgtaaagttgttgaatcagtatttaaaaatagatgaaagtgaatttctgattgagttatcaaaagatgaatcaatagcagaagtgacggcatttattgatgaagcaatagacctattgccccaaaaagagagattgcctaaaggacatttaactaaacctttccgctatggtgatggcgtatttcatcttttagaggatggcttgtactacatcgaacagatcaaagatgacgagtataagcgttatatctcaagtccgattcgagtattggcacaaacaagagataccactaataacgcttggggacgtttattagaatggcatgatgctgatggtgtgaagcacacacaagccttgtctatggagctatttcaatccgatggcgtggaacttcgcaaagccttagcttatcaaggtgtcatcattgcacccgatggcaaagcaaggaacttattgcaaagttatttgatgagctacccaactgaaacaagggcgttatgtgttgaccgtgtgggatggcatgacaatgtttttgtattgccaaatgagcagatcggacagcatgaaaatggtgatttaatcgtttatcaaacgacacagggtattgatagcaactatcaaagcaagggcacattagaacaatggcaaagcaatatttctaaacctattgccagtcattcaaaattagtcgttgcattgagttcggcttttgcagggcaattacttgcacctttagaacaacaaacaggtgcaggcgtacacttcaaggggcaatcatccaaaggtaaaactacggcgttatatgtgggctgtagtgtatggggcaaaccaagtcattattgtaaaacatggaaatcaacaggtaatgctttagaacatacagcatatattcacaacgatggatttttagcactggatgaaattggagaagtcgccaatcctaaagagctaggcaatattgcttatatgcttgccaatggtaaaggtaaggcacgactgacaaaggaaatcaaagctaagccatcatacgcatggaaaatcattttcctttccactggtgaaaagagccttaaagaaatcatgcaagagaacggacaaaagaccaagctagggcaagaaatccgtttgattgatattgatatagaccagtcagaatatggcttatttgatcagatcgactttgccgaagatggtgcaaagcaatcaagacagcttgtagagcgttctaatcaagcctatggcgttgcaggcatggcatggctgagatacttaactcaagataaggaaaaggtcataagccaagctaaacagctattggggcaatatcaccttgaattaattgcagagcataaacaaggtcatattgtacgagtggcaaatgcttttgctttaatcgccgttgcaggcgaacttgctacacaagcaggcattacagcatggcaaacaggcacagcgcttaatgctgtgaaagcagtatttaatgattgggtgaatagctttgagtatgtcggggactatcaaaccaaagaatacatactccatgttaaggcattctttgaggcgaacgaatcaagccgattcgaggcaattacacccgaccctgaccacatcgagaaaattatcaatcgtgttggctactggaagatcgagaatggcgaaaagttatttcttgtgttacctgagcagttcaagatgaaccgtaccgggtttgtcggagagtcaatattctga

SEQ ID NO: 47605 - DNA, 342 bp, Acinetobacter baumannii
gtgtatgaacaatctacacatggtattttgcactgttttactgaggactgggaaacagcaaaagctgtattggactgtggttactatatttccttttcaggaattgtttcatttaaaaatgctcaagatctacgagatgtagccaagcaagttcctttagatcggcttttgattgagacagatagcccttatttggctcccgtaccatatcgtggtaaaacgaatgaaccaaaatatgtaccttatgtagcgaaagcactaagtgaggtatatgataagccagttgaggaaattgcaagaatcacctcgcagaattttgaaaatttacttaaagcgatttaa

SEQ ID NO: 47606 - DNA, 702 bp, Acinetobacter baumannii
atgataaaaaataaatatattcacatccgcagctttgcttctcgccttgcagcacgatcgagcagtgctcgattaactcgcgcctcaggatttactttggttgaattgttagtcgcgatcgctatctttgcggttttatctttattggggtggaaaattttcgattacttgctcaaagttcgtgatcgtaatgccgaacatgaagtgcatttatttgaattacaagatgcttatcaacaaattcttcgtgatactttgcagattatccctttatccgccaaccaaggtgggcaacttcatccagctttagaaatcgataatcaaattctacgttttagtaaagctggggtaacagatcctttaaaacaaggcttatcaccatttgaacgaattgaatatcgttatgatgcagatcaaaaaaaactatatcgtcttaaatatacaaatttaaatacttcgaacagagagcaacctttatcgagtactttgttaagtcaagtcgaccaatatcagattatggttttgactccgcaagaagtcacaaaatggcccgagattaatattgatccaacgaaacctaatgagttaaaaaaattaccgaaagggataaaaatccaacttacagtcgctggtgtaaattatgaatggatttatagcttaaatcagggtgacttatcgctttcacaggaaggtaattcataa

SEQ ID NO: 47607 - DNA, 507 bp, Acinetobacter baumannii
atgaatgaagtcaccgtatcttctgcctgtaaatacctaggtgtcagcacttcaggctattatgcctggcgaaaacatcaagccaatacggcacagaaatataatgacttaaaagccgtatattggcagcatcatgcacgattgggggcaccttcattagtacatgacatgcatgaattagattacaacatgagcgaacgtactattggaaggatgctaaaaaagcttggtttacgtagcaggattgcacgtaaatacaagcatacgactgattcaaaccatcgtttgcctacagcacccaacttgttggatcgtcaatttacggtcaatgaacccaataagatctggacaacggatattacctatatccatactaagcaaggttggctgtatttgtgtgtgatgctggatctattcagccgtcgtatcgtcggttggcaaatcagccaggctttgttgcacaaacctagcattaaaagcttattcagcaatataatttcaaaatga

SEQ ID NO: 47608 - DNA, 294 bp, Acinetobacter baumannii
atggctaaacgttttagtcctgaatttaaacagcaagcgattgattatgcactttcaaactcccacgagcctatagctgcaatcgcccagaaattaggtgtgggttattcaactttagacaaatggattcgtgaagccaatccagtgggttcaagcaaacgtcaactttcaccagaacaacagcggatcttggaattagagaaagaagtcaaacagctcaaggaagccaatgacatcttaaaaaaagcgcatgtgtactttctaacagatcatgccaagaaaagtacacggtaa

SEQ ID NO: 47609 - DNA, 2679 bp, Acinetobacter baumannii
atggtaagtcgattcaagggaagtgttatttcacgagtttcttttgcctgctgtcttagtttatttatttttacttatagccctgtggtttttgctcaacccaaggcgggaagtagcattactaacatagcgagtggtgacttttatgatgagcaaggcaacttgcaagtcatcaactccaatcccgttatcctcacagttcagcctatttactcattgagcctgcaaagcaatcagcagaatatcggaactattggcagtaaactcaattttcctcatgtactcaccaatacgggaaatattgctgatagctataaaattacactgaatcaacttacaaatgaccagtttgatctagaaaatatcgcagtttatgcggatcgggatcaaaatggtgagcctgatgacaataataatttactcaataatgcaattctgaatttagaagcaggtgagtctgtggctgtggttgtggtgggaagtattccagtcaacagcattagcgcaggtcatgttgcaaactttactttaacttcaaccagtcaacttgattcaggtaatgtgtctgccactgtctcagatgttgcaaaagtggttgatgatgcggttattcaggtcacaaaatctcaaaatatcagtacaggtaaaacaggcacagaagttacctatacatttacctataacaatacggggactgcactaggtcaactatttgtccgtgatactttgccgagcagtgtaagttaccaagctggaacagctatttggaataatggcgcaagtacattaacagatgtagataatgacaatgaagcaggcagtactgctgagtcagttatgaactataaatatgagggtggtgaggtggaatttaaactcacaggcattactgcgttaagcaaaggtacatttagttttaaggtaaaagttaatccaaatgcagcggaaaaaatcaataacactgctaactataaacagtataaaaataatacaactaccttgttaaaagatacatcaaccaataccgttatttttacagttcagcaaaccttaggggtgatactgaataactcttctgttggaaatactgatggaggaacgaatgacttgctcaccaaatcaaacacatttactggtgcagccaaagaaatccagtttgataattatgtttggaatacaggacaggcgacagacagctataatttaaacattacaaaaagtgcaaatgtcccaagttgtgcagtcacacgcttataccagtccgatgggcgtactttactgacagatagtaatgctgacggtattattgatacaggttcgatggcagcaggcgcatcgaaaaaaattgtgcttggtgtttatttccctgccaattgtgttacagcgactaatgaaatactagattttgatgttaaggcaacttcagttacagatacagcaattaccaatagtactcgtaatcgattaaacaataccaataccgcaggttctagtgacttgtacaataatgatagttcaggaactggtataggtgctgttacatcacctggtggacaggcatgggtaaataaatcagcagttaggggtggaacagccgtatttcctttggttgtagagaataagagtacggtaacgaatagctataatttatatgcttcggttgctgaaattgatgtcaataatatcagtaccagtttgcctgcccagtggatagtgaaattctatgatacgagtgatgattgccaaagcctaggaaatgtaatcagcagtactggcaatgtagcagcgggtgcaaccaaaaaatattgtgctgttgtcactgttcccactaatacagacttggctaatcttcctatttggtttgcgataaaatccccaatgaatgcacaggcggatagtattaaggaccaagttgatattatccagagacaaatgacactggcaaatgatcggcagggtcgggtcaatattggtgggacagttgtctatttacataccttaaagaatacagggactgtggttgaggggaatgcagcaggccagatcacgtttagtgttattccgcaaaacccaaatgatacctttacttatactttgtatcatgatgccaataataatggcgtgattgatgcaactgatccactcattaatgacttatctacggttacgggtggtttagcgccgcaagcttcaattcaacttctcttaaaagtccaggcaccaacaacggcaaccaatggtatgtctagtgtggcgaatattgtggtgaaagcaaacaataccattcaggggctggccttggctgatatacaaaatactgatttaactacagttgatccaacacaactacgcctaacaaaagaacaaactaaagatgaaaattgtgccttaacgtcggtaactgtaataaatgcagtgtatggaagtacgccgcttcaagtaaaaccaaatcagtgtgtgacttaccgtttaacccttaaaaatgaaggggcaacttctgccagtaatgtcgtaatcaatgacgttgtgcctgcttatagcaatttacgtacaggtttacctccttcaatcacgcaggggacagtgactgtaaatacagatcaaattgcaggaaatgtgggtacgcttgcaccgcaggggcaggctgccatgtatttctccattcgggtaagcccataa

SEQ ID NO: 47610 - DNA, 2661 bp, Acinetobacter baumannii
atgatcaatacactaaataataaccgcccaaaactgtttaattgggtcttgaccttgctgtgcgtgttgatggtccagcaatcggcctgggctgcaaccaactcgatcatcagtaacatggcagttggtgaatatagcgaagagggctcaacggttgtacaggtggcgcgttcaaatcttgtccaaaccacgattttgcctgtgtactcattaaatttggtggcagccaataacaaaacagtagtggcgggacagacagtttattttaaccatatcttaaccaacaccagtaatgagacagatcaatatactttcactgtaagcaataatcccactggtgatgattttgattttgtgaatagtagcctgatggtttatctggatgccaataatgatggtattcccgatggatcagcgattacaggttatacattgggtgcaggtcagtcagttggactaattgttgcagcaagcataccgaatacgattaccacaggaaaagttgcaaatttaactttgatggtgacatctgcgaatggcgcgagtggaacaaatagcaatgttgacaaggcaactgtaactgaccagtcaactctggtggtgcgtaaaaaattctctcaaatcactgctgcaaatggtgatgtggtcaccatacgtctggattatcaaaatccaacaaacacaattgtaccaacggcaaccttgactgacacgttaggaagcaatttaacctatgaagtaaatactggtaaatggaatggcgtaactgtatatgatgcagtggggggaacagccgatccaacaggaattaattatagtgtcacctcgaatgttgttaccgcaaccctaaccaatattccagcgaatacgattggctatatcgaatttaatgtaaaaattaataaaagcattgcagggaaaattgagaacgtcattaatgtaacagggccaacgacagacacaagtaatacagcagttgtaaatgttgctccagtctatgctgtcaaaatgaatggtagtgcaagcaacgtcagtgataataccaataccattacggccagtgcggttccccagggtggtgaacttaaatttaccaactatgtctggaatatagggaataccacagatcgttttaacctcactttaactaacagtacatttccgacaggtagccaaattgaattttatcgtgcagatggcgtaacccctttattagatagcaatggagatggtattcctgatacaggtttattatccgcaggcgtaaatttaccaatcgttgttaaagtacgtttacctagtagttatgctgtaacgactgatacgacattcgaagtttcacctcaagctcagtctttaggtgatattagcaaaacgagtttgattaaagatcagggtaatttacttgccacaacggtagcacgtttagttgatttgacgaatagtcctgaaaacaatggtttgggtaatgggaatgttaataatgctggtaatccgtggaaaaccgtgattgccgcaacaagtaccaatcctgttgcgagtgggcaagcaatatttccattaaaagtgagccatactggtattggaactgaatatttacttagtgcgaactcgacgagtaattttacaagcttaactttgcctaatggcgtgaaccgtgttcgtttttatgtttctggaaatggttcaaactgtaatgtcatgggtagcgaaacaggtaaaaccatctatctgaataatggtgagagtcagttaatctgtgctgttgttgaagtggatcaattgaacagtagtgtaactacaccgatctatttccgcgctctttctacaagttttgtaagtggtaataatagtagtaatccgagccaagatattattatggatgcgattactattcaaagtgtcaattctgtagctaaagtagaattcacgccaaattttcgtggacaagtctcgccattaggcaccgtcatttatagtcatcttttaaccaataatactgatgttgattatacaggtaactatagttttctttcgaataacgatcaggttgagtttaacagcactcttttctatgacgtaaatggaaatggtgtttttgatgctggggatttggtgatgagaagtttagctgacttgccaggtggaaaattagcagcacatacacaagtcaaattattgcttcaggttaaaaatcttgtagcaaataatattgcccaagcgaataccaccacgattaatttaacgaataatgccaatggtcaagttttggcatcaattactgatgtaactacagtgaatcagagacaattgaagttgagtaagttgcaagcacgtgattttgattgtaatggcacagctgatgagtcctatacaacaaatagtctcaatatcggtaaacaagcaaatggccaaggtcaatgtgttttgtataaggtgattttaaccaatacaagtgctactgctatgagtactgcatttacctttagagacatgacgcctgcctatacagttttatctcaatcgcctatctgcacatcatgtagtggtatgacggctcctacagttggtaatgctggcgcggtttcaggaacattaaatagtgtggctgcaaaccaaagttatgaatttaatttcggggtgcgctatgtgggtcagtaa

SEQ ID NO: 47611 - DNA, 3996 bp, Acinetobacter baumannii
atgtgggtcagtaagcaaaaaatgaaaaagaatacctctaattacagcatgatgaatcataaagttagttatatatatactttggttttgtttatcttaagttgtttgatgtgtagccaaaatgtattggctgcaccgccaacgattgagattttttcaggctcagggtctgggcagggtccaacagcagggccagttgtaacaacatttaagttaaatgccaacaatccaagtgataacaattatgttgattatgcgccgcttactactgctacatatacgataaccaattccgcttttaattcggcgtcttatcaaggatctattggtactaatagacctaatttaatgataggtggtgcgggcacagctgcaacagtagaagcaaccaatgtaattcaacccttagtatcgattggcagtgggcaagataatatgttcgctgcctcattacaaaacgctccaactggatgtacaaatggctctgggtgttatagtaccaatggtggtattagagcaggcagcagttcatctgatactactgccaattatggcgtagcaatgtttatcaaggctacaggttttgcagcattgaatgtatcgactacaaacagagtttatgttggtagggttcgggttaattttaatagacctgtaactaatcctatattgcaggcagcagggatggggggggctgttgtaggcggtttaggttatagtgcagaatttacattggttagtagtaatttaagttcactaccagtgcttagtcgcttagctggtagtaaagaattatcagtgattggtaatgatattacgaataatgcatctagaaagggtgcaacaagtgatcaaggtggagcaagcggtagtatttatattaaaggtaaaggaattacaactttagtttttgatatgtatatacgaggtgatggtagaggtacctggatagatagcgccgctgattcattcttttttggtatctcaagtatggacgttgatagcgacatcgctctagttaaagctcaacgtgtaggcaacacaggaacattcgtacggacacaattggataatgttcctgttaattcattgatgcaatatcaattaactattaccaataatacgccatcaggtgcaacattgggtgggacagttgtaaatttaccttttaatgacacactcccagtcagtttaaaaaatgtttctattgtcggaacaccagctacgacacaaggtacaggaggttcaagccctgttactacttcctgtactcctacattaacaggcgataataccgcaggctggaaagtttcgggactgtttacaggtgcaacaacagcaacctgtataatcacgattcagggtacagcaaccgcagcaggtacgttaaccaatacagcaacgatagagtcaacctcatcaaatacgccagtgagtagttctgttaatgccgtgatcgttaacccaacagcaattacaccagacccagttatcaaagaagctcgttttacaattacttctgatttaccaacgattgtacgaggacgagttggtacacaaaccatcaatattaaaaatgaagggccagatagtgcaaccaatccaaaagcaacctatgttgcagcaccacaaacaggagttaacgtcagttctgtaagtgtgataggtggttcagcctgtctacaaagtggcaataactggaattgtgaccttggtagtagtatggcaaatggtgcaacgaagcaattattggttacttacgccacgatgagtaatgcggtactaggaactgcacaacaggcaacagttaaagcttatagtgatgagtttaacccaggtagtggtgtaggagagacactctataaagtatggggaactaatcagcaaaatgaatacagacctaatggtgcattttgggtgggttatgaaggaactgggggaactgcaaaagtcggtgattttgctgatgaaggcacaccaatcttgagtgcatggccattgaaccaagccagcccaacaggtggatacttagtttctggtaataatggtacgagtgattcaacttatggagcatcaagtacaactgcttctgcaatgattcaaagaattattaccaacatgagttcggatgcaaatgcaacagttcaactaaataacattagtgttcctgacattggggataaccgtagagcatgggagtttacaacgggcgtatacattccaacgtcacaagcagtcactttttgtgttggaaatacaagcgttggtgtggatgatggcgcatatattatggtggatggtaatatcgtggctagcacgaatggatgggcggcgggtggtgtgtctgtaaccacaaactcaccgttaagtgctggttatcatcgaatcagttatcgtattgtcaatcgaaatacttataatccgtctggtctcgatgcggaaaattcggcaggtggttatggaccgattggtttatcgcttagtggtagttgttcaactgcaaactatgacaatgtaactacgagtggggtccctgcaagtatcaatattattgatggtgcaaaaattatcattgctaaaaactctgtgaatggcacgggtacatttaactatattaatcttagcaatcttgtaaatagtacaacagcagttaccacggattctgtaactacggtgacagcaggaaccacagcaacctctgcacaacagctttgggcgcaaacgttgaatacagatgtttcttttacagaaagtgctttagctggatatgttttatcaggtgttagttgtgtagatgcaaatagcggtgtaacaggtaatacaggtactttttggacgcgtgtaaataatattgtgacgattcccgctgttcgcataaaagaaggtgccaatattacctgtacatttaccaatactaagcttatttacgttgatattagtggacgagtatttgttgataatagcggaacaacgctggatgtgagtaaagcatataatggcatacaagatgcaggtgaagttgggattgcaaatagtacaattcgtttgaataactgtagtactacacaattagcttcaacagtgacaagtgcaaatggtgattatgctttctcaattgaacaaagcttattaccatcatcattttgtattgttcagcagaatttacctgaatatatttctgtcagtgccgatagtataacggtagcaaacacaagtgcgaccagctatccaaacaataactttgccgatgttaaactcaatgtacttctaacagaagatggacaacataccattaccgcaggtgaagtgactgattatccacaccgtttaagtacccaggcccctgtttgggtaacaaagttggaacaaacccaatcaaactcaaacaatgatcaaccttggcaggcattggtttaccaagacaccaactgtaacggtaccgttgatacaggtgaaacagtgtttgatccaacagcctcaggtactgtgttgttgcaaccaaacactgatatctgtcttgtacaacgtgtatttgcaccgaccaatatttttgctggtgcacagcatattggaacgctacaggcaagctatgctgtgagtgcattaaacctcacagaccagaaaacccaacaacgtcaggatgtgacacttattggtagtgcaggattaacactgacaaaaaaagtacgtgcagtgaccagttgttcttcaactccatctgattcttcaggctttttagtgaataacgaagccacaaaacagcaaaatctggagtatgagatcacctataaaaataatagtgtgaagaacctacagaatgtcaaagtaaaagatagtttaccaactggtactaattttggcagtctaagttgcggcctaacaccaagtggaaatacttgtaatgcaacacgttctggagaagttcttgaatggactttaacaggtttgctaaaaccatcagccacaggaactttaagattttgtgttagtcagtaa

SEQ ID NO: 47612 - DNA, 495 bp, Acinetobacter baumannii
atggcgtatttgaacaatatgtacaagaaatgtttgcttggtactgcggttcttgttttggctggaagtgtattcgctgagcctaaaacgacaaaagagcccgtttcagtagaactcaaaactttcctgatcagtgcaggcactgatgggaaaccaacttcaaagctggtgaccaaggtaaaacccaatgatgtgattgagtatcgggcaacctataccaataacaccactggaaaaatcaagaatctggcagcgactttaccgatacctgtagaaactcaatttttggcaaagtctcagccagaaaatgctgaagcaagtactgatggtacacattttgccccaatgcctttaaaacgcaaagagagtaatcaaatggtgaatgtaccactgaaagattatcgtgcattgcgttggatcattgcagagcttccagctggaaagtctatgacggtttctgctcaaacacgtgtaaatagtgaaaaaactaactaa

SEQ ID NO: 47613 - DNA, 849 bp, Acinetobacter baumannii
atgtcaaaccgtctacaacttacacagctagcggcttctattgctttggttgcaggtagcgcagctttcatttcatctgcacatgccgctgcaccagccgctggtacaaatatcagtaacattgcatctgcaagctatactgatagcacaggaaacactaaaactgtatcttcaaatattgtgaccaccacagtattgccagttgcaagtttcacgttgattgctgaccgaacagcaaatgccaatgccaacaaccaggtttctttatcacacaccttaaccaacacgggtaacggtagtgatacgttcacggtaaatgtggcggatgttacctctggtgaccaatatgacttcagtaatttaaaagtttatcttgatgccaataaggatggtgttcctgatagccagactcctgtaacaagtgttaccttggcagcaggtgagtcggtgaacttaattgttcaggcaaccactccaacaactggtgcaggtggtgctgcactttctgctggtgatttgggtaaattaaccatcactgcacaaagtactttagacaatacactcacagcaacaaatacagacaccgttaaaattaccaacggtgcagtgattagtgtgattaaatctgccagcgtaacggcgattgatgcgacccaagctagtccaaccgctcgtgaagttgaatataagttggtttaccaaaacacaggtaacacaacagcaactgatgttacagttacggacttgttacctgctggtttaacttatgttgctaattctgcaaaacttgctggcgtggcacaaactgaaccgtaccgggtttatcggagacttttttatttaagttag

SEQ ID NO: 47614 - DNA, 276 bp, Acinetobacter baumannii
atgtctcaatcatatattgcaccagtagagttagaaaaagcttatcgtttattaaatcatggtccaactgtgctggtttctgctcagcatggtgatgaccataacgtgatggctgccgcatgggcatgtgccttagagtttaaacctgctaaagtgactgtcgttttagataaaagtactaaaacccgtcagctggttgagcaaagtggttattttcacactacaagtcccttgctatgcacagctcaatatgaccaagcaacttggtaccattag

SEQ ID NO: 47615 - DNA, 1644 bp, Acinetobacter baumannii
atgaaaactttggcagaagcttatcagcaatttgatcttacaaggctcatcgaagagcaacttgttgggcatccccaagcaataaatgcttatgttgagtgctgtgagcgttatgtaggaaaaaataaaacagcgcttatctgggaaggaaaaaacgggcaggcagagcactatacgttcgaacaacttgctgaactttctggaaaacttgctaacttctttaaagcacaaggaattcaagctggagattgtattgcaggacttctaccaagaacgcctgagttattaattacaattttggcagcatggcgtataggcgctatttatcagcctttatttactgcctttgaagcaaaatcgattgatcaccgaattacgactgctcaaactaaattgattgtgaccaatgatgaacagcgccctaaactgaataccttgaatgttccggttattgtaactgttcatcaaacaggtcttttatctgagcatgactttgatttttggcaatctttacaacgatattctgagcaatgtgagccagtaaatcgtagctttgatgatgactttttaatgatgtttacctctggcacaactggacttgcgaagtctgtacctgttccactaaaagcaattttggcatttaaaggttatatgacccatgccgtcgatttgcgtgaagaggatatgttctggaatctggcagatccgggctgggcatatggtttgtattatggcattaccgggcctttaagcttgggtcatagcattattatggatgagcgttcatttaatgtagatcaggcaattgagttaattaaaaagtataaagtaagtaatttaacaggatcaccaacagcatttcgcatgttctttggttttaaggaaaaatttgatccttcaattaaacaacatttacgcgtagtgagcagtgcaggtgagccattaactcctgaggttgtgaactggtttaaacaggatttaggggtcaatatttttgatcaatatggacaaactgagctagggatggtgattgcaaatcatcatgctcttgagcatccattaaaagtaggttcagctggtttcgcaattcctggacatcgttttgctgtgttagaccaaaattatcaagaattgccgactggtggtgttggtattttggcaatggactcggagcaatccccactaatgtggtttaaaggttatggtggcaataatcgcaaatcatttgttggtaagtattatttaacaggtgacacggtcactttaaatgaacatggaggcattgattttgtgggacgtgcggacgatgtcattacaacatcgggttatcgagttggaccatttgatgttgaaagtactttgttagagtgtgaggccgtattagagtcagcagtaattggtaaaccagatccggaacgtaccgaaatagtcaaagcttttgtggtgcttaaacctgcttatcaagcgtgtgaaacattaaaagataagttacagcaatatgttcgtaaccgtttatctcgtcatgcttatccaaaagaaattgagtttgtggacagtctaccgaaaaccacgagcggaaaaattcaaagaggactgttgaagcagcaagaaattgcaaaaatgcagcaagcctacgcaagctaa

SEQ ID NO: 47616 - DNA, 945 bp, Acinetobacter baumannii
atgaaaaagcttgcaataaccttagctgttttgattccactttcaacttatagctttgccaatgactcgactggttatgtcggtacaggtggtattcagtatttaaaaaatgcacaagttgcgatgcaaagtgaggatctatttattagtaaaaaaatcattaaagtcgattatctatataaaaacttaagtaataaggatgcgaaggaaaccgttttatttccgctaccacgtgtagataacttttttgaagcagattttgcaaatactgaagcacttttaaaaagctttaaaattgtggtggatggtaaaaatataaaaccagaaatgcatgttagaacgtttattcaaaaagatgaaaaatcacctttaatggatgtaaccgaagagtttaagcaatgcggttttactgaaaaagacatgctgaatccatggattcgtagtaactatgattatttgaattatcaagataagctaaacaaatgtaataaaccacaaatgcagaaaattttagctcaatttgaaaaagatgatgtgatcccgtggtcatctcaagtcatttatagctggaagcaaacctttaaagccaatagtttgaccaaaattcatcatgaatataaacctttagtcggtggatctgtaggtctcacaccagatgaagatagcaagcgattttgcatggataaacaatttaaacagggtcttaaaaaagctcaggcagaacattcgccgtttagtgctttaggttatattttgacaacaggcgctaactgggcaaaacctattgaaaactttaagttaacgattgaacgtgataaaggcgaactagtttcattttgttgggatggcaaagtcaataaaattagtccgactcaatttgaaatgataaaaaccaagttcgtaccaaaacaaaacttagacattatttttgttcatctgccataa

SEQ ID NO: 47617 - DNA, 288 bp, Acinetobacter baumannii
atgtcaagttctgttgaaatttctatgcatattaaagacattgttgctttaattattaaagaaaaaaatattacagaaggcttatatgttccaacaatggaattgagttttggagctggaacagataaaactccaagcggtgatataatgcctacagtaaaaatcggaataaaaagtataggaatacaaaaagttgaagatgatgatacagataatgagttgatggtagatgcaaaggaaataaaccctccaaaaaaaactagaaaaactaagctatctaaagaataa

SEQ ID NO: 47618 - DNA, 447 bp, Acinetobacter baumannii
atgaaagagacttttaaatacaaaggctttgaaggttctatggaatttagtgctgaagatgaatgcttggccggagaagttctctttgtacattcaaagatcatttatactggtgaaacatttgctgagttaaaacaggcatttgaagatgcagttgatgcttatctacttcattgtgcaaaacacaatattgagccagaaaaaccttgtagtggaacattcaatgtacgtataggctcagaattacataaagaagtaattaaatacgcatatgagcatgaaatgagcttaaatgaagtgatgataaaggcagcttcatgtttagttttagatgaagttcatcatacgcatactattacaattgaacaaagcaccaatacatcattcaccacaacatttaagaataatacaactgaaataggggcgggaaatgtcaagttctgttga

SEQ ID NO: 47619 - DNA, 270 bp, Acinetobacter baumannii
gtgacaaaagcggataaactattgcaacgattcttctcgaatcctccacctaaaaattttaaatgggaagattttgttgtaatgatgcaacgacttggctttaaactggagtttaatggccgtggtagctctcactgtattttttacaaagatgatccacgtgtagtattagactttttaaagccacatccggggaatgaacttaaagttgtctatgtaaagaaagcaagagcttttcttgaagaacatggcattggagtaaacctatga

SEQ ID NO: 47620 - DNA, 282 bp, Acinetobacter baumannii
atgtgtgctgaaaaaacaggagaaattgttacttatgtttggggtaaaagagatatagctatagtccaacgactgaaggaaaagttgaaacagttaggtattcactatacccgaatttcaagtaatcaatgggatagttttatcactacatttaaagactgtcagcaaagtattggtaagtttttcactataggtattgaaggaaataattgcaaaataaggcatcggattagatgtattagttcagtattgagtgtggctttagcgaaatacggatattaa

SEQ ID NO: 47621 - DNA, 588 bp, Acinetobacter baumannii
gtggaacgtgccaatagaacactccaggatcgcctgatcaaggaaatgcgcctagaaggtatctgttcaattgccgaggcaaatgcctggctgccctgctttattgagcatttcaatcagaagtttgccaagtgtgcgcgaaactcaaagaatttacatcggccattaaccgaatctcatcttgaactggatgatatttttacctggcaggaaccgcgtaaggtcaccaagaatctgaccctgacctatgacaaatgtatttatctgcttgaaccgacagagctgaatcataagcttgttgggcaatatatttcatttctggagtacccggatgggactgtggccctcatgcacgagggacgaaagctcaactacagcattttcaataaattagctgggctacagcagaatgagatcgttgagaataaacggttaggtacagttctggcacatattcagcaacagcatgaagagttggaaaaacagaataaacgttcccgtctcaagaaaagtatgccgagtcgtaaagctcagaaagctgttattgaacaaagaaagttaaatcctgtgcttgactcttgtggttaa

SEQ ID NO: 47622 - DNA, 783 bp, Acinetobacter baumannii
atgctgatcactatgtctgataaagaaattcaacgtcttgcagttctgcaagacgttagagatcatcgtattacccaggtccgtgctgctgaaatcctgaatctttccacccgtcaaattacccggttattgcagaagctcaatcaagatggtgtctcaggtatggcacatgccagtcgtggtcaaccgggtcatcgtcgccatgacgtcctgttaaaatcagaatgtctttccattatttctgaacatttacttggctttggtcctacattggctcatgagaagctcagcagcatgtttggcctgcatatcccggtagaaacggttcgtcgctggatgactgcaaatgacctctggattcctcgatccaagcgcctgaaacgtccatatcagcctcgatacaaccgtgattgcttcggtgagctgatccagatcgatggctcatatcatgactggtttgaaggtcgagcttccaaatgctgcttgctggtttatatcgatgacgccactggaaagctgttgcatctgcgcttttgtgaggctgaaacgacctttgattatatgctttcaacccgagcctacattgagcaatacggcaagcctttagcgttttatagcgataaacactcggtattccgagtgaatcagaaatcgagccaagatagccagatcacgcaatttgggcggattctgaatgagttaaatattgatattatttcgccaactcaccccaggccaaaggccgtgtggaacgtgccaatagaacactccaggatcgcctga

SEQ ID NO: 47623 - DNA, 288 bp, Acinetobacter baumannii
atgaaacaacataaatatcaaattagtgtaaagcatcttgtagatccaaaaggacagccttcaacttacactgaagatcttgtttttactgcttataatcacgatgatattttcaaagttttagaaaaattgcagcagaaaaaaattatagatgaagaatcaatgaaatcttttgccgtaggattaaagcttatgggagaagtgttattagaaaataaagatattcctttatttaaagatttttcgccgcaatttattgaatttattaaatcaatcaaaaaactttaa

SEQ ID NO: 47624 - DNA, 531 bp, Acinetobacter baumannii
atgaatgaaacaactgactctttgctgataaattcagataagccatcacgtaaaagccgtttatttgaatctggccatatgaaattgctagtgctttctttaattgaacaagcgcctagatacggttacgaaattattaaaagcattggtgagttggtaggtggtggatatagcccaagtacaggcacaatttacccaaccttatcttatcttgaagacatgcaatttgtttctattgaaaaacctgatggtgaccgtaagcagtacaagattacagtgactggtattaaccatttaaatggtcaaagagagcatttagaacatatccttggccgcttagagacgcgacgtgaaattcaaaataatgatcaatatctagatatctatcgtgcaatggcaaacttaaaaacatcattgcgacttaaattaaaaaataatgcactgactgaagaaacaattcatcaaattgctaagagcattgatcaagctgctgttgatattagctgtcttaaaaatgaggtagtccgatga

SEQ ID NO: 47625 - DNA, 645 bp, Acinetobacter baumannii
atgaattattcttcctcacccaaaagaccacgtggtcgaccaaccaaacacggttgtaactatgcagacactaaagaagttttaatccaccgaggtatcgagttactgaccgaacgtggaatgaatgctatgagcttgcacgatctcatgaaatcaatccaagttcctaaagggtctttctaccattattttgtaaataaagaggcttttattttagaagtcttagatgcttatgaactttattttgtgaagcgattgaataagtttttaagtcaaactgatctttccccactagaaaagctgcaaaattttgtaaaagatgcgggtgaaaaaatgcaaaaatatgattttaaacgaggttgtattttaggtaacttaggacaagaagtgtcgtatttgccacaagaaatcattgcccgaatcgaaagtatctttaaggtatgggagaaattagtttctgattgcctacatcagtcaaattcacaatatagcctagctgattgcgatgaagctgcttatcagttttggattgggtgggaaggtgcagttctaagagcacgtttggtcaaatcaacaagtcccttagatgcattttatcgcttgtttactttagctgtaaaacaacaaaatcacgtaaaaagttaa

SEQ ID NO: 47626 - DNA, 978 bp, Acinetobacter baumannii
atgtacaaaggtattgtaattactaaagatgaagcaggttacacatcacgaattactgagattgcatcaaagcctttacaagaaggagaggttagagtcgaagtcaaatattcaacactcaattataaagatgctttagccattactgggcgttcaccagtggtgcgtagttttcctttgaccccaggcatcgatttttcgggtgttgtgattgaatcaaaacatccagcatggaaagaaagagatgaagttctactgaatggttggggagtgggtgaaaagtattttggagggctagccgagcaagtcactgtttctggtgattggctcatacaaaaaccttctgctttttcttttaaagatacgatggttattggtacagcaggttataccgcaatgttgtgtgtcatggctttacaaaaacatggtattaaaccaagtgatggaaaaattttagtgacaggtgcaaatggtggagtaggtagtattgccattattattttgaatcatcttggttatgagattacagcttcaactggtcgacctcaagagtcagaatatttaacctatctaggtgcgagtgaaattattgatcgtattgaattatcttccccaggaaagccattaaacaaagaagtttgggctggcgtaattgatactgttggaagccatactttagccaatgcatgtgctagtacaaaatatcgtggtgcagttgctgcgtgtggtttggcaggcggaatggattttccagcaacagttgctccatttattctaagagggattaccttatatggaattgatagcgtgatggcaccaatcgaattaagaaaagaagcatgggaacgtttggctacagaattagatcaaacaaaattagaaacagtaacgactgaaattcagttaacagatgctttaaatatttcaaatgaaattttagatggaaaaattcgaggtagagttgttgtacagatatag

SEQ ID NO: 47627 - DNA, 420 bp, Acinetobacter baumannii
atggatgaagctacaatcaaaagtatggcagctgaattagctaaaggtttaaaaactcctgaagatttaaaccaaatgacagccatatttaaaaagttcatgatcgaaaccgctctgaatactgagctttctgaacatttaggctatgaaaagcatcaacctaagaaaggatctaatgcacgtaatggttttagctccaaaacagttctaacacaagatgggcagcttgctttagatatccctcgtgatcgtgacggctcttttaaaccacagattattaagaagcatcaaacacgcattactagcatggatgatcaaattctttcgctatatgcgaaaggaatgacaaatagagaaattgttgcttttttaaagaaatgtacgatgccgatgtatctgcctcccttattagtaaggtga

SEQ ID NO: 47628 - DNA, 2667 bp, Acinetobacter baumannii
atgaaaatacattcttttggtgaacacaataacattactttatctaataattgtattgaagttcgaggtgcacgtgagcataaccttaaggatgtagatgtttctatcccaagaaatgcacttgttgttttctcaggtgtatcgggttcaggaaaatcatcacttgcttttggaactatttttgctgaagcacaaagaagatatttcgaatctgttgcaccttatgcaagacgcttaatagatcaggccggagtaccagatgttgatgctattgatggtctaccaccagcagtagcattgcaacaacaacgtggtgcaagtaatacccgttcttctgttggaagtgtaacaactttatcaaatctcgtgcgaatgatttattcgcgtgctggtgcatatcctgccgatcagccaatgttatatgccgaggacttttcaccgaacactcctcaaggtgcttgtcctacctgtcatggtttaggtcacatttatgaagttacagaatcgacaatggttcctgacccaacactcagtattcgtgagagagctatcgcatcatggccacctgcttggcacgggcaaaacttacgcgatatcctagtaaccctagggtatgatgttgatcgaccatggaaagatttaccgcaatcggatagagactggattttatttactgaagaaaccccaacagttcctgtctatgctggtttaagccccgctgagactcaatctgcacttaaacgtaaactagaacccagctatatgggcactttcactggtgctcgtcgctatgtccttcatacttttgctaatacccaaagtacgttgatgaaaaaacgtgtttcacgttttatggaaggaaaaatatgcccttcctgtcatggtaaacgccttaaaccagaagccttatctattacctttgctggagtagatattggtgagtttatgcaactttctttggataagttaacttgcctgcttgagcccattgttcttggcaatttcgacgctcatgatgctggagaaaagactaataataaagtaacccaacttgatagatctgaacgagcaacaacaggtagagcagtgcattctgtatctccagatgtaagacgtacgtcagcactttcagatgaaaagaaaattgctgcccagcgtttagcaaatggtgtggtggggcgtttaaatcaattacgccagttaggtcttggttatctaacattagatagagccacaccgactctttcggcgggagagttacaacgtttgcgtttagcaacacaattaagttctatgctatttggtgtagtttatgtactggatgaaccgtctgctggattacatccttcagatagtcagtcattatatgattctctcgataaattaagagacgctggaaactccgtatttgttgtagagcatgatttagagctcatgcgtcgtgctcaatggttagtggatgttggaccagatgcaggagagcaaggtggtaatattttatatagtggagtacctcagggtttaagtgagatttcagcttcacgtactgcaagttatttatttaataaaatcccagttactcaaagttatggacgtacaccctctggttggcttgaacttaacaatatttaccgacataacctgcataatattgatgctcgtatacctcttggtgtacttacagcagttacaggtatttcaggttcaggtaaatctagtctcgtttctcaagctttacccgagttagtactttcatatttaggcaatgaatctgaaactgaaaacaataatgaaaataatcctttaaatgaaggaatgttggttaccgaggttacacagggttctctggctggtgatgtggaggctatacagcgtctggtacaggttgatcaaaaaccaattggccgtactccacgttctaatctggcaacttatacgggtttatttgatcatgttagaaagttatttgctgggactcctgaagctcgccaagctcattatgatgctggacgtttttcgtttaatgtggctaaagggcgatgtgaaacttgtgagggtgaaggctttgtcagtgtagaattattgtttatgccaagtgtatatgccccatgtccgacatgtcatggtgctcgatataatgatgacactctgaaaattcgctggaatggacgtaatattgctgaagtattaggaatgaccgtcaatgaagcacgtgatttttttgatggagaggtctcgattgctcgttcactacaattattaaaggaaattggccttggttatttacgtttagggcaaccagcgactgaattatctggtggagaagcgcaacgtattaaattggcgaccgagctgcaacgcaatcagcgtggaaatacactgtatatacttgatgagccaactacaggtttgcatccatcagatgtagatcgattgttagttcaattgcagcgattagtcgatgcgggtaataccgtggttatgattgagcatgatatgcgtgccgttgcacaagcagattgggtgattgatgtgggaccaggtgctggaaatgctggtgggaatattgttgtggcaggaacaccaaaacaaataacagaaaatcaagatagccgtactgctccatatttagttaatgagttagtgagtcgtgatactaaacgttga

SEQ ID NO: 47629 - DNA, 150 bp, Acinetobacter baumannii
atgagttattcagaacattttagacgtaaaattttagctaagcttgaggaaggttattctattcgagcagtagctgcacaatttgaaattaataaaaataccattgttgaatggaagaaacgtatagagattaaaaaaactcgtgtataa

SEQ ID NO: 47630 - DNA, 1359 bp, Acinetobacter baumannii
atggacacaagcaaggttaatattaatgagttaattgataaagcccattttacatcttttcattggaaagttttaatctggtgcttacttattattatttttgatggatatgatttagttatttatggggttgctcttcctctgttaatgcagcaatggtcgttaactgctgttgaagctggtttactcgccagtgccgctctattcggcatgatgtttggtgccatgattttcggcacgctttcagacaaactgggacgcaaaaaaaccattctgatttgtgtcaccttatttagcggatttacctttataggtgcctttgccaaaggaccaacagagtttgctattttgcgctttattgcaggtctaggaattggtggcgttatgccaaacgttgtagcacttatgaccgaatacgcacccaaaaaaatccgcagtacattagttgcaattatgtttagtggctatgcaattggtggcatgacatctgcgctactcggtgcatggctcgtaaaagatatgggctggcaaatcatgtttttaattgcgggtattcccctgttgctgctcccgctcatttggaagtttttaccagagtctctcgcctttttagtgaaatctaaccatagcgaacaggcaaaaagtattgtgagtaaaattgcacctcaaactcaagtcaatgccaatactcaactagtgttaaatgaaagtacaacaacagatgcacctgtccgtgcgcttttccaacaaggccgtaccttcagcacgtttatgttctggattgctttctttatgtgcttactcatggtgtatgccttaggaagctggttgcctaaactcatgctgcaagcgggctattcgttaggtgcgagcatgttgttcctctttgcacttaatattggcggcatggtcggtgcaattggtggcggtgctttagcagacagatttcatttaaaacctgtcattaccattatgtttattgtgggatcagcagctttaattctgcttggcattaatagtccacaatttattttatatagcctgattgcgattgctggtgctgccacaattggttcacaaatcttactctacacttttgttgcgcagttctatccgacagcacttcgttcaactggcatgggctgggcatcgggaattggccgtattggcgcgattattgggccagttttaacaggtgctttactttcatttgaacttcctcaccaaatgaatttcttggcgattgcaattccgggtgtgattgctgcacttgcaatatttatggtcaatctaaaagcctctgttgctgcacaaacgccatcaacttttaaccctcaaaacacgcttacccagcagtaa

SEQ ID NO: 47631 - DNA, 795 bp, Acinetobacter baumannii
atgagtgtacttgaagccaaacatattcatctgacttttcctaaacagcaaaagccagttttacaagacattaacctaaccattgaagaaggttctttaaccgtgattttaggtgagtcgggttgtggcaaaacaaccttgcttaatatcttggcagggtttcaaaagccgagttctggtgatgtgcttgtaaatcatgaagtcgtaactggaccagatgtaactcgtgctgttgtatttcaagatcacgccttacttccttggttgaatgttgcagataatgttggcttcgctttgcagttaaaaggtttaaagcgtgcagagattgagaaacaagtgagtgcaattttaaaaattgtgggtttaagtcacgttgaaaaagccaatatttgggaactttctggtggtatgaaacaacgtgttggtattgccagagctttgatcagtcacgcgccgtttattttattagatgaaccttttgccgcattagatgcttttacgcgtgaaaacatgcagcagttagtgctcgatttatggattcaacaaaataaaagcttctttttgattactcatgacattgaagaagcattattactcagcaatcagctggtactaatgacagcgcatccaggcaagattgtagaaactctacacctcgattttgcccaacggtaccgtcagggtgactctattcgctcaattaaatcggattctcaatttattcagctcagagaacagctatttgaaagtttaagggcacaaaaacaaagcggtaaggaggcgttacctacatga

SEQ ID NO: 47632 - DNA, 174 bp, Acinetobacter baumannii
atgattgattctggtctaggaggattgtctctatttattaagcacattcggcagacccttccgaatgaagatattatttcctttgcagactcgaaatatattccctatggagataaaaatagcgattggattgtttcaagaaatacctacttaatctcaaatcattataaataa

SEQ ID NO: 47633 - DNA, 210 bp, Acinetobacter baumannii
ttggcaactgaaaccaccgttaaaggaaaaaatttagaaaatttaattgaaacttacgcaaaagatatcaaagtgtctttactgccttgtattggcctggccgaaaaaattgaaaatactaaagcacacactgctgaagttaaaagctatttaaaaaatattttggattctctgttaggacgaaaggttgatatgatcctagcaaaataa

SEQ ID NO: 47634 - DNA, 315 bp, Acinetobacter baumannii
gtgatacgtgaaataaaagtggctggcgccagcaaacgacaactaacaccagagcaacaacgtattctggatttagaaaaagaagtcaaacagcttagtgaagcgaatgatattctaaaaaacgcatgtgtactttctgaccgcagatcaaacttcgaaaagtacacggtaattgcggatttaacgatgaacaagaaagtcactatctcttcagcctgtagatgtttagctgtcagcgctgctggttattatgcttggcgcaagcgacgagttgataatgctcagaaatataaggatttaaaagcagtatattag

SEQ ID NO: 47635 - DNA, 309 bp, Acinetobacter baumannii
atgaactggataatatatagtgactttcataaaaagtacccaattggtacaattcaagctacagtattaaaagatgaaaaaaaagcttatgtaggttatgtaatttataaaaaatattggaaccaaggttatggatattctgctttgcaatggcttgaaaattttttaaaagaaaaagataatgtgcagtacctagaaggttatgttgatcctagaaacatattttctataaaaattctcgagaaatcaggttttataaaaactcatgaagaagataatgattatgtttatagaaaacaaataaaataa

SEQ ID NO: 47636 - DNA, 843 bp, Acinetobacter baumannii
atgaaccgtgttattgcgtgtattgactcatcaccttgtattaatgctattgcagatgcagcggcttgggttgcgaaagcaactggacgagagcttgtattattacaaattctagattactacccggcaagttatcaccttggtgaaattagcggtgtaatcggctttgaaagcaatgcaatgttgcttaaagagttagctgaattagagcaaaaacaaagtgaactcgctttagattacagcaataatttactcagacatatctctgacttaattaaagaaaaacacggaattacttgctcaaaaattcaggaaaaaggggattttctagagcaaagttttaatctcttacacgaaaacgatatcgtgattttaggtcgcgtaggcgaaagagctgccgaaaaacataaaccgattggcagcaatgttgaaaactttatccgcggtgcaaattgtacggttttgaccattggtgaaaacttcaaagtaccgacacgttttattttcgcttatgaatactctccgacatgtcaaaaaatgatgcgccgtattgcgcaaagtgacttattacggactttacagtgccatttagtctatgtcggtgaccatcctgaaatattgaatgaaccagagcattacttgaaacaagcggggctagatgtagtgaccgtttatagatacggtgatgtggcgcaaaatattctagagtaccaacaagaacacggcattcaaattattgtgctcggcgcatttagccatagcaaaatacatcagttcttcttgggaagtattgcaaccacgattttccgtaacgcgactgtaccattacttgtggctaaatga

SEQ ID NO: 47637 - DNA, 1593 bp, Acinetobacter baumannii
atgtttttattagtgttgttttcagcattttttacaacattattaccttacttgctgaaaattattatcgattattctgcacatgaatataactttctgctcgatattcagtttccatttaatttcttatacctcatcgtatttgcctatgctatagcatggttagcgaatgagttgtgtaactggaccaaaaatatttttagcgcttatttgatggtcgatttcaaaggagcattaatttttgcgggcttaaaaaattatttaaatcttaaaaaaggagaacaagatcaaattgaggcaggagcagtaattagtgatcttacaagagggagttctgcttttggtgaagttaacctcacattgcttcttcatgtagggccaattatttttcaattggttatgattttcgcagttttattcacgaccattagtttactttttagtattagctttttagtggtagctattattatttttctagtttcatttcatataaataaaaaaagtagttcactatttgatgctatgtatcaaaaaaataatcaggtaaatagccatttgatacatcagatctcgaattcctatgaaattaaagtaaaaaatgcagtaccgtttcaattatcaaagtttaatgaaacattaaatttgtatatcactacagccaaagataggaataagaaaataggactattgatgatttctcaattattcatgatcttcttattcttactcatgtttatgttgtttacagtatttctttccactgaaaagcaattgacccctggttcttttgtattgataagtacctatattattcaactcaccaatccgtttctggcggtttcccaaagtttgatgcgcttaaatggaaattttgttgctctagcaaaatatcggcagtactttaatttgaataaagagcaatatacacactccactgttaaagatacggaaattctctaccaatttataaatgctaaattttcattaggaaaaagaaacgtagatcattttaatttaacaatatcaaccaataaaacgtatgtcgtgattggtcaaacagggctaggtaaaacttctctgatgaattatttagtgggggtatatcagattcagtcaggccagcttttgtataaaaatattgatattagtcataatttttctaaacatatttttaatgaagtggtctatgttgcccagcaacctataattttcccttattctttaagagagaatctagtctataactctcaacatatatacgaagactcttatttactacagatgcttgagcagtttaacttatcgcatattttgaaaaagcataagttaacactctatgatgatctaactgaaatttataagaatttttcaggaggagaaaaacaaaaaatttgtattcttcgaggtcttttagctcgtccacaactcatcatattagatgaaccgacagcagctttagatgtagatactgccaaaaatatacttgaatatattcagcaagttgttccgtccataattatgattacacattcaccttatgcaatggagcttgcagatgaggtgattgatttagaaaaattattaaactaa

SEQ ID NO: 47638 - DNA, 1101 bp, Acinetobacter baumannii
atgaatctgttaaaacctctcatcatgagtatgatgattgtttgcatggtcacattaacggggtgtagtaaagaggctcctaaaacagaagaaataccctatgtgatggtaacccagccttcaaccacacttcacgaacaaaaaagctatgctggagatgtacaggctcgacaacaaactgccttggcatttcgggtgggtggacaagttacggctcgctatgtggatgtaggtgaccgggttagagttgggcaagtattagcaaaactcgatgtggcggatgcacagctacaattaaatgctgccaaagctcaattagaaaacgcacaggcagcagcaaaaacagcctcagatgagcttaaacgttttcaacaattattacccataaatgccgtaagccgttcgcaatacgatacggtaaaaaatcaatatgatgcggctcaggcagcattacaacaagctcgttctaattatgaagtttctgccaaccagactggttataaccaacttgtttctaataaaaacggggtgattacagcgcgtaatattgaaattggacaggtggttgcagcagggcaagcggcttatcaactggcaattgatggtgaacgtgaagtggtcatcggcgtaccggaacaagcagttagcgagattaaagttggccaagcggcatggataactttgtggtctaaaccgaacgaacgatttgctggatatgtacgcgaagtttctccagctgctgaccagtcccgtacattcacagttaaggtggcactcaaagaaggtcagtctgctattcagcttgggcaaagtgcacgtgtattttttagttcgactcaaactaatgtcatgagtgtgccactttcgagtgtatctgcaacagataaccaaccttatgtatgggtggtgaatgcgaatcagaccttacgtaaagtgcctgtaacgattggtgcttatggcagagatagtgtgccggtattatcgggtttaacaccaaatgattgggttgtgattggtggtgtgcacttgctgcgcgataaacagaagattcacccgattgatcgtgaaaatcgtgcagtgaaaattcagggagccaaataa

SEQ ID NO: 47639 - DNA, 285 bp, Acinetobacter baumannii
atgtttgaattcgccgtggtatgtgcagataaaggctatgattcagaaccactgcgtgaacagatcaggaaaacagggactaaagcgaatataccaaagaaaacaaatagccaatcgaacaatgaccatatggactggtatttatataaaatcaggcatttagttgaaaatatgttttgtagattaaagcaatttagaggaatagctactcgatatgacaagctcaaaagaaattatcaaagttctgttgctttagcatgtatatttttatggctacctttatag

SEQ ID NO: 47640 - DNA, 957 bp, Acinetobacter baumannii
atgcttcattttacttttttaggcacatcttcaggtgtacccaccctgacacgtaatgtttcaggattagcagttcgtaacagtaaaaataaggactggattttaattgatgctggcgaagggacacagcaccgcattcaacaagccaaactttcactacaaaacctagttgccatttgtattacacatgttcacggcgaccattgttatggtctagttggtttattggcaagtgcaggcatgaatgcccgtagcaaacccttaatcgtgattgcaccgaaagaaattcagcaatggtttgaaatcactgcccagcttacagatttatatttgccctattcccttcaatttattgatgtaaatgaagcaacgcagccacaacagatcattgacgaattcattgttcaggcacaccctctaagccatcgtgttccaagttttgcttttagcatttatatcaaatctattcagaagaagttagatacccaagctttaactcagcttggcgtacctaaaggcgatatgtggggccatttaaaacgaggctatgatgttgagtttgaagggcgaattttaaaatctcaagactttatcaaaattcaaaatcagcagattcatgcaattataggtggtgataatgatcggccagaattattagccgatgcttgtaaggatgctcaattacttattcatgaagcaacttatttgcaaacagtcttagataaagtaggtaaaggaccaatgcacagctcagcaaaaatggtggctgaatttgctgagcagcaatctctagacaatttaattctgacacactttagccctagacatcaggataaaactgggcagcaagctattaccgaagaagttcgccagttttataaaggtcatttttatttagcgaatgattttgatgagtttactttaagtgaaacaggacaacttttaaaaatcgagtaa

SEQ ID NO: 47641 - DNA, 786 bp, Acinetobacter baumannii
atgcaagacacccctctcattattggttcacgttcttttcaatctcgtttattggtaggaacagggaaatataaagacttaaatgaaacggatttagccattcaagctagtggtgcagaaatcgtaaccgtcgcaatccgccgtgtgaatattggacaaaatccagatcaaccgaatttactttctgtcattccaccagaaaaatatacaatcttgccaaatactgcaggttgttttgatgctgacagcgcagtacgcacgtgtatgctagcgcgcgagctactggatggtcataacctagtaaaacttgaagtgttgggtgatgaaaaaaccttatatccaaatgtaaccgagactttaaaagccgctcgcactttgattgatgacggttttgagattatggtctatacctctgatgacccaatcattgctcaagaacttgaaagtatgggctgtgttgcaattatgcctttaggtagtttgattggttcaggcctaggtattttaaacccgcataccatttcaattattaaagaaaatgccaaagtaccggttttagtagatgcaggtgttggtacagcaagtgacgctgcgattgcgatggaacttggttgtgatggcgtattgatgaacacagcgattgcagctgctcaaaatcctattttgatggcttctgcaatgaagaaagctgttgaagcaggacgtgaagcatttttagctgggcgtatgccacgcaaacgcatggcaaatgcaagttcaccagaaacaggttatttctttaaataa

SEQ ID NO: 47642 - DNA, 1278 bp, Acinetobacter baumannii
atgccaaagaaagctaaagaactatctgctctcagtgtagcaaaaatcaaagagattggtcgccattctgtagggggtgttgatggcctttgcttaaatgtcgaaggcaattcacgtgtctggattttacgtgcagtagttggtaaacgtcttgataaggatggtaagcaaaaaccgcatcgccgtgatattggtcttggtccctatcctgaagtttctttagctgaagctcgtgccaaagccactgaactaagattacaaatacgaagtggtattgatccaattgctcataaacaggaacaactcgaaaagctccgcatccagcagttaaagaataaaactttccgtgaatgtgccaaagttgtgattgccaataaaactcgtgaacttaaaaatgaaaaacatattgggcaatggtcatcaaccttggaaacctacatttacccaacgctgggtgatctcactattagcagcattaccaaagttgatattgctgaagtacttaagcctatctggattgagaaaaatgaaaccgctaaacgtatccgtggtcgtctagaaaccatttttgattatgccaaggctataggatattttgagggtaataatcctgctgaatggaaaggtaatcttgaacctattttaggcaacttaaaacaggaatcacgccctcacccatccttaccttatgaacaagtggctgagtttgtccagcaccttcgacagaaagatggcatttctccaaaagctttagaatttgcaattttaacggcatgtcgttctggtgaagtctttggtgccacatggcaggaaattgattttgaatctaaagtttggatcattccgaaagagcgaatgaaagcagaaaaggaacaccgtgtacctttatctcccgaagccctctcattgcttgaatccattaaactgtatacccagcctcaggattttatcttccctgcacctcgcagtggtggcatgctttctgatatgtcactgacagctttgattaagcgaatgcatgaacaaaaacttaaagaaaatgccttaggctatattgatcctaagcaaaatcgagtgatcacaacacatggtttccgttctactttccgtgattggtcagcagataaaactgattaccctcgtgaggtctgtgagcacgtattagcgcataaactaccagacgaagttgaagcagcttatttacgaggagcttatctagaaaagcgtaagggattaatgactgattgggccgaattctgtagtacacactttaactag

SEQ ID NO: 47643 - DNA, 1254 bp, Acinetobacter baumannii
atgacagaacctacaacatttgaagagtttaagtcatctttagctgagagagacttagatggcatagattcggaacatacttgctcgacacttgcgttggttaagtcattcaatgccagcggtccacacatgaaccgttggtgggtaatgacccctgtgaactggtcttgcccttgttgtaaaaggactaaggcagaaatagtaaggttaaataaaaataattatctaacctgccaattacatgaacatcatgaccacatgaaagatgtggtcaaagggctttttgaaaagtattcgattcaaaaagatcacgttgtagctgatgaactttctgaaaaatttgctatcaaggctgcattctctttatctgcttatgacaatacggttatttgctttgattgtaataaagcagatgcagaagccaaaaagatagtaaaagcgcacaagtatttttcattctcgccacgtgagattgcagagttcgtcaaacctacaccaaatcaagagcatgaaattgatccactacttgcacaacaagtgtgggaaagggctaaacccatttttgaaatgagaatggagtttgctgaaagatttgcaaaaattgcggctgaaaatcaagattggtatcaaccatcagaaagaactgctaagcaaattgaacgacttgctaaatggcattttgaacgtcatggattacaccaacttgatagatatgaaccggagaggctgctttataatccagtaccatttaaaggtgcgaacagttcatggcggttaaaagataaccctatagttaaaaagaagccttcaaacaatgagcttgcccatcttgtcgctacacgagggaagtattggaacagatatgaaggtgagtggttctgtccttgttgttttagagataaatatgattgtgtgaggccttcaaagaaaaattcatggatatttgaggtcaaaacagcttctctattttccactaaagatatgaatttcgattccaaccctgctccgatgtgtgttgattgtgttgatatggcattaaattttgggcgggaagtgttggagttaagcggaaagcgttcgatgatccactttcctagttctgttcttaccttaaaagagcttcgagaaattgtaattgctagaccacattctcaacacaagtttaagaatgaagtcattgatcgtatcattccagagattgtacaaagggttataaagttttgtgatgaggtggtagatcagggtaatgattga

SEQ ID NO: 47644 - DNA, 753 bp, Acinetobacter baumannii
gtgaaatatgcattaagtttgccatcgacagtcacgcttacagatgtagtgaatgttcaaaagttaatttctgatatgccagcaaatgaacatagaatcatagatgcctttgcaaatattatcatgaatcctgtaatgcgagcgcgacagaaaaaaggtcgatttgagcatttccccccttttaaaagctttataaacatcattgaatctgctgtgatttcttactatcgaggcaattttattggttcttatttgaccttgattcctgttgttgagggggtgatgttaaggtggcttggttatttcggaacgggtaaaaagcctaccttccctgatctaaagacattctttagcagctcttatcagagacaaccatgcccggggaatgttttgttttatgatgtattctcaaaagcatgtgacaagttacttacagaacatctatttaaaaattcccaagatggagatgcctattcaaactttaataggcatctagcagctcatctacttaatgattcgcaatttgctacaagagaaaattgtgtaagactctttttgttattggatttaatgtcagagctttacttatacgaagctcattgcggtggtgatccaagatttaaattgagcggtgaagacatatcacttgaatttaatgaatatcttaaactaatggcgcagttacatagccctgaaagagtccttttaagtgtcacaatggacacaaaacatactccatcaggtgacctatga

SEQ ID NO: 47645 - DNA, 465 bp, Acinetobacter baumannii
atgtcgatacttaacataaaaaaagatgtcctcgaatttctatatggattttccaagattgacaaagatgattttcatttggaagtattatctttgtttcctaaagcatgttgtgaatattcttcaatgttgttggctcgatttctgatagaggagaaaggttacaatattacagatattttaatgataaaagggcagtctatcgtagaagtagatcaattacatttatggcttaacgtgagtgatgttattgtggatataactgcaggacaatttaaggcggctgaaaatccgataataattgatgcatatggctcttggcatcataaaattttctacgaattagaaacatatattccttcaatagacttcaaaaattatgtagatgattttggtgaactaactttagaaaaggattatttaatgataattcaacacactcgtcagaattcaacgttgctttaa

SEQ ID NO: 47646 - DNA, 246 bp, Acinetobacter baumannii
atgaaagaaaacttttcgcctagatatattcttaatttaaaagcacactcaccaactggaaaaattgtaaacattactattttttcagaatacggccctgatgaagtagaattaaaaaggaaagcaatttgggctttagatatattacgtatcaatgatgaaaatgaggttatagatttttcatacggtgaaaaaacttttattcatccaagaactaatgaaaagtttactattgtctacgattag

SEQ ID NO: 47647 - DNA, 501 bp, Acinetobacter baumannii
atgaatatagaaccattccaaccatcagaagaagatgagttaattggaattgaagaacaaaatgaaatctcatctttagtccaaacatttgctagaaaacaatttggatactcaagagtaagtgtttcatctccccagttaattagaaaaacgcctcaaccaagggtaaatattgcatttagtaaaagtttaattgatctttatctaaggtttggagaatatcccttggctgatcatggaggtaaaaaatgtattattgttgctcgtattggatttaggaaacagaaacaaggttatggaaccgcattaataaaggaactctgcattttcggggaaaaatttggatatgaatatttagaaatagaatgtccaaacccaaattgccaagcttttatgaaaaagttaggttttaaagatcagttctatcttcctattgttcagttgaaaaagtctattcaagaatatgagcttctgaaacagacaaaaatcagcctctcatga

SEQ ID NO: 47648 - DNA, 870 bp, Acinetobacter baumannii
atgatatttctaatttttgctgcactcttatggggaacatcatttattgctgggaaatattcttatgatgtatttgatccatatcttttagttcagctacggatgggaattgctaccttatttgtattacctattttatatgaaagaagaaatgatgtacttttaagttttaagacgcataaaaaaggcttattagctttagcatttctcatttatccagcaacttttttattgcagtttttaggactaaagtacacatcagcttctagtgctaccactatgataggtatagagccattcatggtagtttttatgggttattttttcttcaaaaataaaacttctaaaatggattgggtactaggagcattaacttttatcggagttttaatagttgcttggtcatcacaacaagatcacagcattaacctctttggatgtttcttggtaatagtatctacgattgtggtcgctatttgggtattaacatcaaagaaaattctagaagaggttgatagtagcatttttactgctattactattcttttagggttcattctctgtatcccattcaccttctttttttctacaacttcattatcgactataagttcaagtatttctatttcaagcatacttgcccttctatatttaggaattggttgtagctatttagcatcaaaactttggaataaaggcttagaagtatcctctgccaataatggtggtctattccttgctttagaacctatttttggcgtgattttcgcagttttgttattaaatgaaaatattactggagtaacattggtaggtgtcattatagttctatgttcaactttttatgcacaagctattaaaaagtcctaa

SEQ ID NO: 47649 - DNA, 255 bp, Acinetobacter baumannii
atgcaaaaatttaatacggaaatttttgactctgagttcttgaaactaattaacttcgaatcagagaacttacctaaaatcatgcaagatttctcgttaagccttgcatgtgaggatattggtaaaatatacgttttaaacaatgcaaaacatacttttggagttgtagagccaaatttatcattaaatacatttcgtgcaaaaagagtgataaatagtcttaaaacgagcttaacagaagttgaggcaaattaa

SEQ ID NO: 47650 - DNA, 663 bp, Acinetobacter baumannii
atgagtaatttttttctagcttttgaaggcctagatggctctggaaaaacaactatatcaaatttagtatataaaaaattattaacaaagattgaagagcaaaatcttttatttattgacaagaaaaatcctgaaaaaaaaacagactacattgaatatcattctaacaacattagagaaattctttgggactacccagaaaatgcacctatgcatgagcttggcgatatgcattggctatatttgttatcctcatggtttcatctgttagattatactcaggttaaacctggtctccatactgggaaaagcattattttagaaagctggtgttacaaatatcttgtacgttacagaatgaaatctgattatatgtttgaagcaatgcaggcagctttctttaatttaacaaatccttttcctgtaatttatttagatattgaccctaaagtagcagcagaaagaaaaaaaacatttgggttttctgaaagtggtggaatggatggtttaaaaggcaatagtaaagagaattttatcatttaccaaaatacactaagggaaatatattatgattttgcacaaaaaggtggttggcatgtaatagatgtctcaaataaatctgaagatgaaattgcaaatgaagttattggtattattacttaa

SEQ ID NO: 47651 - DNA, 732 bp, Acinetobacter baumannii
atgtcatttaacggtagtaaattcttgtctggttttgcactctgttcaatgttagcaactgctactcatgcagagattgtcattcacggcacgcgcgttatttatccttccgatgcacgtgaagtcactttacagctcagtaataatggctctaaacctgcattagtccaagcatggattgatgaaggagatccaaaaagtacacctgatcaatcaaaagttccttttatgatcacgcctccgatttcgcgtgttgaagcaacaaaaagccaaactctccggattacagctttaccaagtgcatcacagctaaatcaacagcaagaatctgtactttggttaaacgtattggatattccacctcgaccaacaggtaaaggtgccgaatcagtaccagataattttttacaacttgcaattcgttcaagaattaaattcttctaccgccctgcgagtattaaagaagatgctaatttagcagccgataagctgcaatggcaaaaagcaggtcaaagtgtggtcatcaaaaacccaacaccttttcacattacgatgacttcaatctatcaagtcaatggtgataaaaaagttgatttattacccaaaggtttaatgttaaagccattttctgaagatcgtgttcaattaaaaatctccaatactgaaaaaatgagctttatcaatgtgaatgattatggcggacgtgtcgagaaaccaattaagtttcaataa

SEQ ID NO: 47652 - DNA, 2553 bp, Acinetobacter baumannii
atgtcaaaaaagcacgcaccatatagattattaaagcgtcatatttgtttttacctaacctctggcataatcagcatgactgtgccagtgatggtgtatgcagacgaactcaaaaacaataatgcgatggaagccgagttcgactcttcatttttgattggtgatgcgcaaaagatcgatatttcacgctttaagtacggtaaccctgtattaccaggtgaatataatgtagacgtatatattaatggtaaatggttcggcaaacgccgtatgcaatttaaagctgtcgatcctaaacaaaatgccgttacctgcttcaactctaatactttactcgagtacggtgttaagcaagatgctttagcgatccatcagtctgctatttcacaaaatagctgcctaaaaatagatgaatggattgaagatgcatactatgattttgatacgtctaagttgcgtgtagatatttctattcctcaggttgcgatacaaaaaaatgctcaaggctatgtcgatccaagtgtttgggatcgtggtgtaaatgctggctttttatcttatagcggtagtgcatataaaacatttaatagaagcaatgacaataaagaaaccactaatgcatttatggcattaacagctggagcgaatcttgctggctggcaattacgtcacaatggtcaatggcagtggaaagatcagcctaacgagaatgaaagtaaatcaaactatcaatctacaagtacctatttgcaacgtgcatttcctcaatatcgtggtgtacttacattaggcgatagttttaccaatggtgaagttttcgattcatttggataccgtggtattgatttttctagtgatgaccgcatgctgccaaatagtatgttgggttatgcacctcgtattcgtggcaatgcaaaaacaaatgctaaagttgaagtacgtcaacaagggcaattgatttaccaaacgactgtatcaccaggtagctttgaaattaatgatctctacccaacaggtttcggtggtgaactcgaagtttctgtgattgaatcaaatggtgatattcaaacattttcaatcccctacgcttctgtcgttcaaatgctaagacctggcatgagtcgctactcggtcactgctggtgagttccgagatcgtgatattgatttagacccttgggttgtacaaggtaaataccaactcggtattaacaactacctgactggttatacaggttttcaagctactgaacgatatgcatctgcactattaggtacagcttttgcgacacctctaggtgctatttcagttgacgtaacccattctgaagctgactttgagaaaaaagcgtctcaatctggtcaaagttatcgcttgagctatagtaagctgatctctccgacaagtaccaatttaaccttagccgcatatcgatactcgactgaaaattattacaaattacgtgatgcacttttaatccgtgatttggaagataaaggtatcaacagctatgctgtgggtaaacaacgtagtgaatttcaaattaccttgaatcagggtcttcctgatggttggggtaacttctacatggtcggttcatgggttgattattggaatcgcaatgaaagcggtaaacaataccagtttggttatagtaataactaccatggtttaacttatggtttatctgcaaccaaacgacaagttgactatagctcgaataatcgtacacgagacactgaatacttgatgacgctctccttcccattgagctttaagaaacattcgatgaatgtgaatgcaaatgcatcacaaaacaaccgaactgttggtgttagtggtactgttggcgatcgctttagctatggttcatccatgtcacatcaagactataacaatccaacattcaacgtaaatggtcgctatcgcaccaatttcacgaccgttggtggatcttatagtattgctgatacctatcaacaagcgatggtaagtttaacaggaaatattgttgcgcatcgcgatggtatcttattcggccctgaacaaggtcaaaccatggtattagtttatgcacctgatgcagcaggcgccaaagtcaataatacaacaggtttaagtgtcaataaggatggctatgctgttattccttatgtaacaccatatcgtttaaatgacatcacacttgacccacaagaaatgtctacaaatgtcgaacttgaagaaactagccaacgaattgccccattcgcagggtctattacgaaagtagacttttctacgaagaaaggttatgcaatttacattgctgctaaaacttcgactggtgaaaatctaccatttgcagctcaagtatttgatcaaaataatgagtctgttggtattgttgctcaaggtagcatggtgtatttacgtacccaaaaagcacaagatcaactgtatgtaaaatggggtgatgaaagcgctgagcaatgtgagattacttatgacgtaacagctcagcttgcacaagatcaacaaaacttaataatgactgaggcggtttgtaaatga

SEQ ID NO: 47653 - DNA, 1017 bp, Acinetobacter baumannii
atgaaaaaattactcttaaacagtgttttgctcaccgctggtcttggtttgtatggtgaggcaaatgcagcttgtacaccagcatcaggatttacaactatagacattagtatggctgtaggtcgtgtcgttgttcgacctagtgatcctgttggcaaaattctaaataaatctttatttgaaatccgccctaactctcaaactatgtacatcaattgtaatagtaacgaaatgatggtagcgagtctaatacagaatcgtccaataagttcactgggcaatagtatttactcaacaaatattcctggaattggtattcgactttatcgtgaagcatttaatgcgacgaacttttcaggctattacccctatacacgtcctgtacctggaactcgtgttattcttgctgagggttattttatagttgaaattattaaaaccgcagaaaatacaggctctggaacattagttcctggacaatatagtacttattatgctggaagtcgaagtgatcgccctttcttaaccagcacagtttatggaaatgcaattactattgcatcttcttcttgtgaatggcgaggtaatattaacaaagctgtcacactaccaactgtcacaaaatcaggttttactggtgttggatccacgcaaggtgagcaaagctttgatctaaatatcctttgtaacggtggtgaaaacccaacaggttatgaagagaaaaacctaataagtttgagttttgattatcaaacagaaggtacaaacactcaagtcctaagaaatctcgaaccaaatgcaacaaaagcaaacggtgtaggtgttcaacttctatggaattataataatcagaatcgcgtgattggtttaggtgacaaattagaattaggtacagttaaatctaaccagactattgaatataacgtaccacttacagcgcgatattatcaaacaaatgccaacgtaacagcaggaaaagttcgagcaatggcaactgtaactattgaatatgattga

SEQ ID NO: 47654 - DNA, 984 bp, Acinetobacter baumannii
atgaaaaaaattggtatattgacgcttagcttagccctgcttggctgtggtgaaaatcaaaatagctcacaaagtagcaatactacatcccaatctacagcaacaacatcaactagcttaagtttacgtagtttagatcagagtcaaacatgtcagtataactttgatgcaacacaacaagattacgatgatttatggaacaaacagaatccagactatctgattggactatttcctacaatcaatggacaaaaatttagcttaactgttgcccctccatatttttcaattaattatcctgaatacggtacttttaattatttacaatatttagctactagtaaaacaaggctatattcagctaaggattctttttactttccatcactacatgatggtttaggagattttagcttacctacaacaggaatttttgcacttgaaatgcaactagacatccctgccgctccactaaacggtggctactatggtgaacctggttcatcttatatagctgatattaattttagtggcgccacagaaaatggttatatcgtaaaatctagttataatttcatagcaggtggcgctgatcccgagtttggtgaaaatccaccttctttgtcatactctttcaactaccaaaatagcgatggtacagaatataactcaattgccgactatcacagtaagatgactgactatcagagtaagtaccatcgtatagggatatatatcaaccagaatacgaaacaattcggttttattatcaatggcattgatcagggatataaaggaacgctaccgtcagcattaaaaaatattggttttgatatctttaatagtgcttcttcagataaaaatggtgatttctcagacaaactcacaggactagaattctcatcagagctaatcactgaccgcaatgccctacagttcacttatccacaaggtacgactgatatctgtggcaatattatttag

SEQ ID NO: 47655 - DNA, 381 bp, Acinetobacter baumannii
atgattcactacaaaactcagcaaattctgagtttatgtaccagtcgcggtgcagtgcatgatttcgagttgttcaaacgcaatttaaaccagattccttttggggcttttatccttgcagataaaggctatcaggggatttatgtgttgtatccgaatagcctgttgccattaaaagccaaaagacactgtaaattggatcctgaattgaaaatctataatcaagaaatcaataaaagaagaatcggaattgagcatgtatttggcagcctgaaaaccttcaaaatccttgctgagcgttatcgaaatagaggtaaaaggcttggtttgagattcaatttaatcgctggaatctacaacttggaactgagcaaaaaatga

SEQ ID NO: 47656 - DNA, 435 bp, Acinetobacter baumannii
gtgaaactatatataagtgcactacagttagaaaatggagagcttttactcgtcgtttctcctcagtttaatgccaatgctattcaggattatgcattacgctgggaaattgaaaccttattcagttgtctcaaaggacgcgggtttaatcttgaaaatacgcgcttgacagacgctagacgagtgaaaaaattgattgcggtgttagctataagcttctgttggtgttacttaacgggtgaatggcaacatgatcaaaaaaaagtgataaaaataaagaagcatggacgactctcaatgagtttatttcgctatggtttagactatgttcaaatggcgattcagcgtttaattggttttgggaaaaaagaagagtttaaggaaattttggcaattttaagaaggcagaatcctgataggataagggttctgtga

SEQ ID NO: 47657 - DNA, 570 bp, Acinetobacter baumannii
atgacacatctcaatgagttatatcttatcttaaacaaatctctaaaatggaacaagtcacatttaaagtgctttgcgctcatcatgcttgtgattattttaaagcaaacatgtaatctttcttctgcatctaaagccttgcccatcaagtgcttaccacaatcattttatcgacgtatgcagcgcttctttgcaggtcagtattttgattatcgtcaaatttctcagttgattttcaatatgttttcattcgaccaagtgcaactgactttagatagaaccaattggaaatggggaaaacgaaatattaatatcctgatgctcgcaatcgtttatcgtggaatagcgatacctatcctttggacattgcttaataaacgtggaaattcagatacgaaagagcgcattgctttgattcaacgctttatagccatttttggtaaagaccgtattgtgaatgtgttcgcagacagagagtttatcggtgagcagtggtttacatggttaattgaacaagacatcaacttctgcattcgtgttaaaaaaacttcattgtcaccaatcatttag

SEQ ID NO: 47658 - DNA, 657 bp, Acinetobacter baumannii
atgtatgcaacgagcgaaacgaataagactataaaaaatctcgccctgttcgattttgatggaaccttgtgcagtaaagacagttttacagggttcatcttttatgcgttgtctaaacgccatattgtgaagcaaggcttgaaaatcctgccatggattcaagcctattatcttaacttttatccagcccatgcgatgcgtgctaagctatttcgtagcatgttcagagatactcctgcaattgaattgcaaagactaggcgaagaatacgcacaagaactcgtctcggcactttcacctgaaatttttgcacaattacagcaacaccagctattaggtgatcaggtggtattagtttctgcttccattgatatctatcttgctccactttgcaaattactaggtatcgaattaatttgtactgaaactcaagtcaaaaatggcatgatgacaggttactactcaactccggattgtagtagtgagcaaaagaagttaagaatacatgagcaatatcctctaaaacattatcagcgaatctatgcgtatggaaatagctcagaagatttagacatgcttagtcttgctacacatccttttatggtcggtgaagatcgaatcttgccctcattaaccccacaaaaaaagctcgcatga

SEQ ID NO: 47659 - DNA, 267 bp, Acinetobacter baumannii
gtgcaacaaagccatgcgccagtaaaaacggtcttaaaagaaaatcttcatattccattaaatgctcaattaaaaacaaatattccaattcagggaagtttgaatgtccctgtgaaaacagctttaaatgcgtcggtagatgtaaaaaataccttgccagttaaaatcgagcatggtgagttaaaaataccactatcgagcatgagcctgaatcgcgttaaatctggcgaagatcactcttcacctgttcagaaccagacaaaatag

SEQ ID NO: 47660 - DNA, 393 bp, Acinetobacter baumannii
atgaatatgccaacccattttgatacaaatcaaaaaatcatgtcgagcaagatcttgcttgagataattaattttgctcgattaagttttaatgaaaatcctgttcgtcttaacgactttaacagcagaattgctgatgaacttgaagatgaacactacgaaactttcgtagttcaaaatacaaacaacactaaatctattgtttacggattaacaattgatcaatgtatgttaatcggtatgcgtgaatcaaaagcagttcgcaagaatgttttagccacgttaaaacaaaaacaagcccctcaattacctcaatctttctcagaagcactccggttagccgccgatcaagcaaaaaaaattgaagaagataaaccaaaaatcgagtactga

SEQ ID NO: 47661 - DNA, 714 bp, Acinetobacter baumannii
atggaaatgctagatagaacgaaatcattattagatgcatacccaaaaatagattcaggaaacaggattctagatatttatcttgtgcaaagagaaatctgtcaaaacgctttagatggcattttaaaattttggcaatcagaagataataaagtacatgaccatttagtaaatcttttttttcaagagcaactaaatagtatttcaaaaaataatactcttccttctgagctatcagatctttttaagcttagcccttctctcaaagaaagtttagacttcctaatgaaaaaagccccaattgagcttcctgagagattcttctattctctatctcagctatatgtatctgctgatgcaatagcaatagatttaaatgaccttattgagcaagaacatgaggatattgataaaattcttatcgaaagattaaccacggatactccattttttacacaactagctttattaattgggggcctaagaaaagaatttctcacaagattcgaactgttgagtaaggaagagcaagaaaatatacaaaaaaaaggaaataaagcacgtgcaaaaaaatatgctcttattgaacaagaagttttaaaaaaatttaaagaaggtaactatcactcatatgcggactttgcaaataaagaacttcagaacttcgatgtgagttatacaacattaacaagatggcttagtcaattaagttaa

SEQ ID NO: 47662 - DNA, 375 bp, Acinetobacter baumannii
atgaatggtgaacagcttcatcaactcgcaatagaggcggcgcgtaatctcccttttagtgagcaaactcatccatttggtccagagtatgaagtttttaaaattttagaaaaaatgtttatgctgacagtagaagtgtctggcgtaaaaatgattaatgtcaaatgtgacccttataaaagtcaggaatatcaggaactctatccatttattattcccggctatcacatgaataaaaaacactggatttcgattaaaccgcataaaaatttaacaagcgattttctccgagatttaattcgcgactcttatgacttggtcgtaaaaaaagcttcctgtgaaagatcagaaaagattaaacaaccaataatataa

SEQ ID NO: 47663 - DNA, 813 bp, Acinetobacter baumannii
atgctcaaacggagcattgcttttgcattattggctgctgctgggcacgcttattctgctgatattgaagtcacaactacaattgatgaagatgtcgataatacagtatgctcattacgtgaggctgtagaactaataaataagcgtaattcaagtgattctaccgtggttgcctcagtaaaagatgggtatcatggctgtggaaataaagatagttcatcaaatattattttacagcgggataaagaatatacgttaaatagcagaataacgattacagcaccccttacaattagtacagcaaaaaacgattctacattagttgatactgatcagcccggttctcataatgcaaccattaaaatggcaggtacagatcagctttttaaaattgatgatggtagcgttgagaaagcatcttttgctgtgaccttaagtgatattaacttacaaggtgcaggcgcaagctctaatgtattaacaggcggtttaattttaaaccatgaaaaactgactattcagaactctcgactgattggtggatatgcgaatcagggtggggcgatttacaaccaaggactattatctaaaataggtcaaacagccggctttgtaagtattataaatagtttgattcaaaataataaagcaacccaaggtggtgtcatttatagtgagcagcctttatatttggtgacccaatctgtagtacgtgataatgaagtctcttctgcagatggtgccttgttttatggtgcaacaaagtttgatgatgaaaggtggatacttaaatgtacgtgccatcggctttag

SEQ ID NO: 47664 - DNA, 1188 bp, Acinetobacter baumannii
atgatatataacttttcttatcctttaaagcttgttatggttgggatactattttccatatatttactcaatctaaagcttacttttatacctttgcctttggtagcatttttgtcaatatttggatttattttttgtttaattaagaataaaattttagtaccaagaaaatattacaattactttgttttaatttctttactaagtatgatttgtgctttttcatttttagtaaatcaaaaaagtgatttttatttttttatagaaatttgcgtatattcagtagttttcttttttgctgccttatttttgaaaagtttcgtgaaatatattggatttaattataattatgaaactcttacgaaagtaagtgtgattgcagttgttgtacagttgtttttctctatactagcttacattaatgctgttttttttaatattattttttctattgttgacattaatctgcctttagatactctcgactcttttaatcaggggcgtttagttggtataggtgcatcattctttgcctctggtattttaaatagtttttttcttattcttttagctggattattggtttctaatagaagttctcctttaaaatcgatgaagtatatttttttggctcttttgttgagttttatgggggttatggcttcgcggacaacagtaatagggataatgttgtttattcttatttctctctgtaagaagcctttgtatgtattttattcaactattccattgctctttatcttaatatttgtcaattggttttcttccgattcacgtttatctgaattattaaaatttggtacagattttttatttgattatgaaaattctcaagctagtgaatctacagggactctatttgaaatgttaagtattattccaactactttaaaaacttggataattggtgatggtttatatcataacgatttaggtgggtattatatgtccaccgatgtcggttatactagaatcctttttgcaacaggtttggtaggttttttcttttatacccttgctcatttatatttaatatttactaccttttggagagaaaagaaatttgtttgtatttctttggtaatactctttttcttattacatataaaaggggtggctaatttgatgccattgctttttttatattttatcgttgatcaggaataa

SEQ ID NO: 47665 - DNA, 912 bp, Acinetobacter baumannii
atgaatattgataagtatagtacacaattttatagtggcttaaagaaaattctttggtttaaacaaacctataaagccctatcttcttatattttacagaatattaatagtatttttatactttcatcacctcctttaaatataatattttcagtattgaagcttaaatacccaaatactcaaatggtaggatgtgatcatacaagtactagttataaagcaaataatttaataggtaagttaaaatttaatttatataatagattagacaaatttattgctttaacggaagaagataataagttttatttgtctcaaggtattcattcggtttatataccaaattttattgagcctataaaaaattcttatccaggaagtaaaagaaattatttattatttgttggtcgtttctctttagaaaaaagaccattattagcattagaaatctataaaaagtcaaaactatgggaaaagggtataaagtttcgaatgtttggtgacggacctttatataatgaaatgaaaaactttattaatattaatgctcttgaggattatgttgaaataatacagaaagtctctgatccgaatgttatttataaagatgcttatgctttaataatgacctcttctgttgagggctttggtatggttttattagaagctatttctagaaatattcctagcattgcatttgatgttaattatggccccagaactattatacaacatggtattaatggtttcttaattgaagatggtgatttagataactttaactcttaccttcatcaaataggttctaaaattccagagataattaatgaaacggttaaatattttaatattgataatgtgatccttaattggattcaactatttgccgatttggagggaagaaaattatga

SEQ ID NO: 47666 - DNA, 189 bp, Acinetobacter baumannii
atgtataagcaaacagtacagttagagataaatagtgtgaaccagaccaaaacaaaaatcgaacttgttatttcacagattgaacaacaaattaagaatcgctctttaactccaggaacccgacttccctctgtacgtaaactagccaaagatttaggtttttctgtttttactattgtcgaagcttag

SEQ ID NO: 47667 - DNA, 864 bp, Acinetobacter baumannii
atgcaaaagtttatgaacggttgggtgaatggctttattggggttgcaatttttgctggttcattaccggctacccgtgttgcggtaacaggttttgagcctggttttctaacagcagcaagagctgtcattgcaggagttttgggtttaattcttatctttttgcttaaggaaaaaaagcctgctaaacaagattggtggccactcgctattgtggctttaggcgttgtagttggttttcccttatttactgcgcttgctctacagtatatgaacgcagcccactcgattgtctttgttagccttctaccgctcactactgccatatttgcagtagtgagaggtggagaaaaaccaaatttatttttttggatatttgcaattttaggcagtctggttgtttttacctatatgtttttcttatcgggtgaagcttcttttggcatcggcgatttatacatgcttattgcaattattttgtgtggatttggctatgcagaaggcggagtactttcgaaaaaaataggtggatggcaggtgatttgttgggcacttattttagctttgccgattatgctgcttgctactcttttttatatgcccgtttcctttcaagatgtatctacatcagcggtagcagggttggtttacgtatctttatttagtatgctcatcgggttctttttttggtacaaaggacttgcacaaggcggtattgctgcaattagccagctacagcttttgcagcctttaatgggacttgcgattgccgcacttttattacatgaacacgtaagttggtcgatgttaatggtaacggcagtaacaattttatgtgtcgctgccgctaaaaaattcgcataa

SEQ ID NO: 47668 - DNA, 240 bp, Acinetobacter baumannii
atgcaagaacttgccaaccgattggcgatacaaaatttcgtcaacgcttatatgcaagaggctggcaaaggatatttactttcttttgaccaacaaagttcaactcaacaagcgtttagctctggtttgacgctgttaactcttcctcttccttctatacaagcagaatgctctgtacctttatcttatgtaagtcgtgtaggacgccaagcgaggaaggcttgctacttttgtgtttaa

SEQ ID NO: 47669 - DNA, 627 bp, Acinetobacter baumannii
atggtgccaacacctatacgggattatcccgaatggcaccttgggcgtcaaaattacgcattgtggtatctagaaattaatgatcagaaattagttcattatctagatcaattgcgtgcgcatttttcagaatttctagtagaacctaatcaccgtcaatatcatgtcacgctgtttatatgtggattcttgacccctgaaaataaagttcatggtgatgacttttgttttagtgactttgtgcagcaaagggaaattttaagaaaagaagatattgcaccatttcaattaaaaattggatcagttgatagttttagtagtgctttatttgtagaagtccaagacaccgaaaataacttatctctcatacggcaaaaattaggtacagtttctaatgaaatagccgctttagattactgtccgcatattacattgggtttgtataagaaagactatagtagtaatttgattttacaaaaaatttctcaattacctgtacaatacacacaggctgaatttgatcttaaagttgagcatttaagctttggctattatcaggctcaaattttacaaggtcagctgtattcgtatcagcatttgtttttaggtgattcatgttgcaattga

SEQ ID NO: 47670 - DNA, 945 bp, Acinetobacter baumannii
atgttaaagggcgtgattttgtctgtcatggcatcattaacttttggtgttctttatttttatactcaattactcggccagcttgatagtgaacagactttcggatggcgtattattgcgactttgccatttttaactttatttatgtggtggagtggtgatttaagccatattaaaaatatatatcaacgtattttagcaaaaccttctttacttctattactcattacaacatccgttttgacttcggtgcagttatggctgtttttatggggacctatgcatggacgtggtttgcaagtttctttgggatatttcctgttaccgcttgttttggttttagcgggtagtgtcttatatggagagaaaatatcgaaatttcagtgggtcgctattgttcttgcaattattggtgtaggacatgagatttttcgactaggaagtattgcttgggaaactgctttagtggctataggttattccgcttatttcttgttacgtaagaaaattaaaacggataatttagggggcttttggtgggaccttctgattattatgccagttgcaatctatctgacacatacagggttattgccatatagtaagttcctcgatcaaccgacactcgggttggttattgcgggcttaggtgtgcttagtgctataggcttgggatgttatatattggcaagccgttatttacctttggttgtgtttggtctgcttggatatcttgaaccggtgttacttgctttagcatctttagtgctaggggaaagcattggtaaagaagaatggtttacttatcttccaatttggtgtgccgttttcgtattggttttagaaggggcttttcatctttaccaacagcagcaaaaagccaaaaatttgcaattaaatatcgaaaaatatcaaaaaagattaaaaaatgatgctcacgattag

SEQ ID NO: 47671 - DNA, 210 bp, Acinetobacter baumannii
atgacagcgttagcagtaaagattgggaaaattattcgtcagaaaagaaccgaatcaagcattactcaagaatcattagctttaaaatgtgaaatagatcgtagctatttagggcgtatcgaacgtggagaagtcaatctgacagtagataagctgtatcaaatcgcacaggttttacaaattagccccaaagacttattaccagattaa

SEQ ID NO: 47672 - DNA, 768 bp, Acinetobacter baumannii
atgatggcttcttcacaaactcaacaaagtgatcagccgttgcagtctatgccattgatgtcgcatgtgattgaactgcgtaaatacttgatgcggatattgattgcggtttttgccgcattctttagcatgattccatttgccaatgacttgtatgaagtgctttcaaagcctttgcgtttacagcttcctgcagatgcgaccatgattgccacggatattaccacgacatttatggcaccatttaagctcagcttttttatcgcagtaatcgtggtgatgccatacattctgtaccagatttggcttttcatcacgccagctttgtataagcaagaaaaacgtattgcagtaccattgctcgtatcaagtattgtattattttatgttggtatctcgtttgcgtactttataactttacctgcagtgttggcatttttcttacatgcagcacccgaggcagttgcaccaatgactgatattaatagctatctgagtttttgcttgaaattatttttggtctttggggtaacttttgaagtgcctgtagcgacattattattgattttggtgaacttagtttccgtggaaacactgactcgaaatcgacgttatgtgattgttggctgtttctttgtttcgatgtttattacgccaccagacgctcttagtatggtaatgttggcgattccgatgtggctactttttgagattgggttgatgtttgggcgttttatcgaaaagtccaaaacgccacaaactgcttaa

SEQ ID NO: 47673 - DNA, 345 bp, Acinetobacter baumannii
atgttagatatgggatttagtgaaatcttactgtttggtattgtcgctattgtggtgcttggtcctgacaagttaccacaagcaatgcgtacagtagggcgatggtatggaaaagctcgacgcttaatgcatagcgtgcagcacgatattgagaaggagctcaatctgctcgagatgaaagaacaagttcagcgtgaacttgatcaaatccgtgcagtagaacgagatatgcaacagcagttggttgaaatgagaaagagtgctgaagatattgcgagtacaaaagcgcaacaagggcaaagtaatccagctgctcaacaacctgcacaaagtataggagagtag

SEQ ID NO: 47674 - DNA, 228 bp, Acinetobacter baumannii
atggcaggtctatcaatttggcatattttattgttcttgattattgttgttttgctttttggtacatcgaagctcaaagggctgggtcgtgacctaggtggtgcggttaaggattttaaagattcagtaaaaaatgaagatcaagatcaaaaactacttgccgaagatacttcggtgattgatgtgtctagtcataccgttcgagatgcgtcacatacgcaaaagtaa

SEQ ID NO: 47675 - DNA, 483 bp, Acinetobacter baumannii
atgaacaatacaatacttaccaccttattatttgctttattatcattaagttgtgcaaaggcaagcgatagtggcatatcacacaacacaaagtacacgactactaaaagcagtattatagacagccaaaaccctccgaaaaacaatcaatcagaaggatattcaaaagcatatgaaaggtgcatatcagaccacaaacaaggattcaaccttgcagtagattgtacgcaaaaagaattggaagatattaataataaaataaataaaataaataaaatattagataataaaaaacctcacataaataaaaaaagcattcaatctaaatatgaaaattatgaaagaatgatgtgcaatgatttaatgaatacatcaaaattgactaaatccagctcaatcacacgatcgcagtgcaaactttcacttcgtcaaaactatttagataatttacaaaatatactttcaccacagcgactagaataa

SEQ ID NO: 47676 - DNA, 1608 bp, Acinetobacter baumannii
atgatggcacagccacaagtgaacttacaaaaatcaattttaaatactcccttgactcgacgctctattttgattgggggaatgaccttgcctgcggtatccatgcttacgggctgtggtggcggcggaggtggtggtgaggttgagtcggatgtggtgataccgattgcaccgtttgacccagatacaacaccgcaaattccagatcaaggcgaaaagactgagcccgaacaaggtactgagccgatcattagtccagatgcggtgaaaatgaatgtggggatctataactttgaatataattcttttgtgcaattacgtgcacgtcgcaaagtaagtaaaggtacagcaggttcagttttggtgaccaataaagatggtactgaaacggcttgggaaagtatcgtagattatgtcaagcgctcggtcgatcatcgttttgtattgttgtaccgagggatgttgactgcttttgctgagcgcccaccacaagactatgatgtcaccttttttactgctccagaattttattggaatgtgccttggactgattttttgaatacggatgaagtcttggtagttgcagatttatttttagaactcgtcacacagaaagtccgtagtttgattgctaagtttcctgaatgtgattatggaaaactggtacttctcccaggaactatcgcagtgttaaagccatcagtaaatatttttaacaaagatggtagtgatgccagcaccgataaaaatccaatattagaagcaacgaaccatttggtatgtgtgcataatctgtctttaaatgatgagcatcagcgccctgcatatatggtttggccaaaacgcactgtgtcttggattgacttcattggtgatagaagatgtgatcgaggggatgaacttggtaataatgccagtaatcctgatctggagaactatgcacatgtttgtactttaaatggagaggaaaagctggtggtaaaaatccagcgagtttcgtctgataaagttcaagcctttgatgattatggtcgtcaattattggacaccacatttaataatgaactaattgaaggcttgccatttgggataaatatttgtttggactacgcagttgccagtacgactacagataagtatcgcatggcacagctaaaaaataccgagtttaaattggattttgtaatctctgctggtattcgtcttaatgcaaaaaactatcaagatgcttcaacggtacagtacgccattcataatgatggtattcaaggtagtaatcaaaacccaaatcaagtcaaatatgagtattttagtaatgtttcgcaaattttttatgataagcgaataggggcaccataccttctgtcattacctgcacttggaacgaccgctgatggctcaagacaatctacaacgatgatttcagttgataacagcacagattttacttatccagaacgttattcagggatgccatcaattactgatgagattaattcagccaatgttcgggtttggagtttgcctgttgatgtgactgacaccttgaagacgcaagaaacagtcactgcaatgaagtctgaaaactgtgaagcggctgttgcataa

SEQ ID NO: 47677 - DNA, 291 bp, Acinetobacter baumannii
atggccaaacgttttagtgctgaatttaaacagcaagcaattgattatgcactttcaaactcacacgagcctatagctgcaatcgcccagaaattaggtgtgggttattcaactttagacaaatggattcgtgaaaccaatccagtgggttcaagcaaacgtcaactttcaccagaacaacagcggatcttggaattagagaaagaagtcaaacagctcaaggaagccaatgacatcttaaaaaaagcgcataacactaaatctaaaaaaattggaagaataatttattaa

SEQ ID NO: 47678 - DNA, 597 bp, Acinetobacter baumannii
atggataaatatggggaaatgggtgacagcctgtattgttaccctggcacaaatatcctaaagaacaaactcaatattcatgatgaacaaattttagaacaagctgaactagcactgtctggattggcaagtaacttaattgaatatgctgaaccaccttacgacttacaatacttaaaatcaattcatgcgcagctctttggcgacttatacgactgggcaggaaagttaagacaaatcgatatttccaaaggtgacacccgtttttgtaatttttcccgtattgaaattgaaaccaataaactactcaaaccgcttcaagaaaaaaaatactttcaaggcttagcaccacaacaactgattcctcaacttgccgacttgtattgtgagcttaatgtcatacacccattccgtgaaggtaatggacgtacacaacggattttctttgagcatctgattgctcattgtggttatggtattgattggtctcgcattgactctcaacaacaatggattcaagccaatattgaaggtttttatggtaatttaaatccattaattaagatttttgaaatatcctttattcaaaatacctaa

SEQ ID NO: 47679 - DNA, 168 bp, Acinetobacter baumannii
atgctcagaaccactgaacagaaaaaaaaatatattcaagcgacacgtgcgcaaaactatcaagccagcctaaagcttgaaggcattacaacgacagctcaaacaactcaacaaagtaaagctgaaatcttgcaaaaatataagaagtattcgcaacccgaaacttag

SEQ ID NO: 47680 - DNA, 207 bp, Acinetobacter baumannii
atgaatgaaaaatttattcaattatcaaaagaacttaaacatagacctattttagagaaggctttaggttattttcctaacttacctttagttgctatcgattgtggctgtggcgctggcaatgaatctgcttatctactctcaaagggatttaatgttcatgcttttgatatttcaattgatgggctttgttgcacaaagatttga

SEQ ID NO: 47681 - DNA, 342 bp, Acinetobacter baumannii
atgccaaagaatgtgattcatcattccgacagaggtgtgcaatatctttccattcgctataccaatcgtttagaagcagcaaatttacgagcatcagtcggtacaacgggtgattcatacgataatgctctggctgaaacggtgaatggcttatacaaaacagaggtgattgaatatttaaaagcagattggcaaggtttagcagatgtacaacttgcgacactaaactgggtagattggttcaataaaaagcgtgtacacagtgcactgggttatgtatcgccttttgagtttgaagcaatgtactatgataagattaacccgttaggtcaggtggcttaa

SEQ ID NO: 47682 - DNA, 1416 bp, Acinetobacter baumannii
atgaatagcgatcagttactagaggctttaaaccaaattgcatctgaaagctcaaaaaatgaaaaactagctttactcatggattttgaagcagaaaaggggttgttcagagaagttctgcgtttggcatatgacccgtttattgtctttggaattttgccaaaagcagaagatgcaggaacaggggaattaatgtttgatgaggttgatacccttgagttcctatctaagcttaataaccgtgaactaacaggcaatgcagcgcgcgaagcgctgcgtagccaactggctcaattatcagagaagtcaggcgagcttctaattcgaattttaagaaaagatttacgtgcaggttttagtgatgcaacgatcaacaaagtcgtgcctgatttgattcctgtatttccataccaacgctgttcattgcctagtgaagtaaagctgaaggcatggccgtggaaagatggcatttatttgcaagaaaaagctgatggcatgtttgccaacgggaccaatttagaagataagttcttcttgtcctcacgtcagggcacgccgttacctatggagcatttttccgaccttactgcggaaatggatatgctgatcaaagatgtccaatatcatggcgaactacttgtcgagcgtgatggtgtcgtcctgccacgcaaggttggaaatggcatcttgaattcggtcactaagggtggctcattcgctgaaaatgaaaaaccgatctatatgatttgggacttcattccacttagttctgttaagtcaaaaggaaaatttgaagcagcatataaacgtcgtattgcactgattaaatcgatgctggccaagtttaagcctaagtatgtgcggcttattgatacgcatgttgttcactcattgggcgagacttacgatcacttttttaatgtacttatgcagggcaaagagggactggtaatcaagcatccagaaggtcactggagagacggtacaagtaaacaccaagttaaattaaaacttgatgcggattgtgagctggaggttgtgagcattaatccgggtaaggtgggttcaaagaaccaagggcgagcaggagctttgcattgtaaatctgcatgtggtcaagtcattgtggatgtcgccattaagaatgaaaaaatgcgtggcgaagttgatgcaaaccctagtgactggattggtcgaattatcactgtacgttcaaatgccattatgcgcccatccaacagtaaccagaattactcgttgtatttgccacgtatggttgaggactgctatcgaatcgataaaacggaagctgatgatttaaaacgtattgaagagcaattcaaaaacgctatcgaagctgccaagaagctggcagaaagtgaagcggtggtgattgacaatacagcgacagcataa

SEQ ID NO: 47683 - DNA, 462 bp, Acinetobacter baumannii
atgttatctaaagctaaaaaactacatcgtcaaaaagctttacgtccttctactgaacaatgggaaattatcgcaactattggatttgccattattcttacagttatcgggtatttttgcattggcggagctaaagcgaatgcagcggtggtagcgagagcagcgtctgtatcctcagctcgtccttcgacatcttttgcgcggtcttacagcagctcgtccacacgcgctccgaccactacaagttttcgttctagtccagttaagactgtgacaaaacctagtacgattcgttctgtgaagcctgttacaacgcctgctaaaccgatgcctgtttcttcttcatctacacagaagaaatcgcgtaagattggtttccaatatgattactatgcatttacagattgcatcccttattcaagcggaagtttccaaggttggaagtgtattgatcgggattaa

SEQ ID NO: 47684 - DNA, 573 bp, Acinetobacter baumannii
atgtttgtattgttatctggaacaacgtgcagcggcaaaacaaccattgctgacgcgctgaccgagaaatatgggtttaatcgtattgttaccacaacatcacggccgaaacgggaaggtgaggttgatggtttgcactaccactttattactcaaacagagtttgatgcactgaaaaaggctgatcagttccttgagacaaataaacatggtaattatgaatatggcgtaacgattgataatttcaaaaccttgccagatgatcgaaatgccataattattgtcgacccaaatggatataagaagattaagcgttatctgaaagcaaatgaaattaaatatcttggggtttttgtcgacgctgatattaaaagccgtctacaacgtttaattgttcgagcagatcagaaacttgcggaacgtttagaagtcatgattcaggtcgaatctcattggataaacgaaatcaaccagtacgatatgttgatccagaatgatgaaacgattgaagatgccttagagccgattttagatcatgtgcgccgtgcaggacatttagataaaatagcctaa

SEQ ID NO: 47685 - DNA, 417 bp, Acinetobacter baumannii
atgcagaatcaaatcagacaattagaagatggaacttttgaaataggtacttggattcagaatgcaaatggtgaagttgtgttctttgatgcaacgagtgccaaaacattagaagaagcaaacaagattgctgatgagttggatgatcaggaatttaaattagtaaagagtgaaattgatatgcttggcggcattcaaggtgccaataaggttctggagctcatgaatgaaaacgaagccgttgccgttgaatttgataaaaaccactttgatattaatgaattaaaattctataaccaaaaagattttgagcagcgaatggatgactacctagataatggtgagactgcaacctatctatatgcagactttgaaatccaaagcctgctgcacaaaactagatttttgaaattttaa

SEQ ID NO: 47686 - DNA, 1530 bp, Acinetobacter baumannii
atgacgcaacaaaacgctcaatcgacttctgaaccaactatttccgaaaacgatttaattgcacagcgtcatgccaaattaaagcaaatccaagatgttgcaaaggaaactggaaagagtccttggccaaatacattcaaacgtgaacattacgctgctgatttacaagaacaatttaaagatcagtctaaagaacaaatcgaaagcgctgaacatgtttatgtaaaagttgctggccgtgtcatgttaaaccgtggttctttcatggtgattcaagacatgactggtcgtatccaattatatgttgaccgtaaaggtttaccaaaagatacgcttgaaactattaaaggtttagaccttggcgatattattgctgctgaaggttatatcggtcgttctggcaaaggtgacttatatgtacaccttgaaggttttgaacttcttacaaaatcgcttcgtccattgccggataaatttcatggtttgaacgacacagaagttaaatatcgtaagcgttatcttgacttaattgtgaatgaagaaacgcgtaagacttttgaaattcgtgccaaagtcgttgcaggtattcgcgcatttttaaccaatgaacgtttcatggaagttgaaacgccaatgatgcatgtgattccaggtggtgcgtctgcacgtccgtttgagacgcatcataatgctttagatatgccattattcttacgtatcgcaccagagctttatttaaaacgtttagttgttggtggttttgagcgtgtgtttgaaattaaccgtaacttccgtaatgaaggggtatcaacacgtcataaccctgaatttaccatgatcgagttttatcaggcatatgctgattataaagacttgatggctttgactgaaaacatgcttgaaaagctagcaattgatattttaggtacgactgatgtgccttaccaaggcgaagtgtttagctttaaagggccattcaagaaaatctctatgtttgatgcgattttggagaataatccgcagttcacgcctgaaaatgtaggcgatcgtgaattccttgcaaaatttgttcgtgaggaattaaaagaagaagttaaacctggttttggtttaggtaagcttcaaacaatcgtatttgaagaaacggttgagactaaacttcgtcagcctacttttattactgagtacccagcagagacttctccacttgctcgccgtaatgatgataatccgcacattactgatcgttttgagttctttattggtggccgtgaattggcaaacggctttagtgagttaaatgatccgattgatcaagctgaacgtttccaagcgcaagttgctgaaaaagatgctggtgatgatgaagcaatgcattacgatgcagagtttgttgaagcacttgaatatggtttacctccaacagcgggtgaaggtattggtattgaccgtttggttatgctttttgcagatgcaccaagtattcgtgatgtgattttgttcccgcatatgcgtcgtaaagaaggttaa

SEQ ID NO: 47687 - DNA, 1128 bp, Acinetobacter baumannii
atgaaagccagcaaactttttcaaaacttaagcttaggcccttatgttttgcaaaaccgtattgtattgccaccattaacgcggtcgcgcagtactcagccagggaatattccaaatgaactgatggcaacctattatcaacagcgtgccggggcaggatttatggtcaccgaaggtacgcaaatcgagccacgtggtcaaggctatgcttggactcccggtatttacagccctgaacagattgctggatggtgtaaagtgacggaagcagtgcatgctaaaggaggcattatttttgcacaactttggcatgttgggcgtgtttcacatacatctttgcaacccgatcatgcatcaccggtcgcgccttcggctattagggctgatagtaatgttaaagtctttattgagaccgggcccaatgcgggggccttggctgatccttcaatgccacgtgctttaagcaatgcagaagttaaagaattagtgcaactctatgctcaagcagcgcgtaatgccttggctgctggttttgatggagttgaaattcattgtgcaaatggttatttggtgaaccaatttatctctgcacatagtaaccatcgtgaagatgaatatggtggatcactaaacaatcgtttgcgttttttacgtgaagtagtagaggcagttgctgaggtggttggtgcagatcgtttaggagtgcgttttgccccgctatttgaaagtacagaggaagatcgtgtttacatggggttggttgaagatgatccacatgtcacttatattgaggcaataaagatacttgaagaagttgggattgcctatttatctattgcagaagctgattgggataatgcaccagaacttcctcatgattttcgtaaagatgtcagagacactttcagtggtcggattatttatgcaggtcgatatacggcagaaagagggactcgaattttagaggcaggtctggccgatttaattgcatttggacgcccatttattgcgaatccagatttacccgatcgtatcgccaatggctggccattgaatgcagtagatgcaagcactatgtatggtgggacggaaaaaggctatattgattatccagcttacgcagattaa

SEQ ID NO: 47688 - DNA, 678 bp, Acinetobacter baumannii
atgaaaattttaatcgttttaacctcacatgatcaacttggcaatactggtaagaaaacaggtttctggctagaagaacttgctgcaccgtattacacctttattgactctggtgctgaagttacgctggcgtcacctcaaggtgggcagccaccactagatccgaaaagtaatttagcagaagcacaaactgaaaccactcatcgttttgaagctgatccaactgcaatgcaagcattggcacagacgcataaacttagcgaaatctctgtaactgattatgatgcagtgttttatccaggcggacatggcccattgtgggatttagcagaagatccgatttcaatttctctgattgaacaggcgattcagtctggcaaacctgttgcagcagtgtgtcatgccccaggtgttcttcgtcatgtgaaagcgagtaatggagcgcctttagttagcggtaaattagtgactggtttcaccaatactgaggaggccgctgtaggtttgaccgaaattgtaccatttttagttgaagacatgcttaaagaaaacggtggtcattattctaaagtggatgattggcaagtatatgttcaagtagatggcttgctggttactggacaaaatccagcatcttctgctgcaaccgctacagcattacttcaattgttgaaataa

SEQ ID NO: 47689 - DNA, 1158 bp, Acinetobacter baumannii
atgctgaattttaacttttataatccgacccgtattatttttggtggcgatacaatagctaaaatcaatgactatgtgcctacagaagcaaaagtgttaatgttgtttggtggtgaaagtgcacgtaagaatggtactttagctgaagtgcgtgaagcattaggtgcaagagaaattcatgaatttggcggaattgagccgaatccgagttatgaaaccctcatgaaagccgtagagctgattcgtgaacaaaagattgatttcttgatggctgtcggtggtggatcggtaattgatggtactaaatttattgcagcagcagtcaattatacaggggatacatgggagattttagaaacccatggtactaaaattactcaagctttgccttttgcgagtgtactcacccttccggcaactggttcagaaatgaatagcggtggggtagtcaccagaaaatcgacccaagccaaattgtcatttagcagtccccatgtttttccgcaattttccgtactcgatccgaataaaacttttagcttgccgacgcgccagttagcaaatggcgtggtcgatgcatttattcatgtcatggaacagtacttaacttaccctgtcaatgcacaagtacaagatcgttttgccgaaggtctattgcaaactctgattgagattggaccgaaaatcttggacgattcagcagattatgacacgcgtgcgaatttgatgtgggctgctagcatggcactgaatgggctaattggagctggtgtaccacaagattggtcaacccatttgattggacatgagctcacggctttacatggtattgatcatgctcgtaccttggccattgtgtttccggccaatctacaagtgcgtcgtcaagagaagcgagaaaaattactacagtatgcagctcgtgtctggcagattgtcgaaggtgatgaagaacaacgtattgatactgttattgctcgtactcgagccttctttgagcaacttggattgccgactcgtcttagcgattatggactggtggagacagatattgagatcatcattacgcaacttaaatcacacaatctgacacagctaggcgaacataaaactgtttcattagagatcagtcgccaaattctcgcgacgagcatctaa

SEQ ID NO: 47690 - DNA, 315 bp, Acinetobacter baumannii
atgcttaaaacagctttatatgtccgtcttgaagctaaaccgggtaaagaagacgaagtggaagctttccttaaagccggtttacctattgtaatggaagaacctgcgacagttgcgtggtttggcctacgtcttggacctacaacatttggtatttttgatgcatttcctgatgaggcgggtcgccaagcacatttatctggcaaggttgcagctgctttgatggctcaggctgaagagctattttcagagccgccgtctattgaaaaagtagatgttttggcgagtaaactaccagctcatactgatgcttaa

SEQ ID NO: 47691 - DNA, 1113 bp, Acinetobacter baumannii
atgaagtcacgtgctgctgttgcgtttggtcctggtcaacctcttcaaattgttgaagttgatgttgcaccaccgaagaaaggtgaagtattaatcaagatctcccataccggtgtgtgtcatacagatgcattcactttgtctggcgatgatcctgaaggcgtttttccggctattctcgggcatgaaggtgctggcgttgtggttgaggttggtgaaggcgtgactagtgtcaaaccaggtgatcatgtaattccactttacaccgctgaatgtggcgagtgcgtattctgtaaatctggaaaatcgaacttgtgtatttccgttcgcgaaactcaaggtagaggtgtaatgccagatggtaccactcgtttttcctacaatggtcaaccgatttatcactatatgggctgctcaacgttcagtgaatacacggtagtggcagaagtatcattggctaaaatcaatcctgaagccaatcatgaacatgtatgcttactgggttgtggggtaacaacgggtatcggtgcagtacacaacacggctaaagtacaagaaggtgatagtgttgcggtttttggtttagggggtattggtctggcagtcgtacaagccgcacgtcaagctaaagcaggacgtattattgtggttgacatgaatccagacaaatttgcgctggcaaaagaatttggtgcaacggacttcttgaatcctaaagactacgataaaccaatccagcaagtaattgtcgaaatgactggctggggtgtagatcattcatttgagtgtattggtaacgtgaatgtgatgcgtgcagcccttgaaagtgcacaccgtggctggggacaatccgtaattattggtgtagctggcgcaggtcaggaaatctctacccgtccattccaactggttactggtcgtaaatggctaggttctgcctttggtggcgtaaaaggtcgtacgcaacttccaggaatggttgaagatgccatgaaaggtaaaattcaattagaaccatttgtgacacatacgatgggcttggatcagatcaatgaagcctttgatctaatgcatgaaggtaagtcaattcgtactgtaattcattacgaataa

SEQ ID NO: 47692 - DNA, 276 bp, Acinetobacter baumannii
atgcctaatcaggttgaagacaaaaaaaagattcttctacgcgtcagaaagatcaaaggtcagacgcaagcgattgaaaaagcgttagaagacaatgtggaatgtggtgcaattctgcaacaaatatgctctgtgcgtggtgctattaatggtttaatgaatgagatgttggaggttcatttaaaggacactttagtatcaggtgaaaccacagaacaacaacgaaaagaagaactggctgaaatcgccaagattctaaaatcatatttaaaatag

SEQ ID NO: 47693 - DNA, 282 bp, Acinetobacter baumannii; identical to SEQ ID NO: 47620

SEQ ID NO: 47694 - DNA, 615 bp, Acinetobacter baumannii
atggctgttgcccgtactggcagtttacgtaaagccgcagaacagctttttatttcagtctctgcagtgcatcggcaaattattcttgctgaagaagagttaggcgttgctttatttgagcgtttaccgcaggggctgaagctaacgttagcaggtgaattactttatgctgatttgcttaaatggcaaaaagaatatcagctgactcgaattcgatttgatgaaattcaaggattaagtcgcggcaatattgaaatgggttttatttctgccctaaatgatggttttgtcgtggattgtattcaacgcatggctgaaagctatccatggattaatctcaatatcagtatgaatagcagtgaagaaatatcgagaaaaatcattgatgcagaattagattttggcattatcttaaatcctaaaagtcacaatcaattagaaatcttatcctttattgaaattcctttaggctatgttttatcaccacatcacaccttagccggcatggataaaatctatttatctgacactttaaatgagcgtcatatcatgccaagtgagcccttagtcatcagtgattatgtacgactgcatatgttgaaagcttattattag

SEQ ID NO: 47695 - DNA, 720 bp, Acinetobacter baumannii
atggtcacaggttttgttcaaagtctgattaaactttgtggattaaattggaccgcaccagattacagtacgctttgtcgaagacaaaaacatattgatattgcgattagctatcaaaaaagtagtgatgggctacatctactcgtcgactcaactggcttaaagtttctaggtgaaggtgagtggaaacgtaagaaacatggacctgaatatcgtcgccaatggcgtaagcttcatattggcatcgatgctgaaaccttgcaaatacgtgcagtacagcttactacaaataatgtgagcgattcgcaagtactcggtgatttacttgctcaaattcccttagatgaacgaattgattcggtctataccgatggtgcttatgacacgaagcactgcagacaagtcattctagatcgagatgcacatgcgctcattccgccaagaaaaaatgcaaaaccatggaaagatcagaaattgagatctttagagcggaatgagttactgaaaacagttaaacgtttaggaagaacgctttggaaaaaatggtctggttatcatcgtcgaagtttagttgaaaccaagatgcattgcatcaaactattaggtgataaattaacagcaaggagtttttctagtcaggtgaatgagattcatgcacgcgtagccgttttgaacaaattcacagaattggggcgccctcacacccaagttgtcacttga

SEQ ID NO: 47696 - DNA, 1305 bp, Acinetobacter baumannii
atgactaacacaatcacagccaataacttaaaaccaagctccatgatttttctcagtatccagcacgtcttggtaatgtatgcaggtgctgtttcaattcccctaattgttggaggagctttagggttaagcactgcagaaattgctttcttaattactgcagatctatttgtttgtggcattgccaccctcattcaaactattggttttaaaaatgtaggtattcgctttcccattatgatgggagttacctttactgcagtaggcccaatgattgcaattgggactaatccagatatgggactactaagtgtatttggggcaatcattatcgcagggatctttggcttcctgatttcaccatttattggaaagttaatacgattcttccctcctgtggtgacaggaactcaaattcttgtgattggtctatctctcattggtattgcaggcacatggtccgctggcggatatggggtaaaagactttggaaatccattgtacttatctatcgctgcctgtgttctattaagcattattatcatcagccgttatgttaaaggctttttgggcaacatttcagttctaatcgggatgggaattggttatatcatcgctgcattttctggcctcatctctttagacaagatagatgaaagcccatggttaggttgggtgatgccatttcacttcggtattccagagtttaacttttgggctgtcttgactatgtgcgtagtcatgctggttattttcattgaaacagctgggatgttcatggctgtaggtgaaattgttgaagaagaggtggatcaggaaaaattgactcgcggttttagagctgacagccttggcacaatgattggtgggatttttaatatcttcccgtatacatcctatgctcagaacatcggtttgctagcgatcacaggtgttaagaatcgcagtgtatgtgctttagctggtgtgtttttaatccttttaggtctatttcctaaaatagcttactttgttgcgtctataccctcatgtgttctaggtggagccgcattgtttatgtttgggatggtgacatctaatggtatcaaagtactgcagcgtgtcgactttcaaaatgtgaataatctctacatcattgcagtcagtgccggcataggtatgttgcctgtattctcacctactattttctcacaactaccatcttatctttcacctctgttaaacagcccaattttgctaacggctttttgtgctgtgattttgaatgctgttctcaatcgaaaacagcggatattggatgaatag

SEQ ID NO: 47697 - DNA, 792 bp, Acinetobacter baumannii
atgaaaaaaaatgcgctctatctatttttaagcacatgtttaataagcacttattcttttgctgaggaatcatggttaaattggcaatccaatagtatttctgcactttacggtaaaggttttgaagttgaaccagatacacatgaaacgattacttttgaacatgcgagcagttggaaatggggagatctctatctatttgtcgacacttattggtttgacggtgaaaagactgcttcccaaggtcataatgcggtctatacagaaattgctccccgcttttcaataggaaaactaaccaatacgaatttgagctttgggccagtgaaagatgtcctaatagctacaagctttgacttaagtattcaagatcagcctggctatgacgatatgtggacttatttagttggtccaggttttgacctagatatcaaaggctttgattatttcacccttaatttttactatcgcattccagacgatggaaacaccccaagtggacaatggcaaatcactccttcctggtcatataccgtcccatttcttaaatcatcaatcatttttgatggatacattgattgggtagtcaattccaaaggtaataactcttccgactttcactttaacccacaaatcaaatatgaccttagccctcatctaggcttaagcccaaaaaaattagcagcaggtattgaatacgactattggaaaaacaaattcttaatcgaagacactccatattttaaaactaatcaaaatgctactagtttcatcgtcaaatataccttttag

SEQ ID NO: 47698 - DNA, 954 bp, Acinetobacter baumannii
atgaaaaaattaccagttatcgacattgcacctctttatgacgttaaccatcctgattatgcagatatatgcaaccaaattgaccaagcatgtcgtgaatggggattcttctatatcagtggttataaaccgaatcaccttgcagaagttcaaagtttagctaaagagttttttagtaagcctctacaagagaaattagaaatagatattcaaaagaataaaattgcacatagaggatatggtgcattaggagtagaacaactgaaccctgacttacctgaagactttaaagaaatatatgacatgggtgtccatttagaagctaatcatcccgaagtcattaatcaagaacctctaaggggaccaaatgtttatccaaatattgaagggtggaaagtagctacagaagagtattttgatgaaatggtggatttagcaaaaatattgcttaatgccatgtctcatgccattggtcttccgcaaaattattttgatcattgtctgcaagacagcctatgttttctccggttaattcattatccgcctaccttagacaatacagactctcaaggttttaatgcgggaacacatactgattatgggtgtgtaactattttggctcaggatgaagtaggtggattacaagttcaggatgtaaatggtaattggatcgatgctcctcctatacctaacacctatgtaatcaatatcggagatatgatggcacgatggtcaaatgatctctataaatcgacacctcatcgcgtttcgagtcctaaaggaaaacaaagattctcatttccatttttcatacaacctagtccaaaaactgtaatccgttgcctacctaactgttacagcgaatccaatccacctaagtacttaccaattactagtatggaatatttgcaatcacgttttagtgcaacctacaaacatcgtgctgaagtttga

SEQ ID NO: 47699 - DNA, 975 bp, Acinetobacter baumannii
atgactgcgctggaaaacaatcaaaacattacctctatacccatcatcgatatttctggacttttggataatgacatacaaacgcaccaaaacattgcctcacatattcggaaagcatgcttagataaaggttttttttacattacgggacatggagtttctaaagcattacaagataaggtttttgaatattccaaattattttttagtcttcccccagaacagaaaaagcagtggtccaaagagctttctgaagcaaatagaggctatgaatcattaagagcacaaacacttgaacctaattctccgcctgatataaaggaaggcttttatatcgggaaggaacgctcaccttcagatccttttgtcatccataaagcttttaaccaaggcccaaaccaatggccagatattgatggatttaaagaggtaatggaggaatatcaagttgaattgattaaagtctctgaacgactcatgcgtgctattgcattatctctaaacttggaagctgactatttcacagagttttgtaaggatgcagatttagtcactttacgcttattacactatccccctcaaccagctaatgctcaaccaaatgaaaaaggttgcggggcacatactgatttcggcgggcttactctattacttcaagaccataatcgtggtttacaagtatgggatcagtcaacaaaccaatggatttgggcagagcctattgaagatagttatgtcgttaacctaggtgacctaatctctatgtggacgaacaatacatatagatccaccctccatcgcgtcatcaacatctcaggtggggaacgatattctgttccattcttctacagcggtaatcaccagtatcagattgaatgcattcgagagtgtttggaggaaaactcagaaccgctatatccaccaatcagtgttgaacagcattatcgtaacatgttcaaaaaaacatatatctaa

SEQ ID NO: 47700 - DNA, 933 bp, Acinetobacter baumannii
atgagtacacgtggtcttcgctttcactcagcagcaattcattattttgatgctgtacgccggtgcggttcaatcagggaagcagccagacaattaaatgtcgtatcttctgctgtaaacaggcaaattttaaaactcgaagatgaagttggagcaccattattcaatcgggtgccttcgggtatggtacttactcatgcaggtgagttattttcaagacatatcagtttagtattgcgagatactaagcgattgcagaatgaattggatgcactgaaagggctttataaaggtcatgtagaaattgcgagtgttgaaacactggcaattaatttcctgccagagattattgaaaaattccaagtaaaatatcctaatgtaactgtaggggttacaattttaggctcaaaagatatccctaatgaaatcattgaaaatagggtggatctaggcttggcttttgccttgccaaagcataatgatttgcaccaaatagcaatatcccattttaaattaggtgcaattgtatcgactgagcatcccttggcctctcaaaagacggtgtcattccatcagtgcctcgactatgatgtgattatgccaaaacctaatttatctatttatcaacagttggcgccattatttgcgggtgcacaacatgctattccaaattttaaaatgcaaacgagttctttggaattaatgaaacagttaatactcaggaataagggaattggttttcagacattctttgggttggaaaatgaaataattaataatcgccttcgctatattccgcttaatgataacaatggtatctactgtgatttaggtctgtatgcacgtaaagggcattatctttccacagcaacagacgctctctccaggcttattacagatgaaatcctacaaagaggcgaagctggacaataa

SEQ ID NO: 47701 - DNA, 1614 bp, Acinetobacter baumannii
atgtctcatcaatcagacttaatcagccaagacattctggcgtatttaaaacaacatgaacaaaaagaccttttgcgctttttgacttgtggtaacgtagatgatggtaaaagtaccttaattggtcgtttactttatgattcaaaattgatttatgaagatcaattgcaagctgtaacacgtgacagtaagaaagtgggcacaacaggtgatgcaccagacttggcattacttgtagatggtttgcaggctgagcgtgagcagggtattaccattgatgttgcttatcgctatttttcgactgaaaaacgtaagtttattattgctgatacaccgggccatgaacaatacactcgtaacatggcaacaggtgcatcgactgctgatcttgcaatcatcctaatcgatgcgcgctatggtgtacaaactcaaactcgtcgtcatacgtttattgcgagtttgcttggaattaaaaatattgttgttgccattaataaaatggacttggttgagtattcatctgaacgttttaatgaaattcaggttgaatatgatgcgttcgtgagccaattgggtgatcgccgtccagccaatattttatttgttccaatttctgctttaaatggcgataacgttgtaaatccatcagctcatactccttggtacaaggggcaaaccttaatgagtattcttgagtctgtggaaatcaaccgcgagtcaagtaaacatgaattccgtttccctgttcaatatgtaaaccgtccaaatctcgacttccgtggctttgcgggtacagttgcattaggtgaaattaaagttggtgacgagattgtggcgttgccttctggtaagcgttctacagttaaggaaattgttacttttgacggtaaccttgagcaggcagttgcgggtcaagcagtcaccttaacgttaaatgatgaaattgatattagtcgcggtaatgtcttagtacgtgcaggcgagcaaccattaatttcaagaagtgttcgtgcttcagtggtatggatgaatgaacacccacttgtaaaaggtaagttgtacaatattaagattggtacacaaactgttccagcaaaagtaactaatattaactatcgtgtaaatgtgaatacgctcgaacacactcaagtagaagagcttgagttaaatgcgattgcagatgttgtggttgagtttgatgctccagtcgtttttgaccgttatcaagattcacgttacacaggttcatttatttttattgaccgtttaagtaacgtaactgttggtgcgggcatggtagaagccgcggtagagtggacggctcatagtaatcctgttactgctgaagatcgtgctgctcgtttaggtcaaaaacctgctgttattggtgtttctgcacagttaattgaaaaatctcaagctttagaaagtttgctgattcagcaaggtgtagttgcgatcgcgaaaacaaacttaacagctgagcaattggttctattacgtgagacgggtgttattattatcacaaccgctgtggatggtacagataccgagataactgctgaaacggtagaagaagcagtagagaaaattgtggaattagttcgtctttaa

SEQ ID NO: 47702 - DNA, 237 bp, Acinetobacter baumannii
atgaatgcgattgctccaattatcgagttagttagaaatactgatttggctggtatagttgcaaaaacagcaatacatgataactccgatgtatgcgctatcccattagaaaatccacgaccaacgagaactacaggattactttggaaaaaagggaaaactgatgaaactgtagttaaagaatttacgaacgtcattcgcaatgtcttaaattgtactagctcaaacctgatctga

SEQ ID NO: 47703 - DNA, 264 bp, Acinetobacter baumannii
atgacgagtcgtaatgtcgaatggactgaaaatgcctgggatgaatatatctattggcaaacacaggataaaaagatactcaaacgtatcaataccttaatcagagaatgtcaaagaacaccctttgaaggaactgggaaaccagaacctttaaaagcaaatctttcaggattctggagccgtagaattgatgagaagcatagattagtttatgaagtgacggatgaacgaatttccattattcaatgtcggttccattactaa

SEQ ID NO: 47704 - DNA, 264 bp, Acinetobacter baumannii
atgcatgtatttacatatacagacgcacgtaacaacttaaaatctgttttagataaagttattgatgatgcagatgtcgctttcattacaagaaaagaaggcggtcatgctgtagtaatgggacaagatcattacgatagtttaatggaaacgttgtatctcctttcatctccaaataataccactcgtttaaacgaatcaattgctcaattacgcgcaggtaaaaccaaacaaagagagttgattaaagatgacgagtcgtaa

SEQ ID NO: 47705 - DNA, 3348 bp, Acinetobacter baumannii
atgtcgtcattgatcaattttctatctcgctttagtacagcaactcttcagcgcagtcttagctatgctaaacacattgatagggaaacgattgagttctttgaggaaaaagatggggttacgatgtatgcccaaattgaagggacagattattacgatactgcaattacctataatccccaaaaagaccgtttaatcgatgacgactgcacttgtccggttggatataactgtaaacatgctgctgctttagcgcggttattctttcaggaatatcgccaggaatttcagcagtgttatgctgactctcaatccccgcagggaatcgcaaaacgccaacgtggggatgatcaggcacagcgctggttgaatgattttaaacggtatttacaacagactgaaccagagcaatctgtcaaaacaaacaattatttaatttacctgctagatcagtcggtcagcttaaagaaattgacagttgatgttcagaaggccagacgcaataaaaacggctcaattgcgggggaaagttattatacccaatatgaaaatatcaccagaaagcatctgactttacctgaacaaaaacgacaattatttaaccagatttattattatgccaaaataaacagtgacgaacgcttttatcaaagcaatcttgatatctcaagcatttcattggagcatttcaaatcttttattcaaagtggcgatgtgtactggcaaaaaaagagccatactgcacttcaatggtcagaacaaggctacaacatcgaatttagatgggaacaaggtgtaaacaaacagacagagcatttaaacattgaattggtcaatggtgatattcgactcgatttgaaatcaaatccacatattcagattctcgcgagccatccaccatgttatgtggatattcaacagaacacggtgggccagttatatggtgaatatacggcaaatcttctgtaccattttttacagatgcctgatcttccatctacgctcttgccagagtttgagaaactgactcatcaatattcagacgtgcaaaatctgcctcaacctgagtctattcagcatattgatgtccttgagggtagtccccagccaattttacgcttcggtgttttagatacatttgattggaaatgggtagaatctgtttgtgctgaaattgaattctcctatgcaggcggaagaataaaagcaggtacatcaggcgacagttttattggtgagcagcatggaaaaatggtgcgacagcttcgggacttagttcaggaacaacagtcaatccagcgtttacagctattggtcgaatcactgaagtgggtgaaagatcttagttatgaccatcaattaaaactggataaacaacgtcttgattctatggtttttgctttctatggagactggatcaaacagctgatgcccatcaatcaaattgagttgatgggctggcagatagagcatctgaaaaacagcccctttaatctgcaatatgttgaaaatttaaatatttctatcactgaatctgaagggcagcaggactggttcaatatcggggcgacggttcaagacggtgccggcaattcttataatttgcttgatgcgctcgtagctttggtgcgagtaaatcctgatttacttgatccacggacttttagtcatctgcatgacagtcaaattttcaccgtgaaaactgcagttgatcaacctgatttggctctatccgctagggatattaagccggtattgttgcatctgcagagcattttacagcaagaagagcgcagtattgatcgctatgatgcgagtcaattattagaattgcagcataatcttgggatgacatggcaggtcagtgatcgcctgcagcaatttgtacagaaattcaaacaaggctaccagcaacaactgccgacaccacaaggttttcaggggaagttgcgtccataccagcagcagggcttaggctggttacagtttttaagggaaacccagcatggcgggattctggcagatgatatgggcttggggaaaacagcacaaactttagcccatttactcatggaaaagcaggctggtcatttgcaggagagacccgccttaattgttgcacccacatcgctgatgcataactggttcaaagaagcggagaaatttacccctcagctgaaggtactgctgctacaaggccccgaccgccatcagtattttgagcagattccgcactatgatattgtgttaaccacttatccgcttctggcgagagatgaagagcaactaaagcaatatgaatatcatcaactcattttggatgaggcgcagaatatcaaaaatccgcgtgccaaagctgcacaggtagtacggcaattaacagcgcgacatcgtctatgtctaaccggtacacctatggaaaatcatttgggtgagctgtgggcactattttatttcctgatgccaggatttttatattcacaagaaatttttaataaaaagtaccgtcatccgattgaaaaacgcggtgatcagcagttaagacaaaagttggtcaaccggattaagcccttcattttacgtcgcttgaaaactgacgtagccaaagagttgccagaaaaaaccacgattgaagtcaatattgatatgaatgaccagcaatccaagttatatgaggctgttcgtgccacgatgcaggcaagcattcagaaaattgtggcagaaaaaggctttaaacgtagtcaaattcaaattttagatgccttactgaagctacgtcaggtgtgctgccatcctagcttactaaggctggattcagtgaaaattgggcaggcaaactctgccaaacttgaacagttgatggatatggtcgttccaatggtggaagaggggcgaaaaattcttattttctctcagtttacttcaatgttggaactgattgaacaacagctccatcacgcagaaattggctatgtgaagctgactggaaagaccaaaaagcgagatgaagtcattacagcgtttcagtctggacaagtgccggtatttttaatcagtctgaaagcaggaggggtcggtctgaatctaactgccgcagatacggtcattcactatgatccatggtggaaccctgctgctgaagatcaagcttcagatcgtgcatggcggattggacaggacaagccggtatttgtctataagctgattactaataaaagcatagaagaaaaaattcttgccttacagcaaaataaagcagaactggcacactctattctaagtacagatcatgaaggcgaagtgaaactgacggaaaatgacgtgatgaacttgtttgagaaattttag

SEQ ID NO: 47706 - DNA, 1290 bp, Acinetobacter baumannii
atgaatactgttgccgtcctgaaattaacattacatcacggtatcgttggatacttggcaggatttcagagcggaaaaaatattctggtttttacagattctttccgctttgatcagcaacgtccgaccttgagcctgctgacttcccccttgtatcctcaagcggataaaattttagaaaagacctatgttacacatcagcgcttacaccccttgctatcaaacttgctaccagaaggtgcattacgtgaactgattgcacaaagcctcaaagtacatatagacaatgaatttcagttattggcagctttaggtcatgatttacctggagcactcattgcgactccattagatccagaagaaattccagatgaaataaaattcaaactgcagatctcgaatccagatcaaattttaaagcaagagattcgaacagataataagttttccttggccggcgtccaaatgaagttttccatgaaagccaaagatgggcgttttacactagcacaggcaacggaaacgactctactcggggactggattatcaaaactccttcttccagacatgcttttgttccgctaaatgaatattctatgatgacccttgccaaaacggtcggaatagatgtccctgagattcgcttggtggatatggcccttttacaagaccttccaccattaaatttaccccaagagcaatatgctttcgcaatcaaaagatttgatagacagagtactgctgatactacagagcttattcacatcgaagattttgctcagatcttcggcgcatatccacatcagaaatacagcaccacaaattatgagcagataggaaagatcatttatcaattatcagataacaaaattattgatattcagcaatttgccagccgtttactcataaatattttactcgccaatggagatgcacacttaaagaactggagtatgatttattacgataaaagtgcaccaagattatcacccgcatacgatatattaatgaccagtgtatatattgaaaatgagcatcatttcgcattaaatcttgccaaaaataaagattggtatttagctgagatgaagcattttaagcaatgggcagaaaaagtcggcgttccatggcgtatcatcgagaagcaacttcacgatattatggataatgctcgatcattatggccagcgctattactagacttacctatgatttccgctcataaagaaaaattaagagaacattggaaaaaattgcatccagactttcagatacttacagatgattag

SEQ ID NO: 47707 - DNA, 309 bp, Acinetobacter baumannii
atgaataagtctttacttcagcaaatcaaaaaaagacgaacccaattgggcttaaagcaagttgatatgcaatcacgtacaggcatttcaagacagcagtaccaaaaactggaaagtcagggcaaccctcgattagagaccttagaaattatagcggcaggattaaatgctcaactgatgctcatccctgatgataaggttcatttgatcagacaattattgaatgatgaaattaaagtcactattgaagatcaggatgacttaatgactaacccatggaagggtcttctcggaggagaggaaccatga

SEQ ID NO: 47708 - DNA, 261 bp, Acinetobacter baumannii
atggctacaagaggcgaaataggtaaagaaatacgtttggcaagaaaaggattaggctatacacagaaaagtctttcagaaaagactaaagtcaataaaacaacaatttcagagatagagaatggccgttttacaggttcatttgacatatttgaacgtgtgcttgatggcgtgggtttacaattcgaagtgaataaaaaaaagtttaaattgccacagtgggatgaaattgaagaaatattttcagaatatgatgaatga

SEQ ID NO: 47709 - DNA, 1074 bp, Acinetobacter baumannii
gtggtttatgtcgcacttcaagttttactctgcctatatacacctgaggctggtattgtagcgtataaaaatgttaaagaaggacagcttgtgaagcaaggtgatattctgtatgttatttcaactactcgatataatgcagaaggtgacattcaagaaaatattactaaaaaaattgagtcaaaaaatcaagcattaaatgaagagattgatcatttaaataatatctatgatgataataagttgaatttactgaataagatagcatcgttaaaaagtgatatatcccaaattcaatataatattaacaatcaaaaacaattagttggtttagctgaagagactgtgggacgttatagtaaacttctcaataaagattttatttccaaagaacaactccaggaaaaacaagcgagcttattgaccgaacaagcaaaacttgaaaatttaatgagggagtatgagtcagcaaaagcagaccttacttcacagcaaattagtctagatgggctgaatgataaaaagaaaaatgatatctcaaaacttaatcgccagattgttgatggaaaacttgagataacggaaagtcaggcaaaacaaagagtttttattcgagcaagccaaactggtattgcaactgctattacggctgatgttgggcagacagttgtgccgaatacatctatgttaaatatcatcccttcaaatgctgtacttacagcccaattatatgtccctagtagtgcaataggttttgtaaaagtaggagataaagttctattgaggtataaagcttatccttatcaaaaatttggacaagcgacggggacagtcaataccatttccctatcgtcaatccctttaaatacttttgattttaaagctcaaatggacccaactaccccagtctatatagtaaatgttcatttagataagcaaataatgaacgtgtatggtgtaaatcatagcctcaaggtaggcatgctattagaagccgatatcatgctagaaaaaagacaactatatgagtgggttcttgagcctttgtatagtatttcaagtaaattacgctga

SEQ ID NO: 47710 - DNA, 2136 bp, Acinetobacter baumannii
atgagtattattaacaagttgtcatttggatcttctcaaaaagttccggtcattttacaaacagaagcttctgagtgtggtttggcttgtttagccatgatagctaattttcatggttataaaacggatttggctactttacgtcgccgattttcggtttcgctcaaaggcaccaatttatctactctagttaaaatcgcaaataaattaaatttaattaccagacctgtaaggcttgaaatagatgatttggataaattatctatgccctgcattttgcactgggacttcagtcattttgttgttttgctagaagtcacccgagactctattgtcatcattgatcctgtttttggcaggcgtcagctacatatccagcaagtatcaaaaagctttacaggtgttgcattagaggcttggccggatacaaattttgaaaaaaaggaagaaaagcgaaaggttgagctttggagcttaatgggcaagattcgcagtatgtggtcaacttttggtcaaatactgattttagcagttgccctagaggtttttacactagttgctcctttctttcttcagtgggtaattgatcatgtaatcatttcagctaataaagaccttctgctaactttagttttaggttttgggttgttaatgatttttcagcagtgtattggcttactacgatcattggtcatgatgtatgtaagtacaagttttaaagttcaaggcagagccaatatatttaatcacctgatgcatcttcctgttcaatattttgaaaggcggcatctaggtgatgtcatttctcgatttcagtctatagatattattcaaaaaacattaacaacaacatttttagaggctatcttagatggtttaatgactgtatttacattgtttttaatgtttatttacagcccaaagcttggtggagtcgctgtagccactatggtgttatatgttttaatacgttggttatggtatagaccccttcgctcagcgactgaagaggaaattgtgtatgcagcaaagcaaaatacacatttaatcgagacattacgtggcataaaaactataaaaatttttcaaaaacaagatagccgtagatcaagttggatggccttatttattgatcaggtaaatgctgggttggttacccaaaaactgggtttgttggttaaatttgctaatggtcttttatttggtgttgaaaatattttaattatatggatcggtacgttattagttttaaatagtgaattttctataggcgcattaattgcatttatggcttataaaaccatgtttgatactagggtcagtgctcttatagataagtacgttgaggtgaaaatgctagaactcgaaggagagcgtttagctgatattgcctatagcacgcgtgaacaaaatgatagtgacgtctttatatcagacaaaaatcctgtggatgcgagtatagaagtctgtaatttaaaatttagatattccgagcatgatcccattattttaaaggacattagcttcaaagtatctgctggggagtctattgctataattggttctacgggctgtggaaaatcaacactacttaatattttattaggggtgcttcctatcaccgatggtgacgtaaaaataggtggtcaatccattaaggaattcggggtaggttttttgcggcaaatggtgggtaccgtattacaagatgatgtcctctttgctgggtcaatcgaggaaaatattagtttttttgatgtgaatcctgatatggattggattgtagaatgtacaaaaatggcggctgtccattcagatattttagcaatgccaatgggctataaaaccttagtaggtgatatgggaactgtattgtctgggggacaaaggcaaagagttttgctcgcgagagctttatataaaaagccaaaattactatttttggacgaggctacaagcaatttagatgtagatacagaacttttagtaaatcagcacattaaaaaattgagtattacgcgaatcatgatcgctcatcgaccagaaacgattcgagctgctgatcgtgttttaaaactatccaatggtacggttatagatgattttaacattagtgattttgcagacccgaattaa

SEQ ID NO: 47711 - DNA, 1470 bp, Acinetobacter baumannii
atgatgtctatgcataaatcattgatctgtttaatgcttagcctattatcatctcaagtatcagcggataacaaaacacttgatttgagtgtgtatgataacccaaaaggtttctctacaagatcgattgcaaaaccgataatacaagcgattcagtcaaatgacagtgtactagtttgtcattttgatccaaatacttttcctacagtagttggtttagttgacgtcatcgagcgttccttatgtaatgatcctcaaagcaaacaggcatgggcgctgataaaaaaacaggttgccgaggtaggtgtggctaagtctagttatttgccaatgattaatgctagttataactttggtgatgggaagaccaattatcaggtaaaagactaccaaaacttaagctatgatacgggtatcaagtcgcgcaatttatcattagaggctagttggatactttttgattttggtatgcgccaaagtaagattgatcaagaaaaattcctgttatcagcagcctatgctaatcaaaacttcatattacaaagtattttattcaatgcaacacagaaatattatgaagtagttcgtttacaaagcgtattgacagctgagcttgaagcagaaaacatcgcccaacaaaatgcaaatgctgcccaagaacgccacgaagtaggtgttgggatacttgctgatctattgcaagctcaaaccaatcaagccaaagccatttctgaacgtatcaaagcagaaggtgaattacaaggggctaaaggagagttggccagcttaatgggggcacccgtcaatacttcttatcaaattgaaaagtctgagaattacgaatcatttgatagattttcatcatctattgatgagttattagcattagcaaaaaaatatcatcctgagcttattgccgcacaagcccaaattgatgcatctcaagctgcattgaaatcagtaaaaagagaaggatttccagtagtatcattaactagttcgatgacagactcacaacaacaaggtacgccaccggcagaaaccaagaatagcaatttctattgggggattaaattgagtatacctttatttgatggttttagtaggcaaaatcgaattaaatcagctgaagctaatttagaatctaaatatgcagagttggagcaaacacagcagcaaattgcagtgaatgtatggaaaagctattatggattagatgccgcaactgaaaatatgaaggctattgatattcttcaaaaaagtgcaacacaatcttatcaggttgccttggggcgttataaggctggggttggtagtatgctagagcttttaagcgcacaaaatgctttggttgatgctaaacaaagaaagacctcagcactttcttcatggaaaattgcgagaatacaactgcttgctagtctggggcaattaggcttgaaggagtggagttctgaaaattcaaaatag

SEQ ID NO: 47712 - DNA, 867 bp, Acinetobacter baumannii
atgaagcaattaatttctggggtttgttacgatcagaattataatattttacttatgcttgatagcttcaccattgaaaactctcgagactacttccctttaaagaaagacacccctcttactattcttagaatgaaagcgcgctactgtaaaggatggtatgatttagaaaaacttacttataatccttgtcaatccaaatcaaagctggaaatcaatcaagaaaaatgttttgaatgcgctaaaaagtctaaatataatcctttttttgacaaaatcgaccaaaactctctttcagctgaacaaattgcgtataacaatcaaccccatattgtatatcttgcttctttcggaccaggaataataaaagttggtatttcaaatgagtatagaaaaatggataggtggatggatcaaggagcaatttatgcgtgtgagattgttaaaacccctaatgcttacattgctcgcgacattgaaaaattaatttctagcaacaaaattgctcccgaatcagtaaacaaaacaaagaaaatttattcaatattacaacatgggtgtaactatgattatgaaaaagattttttagatgcgatcaaaaaaattaaaaatattggagttaaagtagaggagtcgatctatcaaataataaacaataatcttgttaactttgactttagctatgctacagatatgtcatctaccctacctatagaaatttcaggggtaattattggagtaattggtgattatttatttttaaaaaataatggtagaatactttattggaagttaagcttaattacatctcatatttgtaaaatcgaatctacagtaaaagatattcactctaacacactattttga

SEQ ID NO: 47713 - DNA, 1101 bp, Acinetobacter baumannii
atgaaacaaaaaatccctgaaaagcattatgatgatacaagtgcattatttcaaagttatataaacaatgaaatctacaataaactatcaggtacctcatcaataatagatacttatgaagataaattaaaagattggtttggtgtcaataatgccatcgccacgtcttctggttcatctgcattattactagccctatatgctttaaatataaaacaagatgataatataattgttagtgcattggcacctataccaacgctacttccaatactacaaactggagcaaatataatttttgtggatacacaaacgaataactttgaatttgatttacaagatttattaatagctttagataaatataaacctaaatgtataataagcgtacctgtctggggatatcctgttttaacgacagagactatcgaactcgctaaagcatataatactcctataattgaagattccgctcatgcacatggcacgattgagaatggtcaattttctggtacctcaggtattatcgggtgctttagtactcatgagaacaaaattttatcaacaggtgaaggcggatttattttaactaataaccaagccttagccaacgatataagaatatattctcgtttagggggctgtgatggtagtaaaattggatttaactttaaattgagtggtgtccaagcattaattggtaattatcggctaaatgatatgaaagataatttagaaaagagagaacgtatagcaggagcgttactttcacttatcaattctgaatgtaagctcttacaagaaattccttattcaccccatagtaagcctaattactattgtttaggtcttttatttaatgatgcatcagataaaaattatgaattaattaatgctgctgacagccttgggatgtactcaaatacaattaaatataaaataaagccatcttttgagtatcctatttttaaaaaatactataggaactgtccgaatgcttatatcttaagtaaaaaaataacgtctatacccacacatcccagtttaactgatcagcatctagaacatttttttgatatcattaactctatttggaaataa

SEQ ID NO: 47714 - DNA, 306 bp, Acinetobacter baumannii
atggaggagacgactgtaaagataaactttttcagttcgattaatataaacactattgataatgagatttcatacattgctaaagcaataagtgatcataactctaccactaatgattttgttaaattttcttgcttgcatatggttacagacatgccaagcagtaatattataggtagtattgaagaccaaataattgatacaaatcatttattaagtaaatcaagttttatttatcgaaataaaaaagaagggtttcacaaaaaagcaatttctataatttttgaaaactttgattcaaactaa

SEQ ID NO: 47715 - DNA, 750 bp, Acinetobacter baumannii
atgaaaattagggctttatgtttggctggtatcttggctgttacgactgttacttcgacatcgagcatggcaacaggtatccctgtttttgatggtggtaactttgccaatatgatcattaatgcttctaaccaagcaacgcaaatttctaaccaagtttcgcaaattaatagcttgttacgtggtaatgccctgtcagaacaagcattgcgccagttaggtcttggcaactatagcggtcttgtcagccaaatgagcgcacagtatcaggatttgaataaaatcatttctgcatcaaaagcacttaatgcttcggtgggtgaggttcaaagccagttccagcagctctaccctaattttcaaaacatgaaaaatagatcacctgaacaaatgtatcagcagttcggtaagtggtcggatcagcttcaagatgctaataaatctgcaatgcaggctcaatcgacaatcaataatattaaggatcggaataatcggattgcatcaattctgaatgaaagtgctgggtcggctggggcttcacaagttgctcaattgcagtcatctaatcaaatgttgggtgttttggcgcaacaaatgaatgatttgcatacagttatggctgcttcggctcgttctgctacagaagctcaagcaaccgcccaagcggaaaaagatgctatgcgtaatgcttggaaacaacggaataccagtagccttgatttaggttctaccaaggcaaaggggttctaa

SEQ ID NO: 47716 - DNA, 147 bp, Acinetobacter baumannii
atgaaatatttgaatattttgatttcaggaattttgattttttcccttgctggttgtggcaaaaaagatgaaaaaacacaagaagattggaaaaaaagaaatacaagtgatttagaccttgataatgccaaaggcaaaggattctga

SEQ ID NO: 47717 - DNA, 1197 bp, Acinetobacter baumannii
atggccagactaaacagatccatgctatcaacgcttttgattattgggttgtttgtcatgtccgcccatgcaaatgctgcgattgatgcttcatcaatcgacaatatgatcgagaagttccaaacagcagcaagtacatggcaagcccctctgttgaactatgcaaccaatctattttggatcctcgcatttattcaattcagctgggcaatgatcggcttggcatttcgtggtgatgatctttcgatatgggcatcaactatcgtcaatcagattatgtatgtcgggtttatgtcatggcttttaatgaactcagcaacgttcgctgaagcgattgtaaatagcttcagacaggctgcatctaccgccagtggctacaatctgcttacaccctcagatttttttgtgaacggctggaagatcgtccaagagattttaaactcggtaagtgcttggtcgcctattgattcattggggatgctgattgcttcaatcattatcatgattgcatttgccttgatttgtgcgttcttggttttggcgttggttgaaatgtatatcgtggtatcagccagtgtcttaatgatggggtttgcaggttcgcaatggacgaaagactatgccctaaaaactattcaatatgctgtttcagttggtgcaaaaatatttattttacaattgattgcaggtcttggacttacttttatcaaagagtgggctacggacttcaatgttgaagacaatgtaagtttagtcggtatgattggctgtagtgtggtactgctggcactaaccaaaattgtgcctgatatgctccaaggcgtgattaatggctcatctattggaagtggtgctgctttaacttctgccctacgtgctgtggctgctgcgacagctggcgcagctgctggtgcagctggtgcgtctatggctacaaaaggcgctggtgctttggcaagtgaacagcttaaaacggctcaagcaactggcacaggcccatcgagtgcaatgggtaaagctggttttatggctggtaatatggccatgaatatgagttctgctttaaaaagtgaccttggcagccgtttaagtggttctacgactggtgggcgtatggctggctcgatgatgcatagagcaaacgagctacggtcaaaacgatctaaaagcaatcaggatgaaaacactatctcatag

SEQ ID NO: 47718 - DNA, 237 bp, Acinetobacter baumannii
atgactgatttttcaaatctaagtgaagatgagctattagctatttggaataaagataattttggcttgaaaggtcaactctacaaactagagcaagaatatatcgaagccaaagaaatactggatagttggcagaataaagaccacccactttatgaacgccataaaagctgtgtggacggtcttattacaaggattcagcgtataaaacaacaactaaaagatactgataattag

SEQ ID NO: 47719 - DNA, 939 bp, Acinetobacter baumannii
atgaaaaaagacctagtcgttaaggataatgcgctgatcaatgccagctataatttagaccttgcagaacaacgcctaatccttttagcaatactggaggcgagggaatctaatacccctagtgaccgtgatttaactatccatgcagaaagctacattaaccatttcaatgtccatagaaacaccgcctacaaagtcttaaaggatgcttgcaagaacttgtttgagcgtcgctttagttaccaaaaattaacggctaaaggtaatcttgaaaatgttatgagccgatgggtacagcgtgtgtcctatgttgaaaatgaagcccttgtccgtatcaggttttcagatgatgttgcaccattgatcaccaacctagaaaagcatttcaccagttatgaactggagcaggtgagtagcctaacgagtgcctatgccatacgtttatatgaactactcattgcatggcgtagcactggcaaagtatcaatgcttgaaactaaggaattaaggtcaagacttggtgtatcggatacagagcatcaacggatggaatcgtttaaaagacgagtattagagcctgctattcaacaaattaacgaccataccgacattaaggcagaatacgaacaacataagcgaggacgttcaatcgttgggttttcatttagttttaaacagaaatccaaacctaaaacaatcaatcatgaacgagatccaagcacagttgatatgttctgcaacctatcagacagtcagatcaatacttacagttcgatattatctaaagtccacagtatcagcgatttagcaggcaataaggactatcaggcatttgcaatatggattgctaatatcttgcgtgacccaaccagtgtgcgagaagaaaccgccaagcgaatttttaaggcattacgaacagagacagattttaaaggttaa

SEQ ID NO: 47720 - DNA, 291 bp, Acinetobacter baumannii
ttgccctatgtactcgctaaagctcgtactttattgaagctcgcaagctcgcttcgaggggcaatttttcggttaattctgtttgtgaaatccaaaagaaaaagcaactatgaattcgcttcgctcatagagttttatgctcgcttcgctcgttctaggggcgaatttcagcatggaaatatagattttctagggttcaaatcacttaaaaacggtttttcagagggtctatggtcgaatattgctagttcgctcgtagacactcgctctgtaatagattgtattgtttag

SEQ ID NO: 47721 - DNA, 480 bp, Acinetobacter baumannii
atgtctactttgcttcgcttttatacgattaaagatgattttattaataaaatgaaatcattagattcaaaaatacagaataattatggcggtacacgcccttatgttggcgttttattggtaattaatggcttgaattattatgcgcctttgtcttcatacaaaccaaagcaagacaaaatcaataacattacagtttttaaattgcatgaaaaaggtaatccaaataataagttaggcgttattcatatcaacaatatgttccctgtaacagatgatcaattaatagaaatcactattgatattacagacaaatatggtcgtttattacaaaaccagtatgagtttattttgcattttcaggatcaaatccaagctcaagcccagcagctctatgatttagctaataaaaatcgaaactctttcatagcaagactttcatgtgattttaagcttttagaaacagcgctaaatcaataa

SEQ ID NO: 47722 - DNA, 243 bp, Acinetobacter baumannii
atgagcatttttgaaaaatttttagagatagaacgtaaatatcaaattaaattgcatgagggtgagaattttaaacaggccctgtataacggcaaaatgacagattctaatgactgtattattgataaaatagaactagttatgaagcactatcctgacagcaaagatcttatgttgtctacctattcatcagatgaaacatctgaaattgtattttgttatgcagtaatagtgccgtattaa

SEQ ID NO: 47723 - DNA, 1425 bp, Acinetobacter baumannii
gtggctatttttcacttttcagtaaaaaatattagtcgatcagatggtcgaagtgttgttgcgtgtgctgcatatagatcaggggaaaaattgaaagatgaacgctatggaaaagagcaagattacaccaagaaaacaggcatagaatttaaaaatatctatgcgcctgaaaacaccaaaaaagaattattagatcgggaaactctttggaatacggtcgaaaccattgaaactagaaaaaactctcaattatcaagagaatttgaagttgcatttccttgtgaattaaaccaagaacaacgagagcagatgctcaatgagctatgcggaaaaattgtagaacgtcataaggtcgttgttgatgcagtcattcatgccccacataccgcaggcggaagtgatgaccgcaactatcacgcacacatcatgctcactacacgcagcattaaccagcaaggcaaccttgataaaaaaacgagagaatttaacgacaacggcaaacaagaagtcgaacactggagacaacagtttgcggaactctgcaatcaatttcttgaacaggttggcagccatgagcgtgtcgatcaccgcagctacaaagagcaaggtttagatttagaagccacacagcatgagggttctacaattacccaacttcgcagacagggcaaagacactgaaatcagtttaagtaacgatgcgattaaggctagaaatacggaacgccaattaattaaaggacttgagcaagaaattttagctacagaacgccttgttcatgacttggaacagaccagggaaaatttagaccaggaacaacgccaaaaagaaaaagaccaggaacaacgttcccctgaagaattaactaaaattgcatatagcgttatttcgcaatataacgacgctatagccacagaagcgaaaaacatagcatcatctattcaaaaaacagaaatcgagcaaataaacgctgttttagagcaaatagagctatctaaaagcgatatcgaacgccaaaaggaagaactaggaaaaagacccctgttttttggcggaaaatgggatacagcaaatgctgaaatccaaaagcaattgaaccaactggaagaacaagaacgagagttgaggaataattcccctagatttgagcctgaacgctatacagatcgggcaaaacagactgtaaacaaggctaatccaaatctaaaagctaaatatgaccgagcaagaaactatcttgagcgagagcagcagcgcaaattagcagaacaggaaaaacgaaaacaggactataaagcccaacaagaaagggaaagacaagcattccttgcacgtaaagctttacgtgaacaaggtaaaaatgatgaggctaataagttgctagaagcatccaaattaaataatcacaaaccacgttcacgttag

SEQ ID NO: 47724 - DNA, 456 bp, Acinetobacter baumannii
atgtttgaattcgccccttttttacaggcagctcgactttcagaacagcatcaaaaacaatttaattatttatgtattggggttgccaaccatgccaatactaaaattttgtttgatactgccgatgcgctgaattgttcatatttacgtgatcatgaggttaatatttttaacctaaacaacgtgcttgcagcggttgatgcttttattgaaaaagtagactgcttgtacgttacgattgatttagatgtattcacggctgcggttgcaccgggagtcagtgcacctgctgtcaaaggaattgatttagcgacttttgaagcgatttttaagcatattcaagagactggcaaaatcaaacttctagatattgctgagtgcaatccaaaatttgatttggacaatagaactgcaaagttggctgcctatattgtttatcaatatttgttttcttga

SEQ ID NO: 47725 - DNA, 1827 bp, Acinetobacter baumannii
atgaaaaacagaaccttacattttgcttgtatcagtattttattttggatgtctcattcttctaatgctgcaacccccgaaataaatacaaataccatcgaaaaatcacaatctaaacaaaagagtgatgtctctgttcgggtgaaagctttaaaccagcttttacaagaacagtgggaatatactttgaaaaataaccctgaaactgcaactgctttaggagacttacgttacaacgatcgatggaccgagatttcaaaaaatcagattgagaaagataaaaaaattacgcaaaattttttaaatcgttttgaagcaattgatagcacagggttttcagcaactgatcaattaaataaagatttaatgatttatcagttgaaagaaacacttaaaaattatgatttgaaattgtatgagatgccttttaatcaaatgtgggggctacatttacaatttccgggatttattagtgcaattccatttaataatgctaagcaatatcaagactatattgctcgtttaaaacaaattcctcttattcttgagcaaggtattcagttagcgaaacaaggacaaaaagatggcttgatgccacccaaatatttaattgaaaaggtggcaaagcagatcactagcattgcgacgcccgcagggaaggacagtgtttttgcttctccattaaagcaatttccaaaaaacatttcgaaagcagaacaagaacgtttaagccgtgaagtactacagaccatagatcaatatgttcggcctgcttatcaaaaacttgggacgtttattcagaaagattacttaccccatggacgacaatacgagggtatatggagcttgccaaacggtgacgagctctatcgtttttatgtagaaaataatacgacaacctcggaaagccctgaaaacattcatcagctcgggttaaaagaagttgctcgtatagaagcggaaatgctgaaaattgccaaagcacaaggtttcaatgacttaaaaagtttccaacaatctctaaaaacaaatcctgcggttttcccaaaatctcgtgaagaaattttagagatttatcgcggatatattgcccaaatgcaaccagagttgccaaagctctttggtttattacccaaaaataaagtcgaagttttacctgtagagcaatatcgagaaaaagaagcggcaggtgcggagtatcaccaagggacacctgatggttcacggccgggacaagtatatgtaaatactggtgacttctctgaacgttccaaaatatcaatggaagcgaccgcttaccatgaggcaattcccggccaccatatgcagattgatattgcccaaaatctgccaaatttgccgatgttccgaaagcaacccaaccataccgcttatattgaaggatgggcactttatgccgagcaattgggtaaagatgttggtttctataaagacccgctttcagactatggaagactatcgagtgagttgttccgtgcttgtcgtctagtggtggacactggcgtgcattataaaaagtggacgcgtcagcaaatgattgatttcatgagagaacactcagctttagatgaacctgatattcaggcagaggcagaccgctatattgctattcctgcccaagcattagcatataagatgggccaattaaaaattttagagctacgagagctagccaaacaggagcttggagaccgttttgatatcaaagcattccatgacatggttttaaatgcaggaacactgcctttaaatatactagatgcacgtattaaaaattggattaaggaacaaaaagcggcagcttaa

SEQ ID NO: 47726 - DNA, 483 bp, Acinetobacter baumannii
atgaaacaaattgcttcgcctatctttcaatcttttctagtacttctgtcccgcaaccaaattgatggatggacatcaaacaaaatttggaacaacttgaatctttcaaaagatgaaaaggaacgaatcaaccagcaacaactgtatagactgctcagaaagcttgtaaaacaaggtcatttgactaaacatattcactctaataatccaaggctttcaacatttgttgaaacagaaagcatgcacgaattcagaaaaaaatttgaccttttagctatcaaaaatgattcaaaaaagcttaatttcaagacaaatgaattaaaagaaaagcaaaagatttatgaaaaccaaataaaagcttctgaacaagcactcatagactttccagaactaagaactaatattttgaaaagaaaaaatcaattacttcaagatattgaaaaactaaaggcttacactgactttttaacatcactgatataa

SEQ ID NO: 47727 - DNA, 213 bp, Acinetobacter baumannii
atgtttatgtcagaacttactattcaatttgggcaattggttcgtaaatacagaaaagaaagaagcatgtcacaagagcaattagcattgctctgtaacatggatcgaagttatttaggtcgtattgaaaggggagaggttaatccaactctagaaaaaatatatgagttatctaaagctatagggatctcagttcacgagcttttaccttaa

SEQ ID NO: 47728 - DNA, 555 bp, Acinetobacter baumannii
atgaaaaatcaaaataatataaatatcgctatttttatgagttcaaaagatgttaattctatttcttataaaaacagtatcgaacaattgattaagaagatatcttcttttaatgtaaaagtacttgtaggaaatggttcagatggcatagctaaaaacttatgtgaaatagcacgaataaataatctcgaaatattaagcataatcacgccagatgaacaaggctatgaattcgcatatgaaaagctaaccgttactacaatagctgatagaaaaaaattgttctatgatctagctgatctttttattgtgcttcctggaggactcggtaccattgatgagttttttacaacgcttaatgaattgaaatctaaaaaatcaaataaaaagatagtgttattcaatttagataatttttttaatcccttaatcatgctcctagatcagttagtcagccatgaattattaaagcaaaaacatataaattatctgctaatcgaaaatgatataaataacttagttgataaactcgaactgaatcaatatttaaggtaa

SEQ ID NO: 47729 - DNA, 312 bp, Acinetobacter baumannii
atggatttcatcaaacaaaaaggcttagaacctaaaggcggaaaaatattagaaagacttgataatctaaataataatttagcacctaaaatatcaacataccagactatcttttgggctatagctgctattgttttaggagtaagtgcttggttatggagcatgttatatagtgtatatagcactgcggatagtaaagtaagtgcagctgaagaaaatttaaaaaagtttgaagttcagttaaaaaaagcaaatactgatttagaaaagctacaaaaaaaacttgatgataaaaatgaaaaatcaaaataa

SEQ ID NO: 47730 - DNA, 3099 bp, Acinetobacter baumannii
atgtggtttacccgaattagtgtgaagtaccccgtttttaccatcatgatgatgctcagtctaatggtactcgggttagcatcttggaaacgtatgaccgttgaagagtttccaaatattgatttcccattcgtagtcgtcactacgcaatatgcgggtgcttcacctgaagcagttgaatcggacattaccaaaaaactcgaagatcaaatcaataccatttcgggtattaaacaaattacttcacgctcaagtgaagggctttcgatggtgattgcagagtttaatcttgatacgtcttcggctattgcagcacaggatgttcgcgacaaaattgctccagttattgcccaattccgcgatgaaattgatacaccgattgtacaacgctacgatccatcatctagcccaattatgtcagtcgtgtttgaatcgaacagcatgagcttggctcaattaagctcctatgtagacaaaaaaattgtacctcagcttaaaactgtttctggtgtgggtaatgtcaatttactaggtgatgctaaacgtcaaattcggattaaggttcatcctgaacaattacaaagctatggtattggtattgatcaggtcattaataccctaaaaaatgaaaatatagaagtacctgcaggaaccttacaacaaaagaattctgaactggttgttcagattcaatcaaaagtcatccatcctcttggatttggtgatttagttattgctaataaaaatggttcccctatttttctaaaacaagtagcaaccgttgaagatactcaagcagaactgcaatcaagtgctttttataatggaagaacagcggtttctgtcgatattttaaaaagttccgatgctaatgtaattcaggttgttgacaagacctatcagaccttagagaagctaaaagctcaaatgcctgcgggtttgaattataaagttgtcgctgacagctctaaaggtattcgtgcttcaattaaagacgttgttcgtaccattattgaaggagcagtcttagcagttttaattgttttactatttttaggttctttccgctctacagttattacaggtttaaccttaccgattaccctacttggcacattaacattcatctgggcgtttgggtttagcattaacatgatgacactgttggccctgtcactgagtattggtctattaattgatgatgcgattgtggttcgggaaaacattgtcagacatacagagctcggcaaagaccatgtcaccgcggctttagatggtactaaagaaattgggttagcagtacttgcaaccacactcaccattgtggcggtatttttaccagttgcctttatgggaggcttaattgggcgtttcttctatcaatttggggtaactgtaagtacggctgttcttatttccatgttcatcagctttacactcgacccaatgctttccgcacactggaaagatcctgtaaagaaaaaagaaagtcgactgcaacgtttctttaactatatttctaatctattagatgacctaacgcacatctatgaaaagcttttaaagcttgccttacgctttcgtttcatcacggtcattattgcaattgtttcattggttgtggcattaggcttatcaaaaatgatcggaaccgaatttgtacctacaccagataaaggtgaaattcgtattcagttcgaaacccctgttgattcttctttagaatatacccaagcaaaattacatcaagttgatcagattattaggcaattccctgatgtcgtttctacttatggagtggttaacagtgaagtcgactccggtaaaaaccatgcaggtttaggagtcaccctaaaaccaaaacaagaacgtagcgcagacctgacaacactcaacaatgagttccgtgatcatttacaaagtgtagctggcatccgagtgacttcagtcgctgctgctcaagactcagtgtctggtggtcaaaagccaatcatgatttctattaaaggatctgatctaaatgaactacaaaaaatctcggatcgtttcatggctgaaatggaaaaaattgatggtgtggtcgatttagaaagctctttaaaagaacctaaaccgactttaggtgtacatgttaaccgtgtactggccagtgatttaggtttatctgtttctcaaattgcgaatgcgattcgaccactcattgcaggtgacaatgtcacaacatgggaagatcgtgacggcgaaacttatgatgtgaatatccgtttaaatgaaaataaacgtgtgcttccccaagatgtacagaacctatatctcaactcgaataaaaccaatgcaaatgggcaaaatattttagttccattaagcgccgtagccacaacccaagaaaaacttggagcttcgcaaattaaccgacgtgaccttgaacgtgaagttttaattgaagcaaatacttcaggacgtccaagtggggatatcggtcaagatatcgataaaatgcaaaaagcattcaaattgccagctggttatacctttgatactcaaggggcaaatgccgatatggctgaatctgcgggttatgcgttaacggcaattaccctttcgattgtatttatttatattgtgttgggttctcagtttaatagttttattcaccctgctgcgattatggcatctttaccattgtccctgattggtgtcttcctggccttattcttatttaggagtaccttaaatctattttcaattattggcattattatgctgatggggctggtaaccaaaaacgcgattttgcttatcgactttattaaaaaagcgatggaagatgggataagtcgttatgatgctattttacaagcaggcaaaacccgtttacgcccaatcttgatgactacaagtgcgatggtaatgggtatggttccattagctctaggtctaggtgaaggtggtgaacaaagtgcaccaatggctcatgctgtaattgggggtgtcattacctctaccttattgactcttgtggttgtccccgtcattttcacttatctggatgacttgaaaaactttatgctgcgtcaaacccgacgattcatgtcataa

SEQ ID NO: 47731 - DNA, 417 bp, Acinetobacter baumannii
atgcaagttttaatggctttggcatacctctttacagggcatgatatgggcttacgtgacgaaattcaggcagatattgccgaagcatttaatgaagatttagcggacgccgttcattcatttacttgtgagcggatctcaaaaactaattgggatcctaaaactgaaacatatattgaagttaaagaaaactattccggccgaggcgttctgtttggctcatacagtcaatatgagattcagacgcttggtgtactggccacagataagaaggctaccgttcttcaaaatgaagtgtttttaacgccaaaaattgatgatgagtggattacagccttaggctcattccgagttattcatatacagcaggatccagccagtacaatctggaaatgccagttgagaaaagtttcttaa

SEQ ID NO: 47732 - DNA, 390 bp, Acinetobacter baumannii
atgagctttattactgtagatgacgcaaattcaattttgggcagcgattttgcaccagacagtgataaagctcgtctggtaaagctggctaatgtttggatgaaaaaacggattggttttgtaccagatcctattgatccacttcttaaagacgcggcttgtgaaattatcaaaggaattctggccaaagtaatttataacggcaaagaccagcagttgaagcgtaagaaggtcaaagctgattctgttgagtcagaaaaagaataccaagatggatctgaagcaatttctagctttgaacagatagcaattgattttattgactcacttgatttgaaagatccaaatgcaagttttaatggctttggcatacctctttacagggcatga

SEQ ID NO: 47733 - DNA, 666 bp, Acinetobacter baumannii
atgaagattatctatacacgcattgcagcactggctgcattagagacgggcattattgctaaccctgactattatgaaaccccaaatctgaaagcaaaagaggtaattatttacggtaattatccaaagattcaaaaggattacgaatctttagaagttccagttgaagttcgcaaattggaagaacctgcaaaaacaactttggccactgtaaatgtagcggttggaattactccagagctgcaagaagtcattgatcaagcaaaagctgactgtgaaaaggttgttgaggaaaacggacaacttaaacagaaaatcgaaatcttggaacaagctagtggtgatagttcggagttaatttctgaaaactcacgtttaaaagatgctgtactccaagctgacaatgctactaaagcggctgaagaaaaggtagtaagcattcaagcagagtttgatgcttttaaaaatgatgttgctgctatgcaagcgcgtattgctgaattggaagctggaaaagcggcagaaaacccagctacagaaacggcagctaatgattttgaaaactggtcaaatgatcaattaaaagagtatttggctagtaaaaacattggttacaaaccgtctgcaacaaaagcagaactccttaaattaatcccgaaggaataa

SEQ ID NO: 47734 - DNA, 957 bp, Acinetobacter baumannii
atgactacgacagttaattccgacatgatcatctacaaccaactggctcaaacagcctatttagaacgattacaagacaatttgaatgtttttaatgaagcttccaatggtgcgattatttatcgtaatgaaatcattcaaggtgacttcaataaaaatgcattctacaaagttggtggtagcattaaacatcgcgatgtgaactccaatgcaaaagtaactccggaaaaaatcggtgcaggtgagtctgtaggtgtaaaaattccatataaatatggtccttatgcatcaactgaagaggcatttaagcgccgtgctcgtacaccagaagaatttgctatggttgttggttacgatcttgctgatgcattggttgctggtcgtttagagtacagcctagcttctttaaaagctgctatttctagcaatccagacatggttgcaaaaggtagtatcgttgttgatggccgcaaagcattaactcgtggtatgcgaaagtttggtgataagtttggccgcattggcttatgggtgatgaactcagatacatatttcgatattgtcgatgatgctatcactaagcaaatttacggtgaatctgaaatcgttatctatggtggtttaccaggaaccttaggaaagccggtcttggtgacggatgctgtaggtgataacgatgcttttggcttgcagtatggtgctgtaactgtaactgaatcacaagtaccgggcttccgagcttatgacatcaatgatgaagaaaacttagcaatcggtatgcgtgctgaaggtgcatttaacctagatatacttggttatagttgggatacatcgaaaggtgaaaatcctgatcttacattacttggttcaagtgctaactggattaaatatgcaaccagcaacaaaatgacagcaggtaccttacttgatttatcaggtacagcgacaactggttaa

SEQ ID NO: 47735 - DNA, 801 bp, Acinetobacter baumannii
atgaatacatttgttgatgctgctcgttcttttagaactcaattcgacttaaatttttctgaaaaaatcatcgtagatttctttgcaggcggtggtggtgcaagcactggattagagatggggttaaacaggcctgtttatgttgctgtaaaccataatccaaaagcaatttctatgcatgaggctaatcatccccatgcaaagcattatgttcaagatgtatttgcagtagatccgattgatatttgtgatggtcatcaagtcggttggtttcatgcaagcccagactgcacacatcattcacaagctgctggcggacaaccacgtaaaaaagaaatacgtgacctttcttgggtagttcttaagtttgcaggcaaagttaaacctgatgtgatcagcttggaaaatgttaagcagatcttaggatggggacctttaattgcaaaacgagacaaagcaacaggcagagtcattactctcgataaaattaatattaatggcaaaaaggtaaatcgaattgcagagcctggtgagcgagttcctcgccacaatcaattcttagtaccaaaccccaagaagaaaggtaaaacttggaaacactttgtccgtagtcttgaacaacttggttatgaagttgaatggcaaaaaaatattattgctgctgacttcggagcgccaactaaacgtgagcgattatttctcgttgctcgttgtgatgggcaaccaattgtatggccagaaaaatacttctcaaagaaacctaagggcaatttaaaaaaatggcgctccctactggaatga

SEQ ID NO: 47736 - DNA, 291 bp, Acinetobacter baumannii
atgaacacaaataatctatcaaatcaagagcaaataatccagagctggtttgagccggctctccacacacttaaagcattaatcaaaaagtgtgaagagaacctagagcgaatcaaagctgatactaaaaatgcagctgtaaagcgagatgaattcaaagaggttttagtgcgtcagcatcgcattacatataaccatgctgaggaaattatcaaaagccttggtcgtgctgggcgtattcgctacttaggtagcacatatattcagattaaagaaggcggtgaagcatga

SEQ ID NO: 47737 - DNA, 201 bp, Acinetobacter baumannii
atgaaacagtggccaaacatgatttcagatttgcgtgaaaagggcttaacacaaactcaaattggtaccgaaatcgggtgctcacagaattacgttagtgatttagagcgaggggtatgtggtaaacgcttatcgcatgaaattgcaaccaaattacaaaagctttggaaaaagcattgcaaaaccaaacaagtggcttag

SEQ ID NO: 47738 - DNA, 657 bp, Acinetobacter baumannii
atggctactttgggtgaaaacttaaaagcaatacgaaaagcgaaaaagatgactcaaaaagagttagctcagaaatctggtgttaaacaatctgtaatttctgatcttgaaacaggaaatgctaagtcaacaggttcaatacttgaattagcgaatgctcttggggttacagctgaagaattaaaaaaaggtgtagttggggaacttattacaaccaacgttgtgccagttcaagctcgtatggcgcccgttttatcttgggtacaggcaggtaattttactaatgttgaatcagtagatatgtctcaagttacggaatggttccctctcccagatgattgcgaaaaatgtttttatttaaaagtacgtggcgtaagtaatgaacctgattttgttgaaggtgattatattgttgtagatccaacagtatattattcagatatgcaatctggagatatcattgttgtacgaaaagacaaagatgctactttcaaaaaactggttattgaatctgatggtacaaggtatctaaaggcgattaacccaaattttcatcctaatatcattccaattgacgaagattgctattttattggtcaagtaatagattcattgagatatacataccgtggaaaacgaagagtaagaaagagttaa

SEQ ID NO: 47739 - DNA, 282 bp, Acinetobacter baumannii
atgaaaatttttaaattaattttgataatgccagttttagttttaactggctgttcagacactattagccgagctgaacatgaggcaatcgtgtatgagaaagatcagaaaattgctgaattagaagagcatattgctgagttagaagctaaattagaagaagtaaataatcaatttgaacgctttgaaaatgaaaattggcgtgatgtcgtaccagatgtggataatgctcttgatgacttaaataatgaagttgaaaataatccatcctcaaactattaa

SEQ ID NO: 47740 - DNA, 1065 bp, Acinetobacter baumannii
atgcgtttccatccgtcggtcaacctatctattttaaaatttttagggtttgagcaaacttttaaaaactcacttacaactttgccaatgggtggaggaaaaggtggttcagattttaaccctaaaggtaaatctgatgctgaaattatgcggttctgtcaggcacttatgattgagctttaccgtcatttaggtccaaataccgatatccctgctggagatattggtgtgggtgcacgtgaagtaggttatatggctggcatgatgaaaaagctcagtaatgacacggcatgtgtgtttacaggtaaaggaatttcatttggcggtagcttaatgcgtccagaagcaacaggctacggtacggtttattttgcagaagaaatgctaaaaacacgtgggcagtcttttgctggtaaaaccgtttcgatatctggttctggtaacgttgcccagtatgctgctgaaaaagcaatgttcttaggtgcaaaagtggttacgctatcggactcaaatggtaccgtttatttaaaaaatggttttacagatgagttgcttgctgaagttatggaactcaaaaatatcaagcgtggtcgtatttcagaatttgcttctaagcatggctttgaatattttgaaggaaagacaccttggcatattcctgtagatattgctttaccatgtgcaacacaaaatgaattaactggcgaagatgccaaaacgctcatcgctaatggggtaatttgggtggctgaaggcgctaatatgccatctacacttgaagctgttgagcattttattgaagctaagattttgtatgcgcctggtaaagcttctaatgcgggtggggtggcaacgtctggtttagaaatgtctcaaaatgcgattcgtttaggctggacacatgctgaagtcgatgaacgcttacatgcaattatgaaagatattcatgccaactgtgttagatacggtactaaagaagatggtactgtgaattatgtagatggtgccaatattgctggttttgtaaaagttgctgatgcgatgcttgcacaaggtatttattaa

SEQ ID NO: 47741 - DNA, 627 bp, Acinetobacter baumannii
atggaacaacatttccctaatctaccgtctcaggttccccaacgtggtaatgctttaagtcgagcattatttaaaaaactctttttggcacaaggttggaccatagaaggtgaagttcccaactttcctaaagctgtagccattatttctccccacacctccaatattgatggctggtatggttttcttgccatttttggactcggtattcaaattacggtgctaggtaaagacagtttatttaagccaccttttaaacgggttttagattgggcgggcgttattcctgtaaaacgtgactcggccaatggtctgactgaacaagtcgttgcgactattcaacagtatgacaagatctggattggaatggcaccagaaggcacacgtaagaaagcaaaaaaaatgaagagtggtttttaccatattgctgcaaaagccaatattcctattgtgatgttttcttttgattatgaccgtaagactattcactgcttaggctatttaactccaagcggaaattatgatgaggatttcgccaaaatttttgaacgttataaaggaaaaatatcaccgaaaaatcgtaattggcttgcagagcctttacaaaatcttgtgaaaaaaacctag

SEQ ID NO: 47742 - DNA, 201 bp, Acinetobacter baumannii
atgggagttatgcataaatttgatattgaccctcgaatcagtccaaaacaattcatggaattactaggctgcaagacaacctgcttttacgggaaaattaaaagaggtgaaataaaaaagccttattacgatgggaaaaagattacctattggcatgcctcttatgtcaaagagattgttgaaaaaaataaacttctgtaa

SEQ ID NO: 47743 - DNA, 234 bp, Acinetobacter baumannii
atggaagaggttaaacgtttggtagaacctaatagctctaatcaggtggtgttggcatccaaccctctaaatggatttctattaagtaaccgattcattaagaaatcatctgatttcaaggaacagatgaaacggttaaaagcgtatgtggtgggtacagataagctcatcagagtgggtggaactcatcctacttttaaagttttgttttctaaatttgaagttaaacagtaa

SEQ ID NO: 47744 - DNA, 612 bp, Acinetobacter baumannii
atgaattattttgattattttctctttatttttagtgtcattattatgattacgacccctggccctgtcatgattttagtggcaagtgccggacttaaaggtggttataaaaaagcactggaaaccatttttggtacaaaccttgcctctctcgttttaatttttatttcagtactcgtacttaaaggcgtattgggtattaatgaaaactatttaaatattattcgtattttaggctgcctatatattggttatttgggttttagtattctcaaagaagtcattcaagcccctcatcctgaagcaattcaaaccgtttctgctcaaaatggcggttttaaaaaaggctttttagtgggtatttcaaaccctaaagatattattttcttttcagctttctttccgcaatttgtttctatttcacctcatctagatttaagtttaactattcttacgctgacatggatagttttagactttttaacgctatctttagtctatatatttttccgccgcctctcgaacagccatttatacccgaagatcctcggtttatgcggtctattactgttagttattgccgtttacggtttatatcagacattcatttaa

SEQ ID NO: 47745 - DNA, 783 bp, Acinetobacter baumannii
ttgccagaccactgccctgagtgtcagcaaaagagtctcaaaactttaggtgctggcacagccaaggttgaagagcatttacaagaattatttccagaccatgatgtgattcgggtcgatcgtgacagcaccagccgagtcggtagctggcaaaaaatttatgatcgcattcaacaaaataaaccttcgattttgctcggtacgcaaatgttggcaaaaggtcaccattttccgcatgtgaccttggttgctattttagatattgatgcaggtttactcagtgtcgatattcgagcgccagagcgtacagctcaattgattgtacaagtcgctggtcgtgcaggtcgtggagaacataaaggtcatgtttatttacaaaccttaaggccagatcatcctttactcaccacactcatcgaaaaggattatcgggcagtcgcgaaacaaacattggctgagcgtaaagttgccttactgccgccttatcgctatgtcgtacttatacgcgctgaatcgaaagatcgcgactataccttgcattttttaaatgaagctgccgagcaacttcgccaaatagcaggtgatattgttgatatctggggaccaattccagccccaatggaacgtaaagcgggacgttaccgcgcacatatggtgattttgtctgctgaccgcgctcgtctgcatttttacttaagacaatggtgggctcagttggtccatgtgcctagacagcatcaactcagactctcaattgatgttgacccgcaagaatttagttag

SEQ ID NO: 47746 - DNA, 381 bp, Acinetobacter baumannii
ttggatatttataaaaaattgatttgtttcgctattaatatacttttggtcgcttgtcagccacaagtatcgagggtcgaaaatagccatgtgaaaatacctagttatcaatcaaatggcgtttttgcctctgcacgattaagggggccattacagctaaaacaagaatgtctatatgtaaatgatattctaattattttccctgaaggatatacagaatgggaccctaaaaatcaaactttaacttataaaagtaagaaaactgctttaggcgaagaatttgatttagctggtggttttggtcggtttgagcgagataatcaacgaattaaaaatttaagccctttatgtgatcataaaactatttggattgctggataa

SEQ ID NO: 47747 - DNA, 354 bp, Acinetobacter baumannii
atgaagaaactaatgcttgctttgttagtgttattttgtggggttgctcatgcggaatgtaagactggtaatgtttattctgatatagaatgctttgaaaaacagttaaaaactgataaagctaaaatgaataaaatttacaataaattagtttcaaacttagatagtgaagggaaagctagtttggaaaattcccaaaaggcttggcttgattatcgtacaaaacaatgttctggattaatgggatattatggggctcaaacattgggtgctggttctcatttaattatcttgagttgtgaggccgataaaactaaagagcgtcttaatgagctcaaaagtttagatctttaa

SEQ ID NO: 47748 - DNA, 312 bp, Acinetobacter baumannii
atgaaagacggttttaacaaattaagaaagttatcggaaaatgctaaaaaacttaatggtgaacaacaagtttctttaggtactttatttaatgaggggtttattcaaacccacactgattttgaaaatattgatgacctattcgagaaggcaggatttaaagttgaaacagaagaagattttgcagctattccacaggaagatattgatgctttcgttcaagagcataccaaatttgacagttttacagatatgcaacagaaggcagcagcggagcatgtccgaaaacaaattttcaaggggataaaataa

SEQ ID NO: 47749 - DNA, 297 bp, Acinetobacter baumannii
atgggaaaatatattgttgtagttgaatcggaaaaaccaccacaaatttttatcaatgatgatgtaccaaacatcggtaaagtaatagaaattaaagcggaagaaataccgaaccgagtgccggcttcttggttaatggaacggtataatttatcgagaaaaaccattatcgatgaattaagggcttataatctaggcggtgacggaaaacacctttataaccctgctactgtcatgccgattttagataatctaaataaggctaaagcccaaaggcaagcaagacgtaaaaattaa

SEQ ID NO: 47750 - DNA, 198 bp, Acinetobacter baumannii
atggttgaacaagttaatgagcctagttggcaagaaatggataaggcaatttctattcttgaacatgagttggaattgcttgtggaccgtaacagttctacgggctatgcgtggtttttaccaaaccgtgcggattctgagcgcctttatttagaacttagaaaagtgtttgtagaacatgcgcgaatcagtaattga

SEQ ID NO: 47751 - DNA, 801 bp, Acinetobacter baumannii
ttggcttatgcaaaatcgtttggtgtatcacctgaagacgtagacaaagaacaacgccaagtcggtaaggttcaggaattggctttaggttacgaaggcggtgtaggtgcatttttaacgtttgcagctgcttacggcttagacctagacgacatggccgcacaagcttttgacagcattgacccaagcataatgaatgaagcaatccgcgcttgggaatggcataagaaagaaaagcgcaccactttcggtttaaagaaaaacacatggttagtgtgtgattcgttcaaacgctcatggcgttatgcgcatccaaatattagtgcatggtggaatgagcttcgcgtggcagcaattaatgccattaacaaccccgataagccctttccatgtcgcaaagttattttcattaaaaaaggctcgtggctttacatcaaattgccaagcggtcgtttcctttgttatccgggtgcaaaagcggacgacaacagaatttcttacatgggcaataaccagtacacacgtaaatgggaacgcctttacacctatggcggtaagtttgctgagaacattacgcaagcagttgcacgtgatgttctcggtcacaacatgccattaatcgagatttcaggttacgaaattgatttaactgtacacgatgaagtgattacagaagccgatgacgtacctgaatacaaccacgaacatttatcaagcctgcttgctaccaatcccgaatgggcacttgatttgcctttagctgcagcgggctttgagtcatatcgctataagaaggattag

SEQ ID NO: 47752 - DNA, 429 bp, Acinetobacter baumannii
gtgaaatactcaaatgaaaaaatagtaaaagctctcttactttctcctttaccactactttttttcacagcagtcctgtttatcgtaatgaatcaggaatacagcctatactcgattttagtggttcttgtagggcacggtcttgtctacttggcttattgtattttgactgtacctttcagcttcatattctcaattcttttaaatcgttataacagtcttaatttattaactatctgtattgcctctataattattgctactccattttttattctttttggatggagtcacacaggagaaatttcgaaagagtggtggaagatgtatacagatacatggactatctttatggctctatttcctggcttatgttattggctatttctgattaacctaaaagataagaaatcaaagaatattgaataa

SEQ ID NO: 47753 - DNA, 2109 bp, Acinetobacter baumannii
gtgttactccctcatttcaaaaaatcagtcctcaccctctgcttatttccctccatactttatgcagccgatacataccctactgtgacgcttaacacgataactgtgcaagccgaaggcaactggttagatgaagccaatgcacagaaagtactaaatcatgctggagcgcgtacagtcattcagcgtgatgagttgattaaccgaggcgtaacttctgtcaaagaggctttacgcactgtgcctggtattcaagctcctgaaaatgcaggaacagcagggagtgatgcatcgttaagcatcggtgtccgtggtttaacgtcacggttttcaccacgctcacaggtactcgtggacggtgttccactttcgtttgccccttatggtcaatcacaactctccttagcacccactagtttaggcaatactgaaagtatcgacgtggtgcgtggcgcgggctctgttcgctttgggccacaaaatgtaggagggattattaactttaactcgcgtacaattcctgaaacctttgctggaacggtagacctcactacagaaattgcagaaaacggtcatgtaaaatttaaccccaacttatttgtgggtggaaccttagacaacggtttaggcttagcgctgttatattctggcgttaatggagagggttttcgcgataaaaatgatgactctgacatcaacgatattcgcttaaaagcagcttatgcaatagatgaatatgcaaaaattgaagccaatctacaccgctacgatgcagatgtagatatgcctggaggtttaacccctgctcaatttgctgaaaatccatatcagtccttgcgcaatcatgattatatgaaagggcatcgtactgacggttcagttaaatacagctataaaaaagatgacaatgcctttgagcttttggcctatcacactgacaccttccgtgatgcaggaatggaacgtagtggatcaaaactgtaccaaacggcgccacgtaattataaagtgacggcaatcgagccacggtattcgcatgcgtaccaacttgggactactgaaaatgaagtttctgtgggctatcgctatctacatgaaactagtgaagaggcggttaatcgtgcaagctataacacggtcacaggccctacaaatgaatatgcttggaccaaagcagacgggaaaacagatgcacatgcattgttcatcgacaaccgcacagatgtgggtgcatggtctctgattcctggtgttcgttttgagaaaatcaaaaccaccgaaaatatgtacaaattaaataaagatgcatcggtactcaacggagtacatgctgaaaaatcctatgatgtagtattaccaagcttttcagtcatgtataaagccaatgatttgtggaatatttttgcaaactacggtaaatcttttgcaccactacaatatagccaaatggctaataccaatgcgtcaggtgcctatctgaccatgcaaggcttgcaacctgaaaaagccaataattatgaaattggtacacactatttagacccatatctatccctagaattcaccctgttttatattgatttttctgatgaattaaaacgagatgatgcaactcaaacttactcaaatttaggtgccactgaacacaaaggagccgagttcggatttaaatataatctcggtgcaatcagtgacgaactcagcggtatttcgctatatgccaataccacttacaccaaagcaaccgcatctgctggggaaaacaaaggacaagatctcgacttttattcacaattggtcggcaatgctggaatagactataaaattgatcaatggacactaaacactaatttctacggtcaatctggtcaaaccgcatcgggcacccatgatgctactggacgctatggcaacattcctggttatggtttagtgggtattcgggcatcctatgatttttccaacacacaactcaatggtctcaaagtgggcttcggtgtgaagaacctatttgaccgtgaatactacactcgttcagcggatcaagtcggtggaatgtatgtaggtgcgccacaaacgtattatctacaaacctcatttgatttctag

SEQ ID NO: 47754 - DNA, 159 bp, Acinetobacter baumannii
atgttggttgaaggcacttatttcaaagaagtaacctataccagtttacttgcattgtttattgttggattaggcatctgtgcacagaagtttaactggggaaagcatgctcaagataaatctgataacactcaggcggacttgaccaacaatctgtaa

SEQ ID NO: 47755 - DNA, 429 bp, Acinetobacter baumannii
atgcaaaactcttattcctctttagaagaaatttcatctcttgaatcttttgtgataacgagtcatataagttcatatcatcataaaatgatgtacggtttaccgaaaaattttaaaaaaatagttaaaaatgatagtaatgaagcctttaaaattaatgctaaggcgtaccactcctctgttacaggtaaatttttaactcatagatcatctgcattatttgatgacatagttgatcatccagaaaagttaaaaatagactctcagtttcttcaaactcttaaatcactaaagctatacccaaatgatatttttcccgaatggaatcagcatattgaaatatataatattttacgtatcttgcaatcttctttattattggcgcacttattaccatgttggttgaaggcacttatttcaaagaagtaa

SEQ ID NO: 47756 - DNA, 336 bp, Acinetobacter baumannii
atgttcctagattggccagaacatacagcacatgtcaaaaaatcatttggatctttaggaaaaactcaccctaaaatgcttcaagcttatttagcacttaatgatgctgctgctgccgaggcattagatatcaaaacacgtgaattaatatctatagcagtggcaatcactacgcgttgtgaaagctgtatttcagtgcatgcagaagcagcaatgaaagctggtgcaacagaaagcgaagtagctggtgctttagctacagcaattcatttgaatgcaggagctgcatatacatttgctttacgagctttagaggcatatgaagcacagaaataa

SEQ ID NO: 47757 - DNA, 375 bp, Acinetobacter baumannii
ttgtattcttcaatacaaaatcaaaatacacctgaatacacagataaaacagttgtagaactcaaaagccaaatcgattttttaaaaaagcagttagaaaaagccgaagatcgtgaagccaaggcaaacgctcgcatagatacactgctgaccctcattgaaatgaagcctccacaatccaatatgactacgtttaccgatcagaaaccagacccggatatagcaacatatcctcggtcagaacttgagccgaaagatgacggattgactactccggagcagacagaaaataagcggattccagtgccggagcacgttgaacaggaaccggagaaaaggggcttttggagccgtttttttagaccctatgattaa

SEQ ID NO: 47758 - DNA, 357 bp, Acinetobacter baumannii
gtgagatatgcagcaagaagaaaacaggatatttccgtttccaccacaccgctagaggtggtaattccactggaacaaccagtaaagatctattcggctaaagaattagcagctatgccactttcagttatgaatgccgcaattgaggctcaggaaagattttatcaacttgaagaattaacccatatgggggggcaggctatagcagttcgccgtctcatggaggatgggcacaaactaattcaggtgaaagaaaagtctcgtattcgctacaaaatcaacgacgaatttattcctccaagaattattcgtcagttggaaatgcgcggattagtgaagcttggaaggggtaagtaa

SEQ ID NO: 47759 - DNA, 297 bp, Acinetobacter baumannii
atgaacagctttacacaccaaatcaaagattctcgccagcaaagtgaaatccaatctttctatgagcctgcattgcgagtacttggacacctatttgaggtgaaaaagcaaaatttacgtaacaaaggttatgacgaaaataatgcagcggtaacaaagattgaattttcagaggctatggctcgtcaatttcgcataacgcagtggttagcacagcagattgtaaccagcttaaccaaggcatgtttggttgattcttttggaggctatgttaagccaaagggtggtgaaaagtga

SEQ ID NO: 47760 - DNA, 186 bp, Acinetobacter baumannii
atgaccaaacaggaagcttatgagttgcttggtgtcaatggtgttggcttagcaaagttattaggaattgagccacctgctgtttaccagtggccaaatgaaaagattcctttagctcgcgaataccaaatcagagatttggcaaatggcaaagaaccaatcaaacgaactacttcaaatgcttag

SEQ ID NO: 47761 - DNA, 216 bp, Acinetobacter baumannii
atggacaactctaaactaccaatcaaccagattattgctcgcatcaatgatgctgcgaaacatggtgaagctttggtgctaaccgccgaagaagtgaagattctttctaaagatattggcgacaaagtctttattcctgtgcttactaatgagcaggtcgtgcagttggtaaaagaaggaaagctaggtcagaaaattaataacaccaaagattaa

SEQ ID NO: 47762 - DNA, 1257 bp, Acinetobacter baumannii
atgaccgctgaaattgcaattttaaatccacatggtgtggcattagctgcggatagtgcagtaactatcggatctcaaaaaattattaatagcgcgattaagctattttcactttccaaaacagagcctgtaggcgtaatggtttatggaaatgctaatttattaaatattccttgggaaactttaattaagatttatcgtaaagaacacgcaaaaaatcgttttgaaaaactcgaaaattatgcggaaagtttcttatctttcttgaaagcaagagtaactatttttgacctaaatatccaagatcaatggcttgaaaagcaaataatttttatttttgattttataaaaaaccaattacaaaatgatgtaacacaaaagattgtacgaggagaatctgtaactgcggatgatgaagaaaaatttattatagaaattttaacaaaaattagggatttccattctggttatgaacctacatggtcaggagacatttctcctgcaaaatcaaaaatagaattagttagcgaacctataatcaaacattactttaaggaattcttgaaaaatagtgatgtaatttcactgcttaatgaaattgtaattttaactgtaacgaataatggctttattgaagcatctactggattagtaatctcagggtttggtgatgatgatattttcccttcagtaattacttatcaaatctctggatactttgaaaacacactaatttacaaaaaagatgaagagaaaactattgttaatacaaattctggaatgagatctggaattattgcttttgctcaagaagatgtagtgcaatcttttattagaggatttgatccagagttacatcaattcaccatagaatatttagattcaatgcttacggaatttttgaaaaaaactcctaatctaaatcctgttgaaatttcacaattaattaataaatcaaaagccatgctgaatgattttaataccaccttacaacaagaaattagggatagacacttaacgccaatgatagatatgattggtgtgctgcctaaagatgaattagcgacaatggcagaaactctagtcaacattacagcatttaagaggaaaatggcttattcaagcctagaaacagttggaggacctattgatgtggctgttatttcaaaaggcgatgggttagtatgggtaaaaaggaagcagtatttcccctctaatctaaatcagcacttctttgacaattattttaaggattaa

SEQ ID NO: 47763 - DNA, 165 bp, Acinetobacter baumannii
atgaaagaaaaaaaccacatcaaacaacaagttaatgcaattcagtctgttgtatttcaaaataaaagcagtagcctggataaaatgtttaaacgtgaagagattaaaacttatgcagcggacttagcaaagcagaatgtcgctaaacaattcttacagacttaa

SEQ ID NO: 47764 - DNA, 324 bp, Acinetobacter baumannii
atgtctaatttcaaaaagcaccctgacggctacaagtcttatttgggccgtgatgataaaggtctttattccgtacgtattaagtgggctatctatgctgcaaacgctaacggctcagtactttacgaaattaaagatggcgttaaaaagccacttaatgttgagcaatttaaagctaaggaaccaaagattttcgcttctcttatgcaagtaatcgacttccaacgcagaaagcagctcgcaataaaactgcgtgaaacaaacatccctacttatgaccgcaaggcttataaaactaagcgcggcttcactggctcaagataa

SEQ ID NO: 47765 - DNA, 342 bp, Acinetobacter baumannii
atggcgaaaaatacagacaaagcccaacttgcacttggggaccacgcggcccgtcaactggccaatgcaaccaagacagctccccagctttctacaattactccccgctggctgactcacttacttcaatggattcctgttgaagaaggtatttatcgcctaaaccgtgtcaataataccgatgatattcaggtggcttgcacacaacgtgatgaagcaactttacctcaaacttttgttgattatgacccagagccacgcgaatactttctaaatggtgtatctactgttttagatgtgcatacacgtgttgccgacctttacagcagcccacatgactaa

SEQ ID NO: 47766 - DNA, 648 bp, Acinetobacter baumannii
atgctcacagatcttgatgatttttattgttttgcccttgttgttgagcatggtggatttagtgccgccgaacgtgttacggatattccaaaatcaaaattaagtcgtcgtgtttataacttagaggaaaatttaggggttcgcttaattcagcgcagttctcgtcattttgcagttaccgatattggtatggatatttatagacacgcccaagtcatgatgaatgccgcacaagcagctcatgatttggttgatcacttaagtattcaacctaggggggtagtcaaagtaagcgttcctgtagatatagcacaaaaccagctacccaaaattttgccagcatttttaaaaaaatatcctgaaattcgcttacaacttattgtaagtaatcgacgcgttgatgtaattaatgaagggattgatattgctctacgggtcagatctaaactagatgatgaccctagtctggtactaagacagtttgcactcatagaacaaagtctctttgcaagccaagcttatttaaatgagtttggtaatattaagtcacctgatgagttaagtgatcatcgtattttaagcttgtcgttattgattggacacaagagcaatatgttcaaccttgcgaacatacagtatttattgtaa

SEQ ID NO: 47767 - DNA, 1344 bp, Acinetobacter baumannii
atgaaaacgatagatgcaaacacgattatcaatcgcgaaaaactgtctcccttacagtggatggtttttatcctaggcttttttgtctttttctgtgatggtctagacacaggaattattggttttgttgctccggcattactagatgactggggaattaccaagcctcaacttgctccagttttaagtgccgctttagtcggcatgtcaattggtgcaattatttcgggacctttagccgataagtttggccgtaaaggcgttattgtttttaccagccttttgttttccatatttaccattttgtgtggctttgccaattcaactcaagacttaatgatttatcgctttattacaggtgtaggtctaggcgcggccatgccaaacatcagtaccattgtctcagaatatatgcctgtaaaacgtaaagcatttcttacaggtcttgctggctgtggatttatgctgggtatttcttgtggtggtgtgttgtcagcttatctattagaaagatatggctgggccaaagtgattattattggcggaagcattcccctaattttagtggttgctttattacttaaattacctgaatcaacgcaatatttgattacacgtcatcaacaagataaagcacagcgtatcttagagaatattcaaggccattctttccaagagcctataaaacttgttttaactcaagcagaaaatacctcagataaaaatccggttaaagtggttttaggaaaatatctttggggttcaagcatgctttggctctgctgttttactagtcttttggtgttctatcttttaacaagctggatgccaacgattttaaaaacagcaggtttcagtacccaacagtttagtttaattgccgcgattttcccttttggtggtgtaattggcgcaaccattatgggatggtacatggataaactgaacccaaccacagtgattaaatattcatatatgattgctttcatcgtattcattgttgcaggtttggtgagctcaaatattttcttattgggtcttactatcttcttaattggtgcattactcgctggtgcacagtcttcattactgccacttgcagctatgttctatccggcagtatgtcgcgcggttggtgtttcatggatgcatggtattggtcgtatcggtgcaattttagacgccttctttggctcgctcattttcactttcaacctaggcttaagcggtattttctttattctagcaataccaaccttcacctcatttattgcacttagcctaaaagtaatttatgagaaatctaaacacaaacaagtgttaaagctcgaagaaagcctataa

SEQ ID NO: 47768 - DNA, 321 bp, Acinetobacter baumannii
atgttattcattgaaaccagtatttttactaagcaaatcaaagagcttgtgagtgatgaagagtatcgtcagctccagcaagatctcttggtacagcctgataagggcgacttaatcaagaatggtggtggaattcgtaaagtacgttgtgctcagggcaataaaggcaaaagtggcggtatccgtgtgatctattattgggttacagaagatgatcagatctttttcctggtggcttatccaaagtctgtgaaagataatctgacagacaaagaaacctcgattctacgtcaattagtaaaggagcaatttcatggataa

SEQ ID NO: 47769 - DNA, 198 bp, Acinetobacter baumannii
atgtttaaacagactctcagcgtaaaagaccagtttggcgttaaacacgctattcaagccacagtggatcatgagtttgccaacacacaatctcatttgaatataaaacatatcaccgttgatggtgaagatattcgacctagttttgaaatgctttttcaaagtaccttaagtggaaaaatatttaaaatcatctag

SEQ ID NO: 47770 - DNA, 228 bp, Acinetobacter baumannii
ttgttaaaagtaaatgatttaattgcaaaatctaaaaatggtactgaaattattgtttcattaattcctctacataaaatgcaaaatacacgtcaaggtttaaaacaaatcgaagtaggtaaaagagttctactggaatctggaatcgaagttgatttaaatttggatggccgtacattttacacttctctaaatcagctatttaaattaaatcataaagttgcttag

SEQ ID NO: 47771 - DNA, 216 bp, Acinetobacter baumannii
atgtcaaactcaaatgttgttaaaggtactgttaagtggtttaacgaaactaaaggttttggtttcattcaacaagaatcaggtccagacgtttttgctcatttcagcgaaatcgcgagttcaggtttcaagaccttatttgaaggccagcaagttgaattcagtgtagctcaaggtcaaaaaggaccgaatgctgtaaatattgttgctatctaa

SEQ ID NO: 47772 - DNA, 1152 bp, Acinetobacter baumannii
atgattttatcgcctgctgatcaagagaaaatagagacattctggaattactgtttaaaacatcaatacttcaatattggatatcctgaatctgcagattttgattattccgctttattccgttttttcaaattctctattaataattgtggtgattggaaagactatagtaattatgcattgaattcttttgattttgaaaaagatgtgatggcgtattttgctgaaatttttcaaattccctttgaagaaagctggggatacgtaaccaatggtggcacagaaggtaatatgtttggctgctatctggcgcgtgagctatttcctgattccacattatattactcaaaagatacgcattattcggtgagaaaaatcgccaaattattgcagatgaaatcttgtgtgatcgaatcattagataatggtgaaatcgactatgatgatttaatccataaaataaaaaccaataaagaaagtcaccccattatttttgcaaatattggtacgaccatgaccggtgcaattgatgatattgaaatgattcaagagcgcttagcgcaaatcggaatcatgcgccgagattattatattcatgccgacgctgccttaagtggcatgattttaccttttgttgatcatcctcaagcatttacctttgctcatggcatcgactcgatttgtgtgtctggtcataaaatgattggctcaccgattccgtgtggcattgttgtggccaaacgccaaaatgtagagcgtatatcggtagatgttgactatatctctacacgtgatcaaaccattagcggttctcgcaatggccatacggtcttgttgatgtgggcggctatacgtagccaaaccaatttacaaagacgacagagaattcaacattgtctaaaaatggcccagtacgcggttgatcgctttcaggcagtgggcattcctgcttggcggaatccgaattcaatcactgtggtatttccgtgtccttctgagcacatctggaaaaagcattatctggcaacctctggaaatatggctcatttaattactacggcacatcaccgagatacacgtcagattgatagcttaattgacgacgttatttttgatttacaaggtgcctctaaacgtacagttggcttttag

SEQ ID NO: 47773 - DNA, 1848 bp, Acinetobacter baumannii
atgctgaagtggtttgaaaaacttgtagatccttatccaaccaaaggtttggatgagcccttaccaacacgctttttcccatttgtttggcaagctactgaaggtgtacgtccatatttattgctacttattatatgtacagctggtgcagctagctttgaagccctgctcttttcaaaaattgggcaacttgtagattggcttagtaatagtcagcctgaaagtttcttaagccaacatgcgtcaaacattcttattctcattagcgtgttatttgccaatattttatttgttaatattcaatctattataaaacatcaaattttatatagtacttttccaatgcgcttacgttggcgcttccataaccttttattgaaacaaagcctagactttttccataatgattttgctggtcgactttctgcaaaggtcatgcaaacagctttagcagtccgtgaattctggattattttaggcgacatgttggcttacgtcagcatttactttattactgtaagtattgttcttggtgcaatctcacccacattacttattccacttatggtttggttagggttatttttattaagcgcatggttctttattccacgtttaagcaaagtatcacaacaacaagccgatgcacgcgctgtaatgactggtcgtgtaactgacgcctacactaatattcaaactgtaaaactctttgcgcatgctgggcgtgaaagccaatatgcaaaagcgtcaatgaaagagtttatgaccacagtctatgcgcaaatgcgtctaggtactctttttgaagttagcattaatttactgtctgctgttttatttgttggggtaattggtacggcagtttggttatggactcaaggtttagcagcgttaggcgtaattgcagccactactgccatgattttaaaacttaatagcatggctgagtttatgatgtggcatatgtcagcattatttgaaaatgttggtaccattcaagatggcatgcaaacacttggtaagaaaatcaatattcaagataagccagatgcaaaaccacttgcagtcacacaaggtgagattgtatttaaagatgtgacctttgcttataacaataaaaatgtcatcgatcactttaatctacacattaaagcaggtgaaaagattggtatcgttggccgttcaggtgcaggtaaatctaccctcatccaattacttttacacttttatcatcttaaagaaggtgcaattttaattgatgggcagaatattgaagatgttacgcaagatagtttgagagcaaatattgctttagttactcaagacacttctctactccatcgctcagttgccgaaaatattaaatatggccgtccagatgcaactgatcaagatatgcaaagtgccgtgcataaggcaaaagcagctgaatttattcctcaacttgtcgacttaaaaggacgttcaggttatgaggcacaagtgggtgaacgtggtgtcaaactgtcaggtggtcaaagacaacgtatcgctattgcgcgtgttttcttaaaagatgcaccaattttaatcttagatgaagcaactagcgctttagactcagaagttgaagcagctattcagtctagtttaaatgacctgatggtagataaaacagttattgcaattgctcaccgtttgtctaccattgctcaaatggaccgtttaattgttcttgatgaaggtaaaattgcagagcaaggtactcatgaagaattaattgctaaaaatggtatatatgcacaattatggaaacgtcaaacgggcggttttcttattgagcaaaaagtagtacagggtcaagattaa

SEQ ID NO: 47774 - DNA, 273 bp, Acinetobacter baumannii
atgcgccgtattgcaattgttggagcaggacagtctggtttacagcttggtttggggttattagatataggttacgacgtaaccatgattaccaaccgaactgctgatgaaatccgtcaaggtaaagtcatgtcaagccaatgtatgtttcataccgctttacaaactgaacgtgacttgggactaaatttctgggaagaacaatgtccagcagtagaaggcattgggctggctttagttaatcctgaaaatggtggtaaagcatttgaatga

SEQ ID NO: 47775 - DNA, 918 bp, Acinetobacter baumannii
atgccatattggatggaagaatttgaacgccgtggcggtcgattggtgattcaagatgtaggaatagaagaattagaacaactcgcaaacgactacgagcttgtattgctcgccgctggtaaaggtgaagttgttaaacagtttgaacgtgatgatgtacgaagtgtttttgataaaccgcagcgcggtttggctttgacctacgtcaaaaacatgaagccaatttcaccttattcacgtgtgacttttaacattattcctgtagtcggggaatacttttcatttccggcactaaccatcaatgggccttgcgacattatggtatttgaaggtattccaaatgggccaatggactgttggcaagatgtgaaaacaccagaacagcacctgcaatgtagtctggacttactcaagaaatttgtgccttgggaatatgaacgctgcgcaaatgttgaattaactgatgctggtggttatttggcagggcgtttcccgccgaccgtacgcaaacccgttttaaccttaccgtctggcaaaaagatttttggcatggcagatgccttagtggtcaatgatccaattaccggtcaaggctcaaacaatgcggctaagtgtagcaagatctattttgatgccattttagccaatgataatcaaagctttagcgaacaatggatggttcaaacttttgaacgctattgggcttatgcagaaaaagtcgtggcttggaccaatagcttgttattaccaccagagcctcatgtcgttgaactcctagcagctgcaagccaaaaccagagcattgcttcaattatggccaataactttgatgacccgcgcgcctttgctccatggtggtttgatgcagatcaagctcaggcattcttagcttcaaaaaacacagcaaaagtcgcttaa

SEQ ID NO: 47776 - DNA, 177 bp, Acinetobacter baumannii
atgaaaagtactttaattaaacatggctttttagcagggacattattaggtttgccgtgggttacacatgcctatgatttaccgaccgtaaatttaggcatgaccagctttctcgatggcggattacctgcagggcccggctggtatgctcaaacctatttttcaaaattacgatag

SEQ ID NO: 47777 - DNA, 834 bp, Acinetobacter baumannii
atggcggattacctgcagggcccggctggtatgctcaaacctatttttcaaaattacgatagcaataaactggttgatgccaatggacaaaaactcggtttacctaaaacagatttaaattatcacgtactggttgagcagattagttatttatcgaatgtccgagtaaaagataaagccagcctaggtatgaattttttaattccttttgtcagcaaaatggacatggatgaaggcttaaataatgctgctattaaggcccaaagtggctttggggacattatgatcggaccttttattcagttcgatccagtcatgggtgcgcaagggccgaagtttgtacatcgttttgagtttcaggtgaatttacctactggcgaatacgaccagcaaaaagatattaatccaggtaataacaccgtttcatttgacccttattgggctgccacatattggtttaatccaaaatggacagtttcaacgcgtatccattacctctataactttaaaaatgatgacccaagctatgcctttgcaggtgcaaatgatatgcaagctgggcaagcaattcatgcaaacttcgcaacagactatgccattaccgaacagttccgtttaggactaaatggctattggctaaaacaaatcactgacaccgaagtcaatggtgaaaaagttaaaggtagacgtgagcaagtctgggcaattggtccgggtgcgatgtatagtttttctaaaaatgatcacttggttgcaaatgcttattttgagcaagatactgaaaaccgaccagaaggtacgcgattacaagttcgttatgtccatcatttctaa

SEQ ID NO: 47778 - DNA, 1059 bp, Acinetobacter baumannii
atgaaccaagccaactcccacgaactcaatggacgtcattttcaaaatgagccgatctttactaatcataatttggtgttcgatcaccacgatttaagcgaaacctgccgaaatgtaggccaaatttttaaaccgcataatcttaaaatctctcatcagaagcgagatttcagtgcaactatgcaccatgttaaaacaggcgcattgtctattagtcgcttagaatatggcgcggatgtgattattgaaccagatcatctggataacttttacttaattcaaattccaactcaaggctacgcagaaatcgagtttggttcacaaaagtttatttcttattctcaagtagcttctcttatttctcctcaacaatctttacgtatgcgctggcatgcgaactcaccccagcttattctaaaagtgtcaaaggatgattttacttaccattgccgtcaacacattgcggattcagagaataacttactcgtttttgaccctaaattagatttttctacccaaggtggagcctattttttacagctcgttagaacattgatggatgctttagcatgcgagcaacaccctctccatcatcctttagcctttaaacagtttgagtcaaatttatttaatgcactgatttatggtcaacccaataacgcattacacaaaatagatcagcataaagaaaaaacagtctctccttatttcgtgaagcgcacagaagcatatattaaagaacatttgcatgagccgcttaatgtcgaaattctggccgagcatgcaggcgtgagcgtaagaaccctatttactggttttaaaaattatttggggacaaccccaatgtcttatttaaaagaattacgttttgaacaagcccatttagagctcatgcacaatgaaaatctatctgtcactgacgttgcatttaaatggggatttacccatttaggccgtttttcacaagagtacaaacgccgttatggtgagttaccttcgtctactcgccgatctggacagagtgaagggtcaggcatcattacttcaattttttcttaa

SEQ ID NO: 47779 - DNA, 168 bp, Acinetobacter baumannii
atggtaatgaataatattgaatatgatgcggtggttgaaagtgcgaaaatcaaagcgaaaagcgatataacagtagcggttttaaataatgcagcaagtacgggtttagttgcaattaatgatgcaagtaaagaaaagcttattagagtttatcaaaaaactgcatga

SEQ ID NO: 47780 - DNA, 3201 bp, Acinetobacter baumannii
atgcaaaaaatcaaagaactaataaaaccacaactagacggtctatttgttgatattcagaaattggtgaaaaagtcgcaagaaagacagccttctttacctgaagtattgacgcaagacatgcagcaaaaacttgatcagcagatcgccgaaaaatggcatgacattaaagatagtgttgattgtttgagtcaaaaattgagccgagatgaacaatctaaactgatgcaatttactgaagatgaatttaataaaagaagaaggcaattcaaccagaatgtagataaaaaatcatacagaattaggctaaatccacatactaaacggatcgtactgcctagaaaaattgagagtacggagtcacggttaaaacaagggcagttacatgcccaggtactcaatgctttgaaagcatattggaaagattcacttggatattgggatgaccctaaatatttgtggggggatttatgcttaagttttatatatatttcaggctgtgcagatgaacagcatctggttgctattcagcagcaattgcaggaggccgttgagcttggtacagatctgaattgttttcggttataccattcggactacaaaaaaatcactaatccattgttactacattatcgtgttgaaaactctcaatatggcaacgatgtagaacagagaaagttgtaccaatggaagcatgttttttttaactcatatgctcagttcatcttgcaatatttaaaaaagttgaaagctactcataaagaatatcgtctgcaacaatcaattgaagattgtattctggaaagcttgagtcgcatgggacgaaacaaaagtttgggcgatctgcaatatcaaattaaacgccgtggatttcgtgcatttaatgatgtgcaaatggtacttgaatttaatccaaaccttagcctagatatatttttaagtaatgtacttcagcaagagattaatactgtcgccttacggccatccgaatttagattgctatggagtaatgaacgtaatcaagtcatggaactagagaatagccctattcattttgaacaagagcagttacatcctgaagttccgacggctcaaagcaaattacaaacgattccgtatgagttgatgttgtttgatcaaaagaaacgtaaaggtcaaaaagttgagcgcttagataaaaagaggaataaagaagaacgcacgctacgtttttggcaagaaatcagaagggtgttagaggagaagatgcgtgatgcaaatacggaagaaaagtctttaattgaagcccaattacgcttaattcactggttagtgcatttaaaaaaaagagggcttcaattatcaactattgaaagctacttaggatcatttgctaaagaatttatatttgaaatttggcttaataaattggatttaaaacaacaatccattgatgattatgaagatttatatcgacagttgttgaaatatagcagtgaacgagatgcacaagcaactcaacgtgaagctgttaaaggaaaaacctctcgtaagatgcaccaaacagcagaataccgttttggtcgcctaaaagattttcatcaattttgtatagataattttaatgcaccagaggtattggtgttacagaattcaagttttaagcatttacaaatttgcaatgcacgcctagtaagccctttgttatttggcaagctattggaaaaactagaacatttaagtcaagagccaacggcatcagagtgggtcgatcatctgagttgtttaaagctgatgtatttactgagttatagaactggactccgattaaatgaagttcgttgtcttaaaatacaagatattatttgcccagagttactttataaagaaaaagaaaatacagcttttaataatatcacgcttcatattcagaacaattcatatcgccgtctgaaaacgcaaagtgcaaatcgtcaaataccattgaaaattgccttgtcagaacatgagtttttagtagtacaacattacatacaacatcgttatgaacaatatttgtttaatcagcaggatgatctactttttagtgttaatcatcgtgtattaacggatcaatgtatcagcaaaattacagtagagttgtttaaccaaatattaggtatgcatcatggctttagttttcatacgttgcgccacagtgctgctaactatctagcaataactttgctgggctcaaaagaaatgattaaaacatatacagattgtccttgggtaaaagcaaaaaagatgcgtgatttattgtttggtgttaaagcacgtgctcatgaagagattattcaacataaatggcaggtgcttgcctcttggatggggcatagcagtattgaacaaacggcttcaaattatcttcatgttttggatttattagcagtcgatcgaatttacaattcgccgtgtatcatttcaaaaaaagtcctagaacagtgttttggtccagtgaattcaagtacagagtacataaacttaaatcgttatactcagcagcagaaatggtttaactcttatcagcaaacacagccagttatgattgctggtcgacaagaaaagaagtttagtatcgagaagagtactctgacgccttttcaacgtttgataagtttaagagatggccgttcaagcgaagatattcaagcacaagaatggatgcagcgatgtcaatttatgagcactaaatggatggaccccaaaaattttaatttaaaaacgaaatatgttagtaataaaaatttagatgggggttggtttgatgagctttacaacaaagctaagaaactgaaacgttctgatgaaataattcctctctttgatttgcataaccaacatgataaggggaaagatatacctaaagagttgaacgtggtcaatgcacttaaggtattattattatttggaaaattacgtaaaaactttctacattttcaatgcataaagaaagatgatgagcaacaaattgctaattttattgctggtatagagccaattattggagatcacctaaatttagacaaacagaattatccagtcaatctggaagtgcttgagagaacagttaaatttagttttcaaagagttgttggccataataaaaaaaatgttactctactggttatatttaatttaatgttaaaaatcatgcaagaagatgaactttggttaaaatag

SEQ ID NO: 47781 - DNA, 390 bp, Acinetobacter baumannii
atgatgaaattctggcaacgactcttcacatcatttttaaaaagatttcatttgatgcgttttttcggtcgtaatcgatcttttaaagagctacatcaatctagttatgctcaagaaattagcaaaaatttatctaagcgtttgcttaatgcatcaagggttcaaacgaatgatctattaaaacaattcgatactcatttgacggggcttacagaagagcaagcgtatacccaacaaatcacggtggggcttaatgaagttactcatgaaaagccattaacttggtggcaacacctttggtattgctaccgtaatccgttcaatattttacttagcctgttgggagtttgtcacccaaaaagtgtgccgagaaattggcctgaattatga

SEQ ID NO: 47782 - DNA, 963 bp, Acinetobacter baumannii
gtgtgccgagaaattggcctgaattatgatcaagttttattgggcggtgtaattgaaaccttaactgatcaacaactcaaaagagcagtagagcaataccacatttttgcgaaattaagtccggttcacaaagaacgtattgttgagcagttaaaagcaaatggtcacgtggttggttttttaggagacggtattaacgatgccgctgctatacgtgctgccgatattggtatttcagtagataccgcagtagatatcgctaaagagtcagcagatctaatcttgcttgaaaaaagtctgatggttcttgaaaaaggtgtgattgagggccgtagaacttttgccaatatgctgaaatatatcaaaatgacggcgagttcaaattttggtaacgttttttcggtacttattgcgagtgcttttattccatttttacccatgttgcctattcacttactcattcaaaacttactttatgatgtttcacaaattgtgattccttttgacaatgtggatgaagagttaattgcaaaaccacagcgttggcaacctgaagaagttggccgctttatggtggtgtttggaccgattagctccatttttgacatgattacttttgggttaatgtggtttgtattttcagcaaatactcctgaacatcagacgctattccaatcaggctggtttgtggtgggtttacttacccagacattaattgtccatatgatccgtacagctcaaattccatttattcagagtcgtgccgcgactccattattaataatgacagcggtgattatgtgtatcgggattttcttaccaatgggtcctttagcaagctatttaaaactacaagctttacctttaagttatttcttatatttacctttaattttaggtgcttatatgtgtgttactcaatggttaaagaaaatctatatccgccgttatggctggcaataa

SEQ ID NO: 47783 - DNA, 1725 bp, Acinetobacter baumannii
atgaaaaaaacattaaaagtcagtattgggcaatattctactgccggaattaaacaacagaaccaggatttccatggagtatatctgcccgaaggacatgtgctgaaacagaaaggtattgcctgtgttatagcggatggaatcggtagcagtaatgtcagtcatcttgcagcagaaaccgccgttggcagttttttatctgactattattctacttcagatgcctggagtacacagacttcagcagaacgcgtgatccgcgcgaccaattcatggctttatgcacagactcaacaaagtcaaggacgttttgataaagaccgaggttatgtctgtaccttatctgcactgattttaaaacagcaacaagcccatgtttttcatgttggtgatagtcgtatttaccgcattcgcgatcatgaaattgaattactgacccatgatcatcgtgtctggttgtcttcaagagagcattatcttagccgagccttaggtgccgactatcgtattgaaattgattatcgaaatattgagctcaaagaaaaagatatttttttactgatgacggatggggtctatgaatttgtcacagatcaacaattattagatttaattttagtagatgcagatttaaatcaacttgccaaagcattcgttgaaaaagctttagaacagggcagtgatgataacttaagtctccaggtgatccatgtagaacagctgcctgaactgaatcagtttcatattcagcaggattatgtatttccacaacagctcagtaaaggtgaagtgtttgaaggctatgtgattgataaaattctgcaccaaaatcatcgcagttgcctgtatttggcacacgatactcagcagcagcccttggttataaaaactttgggggtagatttacagcaagataaaaatgccgtagagcagtttcaactcgaagattgggtatcgaaacgtctgaaacatgacaacctgatgcagtgttatccacataacactgagaaaaaatatttattccaatgttatgaatatttacagggtgaaaccttggctcaatggctgcatcgccaagaaaagcctttaaatctggatgaaattttaccaattttgcaacaaacagccttggctttaaatgcaatgcaccgactggaaatgctacatcaggatatacgaccaaaaaacatcatggttataaatgcagaaaatgccatgaaaattaaactgattgattatggttcaacggcagtaagaggcctggtcgaaattaatcctaaaaatgcgaatcgagcactcggaaccttggcatttatggcaccggagtattttattgatcattcgccatctgtacattcagaccaattttctttggcggtaatggcctattatttattcaccaaacaattaccttatgggacagatttagctcgctgtaacagtttaaagcagatgaaaaaagttcaatatcattccatcaggaaatatcggccagatttacctatatggttagataaaattttaggccaagcgctgagtattgaaccgatacatcgttttgaggccttgtctgaactcattcataatctaatgcatccttccaaagaattattaaactctaaaccaccagcaatcattgaacgagatcctttacgtttttggcaaatgagttgcgccgtattagggctattatttttactgagtattgcatggccatttatttga

SEQ ID NO: 47784 - DNA, 810 bp, Acinetobacter baumannii
atggcatatcttgctcctgcagagtttgcaaaaaaagtggtagatgcgggtgaatccaaattacatatggcaacccgtgatgtattgattcgtgcctttatggcaggtgcgattttggcactggcagcagtatttgccattaccatagccgtgcaaacaggatcagcactaattggtgcgctcctgtttccagttggtttttgtatgttgtatttattgggctatgacctgttaactggggtatttgtacttacgccgctggcatggctagataaacgcccaggggtgacatggggacgtattctaaaaaactggggcttggtgtttgtagggaactttacaggctgtttagtcgttgcagtgctcatggcagcggtttataccatgggttttgcagcggatccaaaccctgtcggtgtgaaaattgcgcatattggcgaggagcggacattaggttatgccgaatacggattcgccggctggatgactatttttatccgtggcatgctgtgtaactggatggtgtcattaggtgtcattggcgcgatgatgtctactacggtgagtggcaaattcattgccatgtggatgccaattatgctgttctttgccatgggctttgagcactctgtcgttaacatgttcctgttcccatttgccatgatgatgggcggtgacttctcgattgctgactacttcctatggaatgaactgccggttgctttaggtaatctggtgggtggtttggcattaacaggtctggcactttatacaacccatgtccgtactggtgttaaaaaagaattttaa

SEQ ID NO: 47785 - DNA, 450 bp, Acinetobacter baumannii
atgattacccatcgtcaacaagtaactgacatgatcatttcagcgaaagttttaaagtcaattaaatgggcagatgtcgccaaagaaattggtctttctaaagaatgggtaacggctgcctgcctgggacaaatggcatttaataaacagcaggcagagaaaattggtcagatttttgaccttagtgatgaggcagtagcatggctgcaaattgtaccttacaaaggctctttaccgaccagtgtgcctacggaccctttaatttaccgctggtatgaagttgtaaatgtatatggttcgactattaaagagctgatccatgaagaattcggtgatggcattatgagcgcaatcgacttcagcatggatattcagcgtgaggaaaacccgaacggtgaccgggtaaatgtcgtattgtctggcaagtttttaccttataaaacctattaa

SEQ ID NO: 47786 - DNA, 327 bp, Acinetobacter baumannii
atgtcagtagataatttggaaagtatagattttattagcactagtccagagggggatatagtgttaacgatctctgatcatttggtatggggggatgatgagcatctttatatgctgcaagaaaaaataaataagtatattgatttcattgagagtggtgatatttatgaaaagtatgaacaagctgttggtaaaaaatttgttatagaacttatttatcgtttcgatccgcttgtgactgatcttaaatttatggataagattaaaaattttttgagtagtataggcataaaatttcaattttctaagctagtcatcgggtcgtaa

SEQ ID NO: 47787 - DNA, 3060 bp, Acinetobacter baumannii
ttgactctccgacaaacccggtacggttcaggtagtttatccgatggctcagccaatttatttacaattcctactaaagttgtatcacccaatttggaagtaaataatattgttcacccattaggcgtgattaccaaacaaacaataagttccccattatcaggaagtattagccaaaccactaactatacatataacactgatgctagcttagccaattataaaacgttaaaaagtattgatggaccacgcacagatgtcgcagatttgatttggtatgaatatgattcaaatgctcaattaactaaacagactcagcgggttcaaaagttaaatccaagctctacaaaagattatgtaaagacgtattcagattacactcctgctggattgcctcgacaagaaaaagattttaatggtttagatactgtcactgtttatgatgcttcaggtgttcgtgttttatccaatacaattgggaataaaaattcatcaggtgttataacgaatggtcgtatgacttccaatacttatgattcacttggtcaattgttgacggttaaagatcctttaaatgcgatcactactttctattatgatattgcagggagaaagacaaaagagagtttgcctgatggctccagtaaactctatttctatgcgacaaatgatgagcttaaaacaacacaatattataattctgcaggagtgttagattatcaggagtctgcggttttagatcagaacgggcgtatcaaaactcgttatcgtggtactaatcaagctatatccatgacctatgaatatgatgcaaatggaaatgtcataaaaaaaacagatcagggcaatcgtatagagtcttttgtttatgatgaattgaatcgcctaaaaagtcacacaaacaaactcggatatgttgatactcaaaattttgatgcatcagacaatttggtgagtaaaaaagctccaaacaattcaggatcaacctctagttttgtaaatacaaataaggtttcaaatgaaagtaatactgattatttagttaagagttttacttatgatagtgcaaacaatatcatcaaaacagtcaactctaatcgtatatgtgacttttctaattacgactctctaaatcgtatatctaagcaaagttgttatttaagcgacaatacaactgaagaatatctgagagctgcttatagctatgtttacgatcaagatgtttttggcaatctcaatcaagttatatatccctacagtgattggacaactaagccactgggggtagattctttttatagctataacgcttatggcgaaattgtcgataaatcacaaacagtgcataaggcggcagctacaggtagtactaacgcgatcgcaaaggttcgttatgaatatgatcaatctggacgagtgattaaactcacgacaccaaagggtaatattgtagagtacatttataatggggtaacgagttccctaactgatgtaaaatttaatgggcaaaccttaatttcctcaattgtgcacaatgcccaaggggagattattggttggaaatggagtaatggggcaacatattcaatatcgaacgatacagcagggcgcgtaagtgctataagcgtgaatggctttacccctaatgttaatttggtttatacctatcaatctgctaaagctgatttagtaaataccatcacagacacagtttcaggtattaaacagacatttacatacgataatgaagatcaactgaccgattatgtggttagtggtggttctagaaatggtctaaaaacgagctatagctatgatagtaatggaaaccgaatcagtagcacaaataaccttgcaggaacttataattatagtttcaccttaacgacgaatagtaataagttaaatagttgggaaaaaaacaatacaagtgtaccgtttactctgcatgccacgggagaggttaatactctttctgatatgttgactggtaattttaagtacgatggagaaggtaataagcgcagagaaatgggagttccttgtactcatccaaccactggcgcaaccacatgtaatatgtggtttgattataatcacaaaaatgaaagagtattttcttatgccgataatatttctgagggacggcagttcgtttatgatgaaaatagtcatttaatcggtgaatatcgaaatagcgatcaagcacaaattgttgaatatatatggctaggtgatatccctattgcagcagagatggctaatgatcgtttaatttatattttgacagatcatagagggtctccaatacgagggtatgatgctgtaactaaagccaacgtctggtcattagacactgggccttttggagaaagtgcagcaactgtaagcgtatctggagttgaaattaatttacgctttccaggaatgtactatgataagcaaacaggtttgtattataaccatcaccgatattacaaccctaaatggggtcgttatatggaacctgaccctattggactcgaaggtggattaaatccttttgtctatagtaataatgatccgatcaataaggtagacccaagtggattgggttggaaacaactcaaacttataggtagcctttttgatgatattttagcaccattaggccgtgaagctattaaaaggctttctcaaaactcttcgaaggaaaaatctatttcggaaaacgtaaaagctagttctcggatacaggaaaatagagctcaaggaaaagcgtttgaacaaaaggttggtgctgatttgaagtcaaaaaatactaatgtatcctctgaggttacattgaaaacgaagagtgggcaacgcacgagaatggactttctcagtaaagatcaagctggtaaagtagtttgcacagaatgtaagtcatcagttactgctccgcttacaaagaatcagaaagcggcttttcctgagattgagcggtcaggggcagttgtagttggtaaaggtaaaccagattttccagagggtacaattattccaccgacaaaaatagaaattgttcggccaaaataa

SEQ ID NO: 47788 - DNA, 402 bp, Acinetobacter baumannii
atggcatccttaattcataatactttatcaagtaattacacattagttattggacgaatagttttatcttcattctttttaatcgctggtatttttggtgtgtttaactttgatactgttgttaatgaaatgattggagcaaatttaccacttcctcaattatttgcttttgcaactattgccattcaacttataggatcaattctacttatttcaaattttgcagggcttacatggttgggtgcaggaatactagccattttcactttactttgtattcctattggacatcctttttggaaattagctgaaccacaaagaactcaggatttccaaattgtattagaacatattgctttaagtggagggcttctattagcagcaatagccaccaagaaataa

SEQ ID NO: 47789 - DNA, 456 bp, Acinetobacter baumannii
atgatgcaacctattcatacacactcaacgctacaatatattcatatttctgtacctgaaatcttactcagtaatattcaaataaaaaattcttggcaagattataaccaagaatggagctatagattagacccgcctcacgcaagccatccttttcagagagacttgtatattattaaatcaaaaaatattgaaacggaagatataaaaaaattactagataatacagttgttaaaaacagtaaaaataaagatgacttaaaaaatatagtcgaagcggaaacagtaataaaagaaattttagatttatctaattatatacctatagaaaattggctaaatgatacaggtaatcgatcaattgttgaaagtatgattgataaaaacaaggttaagttattagatattatcggctttgttgcacaaagatttgaaatgcaaagcgcccctaattga

SEQ ID NO: 47790 - DNA, 489 bp, Acinetobacter baumannii; identical to SEQ ID NO: 47345

SEQ ID NO: 47791 - DNA, 1143 bp, Acinetobacter baumannii
atggcccgtactaagcttttaaccaatattattcaaagaaaaatgatggtgcctgacgaaatgtctcactcaaatctgcaccataactttgaaatatcactttatgacttcgccaaccatgagatcctagaaaaactatataaagcagacaatcaacgctccacagagtgctggagccctgctgaaattcaggagtttattctaaactgtttgaatgatcgtaatgtcaatttatgcgttcgctattggaaagatgctgctggtaatatttatatcatcgatggtgggcacaggatttcaatcatttatgcttggattaaaagatactttattgatgagcaagtaataggagccccaaaattcacggcaccacaaaaacgagatattcgtcagattcgtaatcgattaggtggattagctgattttcaagagttatgtagcgattctgagtttcagcaaaaattaaaatcaaccaaaattaattttattgaagtcattgggacacctgaggaagctcgaaaagccttttgttcaatcaattcgggtacgaagcgattagatccagatgaagaatatcatttacaaaatagggggagtgatgctttttatgtgatctatgcgtgttgttatataaacgataataaatccaacttggctgaactgaattacgagcggataaatgaagtgatcactttgggtgagcaaattcatgatcatctttttaagataatacttttagatccagatttaacacacggtaaaaaaatcggcttggtcaatgaactcctgaatatcatgtttggtgatactagtcagaatactgtgaatatagaccaaggtcagcgtgtagaaaatttaatgctaaaacttagagttgtgctgtgtcgtatcgctacaccaccaattagtattcggattccaagtttgggcttacacccaaaactatatttttataaagataatcgttttcaagtgacatcctttttggcctggttctctatcgtctgtgaaattgaacaagactgttttgaaatacagaataagaagttagattttattggatttactcgagcacgccgtggtgttgaaagtttaattgaaaaaattcctgtggccatcaaagaaactgtcggtaagttttga

SEQ ID NO: 47792 - DNA, 525 bp, Acinetobacter baumannii
ttgaaactgcaaattttatcggatactcacaattctaaatattcaatatcagagcaagctgatgtcattattcacgctggcgatttttctaatcgcttaagtggtgcaattgagtttgccgaaaaatgtaaatctctgaataaaaaatttatctttgttttaggtaatcatgattactacagctctaactacagttcagtcgtgaatttcttgaaagaaaactaccctgaaaatgcactacttgacgacaaccatatcaaaattcaagataaaatatttgtaggcggcacgttatttacgaacttccgctccaattccccacttacatctcctaacgtacttttacagtctcaaaaagatgctgaacaatcgatttatgattttgatcaaatcatgattggcagtgatcatcgaacgataactgctaatgactacatagaattatttaaaaaatatcatgaaaatattatgaaatttaaggatcaagataatgtgattgtcattactcggcagagtaaaacttga

SEQ ID NO: 47793 - DNA, 300 bp, Acinetobacter baumannii
gtgagtagaagtgtaaagaagcaactcagtttctttttaatcgtactttgcggagtgattagctataattatgtagctactcgcccagtagaaaatacagcggtgaattccaacgttcgagagcgtgagcgagcatttatacaaaaacgcgctgaatacataaaaaatcacggcgagaaaagtatagctgagcaagaaattaataaagaattggcactcagaagagggcattctttaattaatagttcgtcttcgtatcagcgtgctgaagagcaagatcttgaaaaatttgtaaagtga

SEQ ID NO: 47794 - DNA, 276 bp, Acinetobacter baumannii
atgtcgagaaaagtaataatgactacaaatgaaagacgtcttcaagtattaaatcaaatgcgtgctagctaccgtggtgtgcagcttttaaagcaagatagaactagatttatacagcatagtactacggctcaatctagcttattttccacaagcgatagtaggtatcatgcatgtgatgaactatcaatggaaacggatgagagtgatgtgttgaaagaaactgctgaagctatgtacgcatctacaggtgatacaatttggttaagcttttaa

SEQ ID NO: 47795 - DNA, 183 bp, Acinetobacter baumannii
atgttgattcctttagatccagaaaatgattggaaaaataaaattgcagatcaaatacttaaagatctactagacatccataaaatccaaggtaattctattaaaaaaatgaaagcagaccaaaatggtgttttctatgtggaagaggaaatatcaattgacgacttactcaagcaattttga

SEQ ID NO: 47796 - DNA, 141 bp, Acinetobacter baumannii
atgcaacaggatgcgcaccccaatatggatcaagacaagctaaatgaggcgggaagtgagggcgaattcaaacatgaggtgcgacagtttgaaaagtcttatgataatcaacaagctgagcaaatttctctaatggtgtaa

SEQ ID NO: 47797 - DNA, 192 bp, Acinetobacter baumannii
atgttattaattaatctcttaactaataaaataggtaaaattgtaatgtataaatttttagcactttcttttattagtataggtctggttgcttgcaataaaactattgaggattctgcattaactataaataatcaggaatatatgccgaaacaccaactaacagctaataaatggcagagtaaaacttga

SEQ ID NO: 47798 - DNA, 951 bp, Acinetobacter baumannii
atggaaggaattaaaacaatcggtgtggttggtgtcggtgtcattggtgcaagctggacagcattatttttatataaaggctttaaggtaaaggtatatgacccttatccaatagacgaagaattatttaaaaagagaatacaggcaaatcttagtgatttgctcactttagatcagcaaacagattcaagtcatcatttacaagatatttttctaaatttagagctttacaacaacttaaaagatgcggtgattgatgccgattttattcaagaaaatgcaccggagaggttagatttaaagcaaaatttatatcaagaaatcacttcatattgccctgaaaaaacactaattgcttcaagttcttcaggtctaaaagtttctgactttcaaaaagatgcaactcatcccgagcgtatttttttaggtcatccatttaacccacctcatctattacctttggttgaaattgtgggtggaaaattaacagttccgcaaattttaaagaaagcttccgagttttatcaaagtttgggtaagcatccgattgttttaaataaagaagttaaagggcatgtagcaaatcgtttacaagctgctttgtggcgtgaggcattttcactggttaaagaaggggtgtgttcggcagaagatgttgatatcgcaatcaccagtgggcctgggctgagatgggctttatttggcccctatataaatatggaacttgccaatcagaaggggtttaaagaggcaattcaccatttaggaccacctatgaccgaatggtggaatgatatgcaaaattttcagcactctgaagaaactactgagttgctagaagaacaaactaaagagcttttaacacattataaagatatcgatttatctcaaaaaagggataaaggactagtcgatattttaaaattgagacaaaaattagagttggattaa

SEQ ID NO: 47799 - DNA, 246 bp, Acinetobacter baumannii
atgagcttgctagaacgcaatgagttgcttcgaacagttaaacgtttaggaagaactatttggaagaaatggtcaggctatcatcggcgaagtttggttgaaaccaagatgcattgcatcaaattattgggggataaactcagtgcgagaaattttcaaagccaagtcaatgagattcatgcacgtatggcagtattaaataaatttacggacttaggcagaccacatacccgagttgtcacttaa

SEQ ID NO: 47800 - DNA, 633 bp, Acinetobacter baumannii
atgaaaaagctaggtatacaaggtgtttggcgaggtaagaacaaacaaaccacccgtagccgagatgaccaaaaacgagcagatgatttagtgaaacgtaattttactgctgatcatcctgaccaactgtgggtcagtgactttacgtatattcaaactcattcaggctgggtctataccgcctttattattgatgtgttctcacgagcaattgttggctggaaagtatctacacgaatgaatacagatatagtgctcgatgcattagagcaagcattgcatgatcgaggcatgccaaagaatgtgattcatcattccgacagaggtgtgcaatatctttccattcgttatacccatcgtttagaagcagcaaatttacgagcatcagtcggtacgactggtgattcatacgataatgctttggctgaaacggtgaatggcttatacaaaacagaggtgattgaatatctaaaagcagattggcaaggtttagcagatgtacaacttgcgacactaaactgggtagattggttcaataaaaagcgtgtacacagtgcactgggttatgtatcgccttttgagtttgaagcaatgtactatgataagattaacccgttaggtcaggtggcctaa

SEQ ID NO: 47801 - DNA, 228 bp, Acinetobacter baumannii
atggctaaattctttgatttgctggcgtatgagcgaaaaggtgcttctgttactcacaaaatggataaagatgaaacaaacgaatctattcacatccaagtaagttgcggttttgctaaatatgaaaagaacggtcaacattatgtttttaagtttaatcatcaaaaacaagaaattgatcaagattgttttgaagtcttaaaagaaaaattcacatataaacattaa

SEQ ID NO: 47802 - DNA, 174 bp, Acinetobacter baumannii
atgaacaagatgagtaaccaaaacgtaaaccctgcaattgttgaacttgttcgcatgggtgaaggcttcggtggtacaaaaatcactggcagcacacctgaagaaacaagacgcaaccttcgcagagcctttcaagcggccaaggaacgcacgaaaagggatgccacaacctga

SEQ ID NO: 47803 - DNA, 516 bp, Acinetobacter baumannii
atgccacaacctgatcaacaactcgaaagaaaatacatctcccacgcagaattgcacgacctattcttcgtaatcagtcaacatataggcttcactattgaagacattgaggattacgaagaagacatctttaacctaatcgagctttggcgagagcaaggttacatcgatatatacatagaagatagcgatagacgctacggtagaatcaaaaacatggcttctgtacgaaattctgttccatactatctaaatatgtatcacgcccgcgttgttaaaggcgagtacgatcctttacttgttataacttttgaagatactgaccaagtacatcccgatggtcacgaaatgaaagtggcaagtattcgctttatggctattcatgatgatttatttggtgaacaagatccaagagtaaaattcaatgatgctgccatgaagcaaattcgaaagaaaattgatgcctatagaaaacaaggcgatcaatacaatgaagaaaagaaaggctcgcaataa

SEQ ID NO: 47804 - DNA, 222 bp, Acinetobacter baumannii
atgttgatcatgattgttggaatggtgctggtagcgttatctgtctaccgcggtgttgccctgagtaagtatttacatagcccgtcggtatcgcactcaaccagtagtctgtatatgcaggagatggtggtcacgcgaattaaacaggcttggtattgtgttgtaggttttacaggatcaacaatgattgcgatgggagtggggttaacttggttcatttaa

SEQ ID NO: 47805 - DNA, 330 bp, Acinetobacter baumannii
atgcttactgtatttattgttttagttgccttgtttgttatagcactaatggttaagacgcataacgagagaaataaggcggcaagattaagccgactttcattgaaagcatctgaggctttggtaaatgcatctatgcataagatgagacttgcctcaatgtctccagaagaggcttttattgaaactctaaccgatgaagaacgtgaaatatatttcagcctcacaactgcacttgagaaattaacttttaaggttgatattgcaggtaacagaattaagaaacaaagcaatggcgttaaacagatcaacaaactactaaatgcttaa

SEQ ID NO: 47806 - DNA, 507 bp, Acinetobacter baumannii
ttgggtgttgtagcaccattcccaattcctgaagtcattagagacatcaatgcctatacacttggggctcaatctgtaaatccaaaaattaagaccaagatagtctggattaacacttggtttgattcaggaaaagagcatgaggctgcacttgcattaatatcgcaaaatgctgatatattatcacaagtcaccaactcacccgctgtagttaaagctgctcaggaaaaagggaaatttggctttggctggaactcagatatgagtaagtttgctcctaaaggtcacctagctgcatcagtgttatattgggaaaaaatctatactcctgttttgcagcaagtgcataacaaaatatggaagtcgggatcgacatggtatggtgtcaaggaaggtgccatcgatatagcaggttttggtccaatggtctctaacaatgaaaaaatgaaggttttggctgtccgagataaaattcgtaacggtcaatatattagacttccgtcataa

SEQ ID NO: 47807 - DNA, 480 bp, Acinetobacter baumannii
atgaataacctacttaatttaaaaaatattttcgtaaatgccagtcttttaggacttttactcatcagtggggccaatccagcattggccgctgatcaagcggcttttgtctatgtcgctcataaaaacgattatggttggtcttattcacacgatataggtcgtctgaaagcagaaaagtccttacagggtaaatttaagacctcttatatcgagaatattctagataatgccgactctgaacgtacatttcggagactcgcacaacaaggaaataaggttatatttgctactaccttcgggtatatgaatgccattgaaaaggtagctaaacagttcccgaacaccatttttatgcatgcgaacggatataaaactgcaaaaaatgtgggagtctatgatatccgaacctatgaaggctcttacttgcaaggagtattggcaggctataagactaaaagtaatgtttgggtgttgtag

SEQ ID NO: 47808 - DNA, 1077 bp, Acinetobacter baumannii
atgaaaaaaatgtttcctctaggttgtgctggtttaggcattcaaaactcatcaaaagaacgaccagtaagcctgaatgagcctactattctcgaacagttcgaaatgctaaaagctgcggaggtctttgattttctggatcgtatccctcttgaagatagtcaaatagatgcttacatcaaggcaagtcagaaaacaaatatccctatttattctggttgtggcttatatgtcattggcaaggatgaggaagcattcaaacaggatattaatcgtagtgccgctgtaggggccaaattccacaacatgatgatttgggcaaaacatgcagatggtcattatgtaacgaacgaagaagttgctaaaacttatatcgatttctacacctacgctcaaagtaaaggaataacggttaccttagagtgccacgttgataactggtctgaagattatcgtcgagtaattccggtggcagatcttatagaaaaagaaggtgtgccgtttgagtttgcaatggattacagccattgtatttttaaaattgaaaatgaaattgagcttgctgtatcacaaatgcgtgatgatcctgaagctatcagaaagttagatccttttaataatgatagttttgcagatgattggctgaatcgaaatttagttacatgggggcagatccgtcctgcagtcccgaataatccagttaactggttagcatttgaaacaggaccatataatggcttaggaacaaatcgtcctggccgaggaattcagtatccatttaatcaacctacggaaggtgaatggcatacagacttctggcatgcatataagcttgcaccaaccaaagaagtcattcgtaaaatcattgatagctacttgaacaatccaaattctaaagttcaacttatgactgttgataatatcaatttagagtcgtatggtttaaattggaaatacaacatgtttgccgacagttgcagtgttgcccattatattcgtgagatttatgaggagcgactggcaatatttatggcaaaacaaaattcaactgatactcttcaaagagaatcagcatga

SEQ ID NO: 47809 - DNA, 990 bp, Acinetobacter baumannii
atgttgatatacacaccaccttctacggctaaaagtattccagtaatcgacttaagcgacagtttttccgataacctagaaaaacggaaatctgttgcgtgggaaatccataaagcatgcagaacaacaggtttcttctatattaaaaatcatggtatcgcttctgaagttctccaaaaacaactagacattgcaaaacagttttttgatcttccgatcgaaaacaaattagagattgatttcaaaaactccaaatgccttcgtggttatgaacctatggcagcccaaacactcgatgagggttctcctcctgacctaaaagaaggcttcatgtctggaaaaaacctagattcaagtcacccatatgtccaaaaaggatatccacaacatgggcaaaatcagtggcctgaagacctccctgaaatgaaaactcagactgaaacttatattcaacaggtgttaaaactgggtaaacatctagctggtttactagccctttctcttggtcttgaagaaaactacttcgaagtaggctatgacgaagctgtgattattactcgtatgcttcactacccaccacagtctgaagaaattataaataatcagttgggttgcggtgcgcacaccgattggggcttattgaccctcttattacaagatgaagtgggtggactagaagtccgcaacagtgagggtgaatggattcgtgcacctcacattccagatacttttatcgtaaatttaggtgatttagtccaattcatgactaatggactatacctgtcaaatatgcaccgagttttcaatagtaaagcaggagtctctcgttattcggttccatccttcttcgatctggattacgaatacaaaatcaaaaggctccaaaatttaagtgatgaatttaaggctgaacctaaagaaatgaccgtaggtgaatacttagcctatatgtatcagaaaacttacgctgcgaaaaaagaagccgtttaa

SEQ ID NO: 47810 - DNA, 465 bp, Acinetobacter baumannii
atgaatgcaataccagttctcaatttattcactcagccacaatgtagtcaatttgacccaaatgactggaatattctagcgcagcattggtatccggtagttcaaatccaggatgtaacgactcaaccgcaacaagttcagcttcttgatgtcaaaatggctatttataaaactgaaagtggagaaattcatctggtcagagatatctgtccacatcgaggagtgccattaagtaaaggatgggtagaaggtgaaaatattgtttgtccctatcatgggctcaactataacgcacaaggtaagtgcgtaaaaatccctgctcaaccagaacttacccaaatttcagatcggttcaccttaactaaattccctgtagttgagaaatatggactagtttggaccagcttatttagccgtgggtggtgtttcaaaaagtatgctgaaacaaagcaggttgaattttga

SEQ ID NO: 47811 - DNA, 2307 bp, Acinetobacter baumannii
atggtactcgaatttaatccaaaccttagccttgatatatttttgagtaatgtgcttcagcaagagattaatactgtcgctttaaggccatccgaatttagattgctgtggaataatgattacaatcaagtcacagaacaagagagtcgccctattcattttgaacaagagcagttacatccggaagttccgactgctcaaagcaaattacaaacgattccgtatgagttgatgttgtttgatcaaaagaaacgtaaaggtcaaaaagttgagcgtttagataaaaagaggaataaagaagaacgcacgctacgtttttggcaagaaaccagaagggtgttagaggagaagatagttgatgctaatacggaggaaaagtctttaattgatgctcaactacgcttaattgaatggttaatgcatttaaaaaaacgagggcttcaattatcaactattgaaagctacttaggatcgtttggcaaagaatttatatttgagatttggctcaataaattagatttaaagcaacaatccatagatgactatgaggatttatatcggcagctattgaaatacagcagtgaacgtgatgaaaaagcagttcaacgagattcggtgaaaggaaaaacctctcgtaagatgcaccaaagcgcagaataccgttttggtcgcctaaaagattttcatcaattctgtatagagaattatgatgctccaggggtattggtgttacagaattcaagttttaagcatttacaaatttgcaatgcacggctagtgagtcctttgctatttggcaaattattggaaaaactagaaaatttaagtcaagagccaacggcatcagagtgggtcgatcatctgagttgtttaaagctgatgtatttactaagttatagaactggacttcgattaaatgaagttcgttgtcttaaaatacaagatattatttgcccagagctactttataaagaaaaagaaaatacagtttttaataatatcacgcttcatatccaagacaattcatatcgccgtctgaaaacgcgaagtgcgaatcgtcaaataccattgaaaattgcattgtcagaacatgagtttttagtagtacaacgttacatacaacatcgttatgagcaatatttggttaatcagcaggatgatctactttttagtgtgaatcatcgtgtattaactgatcaatgtatcagcaaaattacagtagatttgtttagtcaaatattaggtatgcatcatggctttagttttcatacattacgccacagtgctgctaactatctagcaataactttgctcggttcaaaagaaatgatcaagacctacacagattgtccttgggtaaaagcaaaaaagatgagggatttattgtttggtatgaaagcacgtgctcaagaagagattattcaacataaatggcaggtgctcgcctcttggatggggcatagcagtattgagcaaacggcttcaaattaccttcatgttttggatttattagcagtcgatcgaatttataattcgccgtgtatcatttcaaaaaaagtattagaacagtgttttagtccagtgaagtcaagtacagactacataaacctaaatcgttatactcagcagcagaaatggtttaattcttatcagcaaacacagccagttacgattgctggccgacaagaaaagaagtttagtatcgagaagagtaatctgacaccttttcaacgtttgataagttttagagaaggtcgtttaagcgaagatactcaagctcaagaatggatgcaacgatgtcaatggatgagcaataaatggatggatcgccaaaaatttaatttaaaaacgaattatgtttatagtaagaatttagaagagagttggtttgatgaactttacgaaaaggctaaaaaactgactcgtcaagatgaaataattcctctccttgattttcattataaagatgataggcagcaagatgcactgaaagaaaagaacatgtttaaggcgcttaaaatattattattacttggaaaactgcgtaagaattttctacattttcaatgccgaatgaaaggtgatgagcaacaaattgttaattttattactggtatagagccaatgttaggagatcatctgtatttagaaaaacaaaactacccagttaatttgggtgctcctgagcgaaccgttaaatttagttttcaaagagttgtcggttctaacaaaaaaaatgttactccgctggttatatttaatttaatgttaaaaatgatgcaagaagatgaactctggatcaaatag

SEQ ID NO: 47812 - DNA, 219 bp, Acinetobacter baumannii
atgcacttatttaaattaactgacgaacaaattactcaactcctaatcccgaaacgatttgtaccacctactccgcaagaacatgaaggcaagaacatggtttatgtttttgatagtgatgataagtttgaactgacttattatgagctggtggatatcattagcaaagcgagaatggctgggccgaagttgatacctgttttaggtactgtgaattag

SEQ ID NO: 47813 - DNA, 606 bp, Acinetobacter baumannii
atggaaaagacagtacttgagttacagggtttgtcttgtatcgacctgactgatgatgcagtagccaaaaagcagattatcagcagccgttcatatggcagccctgtgtatgaagtggatgatctaaaggcttcggtgcgactctatgtagccagagcagtaaagcgaatgcgtgatgatggctcaatctgcaagatgattggggtttatattcaaaccagtcgatttgataagactgagcgttacactccatacaccgtagttcagatgcatgagcatacagacgactggttacttatcaccaaggctgcaatgaaaggtatcgatcagatatttaagaagggttttaagtataaaaaggcaggaatcgtacttttagaaattaaggataaatccaaatttgtgcctgatctattcacggactattcgcataagcaagagcgcgaaaaactttcagatgttattgaagccatcagtgaacggtttgggaagaatctcgttacgctaggcattgccaacaatcaagaagcctcatggcacatgaatcaaaaccttagatcaccatcgtatttaacaaaatggtctgacttacctagagtaggataa

SEQ ID NO: 47814 - DNA, 489 bp, Acinetobacter baumannii; identical to SEQ ID NO: 47345

SEQ ID NO: 47815 - DNA, 534 bp, Acinetobacter baumannii
atgctttttagaaaagcaatctacgatcatcaaacagatttaagagcaaagtttgtaggttctattgaaattgatgagagctattttagggcaaaaagacaacgtggttttcatgggaagttgaagcgaggtcgaggtactttaaaacaacctgtatttggaatatctgaaaggaatggtcgagtttatacagaaatagtccctgattgtaaaaagactacattacaaaaagttatcttaggtaaagttgcacttgaaagtgtaatttatagtgatggttggcgtggatacaatggtttggtagatgttggttactcaaagcattttagagtaaatcatggagtgaatgaatttgctagaggacaatgtcatataaatggaatagaatcattctggagcttttgtaaaagaaggctagcaaagttcaacggtatatcaaaagagtattttgattatcatcttaaagaaacagaatggcgttggatgagggagcctaatgagctagcaacagagttgtgggacctcattaggtaa

SEQ ID NO: 47816 - DNA, 1233 bp, Acinetobacter baumannii
atgagaagcgctaatattcgacgtgatggctacttaaaatttctgaatacatggcaagaccgtgatgtcattaaagtactttcaggtgtgcgtcgctctggaaaatccaccttattggcgatgtttcaacaagacctaaaagcacagggtgtacaagccgaaaacatcattgccatcaacttcgaatttatggaatttgaagaactcaccgattaccgtaaactacatgattatgtattgtccaaagttgataaaagtaaaaaaaactatgtttttttagatgaaatacaacatgttacaaattttgagaaagtagtcgactctttatatgttcgggattatatcgatttatatattacaggctcaaatgcattctttctaagtggagaacttgcgactttacttacaggacgctatatcgagcaacatgttctacctctgtcattccaagaatttaaacagtggcatattgaaaataatccgatcatccaacaattatccaatcgtgatttgtatgccatgtatacgcgcagtagtttcccttatacgcttgccatgactagccagcaggaaacttatgattacttgcaagcggtctatgccagtgtaatgtttaaagatgttattccccgtttgaatactgccgatattaactctctcgagcgtgtcgcaagatatttggcaagcgtgacaggctcacctatttctatcaataaaattaaaaatacctttgtttcaagtggggttaaaatttcatttgaaacagtaaaacgctatattcagggcttacaggacagtttgttattttatagtgccgcacaatttaaagtacgcgggcgtgagttattacaatcctctgaaaaatactatttagttgatgtcggattgcgccggattatgttgcctgatgctaatgctgatcaaggtcatatcttagaaaatgtgatttatcttgagcttgtcagacgaggttataccgtctatgtagggcgtgttgatgaatatgaaattgattttgttgctgtcgatactttacagaatttaacttattatcaagtggcattagaaacgctcaatgaagagacactcagccgagagttacgtccattacagaaaatttctgattcgtatcccaaatatttacttaccttagacacgatagggactgaagcaaattataatggtattgtaaaaatgagtgctctcgattggttgctatctgaaaataagtaa

SEQ ID NO: 47817 - DNA, 291 bp, Acinetobacter baumannii
atgcatgtgatcacccacactcgaattatagaagcaatgcaaaagtggccacaggctgaaacggcattagatggttggtatcgaaccataaaggcaaacgatccgaaagattttgctgagatgaaacatctctttccagaggtcgataaagttggaaagttccatgtattcgatattggcgggaacaagatccgacttattgcagtcgtgatgtatcaagcaaaacgtgtgtatatccgtgatgtcttgtaccataaagaatatgacaaaggtcattggaaggaaggttag

SEQ ID NO: 47818 - DNA, 402 bp, Acinetobacter baumannii
atgaacgcgatgattaaacaggccgtagaccactggcactgcgttgcaccattgctcagcaagccagaaaatgaagacgactttcatacacttgttgaagctttagatgaacttttagatactgttggtgatgacgagtcccatcctttaatggggcttactcatcagcttggtgatttggtttctgattatgaaaatgagcatcttcctatgcctaaaggggacggtcgtgctgctttggcttttttgatggagcaacatggtttaggtcagtctgacttaacagaggttgcaacaccatcagtgatttctgagattttaagtggtaaacgccaactgaatattcgtcatattaaggcattgtctgagcggtttaatgtatcggcagatacgtttttctaa

SEQ ID NO: 47819 - DNA, 306 bp, Acinetobacter baumannii
atgctgatcactatgtatgacaaagaaattcaacgtcttgctgttctgcaagacgttcgagatcaacgtattaaccaagtccgtgctgcagaaattcttaatctttcaacccgtcaaataacccgattattgcacaagctaaagcaagatggtgtttcaggcctgatacatgccagtcgtggtcaaccaggtcatcgtcgccatgatgatttattaaaatcgaaattttttctattatttctgaacatctgcttggatttggacccaccttggcgcatgagaagctcagcagcatgtttgccctag

SEQ ID NO: 47820 - DNA, 336 bp, Acinetobacter baumannii
atgtttgccctagatatcccggtagaaacgcttcggcggtggatgacggcaaatgacctctggattcctcgatccaagcgccttaaacgtccatatcagccacactataaccgggattgcttcggtgagctaatccagattgatggctcatatcatgactggttcgaaggacgcgctgctaagtgctgcttgctggtttatatcgatgatgctactggaaagctgttgcatctgcgcttttgtgaggccgaaacgacctttgactatatgctttcaacccgagcctacattgaacaatacggcaaacatctggccttttatagcgacaaacattag

SEQ ID NO: 47821 - DNA, 696 bp, Acinetobacter baumannii
gtgaaccaaaaatctagcctaaacagccagatcacgcaatttggccggattctgaatgagttaaacattgatattatctttgccaactcaccacaggctaaaggtcgcgtagaacgcgcgaatagaacccttcaagaccggttgatcaaggagatgcgtttggaaggcatcagttcaattgccgaagccaatgcatggctaccctacttcattgagcacttcaatcagaaatttgccaagtgtgcgagaaactcgaagaatttacatctacccctaaccgaatctaatcttgaactggatgatatttttacctggcaggaaccgcgtaaggtcacgaagaacctaaccatcacgtatgataaatgtatttatatacttgaaccgacagagctgaatcataagcttgctgggcaatacatttcaattctggagtatccggatggcactttggccctcatgaatgaaggacgaaagctcaactacagcatcttcaataaattggctgggctgcagcaaaatgagattgttgagaataaacggttaggttcagtcctggcgcatattcaacagcaacatgaagtattggaaaaacaaaataaacgttcccgggccaagaaaagtatgccgagtcgtaaagctcagaaagctgttattgaacaaagaaatttaaatcctgtgcttgactcttgtggttaa

SEQ ID NO: 47822 - DNA, 231 bp, Acinetobacter baumannii
atggaaattgcgaaagtatttcaaactggtcgcagtcaggctgttcgcttgcctaaagcctttcgctttaatggcacggaagtggccatcaaaagcttcggtcgtggtgtattactcatgcccatcgacaatccttgggatgtcatgttagaagcaataaatgagtttgaggttggattccaattggagcgagctgatcaaggcgaacagctccgtgaggagttcagatga

SEQ ID NO: 47823 - DNA, 396 bp, Acinetobacter baumannii
atgatttacctcttagacacaaatatttgtatctatgtcatcaacaataagcctcaacaagtttttgagcgctttaagcaatatcaactcggccagcttgcgatttcgagtatcacggcatctgagctggcttttggtgtagagaagtctggatctgaacgcaataaacaggcgttaaacaagtttttgtcacctttagagattcttccttacgatgaacaggcgatttggcattacgccaaattacgccagaatcttcaatctacaggtaaaccgattggcagcttagatatgctgatcgctgctcatgctttggcattggatgttgtattagttacgaacaatacaaaagaatttgaacgaattgatggtctgaagctagagaattgggtctaa

SEQ ID NO: 47824 - DNA, 432 bp, Acinetobacter baumannii
gtgaatttttcaggtgatgtagaggtttttttatcttgtcttggaactaaagagtcaagttcagatattttgaaagcagctattcttgttgcaagtgagtttgactcattagagactaattttggtggagaaaagctatcctattggcaattttttaagagaggtattacgttcaggtttaatgaacatcagatactagataccattttcatctacgtcaaagagaatgaagaatattacccatacccatttttagaaaatctgatcacaggtattaatcacaaaagtacgatgcaatctgtagctaatttatttggaacccccgaaagagaaagtaacagttggcttaaatacaaaatatttgataattatttacattttgagtttcataattcattagaattgaaacaaattacaatgggacaatattaa

SEQ ID NO: 47825 - DNA, 1218 bp, Acinetobacter baumannii
atgaatgagagatatgacgtagttattatcggtggaggtttagctggagttttcactgcattaaagttaattggtcatgatctcaaaatattaattattgacaaaatattacctgaatccaaaaattctttgggtggatttactggtttttcaggtgcaaaattttctctccttcccgcaggtcaaggacaaattcccttagtaggaaatattgagcaactaaaaattagaacaaaggaagtactagaagtccttaatttaaaagcaagtattcatgattcagaagattgttcttacatatctactgataagaaaaacttaagatcatatgagtctatacttttggaccctaatgaaattgataatttactcaaaatgctcattaataaactatcatctgaatgtgaaattattaatggcacagctacaaaaatttctaaagctgattcatggatagtggaagtcgaatcgacaaaaatgtctaagtcacatttgaaatttgaatgcgatactatattttacgcaggtggccgatcaaccaatgatattttagtacaagcaggtgctcagactctcgatggtaaaggacttgatctcggagttcgatttgaatttttagataaaagtgcaacctcaaatctacgagctctcggacctgatgcaaaaattatccacgaaaattgtagaacattctgcttaaattcacctggtactatttattattatgaatcttccggcatacaaattcctggaggaatcgttgcttttgagaacgaacctaaatcaaattttgctatccagtgtcgcgtaagaaataaagcatcttatcttcctgctactttaagtaaaattcaaacaattagtatggagcttaagcaagaaagccatattataagaacgggcttaccatttggtgatttaaaatcatatctcgaatatatttacgattcgtctattgctaatcaattagaagatttctgtcagcttttagatcaaagaaatttgattgattggtcacagcaatataaagttcatacaccgttgctagattggcattggaatacttacgcaaaacctcattctcatatgacatctttaccaaatatttatgtcgccggtgatagtgcaggccatgctcggggccttttacaagcttgcttatctggttggatagctggagaggaatttttaaatgctaagtcaaaaacgtatatttga

SEQ ID NO: 47826 - DNA, 1266 bp, Acinetobacter baumannii
atgtccgaaacaatcaaagttcgacttccacaatttgaactggctagatcgctctttttctatactccatatcttgcaagatcagcagttttagagaatagtctaagtattgattttgatattgtttcaaacccagatcactacctcatcaatattttgcctgcttgctcctatcctacctctcatttcaatgatgcaggcatacgacggatcttatcttggattcttcttgattctgatattcgacaatcttttgaaagtatcagccagttttgtaccaaatatggctatgacgttgaccaataccgtatatggagtttctgttttaatccgccccaactcaatggagtgatctttaatacatttggctattacaaagctgaaacttcagagttttttgtcaatgaaatatcaggttttgaaagaatctcaagccagatttctaaagaagttgagttttatagcgataaatttgtagagtccaaatcgggtggtaaaggtgaaaattcttcaggaactaaaaatgatggcaaagagtccaccattaaagatgatgaggaaggcaatagcgatgatgttcaaatcattgatgttttaccgacacacttcgacttcctagaagccattgaaacaaggaaaacttcgaaaaaaactaggcatagaaatcatggtataaaagatcaagatttaccatctaacaatgcgacttcggaagttagcaccaacgagcctatttttgagggtactgtcccctccgctgaatttaatggcgttgaggatgaaaccgaagatcttcatttgtatcttgatcgattctctgcatttcaacatatgattgatttatttttcaaagaaaactcagttaaagaatttagctttcaactccacaaactaccaaacattcaaggttattccaaacatgcaaaaactgatggcaatcctagatgtgtagccgaagtcagtttccagcttaataatcaaaatattgtgatcttagaggttgatacttctgacaataagaaacccctttcaactcgagttctatcgcttaaagatatcagtcaatggaatcacactgatcgagctaaagtacttgagcttgtggtcactcaatgcttacgctggccaaaaggaatattgaaaaatatctgttataaaaatagcacactcaatcatcctcggtgcgaagagaaatcaaaatcaatttctgaatctgaaatatctaagtggtctaatcgattaaatttattatttgatactccttga

SEQ ID NO: 47827 - DNA, 618 bp, Acinetobacter baumannii
atgcggttacaagcatttcaagatgggttcaaagaagttgtaagtaataaaaccaccatgagctatttgttatgtgcaggcttttgctttggtggatttattggttacttaggtacttctcagcaaatttttatgcagcagtttggtaaaacagggcaagagtttagtgcttattttgctgtgcttgctggtgtaatgggcattgcttcatttaccaattctaaaattgtcatgaagtttggtatgcgtccaatctgtatttatggctttctcggtctgtgcttaatttcattaattttcttagggattcaacttataggtgtgactgtagcattttggatgtttatgctttatgcctgtattttatttttattatttggaactttatttggtaatttaaacgcgattgcaatggaacctatgggacatgtagctggtatggcatcagctattattggtgcagcttcgtccgtattgtcgcttattcttgcctctattattgggcaattatataacggcacactaattccaatgacttgcggttttgtcattttatgtagtttagcatttatgatgacagtatatgagaacagatatttaaagaaatcgaatgtttaa

SEQ ID NO: 47828 - DNA, 327 bp, Acinetobacter baumannii
atgccaaacgtaaacaaagtaactgtgatgggtgtactaggtcgtgaccctgaaactaaacaatttcccaacggcggaagcgttaccacattcagcgttgcaactactgagttttggaaagacaagactacaggcgagcgtaaagaagctacagagtggcatagaatcaccaccagcaaccgtttagccgagattgccagtaagtacctcaagaaaggcggaaaggtgtatatcgaaggctcattgcgtacaaggaagtggaaggacagcaaaggggcggaaaaggaaataaccgagattcgagcagatgagatgcaattgctttaa

SEQ ID NO: 47829 - DNA, 714 bp, Acinetobacter baumannii
gtgcaacaaagccgttttaatgaagaaagagcacctgttggtgagagaattgttaaacgcgcaaatcaaagtgttagagagttctctaccatattttctgctttagatttagatggaaagtacagtacagagacaatgcaaaaaagcattaatgctttaagtgagagtaatgaaaaaggtgctgttaaacgccgtgatttaagatctgcaattaaatataaagcttatgaatttgctgctttaggagtagaaactaatgtgcggtataattcatctgcaattattggggcagaacataatattgaaaatgaactagattcttgtcgagatgaagatctttattactatccctcatttactcctggccataaactccctcatatatggttagtcaaaaatcatagaaaaatctcaactttagatttaattggaaatggaaagtttacgctgttttgttggttacaaggtgataaatggaaacttgctgtagacaacctgaatagacagctcaacttggatattaaagttatacaggtaggcccaaaaagagatgtcgaagactcttatggagaactttctcgctcttggactaatgatgaaaatgattgtattttgattagaccagatggctatattgcttggcaaagcaacgtaattgaatcggcagataatgagttatacagtgcaatttcatcaatacttagtttgaattag

SEQ ID NO: 47830 - DNA, 279 bp, Acinetobacter baumannii
atgacaaagcatatcttattcgctttgggacaagtcgtggctactaaaaatgcagtagagttcatgaatcagcacggtattattcctttggatttactttatcgacatcaacatggtgactggggtgatttaaatgaatctgatcgtgaatcaaatgaacaggctttgattgaagaccatcgaattttttcaagctacaagtttagcaatgagaaagtttgggttattacggaggcagataggaccttaacaacgattctattacctagtgattactaa

SEQ ID NO: 47831 - DNA, 390 bp, Acinetobacter baumannii
atggaaccagtttccacaagcggttttacagcactactaaaattgtacgggattgcaatcatggtgactttagcggtcggtttggttgcagcagtggtattaatgactcgtatgccacgttcaccacaagagtgggcagtgggcttgatctgtacggttgtttcaagtttggctggtggctcattcattatagtgaagtgggggcttcatgaatgggttactgatgtatgggggatgattgctctaggtgggttcttctttgtttgtggtttacccggttgggctttagtccgttggatttttaattttatagataaacaggaaggtaaaacgatcgttgaagtgatcaaagagtttaaaaaagccagaaaagacattgaaaacagttaa

SEQ ID NO: 47832 - DNA, 543 bp, Acinetobacter baumannii
ttgaatatcatttcatttgacgaagaattattaaaaacaacagcacgacactggattgatcgcggtatagcattaaatcttgatgacgaattaattgagttaaatgaacagtttttcgaacacattcaagcaagtaaagattatggggattatttaacgcgagaaagtctaaacacttatatcggtatttgtgaagatgattgtgatcatccaaatgttattgttgaagtcggttatcatcgtcgtggacgtgaattaacgttaaagatttttgatatctacattagcccagagcttgatagtttagttgattcagaatatgattcgaaatacgcagaatatttgatctttattattcaaaaattcttgcagcatgctgattgttctggtagtgcgactaaaatctacgcacgtactgactatagtcaagcattcttacagcgaatgcatgacgcagcagaatccattaaatcagaattagataaagctggtttgacagttaagtttgaaggtaagcgttggcttgcctttcgacgtcaataa

SEQ ID NO: 47833 - DNA, 180 bp, Acinetobacter baumannii
atgaacgttatttcattgctaagtcatgttcaattaactgaaacaaaacaacaaaaagttaatgaattggtagctcaatgtgtattgtctgcttgtgcaaaaactccaagtatgcgagaagttctcaagggtgatatgcgcagcaccattcatgcatctcgtctccgaaaagtatcataa

SEQ ID NO: 47834 - DNA, 774 bp, Acinetobacter baumannii
atgaacaattcaagtcatgaaatgagtgagtatataactaaagttccccaagttacccttctcttctggattactaaaatcttcgcaactacttttggtgaaactggcggagatagtttttcaatgtcattgaaacttgggtatttaactagtacttttatttttgccatagtttttattatcttgttgatctgtcaaattaaggcaaaaagttataaaccatatttatattggtttaccattattgcgagtacaactgttggtacaacattagcagactttgtcacgcgatctttaggtattggttatagtggaggaagtagcttactcctcggcttagtcatcttctcattattgggttggtataaagttgaaggtagtgtctcccctcataccgttaataaacctaaatcagaagtcttttattggttaacaattacctttagtcaaactttaggtacagctcttggtgactggtcagcagatacgattggattaggctatagtggcgggattgctcttttctcagcactcattttattgatggtgtttttgtataaattcacttctgtttcaaaaacatttttattctggagtacttttattttaactcgtcctttgggtgctgtggttggagactttctagataagccgctttccgctggaggattagacttaagccgtttttcagcatccggagtaatattaattgctattttaatatgtatttattttagtaaaaataatcagttaggcaatatcaaaaatgcataa

SEQ ID NO: 47835 - DNA, 507 bp, Acinetobacter baumannii
atgaatatttttattcgcgatgagcgagaagaagatattaaagaaattgaagaattgactaaagcggcatttctaaatgctgaacatacgagccatactgaacactttattgttaataatttaagaaagcacaaacaacttacagtctctttagttgcggttgaagataatactattgttgggcatgtggtaatttcaccagtgcaaatttcatcaggtgaaaagaattggtatggcttaggacctatttctgtcgcgccgaataagcaaggacaaggcattggatcattgcttatgaatagctctttagaaaaattaaaaaaattaggcgcaaaaggttgtgttttattaggtgatccaaagtattacagtcgctttggttttaaggcataccctgacctaaaactagctggagtgccccctgaatacttccaagccttaagttttcaaaattatgttcctaaaggtgatgtaagctaccatgaagcatttaatgcccaagaatag

SEQ ID NO: 47836 - DNA, 1884 bp, Acinetobacter baumannii
atgaaatcggttgttttaatttttgcctctttggcagtgaatattgcgtattcagcagaaacaaatccatctattcaaaactactggtccattgcagaacaaaaaaaattagaccaagatattacatggcaaaggctcatgtatgccaataaaaaccagaaaagtgaggtcacttatgctggctattttctatcagaaaatggaaaaaataatttaaaagaagaactgaaagcagacatctcggcattatttatacctacgcaagataaccagtcaattcgttgtaaatttccggcacgcagtcagtggcttatacagcaattaggcattcaagaaaatgaattgtcgcaagtaaaatgttcagaatttgaaaactggattgggcagattaagccttataaagcgaccctaatttacgctacagattttatgggtaatccaagctcaatgtttggccataccttattacgtctagatcctaaagatcaacagcagttaaacctcgtttcttatgccgtaaactatgcagcaactgtggcaggcaatgacaactggtcatatgcatggaaaggcttaacagggcaatatccgggtgaatactcacttatgccttactatcgtaaggtaaaagaatatggtgattttgagagccgtgatttgtgggaatatgagttaaatctatctccagaagaaacgcgttttttggtgagtcatatttgggaaatgcaacatgtaagcttcccttattactttgtgagtgataactgtgcatatcggttattgggcttagtcgatttagttaaacctgaatctcatctacaagaaaagtttaactacgcttctattccaatggaaaccattaaagcgatgcaacaacaaggactcaccaaagctcctgtgtatcgacctgctttagaaactcaattattggcccaagctcaccagcatggcgcatctttagctaaagttgctcatcagttagcaatgaagccaattaaagagtcttcggaaacacttaaatcatttagcccatcagatcaggccaaaattcttgagatggcttatgatgatttatatctacagtttattggtcgcaaagttgaagaaagctttgctcagccacagcttagacagcttttagcactacgaagtcagattgatttagacaaacagcgccaagaacctaaaagaccatcaaccgagccgactcaaggccataatgcacgtaatgtttcgttaaaactgggcgaagtgcaaggtgacaaatttatcgagataggtcatagacaggcttatcatgacttaatagatccgcagggcggataccgtgctggtactcaattattatttttaaatggtaatgcacagtggcgagatgatcatttaaaactagaacgtcttgatctgttagaagtgaactcttataacccgattcaaccatttaaaactccactgacttggggatttaacttaggctggcgtcaggaagcggttcatgacggcgtttatagtgatgaaaagcagcatggcgtcgcgagttttaatgctcaggttggttacagtcttgcagattatgagcgcaaacatatctgctatgggcaggtacaaacttatgtccaagcgggttcaaatttagataaaggctggcgtgtgggagtagggccgacattaggatgtatgaatcagtggtttgaaaaatttaacactgtggtacaagttgagctgccatattgggaagaccaaaaccaatggaacttacggctaaatacacagtggcaatatgccattaatagtaataatgccattcgctttaattgggattatgaaaaacaaaatcatctagattggatgaaatcaagcttaggatatgtttggttcttttaa

SEQ ID NO: 47837 - DNA, 516 bp, Acinetobacter baumannii
atggcaacactaaaagagcctgtgaaaatctttatagttcagtctcttgcttgctttgatacccctcaacaagttgtagaagccgtaagagaagaatttaacatcgaattaactcgtcagcaggtagcttcttacgatcctacaaaagcaacatgtagagcattaagtaagaaattgactgcgttatttaataaaaccagagaagactttaaaaagaatgtttatgacatcccgctagctaataaagcctatcggcttaaagaacttcagaagatttatgaagactggaagaacaacaggcttatgaagcaaggggttattaaacaggttcgggaagaaatgcagggttatgacctgatgttattaaatcttgagttaaaacagcttgagattgaaaagttgagagagggtgaaggtgatgaagatccaacaccagtcaaggtaactattcaagttgtggatgcgagtaaaaaagatgccgaacatcaatccgacgctgaatgtgcctcaggctaa

SEQ ID NO: 47838 - DNA, 258 bp, Acinetobacter baumannii
gtggaacatgccttcgtggagctttatcacattggacataagaagaataaagattctggcgagtttgaatatacatctgtaggtgagcctagattgtatttacgtgggcatgatgtcgaagagttccatggtgtagttcagcgttatggcgcatcagaagaagtccaaaaaatggttaatcttgcgaatgaaggtccaactatatctcgggctaatattgctcatgcatgtggtacgtgtttattgaagttggcttaa

SEQ ID NO: 47839 - DNA, 426 bp, Acinetobacter baumannii
atgaccacattcaaagaggctcaaagggtccagtcacagaaggcagctcgttcaaagcgatttaatcgagtgcctacagaagatcaagaacagatgacgctcatgagttgggcgcatcgagtgaagtatggttcaggtcgtttgagtgattacctgtttcatattcctaatggtggctcaagaaacatccttgaagctgcaaagtttaagaagttgggcgtgaaggctggtgttccagaccttcagctaattgttccaaatggtgagatacacgggctttggattgagttgaagtcaaagaaagggaagttacaaccaagtcaaaggctcatgattcaacgcttagaagaacaaggttacatgtgcaaagtctgcttcggtgcagatgaagccatagatgaaattaaaaagtacttaatgatttag

SEQ ID NO: 47840 - DNA, 363 bp, Acinetobacter baumannii
atgaaagcaaccaagatcccatgtgagcatgacttgctaagtaagaacgacgacacatgggctaatgctgtgatgcgctgtaagggtggaagcccttactgtggagcagacggttattgtcatgcaggcggcacctgctttgcggaccaagaactaacaagagagcaagcaatcttagaagtagatcgcctagctcaagaattacataactcaaagattgaaaacgacaagttaagaaatgcagctagtcagcttgttaatcaacttgaattggcgaaagagcagaacctaaagaacggtaatgatcagagagtatttgctttgaagttctgtatccatgaaatcaagaaagcgatggggtga

SEQ ID NO: 47841 - DNA, 477 bp, Acinetobacter baumannii
atggagaagtttgaggaatatttcagaacaaccaagcattatgaaaacatgttgctggatattgccagaaatcaattatctgtaagtgtttttgataaaaacggcagaaagtacaggaatcatattgtccagactgcttatgaagtttttcagcaccagcaagcgaaagtgaaggagctgcaaacccaattgtcactacaacgtcaaagagtgaaggcttttgaggaagagcttactagttcacgtaattatggtgatgagctgcaaaagagggtggatgaacttgagtttcaacttaaagattggaagcaaaaatcaatgcctgcaatgctaaatggtatgtgtggtcgttgcggtaaagagccgttgcaaggaattggctcagataaagaagattatgcgctactacattgctttggttgtggtgcaaacaaatacgaatggataggagagcaagcgctcaagggggaaggatga

SEQ ID NO: 47842 - DNA, 276 bp, Acinetobacter baumannii
atgagtgagtttaaagtcggggattacattgtaattgatcaaaaatatgacaagaccttcatgcccgttttgcaaattatttcagaaggtaagaactatttctattgcaatgatgggcaagtacataaatcgcaaatgggacaatggcgcaaagctgagccagaagaaatcgcagcaggtcaccgcattgataaaccctcgaattcgggggaattagaaaccctagacaaactagaaaaccacatttcgccgaattgcaaagtggaggatgtgtga

SEQ ID NO: 47843 - DNA, 696 bp, Acinetobacter baumannii
gtgcctgctgagcatattgtggattattattcaaaagaaagacgaaaaggtttacgtaaaattaatgataatggacgtttaatagaagaacatgatcgtttaaagcgtaatgcagcaggtgaccgaatacgtaaacaagatattaaccaaactggtatagatcatttgtggtttggaagccgtaaaggtcgtaaatatttagttggtgaaacaaagggaagcatttttggtcattttgcttttttagcgggaatggcagattctgatgctaaagctattgaaggtaatcggagcgagattggtaaaatttttgatggaaagactgagtacaatgaacagtcagggttaggtaaaagatcaactagtgcagaaacttctataaaaaatgaaggggctctaacgggcagtcaagggaaagctgggttaagtggaactaagtctaaaggtcgtcagatgagtcataaatggattaactcatcaataattgttgatgcatcgatatcagtgggttataaaaatcaatttattcttgaatatcgtagtgctcagaggttaagaaagcctattacgttatactgtcgtgaaatttatatggtaacaggtaaacaatatgagcaacatgatcgatctaagggtaaaacccataatattcagcagcctataattttattacccgataatgttttgatggaataa

SEQ ID NO: 47844 - DNA, 1017 bp, Acinetobacter baumannii
atgattaccttattgaatgagaaagactggaaaaatttaagaagagaaccttatcagaaatataaggattatcagatggttgtttcctctgcaattgatggcattccggagactatgaggtccataaatgatgatagcttatctgtagaggggtatcattttagtggtttaatgaatgcctcaagtcttttgtttaaagaaagcttagagcttattttttatagttattctgctggttcatctataaaagagttagctaattattttccaaatattattgaatatttgaaactttatgttaagcaccatatcaattttcatcaaagttcagaaagtgatgggcatttagtaccacatttagaactggtaactgatgaatattgggaagctttacagttagtttgtttctctattttatttgctcaacctgagcatttaaaaacaattatggaaattctggcttatgaaaatgatgagcaagatgctttactggataagctagtttctccatggttaccagatcgggaaatctcgggggtgtatttaagacaacttccatatagaaagcttgaaaaagtatttacggcggatgaagctgaccgtcctgttctgatgtcggcttatatggatgagtggtatggtgcaagcaaaagagaaccttatcatgatcgccataagagtagttttttcccaggctattggtcgctagaagcagcagctatgacggtcattttgcgaatagatgacagtagttatcgagataaaccatactatccaaaagacttagttgattatgctcgaagccagtatacagttctagatgaacatggaaatgtagagggagaagctaaccgtttacgttgtgaagctggtgagccttgtccacagtctggagaatggtatagcccagcgaatggcatgcaaaagcgtcattttaatcagggcgaaattatgccggaaattaaagataatccttggggcgaaaccatttggtatttagatatagaaaatgaataa

SEQ ID NO: 47845 - DNA, 189 bp, Acinetobacter baumannii
atgagacttttggttgctttaatttttccctggctgctgttttttacgataggtcgtccatttgcaggaatgatttgtttatttcttcagattacgattttagggtggattccggccgcaatctgggctgtatatactttatcgcagtataagacagataaaaagatcaggaaagcattgctctactaa

SEQ ID NO: 47846 - DNA, 462 bp, Acinetobacter baumannii
atgaaattagcagaagctctcttacttcgaagtgatcaacaaaaaaaaattatttcattaaaacaacgtatcaatgcaaatgtattggtacaagatggtgataaaccatctgaagatccaaatgaactattaaaacaagtattttctttaattcaagaatttcaaaaattaagttatgcaattcatgaaactaatgctttaacaaaattaaatgatggccgttctctacttgctttattgtctttgcgtgatgaatttgtagaacagcacaaaaccctaactgcagcaataagtaatacatctcgtgaatctgatcgttatagtacgcgggaaataaagtggcataaagttattccagtttcatcactacaaaaacaagctgatgatattagtcttaaattacgtgatttaaatgtgttaattcagtcgaataattggaaaattgatttgattgaagcctaa

SEQ ID NO: 47847 - DNA, 129 bp, Acinetobacter baumannii
atgcttactggagtctatataaataatgttgctacttatagtgtaccaacacaattagatggtttaaagcagataaattttatatttggggcaaatgggtcaggaaaaactacaattgtagaattatag

SEQ ID NO: 47848 - DNA, 321 bp, Acinetobacter baumannii
atgagtcgattaacttttataaacggtgcgattgtttctgcgtctgatgttcgcaaatcttggagcaaaattgttcaatgtgtcaaagaaagtcataaacctgtttttgtttatacgaagaatacgcccgaagctgttgttctgagttttgaagaatttcaaaacatgcaggaaattgttgaagccgtccggcgtgaacagctaggacaacaaatggtttatgatcttttggatattaatcagctcactggtcaaccgatcaaacacatgcttttgaaccccaaaggtgtatttgaagaagtaaatggacaagaaaaatag

SEQ ID NO: 47849 - DNA, 189 bp, Acinetobacter baumannii
atgagtaaaggactatttgagttgcgcttaaaatctcaagaaggtattgctcgtgttatgtattgcacactagtcggtaaacgcattgtaatgctccatagttttgttaagaaaacccaaaaaacacctaagcaagatctaaacctagcacttgaccgcatgaaagaggtgaaaaatgcgaacacatga

SEQ ID NO: 47850 - DNA, 192 bp, Acinetobacter baumannii
atgcgaacacatgaagaaatgaaagcacttgcattatctcgttcagcagtgcgtaccgaatacgaacgaattgaacgtgaagaaatgcccttgctcgatatggtacttactgcacgtcgagaggcaggtctatcccaagcgcaaatcgcggaacgcgtgggaacaaatgtacctctgccgtttcacggctag

SEQ ID NO: 47851 - DNA, 255 bp, Acinetobacter baumannii
gtggttattcaatttgcaataatttgggaagcacactgcactccaaataaattatctttaaaagagcgcaatgagtgtgtaaaggatgcatataatcagtctcttataatggatgcaaggcttaaaggggtttccaaggaaagcttaaggaatgaaatattaacagacaaaaatgcatcaaaagcagaaattcaagaaggcttaagagatattgatcgtgcgtataacagtaatttcaaagataagggtctatag

SEQ ID NO: 47852 - DNA, 123 bp, Acinetobacter baumannii
atggatcagatcagaccatttcctccaactgattttattgaccaagcagatgaagaggaagcgattcgcatagtagaaaaagattatttttttaagcttagttcttggtttggtagggattaa

SEQ ID NO: 47853 - DNA, 468 bp, Acinetobacter baumannii
atggattctacagaatacttttggcttactcggaaaaaagaacctaaaactaaacttaaaagccggccactgccaaagcctacacaaaaatatctagaggcagaagaagaatttactgaaactttagataatctggaaattaaatatgaaaagaaatttcagtttaagtctactaagcactggcggtttgactttcatttaattgagtatcgaatactagttgaaattgcgggtggtccatggtctggcggtcgtaagggcaaacttaaaaataaagcttgtagtcttgatcgttacgatgtggctgaagagatgggctacaccgtagttcgcatagagacagcttcaagatgtcgcattgatgagtctggacctttgcagttacggactgaatacgctagtgaatggctaaaaaatttaaagaggcaaatatttaatggatcagatcagaccatttcctccaactga

SEQ ID NO: 47854 - DNA, 672 bp, Acinetobacter baumannii
atgactttaagattaagtgtcgctgcgatgggtttattactcagcggttcagtattttcagcagttacaattacagcgccagaggaaatcgtaatccttgcggtgaatggtcaggaagtcaactctggattattccgttcttctaaaaataattataaagtcgatgctggtgagacaagcctaagtgtacgttatcaagaatattttgagcatttaagtggcgaacacgatattgttaagtcaggagtggttaccattcaaactccagcgctcaaagatggtcaaacttataagcttgcaatggtagatgctccaaaacaatttgaacaagccaaaaaatatgctgagcaacctacagtggctttatataattcaaataatgagttaattgttcaacaaactggtgccaataatgaggcaagaccgtggtttgcatcgggattgctaggtacggttactgatttcacgactaaatcatctaaacaacaacctgacgctgtgtatgctgctgcaaaacctaccacgactcaagctaatgcgcctgttgcaacaactatgcctgctactggtgtagcacaaactaatgatcagcgtttggcagaaatttggaaaaaatcttctaaagcagagcgtcaaaagtttatggcttggttagctgagcagtcgaattaa

SEQ ID NO: 47855 - DNA, 597 bp, Acinetobacter baumannii
atgtctactttcttagataaaattaaaaaccgtcgtactatttatgcaattggtaaaaatgttgcattagatcgcacaaaaattgaagaaactattcgtgaagcggttaaacatagcccatcagcgttcaactctcaatcttcacgtgttgttactctttatggtgaatcacatgctaaattttggaatttagtccgtgaagcattacgtaaaattgttcctgcagatgcctttgccggtacaaatgcaaagattgatagcttcgttgctggtgttggtacagtactattttatgaagatcaagctgttgttaaaagcttgcaagagcaatttgaattatatgcagataacttcccagtttggtctgaacattcaagtgcaattgctcagtttgcgacttggactgcgctttcagaacttggtttaggcgcatcgttacagcattataacccgattgttgatgctgatgctgctgaagcatttgatgttccagcaacttggaaattacgtgctcaacttgtatttggttctgttgaagcaccagctggtgaaaaagcatttattagcgatgaagatcgttttaaaacattcaactaa

SEQ ID NO: 47856 - DNA, 846 bp, Acinetobacter baumannii
gtgttagagctaaaaattgatgatgagttgcttgaagaagtcgaagagcaattattagttgcagatattggtgttgatgcaacaaaaacgattattaccaacttaactgaacgtactgctcgtggtgatttgatctattcacattcactttataaagccttgcaagaagagttggttgctttgcttgctccacgtgtgaagcctttgcatattgaccctaataaatcaccttatgtgattttaatggttggggtaaatggtgttggaaaaacgacaacaattggtaaattagcgaagcgtttacaaggtgaaggcaaaaaagtgatgttggcggcaggtgatacattccgtgctgctgctactgaacaattgcaaatctggggtgagcgtaacgatattgctgtagttgctcaaggtcatggtgccgatagtgcatcagttatttttgatgcttttgaaagtgcgcgagctaaaggtattgatgtactgattgcagatactgcgggccgtttgcataacaaaagtaatttgatggaagagcttaagaaagttaagcgtgttatgcaaaaaattgatgcaacagcgcctcatgaaattatgttggttgtagatgcgggtactggacaaaatgcaatcaaccaagtacaagaatttgaccaggctgtcggtttaacaggtattaccattactaagttggatggtacagcaaaaggtggagtattatttaatattgctagtcgtactcatgtgccaattcgtttcattggtgtgggtgaaaaaattgatgatttaagaccattctcggcgaaatcgtttgttgcagcactatttgaaactgaaaaataa

SEQ ID NO: 47857 - DNA, 1866 bp, Acinetobacter baumannii
gtggtttatgtcgcacttcaagttttactctgcccaggttcctctgttaatgtaaatgtttctgatatcaacattgctaatgtttcaacaacaggcttactttctaatgtgatttcaactgtaaccgatacagtttcacatacaaccacagacttagtttctaatgtagttggtaccgtaacaggtactgtagggtctacaaacccaattgatactgtaaccaatattattggcggcgtaacgggtggtgttacaggtaaccctcttgaagttgttactgatattatcggcggcgtaaccggtggcattattggtggcggtacatctcctatttctccagttattgatgttgttcaaggcggcatcgatattcttcaaggcgttgaaagcctaaaaaccgaaattattaacactggtattgatacagtagccgacactattattggtgtattacctcaagctgagcatccagtttctgaaattgcagaccttggcacattaactttcgaaacgtctcgagacacggtcaacggcgctcttgaagttgtttctgatttagtcggtggtgatattcaaggcgctactgaaaatgcaactggtattttaggaacacttattcagaatggttcaacagcgactgggattgtgactgatatccttggtggcgtgacaggtactatcggcggcgtaactggtggtatcggtggtgacaatccgctcggtatagtaactgacattatcggcggtgttactggcggtattggcggtgacaatcctcttggtgtagtaactgacatcatcggtggtgttactggtggtatcggcggtgataaccctcttggtgtagtaactgatattatcggtggtgttactggtggtatcggtggtgataatcctcttggtgtagtaactgatattatcggtggtgttactggtggtatcggtggtgataatcctcttggcgtagtaactgatattatcggcggtgttactggcggtatcggtggtgacaatccgcttggtgtagtaactgacattatcggcggcgtaactggtggtattattggtggcggtacatctcctatttctccagtaatcgatgttgttcaaggcggcatcgatattcttcaaggcgttgaaagcctgaaaactgaaattattaacacgggtattgatacagttgcggatacaattatcggtatccttccacaagcagaacatccagtttctgaaattgcagaccttggcacattaactttcgaaacgtctcgtgacacagtcaatggtgctcttgaagttgtttctgatttagtcggcggtgatattcaaggcgctactgaatcggctactggtattctcgatacgcttattacaaatggtacaactgcaactggtttagtaactgaaatcattggcggagtaacaggaactattggtggcgtaactggcggagatagcccactaggattagtaactgatttacttggtggtttaactggtagcgtaggcggcgacagtccgcttggtgtagtcactgaccttctcggcggtttaactggtagcgtaggtggcgacagtccgcttggcgtagtcactgatctgctcggcggtttaactggtggtattactggcggtacagataaccctatcagtatcgtaacggatatcgttggaagcttaacaggtggtgttactggtgaaggcagtttagatgttatttctaatttgctaggtggattaactggtggtagcttactcggtggtgtaacttctacagtatctagcgtaacaaatacaacgcatacgatcgtaccgacatcattacctactgataacttcctagaaaactcattcaatactgtttaa

SEQ ID NO: 47858 - DNA, 594 bp, Acinetobacter baumannii
atgaatctggctttattcgattttgatggcacgatcacccataatgataccttcagtttattccttaaattttctttgagtaaaaaaactcgaatattaggtggcatccgtcttgcaccttatatagcgggttataagcttgggtgggtaacgggtaaaacgacccgtactaagctctgccaagtgggatatatcggctatgaggcagcttctttgatatgcaaaggacaagagtttgctaaaaaagtaattccttcctgtattcgtgaaaatgctttagaacgcattctctggcataaacaacagggagatcaggtcgttgttgtatccgcttcattaagtgtttacttggaaagttggtgtaaatctttagatctggatgttatctgtaatcaacttgaaatagataatggtattttgacaggttattttattgatggtgattgtggttatttagaaaaagtaaatagaataaaaaataaatatgacttaactcaatattctataatctatgcttatggtgatacacctaatgattatgcaatgttggagttagctcatagaaaatattataaatggcaagagattaattaa

SEQ ID NO: 47859 - DNA, 2343 bp, Acinetobacter baumannii
atgccaaagattgaaacagaagagcaattcttagatttagcagaaaaatttaaacaagattattgtctattacatgatgatgttgtgaatacacaatttgtcgatctatcagatgatttacgtgaaaaagcccacgctctatataaggaagcgcaacagatatatggctatatatctagctctagacaattaggtaaatattattttctagcttctttaagttattttgcatgtccagatactagtaatacacaagagctgtcatcgcaacgttatttgattctacaagcgagttttttaacatatcggcagtatcaagaatttgcaaaaattgctaaagctgagaataagcaaaaacatgtttgtgacctcctacgctatgtctcacgatatgtgctggattctaataatgctgaattatttcatgaatgtagtaagctgctaaattgttatgtcacgtacgaacgtaatttgaaaaaagaggatcgtaatcaactttttaatattaaaaatttcaaaaaagtacaagtcatagagtatttatcggctctattaataatttttaaaagacttgatgatcgtcgtgttgttcatcgtcagcgtaagtcaaaaaaaagcaaagttttgcaatggccaactaaaattgaactcaaaaaatttcgtgaaataaaatctggtaagtatgaagatatcggacataacgcaaagatcagtttttatgatgcctctcttcacaaagatgaagatggtgaaattgagttattggacattgaagtagaattatactcagaagatgaaaaaactaaaaattttaatcatttaattagtgattatactgcatattacacgcggcatcgccaacgccgtcatgtgccatttattacaaatccttattatttagcaccagatgtactgaagcaaattgtttatgtgttgagaactgagttaaatgcggactgggataaggctgcaatcgctgccgcatgtttattgtcacttttgactggattatctcccatagcactgatggattttaacgagctcatacaagatggtgttttgatccagaatggttcaagaaaacgacgggaatatttacttaatttaaatttgaaagttaccgagcagaaaattaagagtttaaagcctgtgcgttggaatgaagagatgactcaccaactacatctacctgcggcatggtttgactacatagaacaagcatcgaatccaaagatctcttcaggagatattaattccgaacttaagaagtggtttgctaatcagtatgtgggtactatcaccgttgaaaaacttcaggcccaattatattttcatatatattatgaaacctataatgaatatcttactcatgtgattgcgaggcgggatatcaagcatgatgtgccaggtatttattacggaggacttcccaaagctcagcttgatagcagctatttagcttttttggaatcagcacttacaccacattctaaggaacttacagaagacacggctgaactcaaaatattacaacaacaattcaaagtgcaatctgcatctaaagggagggtagggagtcaactggcacttgaacccagttttgtgaaagagcaatttgcttttttacatagacattgccaagaaaatattcaaaaagatcaacatatcattaatcaattgaatgcatacgcgtgttggatgtggcatgttagcttgctaagcatggccagacggcctaataaaaatctgttggggaatttggaagattattgttttgagcttaaaattctatatgtaaacgataaaaagaatagcaaggtaagaaaggatggacgatttatcccgctatccgatttcttcttaaaagcactgcaaaattacactgtatttttaaaacaaataattgaactgtatagcccacttttaaaacaagtatttgcaaagaaaaaaattgcgctcaatgacttattcggaaaggtcattgatagtaaagatatcttgccgataactgtcaaagagtggcagagcaggaaagttaagttaatccctttatctcgaaactgggtaaatttatatatggaaggaatctttccaaagaatatgtattcgaattggttacgtcattttgatatgaattttttgatgtatgcagaagaaaaagaagaaaaaaaaactgctttagcattccatttaattcaggctctttatggtcatgaccaacgtgaccgagaggcttttcatccgtattcttcacttattccgaatgtctatgtacagcaagtccgccagcaattgcaagataatgtcaaatctttatcgattaaacacttagagcgaaaatag

SEQ ID NO: 47860 - DNA, 1086 bp, Acinetobacter baumannii
atgacttcttcttatcgtcaacaacttcaagctaaaattgatcgcattactactcaattttctgaatttacaccgcctacattagaagtgtttgaatcgcctgaacaacatttccgtatgcgtgctgaatttcgtatctggcatacagaaaatgatatgttttatgccatgtttgaacgtaatgacgatggcaagcaaaaaaccgttgtacgcatagatgagtttcctattgcagataaaagcattaatgacttaatgccacttcttttagcagaacttaaggccaactctttactttctcagcgtttatttgaagttgactttctcgcaactttaagcggagaaatgttagttaccttgatttatcaccgtaagcttaatcaggaatgggaacaagcagctaaagcacttgctgaaaaattaaatattaaaattatgggccgtagccgcggccagaaaattgttattggcgatgactttgttgtagaagaatttgaacttttaaaccgttcatttaaatacaaacaaatcgaaagtagctttacgcagcctaatgcacaagtttgcaaaaaaatgctgcaatgggcatgtgatgcagctgaaggatcaaaaaaacacctattagaactttattgtggtaatggtaatttcacgcttccactctctttaaaatttgaaagagtgcttgcaactgaacttgcaaaatcatcagtttatgcggcgcagtggaatatcgaacagaaccagattgataatattcaagtagctcgcctatcggctgaagagttcactcaagcctatcaaggtgaacgtgaattccgccgtctacaagaagcagatattgatattcaaagctacgacttcggtacggtattcgttgatcctccacgcgcaggaattgacgatgaaactttaaaactattgcagggctttgaatgtattatctacatttcatgcaaccccgacactttatatgaaaatttaaaaacgctcactcaaactcatcgcgttactaagtttgctttatttgatcagttcccttatacgcatcatgtagagtctggtgtcttacttgagaagatttaa

SEQ ID NO: 47861 - DNA, 489 bp, Acinetobacter baumannii; identical to SEQ ID NO: 47345

SEQ ID NO: 47862 - DNA, 594 bp, Acinetobacter baumannii
atggctccgcctgcaaatcaaattaatcgactgatggttgacttacttgattggttaaatgatagcgaagtgcatcctcttatccaaagttcagtatttcactatgagtttgaattcattcatccatttgcggatggcaatgggcgcatgggaaggctatggcaaactttaatattaagcagatggaatccaatctttgctaatattcctgttgagagtttgatctatcaaaatcaaaaagcctattatgaagcattacaagcaagtacggatcgaacagattcagcaccttttatagaatttattttgcagatgattttagatgcaattcttagttcaactgataccgctcaagatagcggtcatgttaccgctcaagcttacgtacaagtgagcgatcaagttcagcgtttaatttcagcaatgaagctagaagactacactttggttgagttgatgcaattggttggtttaaaccatcgggcaacattccaaaagaattatttgaatccagcaatagaagcagatttgattgagcgtactattccagataagccgaaaagccctaagcaaaggtatcgtcttaaatcatga

SEQ ID NO: 47863 - DNA, 762 bp, Acinetobacter baumannii
atgagtacttttgaaatgcaaggtctgacatggaaggcgaggtcaaagtatcaacaagatgccattttgattgaaaataaagttattcaacatgatggactcatcactaaactatatagccattctgaaaaagaacagtggtgtgttgctgtagcggatgggattagcaatagtccagtagctgagcaagcagcctatacagttttaaatgctttaatgcaaaataaaaagatagaaacttgtcaagcatttaccattcagcagtatcttgtcgatcaattagcacttcagaaaaatagttttggagccagttcaacacttgcactcattcaaaataatggcgaacaaggttttgtgacaattcaacatattggggatagtcgagtatatttgtttagccagcatgatcaaaagtggcactgcctgacgagagatcataattatcttgaacagttaagaggaaatggcgagataaaagaaggggaaaactatgccagtatttatggtgcattattacaatacttttgtgctgatcctttgcatgaagtgatggattttacaacaacagaagaatatttgactgagaatgatgccttattggtttgtacagatggtgtgcatgatgtgatggagtgtggggaatggcttcctttaaaagcagatatggagcttcgaacatggttactcaatataaaagcgtcattagattcaaaacaggcgtatgacaatgtcagcatggtcttagtacgagcaaaaatttaa

SEQ ID NO: 47864 - DNA, 213 bp, Acinetobacter baumannii
atgcaatcagatgatatttttgaacgtgccaaattattcacagaggaagtgggtgtcgtttctgtatcgagtttacaacaccattttttaattgggtattctcaggctgaacaactacttaatcagttaattgaagcaagtatttgtgaatctacaaaaacttttgttctagattatgggtatggctataaattgcatcaaggtatgaaataa

SEQ ID NO: 47865 - DNA, 330 bp, Acinetobacter baumannii
atgattgatctaaaccaagaacttgaagattttgatgcttatttttttaaaagacatggtgaattgccattagattctacctctgaggaatacgccaataaatcatatctaaaacacgagatgtttaaggcatggaaagcaagagccaaagctcaggcggtgccggagactcatctactaattccaaaggaaccaaatcgcaaaactataatggcaatggcttgtgtctgcttagggtctgttggttcaggtccagagttccttactcttaaagaagctaaagatgtttacagtgcattagtagaaaaagaatcgggagctgaaggatga

SEQ ID NO: 47866 - DNA, 222 bp, Acinetobacter baumannii
gtgttcaacgtaaatgcgggatatcgcgggaaaggcacaccgcacggcgtgaacttaattaaaggtaataaaggcaccctttcagtaagcaacgaaggtgtgatgaacaaagcagctcaagagcgatacaaactaatgcttttgaaatatttcaaagaaggtcgctctgcaatggatgagctggaccatgaagttaaacgtatttatagaatggtggcctaa

SEQ ID NO: 47867 - DNA, 864 bp, Acinetobacter baumannii
atgcctaaaaaatttgaggactttaataatcctaggaaaaaagcacttgcaggaatgaaacaaagcatttcagctgaactttgggacaaaaatcttaattttttaaatcaattaagagccaagatcgcgaaacatccagtatctcatcatcctgcaatagaaactttaaataacggtgaaattaataaagaaaacttaaagcgtattcatttagagtatcgccatgcaatcgtacaaacttttacagatgctttattaatggctcaataccagacaaagcagttagaacctaggttgcatgcaggtgcaaagatgtttccgcgctgtcttttgagtcttaacatatttgatgagtttgggtttcggcctgggaccgacaaagacggttattatcaaggtaacccagaatatgcacattatcctttatttgaagatgtccttgatgattttggagtaacggagaacgagcgcctgagttatcaaccaacagaaattgcacatcaggtgagagagtttctagaaaattcctataaagactataaagccgtttctgctttattagctgtagctgaagaagaagttattttgtacagtccacctttacgaaaagcaaccagtactgtaggtatagcggtggagggtggtggctattaccatgtgcatggagtatctgaagatgaaactgctgaggcagcagatgacgatcatgaagaagatctatggtttattttaatgcaagcttgtacagaagaagactacacttatttagaaaacctatgcctcgaatactgtgatttatgggaaaagttttgggatattcaaatagaaagctcaaaatcaatcctgaaacaaaatttagcttaa

SEQ ID NO: 47868 - DNA, 912 bp, Acinetobacter baumannii
atgcgcacatctgaaaaacaagtaaaacctattgagattgatgatatcaatatcatcgagaacgaaaaaaccaaaaaagcgattactgcagctgcattaggtaatgcaattgaatggtttgatttcggcgtttatggttatgtggcatacgttctcggtaaagtatttttcccagatgcttcaccaagcgtgcagatgattgccgcgcttgctacattttcagtaccttttattttccgtccattaggtggtcttttctttggacatttaggtgacaaatacggacgtcaaaaagttctggccattactgtcattattatgtccatcagtacctttggtattggccttattccatcttatgaaacaatcggtttatgggcacctattcttttactcatcgtaaaaattgtacaaggcttctccattggtggtgaatactcaggtgctgcgatttttgtagctgaatattctccggaccgaaaacgtggctttatgggaagctggcttgattttggatcgatagccggctttgtacttggggctgcaactgtcgccttgatcacacacgccgtgggtgaggcacgttttgccgagtggggttggcgtattccattctttctcgctctaccactgggcataatcggtttatatttacgaaaccgccttgaagaaacccctgtatatcaacagcattcagagcaacaagcacaaaaaagtaaaccccaaaaatttagtttcaaagaaatttttgttaaacataagcgtagtttattggtgtgcattggccttgtaatcagcactaacgttacttactacatgttgctaacttatgaaccgtaccgggtttgtcggagagtcaatattctgagagactatcccgatgacaaaaccaaactatacccccgaaattag

SEQ ID NO: 47869 - DNA, 750 bp, Acinetobacter baumannii
atggcgggtcattctaaatgggccaatattaagcatcgtaaagcgaaacaagatgccagtcgcggtaaagtttttactaaatatattcgtgaaattgtcactgctgcaaaacttggtggtgcagatcctgccagtaaccctcgccttcgtgccgttgtcgaaaaagcgctttctgtcaacatgacacgagataccattaaccgtgcaattcaacgcggtgtgggtggtgaagataatgatgatttaaaagaagtaacctacgaaggttatggtgtaggtggtgttgctgttcttgttgaaacaatgacagacaacctgaaccgtacagttccagatgttcgccattgtttcagcaaaactaatggtaacttaggtaccgcaggttctgttgcttacctatttaccaaacgtggtgagattacttttgacgatatttctttagaagataagatcatggacgttgctttagaagctggtgcagaagatattgaagtttcagaagatgaaattttagtaatcacttctccagagacttttggtgaggttcaagatgctcttgcagctgctggtttaaaatcagacaatgctgaagtagtgatgagcccttctactaaagcagaaatcactgatattgatcaagctaaacaagtaatgaaactcattgatatgcttgaagatctagacgatgtacaaaacgtttatacaaacgttgagtttagtgatgaagttttagcgcaacttgatgcctaa

SEQ ID NO: 47870 - DNA, 243 bp, Acinetobacter baumannii
gtgcaggttaaaaaaaggagaatggaattggataacgcaaaattaccaatcaatcaaattattgcccgtattaatgatgctgcgaaaaatggagaggcgttagttctaactgctgaggaagtgagaatcctttcaaaagatatcggcgataaggtctatattcctgtacttacgaatgaacaggttgtgcagttggttaaagaaggaaaacttgggcagaaaattaataacaccaaagattaa

SEQ ID NO: 47871 - DNA, 744 bp, Acinetobacter baumannii
atggaaacccttggtattcgcttgaaaaatctgcgtaaacagaaaaaacttactcaacaagcattggctgatcttgttggtgtatctaaaacttctgttatctactgggaaaaagacgaaaacgtgccgaagcatgaaagcttaatggcattagctaaagttcttggtagctcaactgagtaccttttgaagggtaaagagcctaaaaatcttactaattttaatattcaagactttattattaagcatggactaacaactaaagaagaagcttcattcgatgctgacagtattattgaacctgatgttgtcgaatttgatgaggtaaacggttatatatggattgacgttgtggaagctaatttttcgtgtggtactggggaatctattgaattccactttgatgtgattaatgaaaagtatccgttccccccttccttctttcaaagaaagatggtggaccctaagtgcttaagacttatcaaagctaaaggcgacagcatggcggattatatccatgaccaagatctagttggtattgatctatcacaaactgaaatagtagatggtggtatttacgcagtttactttgctggcgaaggcatgattaagcagatatttaaagaagctgatggctctttagttctgcatagcttcaacgaaaagtatcgggatagaataattactgaacagaatggactgaattttaaggttatgggccgccaggtgtggcgtgcaggttaa

SEQ ID NO: 47872 - DNA, 186 bp, Acinetobacter baumannii
atgactaagtcagaagctttagccctgcttaactgcactgttacacagttagcagcgaagttagggatttctcacaatgcaatcagccagtgggatgaaacaaaaatcccattagcacgtgaataccaaatacgtgatcttgctgatggcaaacaaccaattaaacgaactaatgcaaccgcttag

SEQ ID NO: 47873 - DNA, 321 bp, Acinetobacter baumannii; identical to SEQ ID NO: 46215

SEQ ID NO: 47874 - DNA, 279 bp, Acinetobacter baumannii
atgagtaaagttcacaatttaaaaactgatccagaagtttttcaagctgttgttgatggtcgtaaaacatttgagattcgtttcaatgatcgagatttcaaagttggcgatgagctgattttgcttgagacgatacattcaggcgagcaaatgaagcaaggcatgccgcttctatattcaggcaatgaacttcgtaaaaccatctcttatgtcttaagcgggtatgggctgcaagaaggatgggtaattttagggattaaaggagccagccatgagtga

SEQ ID NO: 47875 - DNA, 144 bp, Acinetobacter baumannii
atgaaactaactaaacagcaacgtgctgagctaaaacaaaagtttggtggacattgcgcttactgtggtgatttgcttggcgataatacgcagagatgtgccgccgtgaaggtatgcctattccaagaaatattcttaagttaa

SEQ ID NO: 47876 - DNA, 126 bp, Acinetobacter baumannii
atgaccaaattcgagatttttagctggggcttactcatttcgtgtgtaacagcagtactttgcggtgcggtggttttgtggtggttggcgcgtaaagagcttgatgagaaaggaattcaccaatga

SEQ ID NO: 47877 - DNA, 771 bp, Acinetobacter baumannii
atgaatgcattgagcaaacaattcaaaactgagctggtacaaactaatcagttttgccttaaacacaatgagttaatggttttactaattggtcgtccagtttgccagacatgtgcaaatgaagcgtatgtgaaatcacaaattgaacacgcacaccaagtcaaccttatggtacgcgagaaacattttgccggagcaaaactccctgagcgccacaaggaaagcggatttaaaaattatgtggtgagtattgatccgcagaaagaagctaaagctgcttgccataaatttgttcaagattttaattcagggaagaagcgcaatctgattatggttgggcgtacaggaacaggcaaaacccatcttgcatgtgctattgctcgtaacgttttagacaagcgtagttatgttcgttacgtcacctcagaagacatggcaaatgaaattgcgactgcatggacaaagccagatgacaatgaagcaaatgcaatttttcgcttcacggactgtgatttattgatattggatgaatacggtttgcacgaccaacacgagagtcgattgcagctcgttcataaagttttatatgcacgttatgacgaaaaaaaaccgacagttttaatttccaacatgacgcttgaatctacagaaaaggcgcaaggtttgaaggaaaacttaggggaccgtttatggtctcggtttcaacatgacggtttgacagtagttgaatgtgactgggatgacttgcgttttggtggggcgaatacatga

SEQ ID NO: 47878 - DNA, 279 bp, Acinetobacter baumannii
gtgggtgcacaagcagagcaggttttaaaaatgccaaattatgaatttcatcttggcaacttcaatgctcactgggaaaacaaaattgatctcacggaaaaccaacgaactcgaaagtttgcaacttggttaattcaggaattcacaaagtcgataagacctaaaaaacaaaactcaccaatgaaaactgcaccagcaagagacgtaaacagtgcttggggtgattcaaaacagtatgcaccagccacagatgatatcgatgtaggggagatgctatga

SEQ ID NO: 47879 - DNA, 702 bp, Acinetobacter baumannii
atgttgttagcatcgccaaatggtattgctttgacgacgcctgaaaatattattttgcaagcgtcgcaagatattgccgaaagtgccagcggttctattaatttaagtgcgcaaaaaaatattattgggcacgcacaagacaaaatcagtttgttcgctgctcaaaaaggtttgcgtgcttatgcagcaaaaggaaagctcgaactacaagcacaagacgatgctattgaagcaattgcgaagaaggtgattaagcttatttctactgaagataaaatcgagcttacgagtccaaaagaaattgtattaacggcaggtggttcacagctcaaaattaatgccaatggcgtattttcaacaacaggtggtaagtttgaaagtaaagctgggcagcatttgtttacgagtggggccaaggtttcttatgaggttcctcaactgccaagtaccatgatgtatagtaataaattagatgtttatgatttattttgggattttgatttatctagattgtcttatgtagctaagtttaaaaatggacgagtttcgactggctctttggatgagaatggtcgtactgcacgaattagttctgattcttcagaacctgctgaagtttttgtggatacaaatacggattgggttgttgaaattgaagaagaagtttctcaagttgaatctcaaaatcaagatattaaataa

SEQ ID NO: 47880 - DNA, 888 bp, Acinetobacter baumannii
atgaatacggaattaaaacataaactttataatattacttttacattacatgatttaacacataaacctattcctaatttatattacgaaattaagaatgggaaggatttggtaaaaaaaggtaatacaaatgcacaaggtgaaatcacgcttaaatacgtgggaggaaatacactaactctttttgtaagaaaggatatagataatactctgaaagaaattggtaaagtacataccccaagtaaaaatataaaagtaaagcttattagtccaaaaatgaaatttgatgtaactctattacctcatcaaaaacaaggtaaatattggagaggaacatacaaagttaaaagtggagatacattatctaaaatagcaaaagagcatcatacgactatttccgctttattagctttgaatccaaatataaaatctccacatgaaatatatcaaaatgaaaatattgatatagttgaaggaaacgcagatgcaataattaagcttgatgaaaatatgactgttaaagtgcccccacataagaaaacgggaacagtttctattgatagaaagagtaaatcaacaagtattactccacaaacagatacaacaaataaaactgcagaaccaaaggttgggcagactaaactacaaccacctgtgaccaaaaaagagcagtcagcggcatcggattctaaatcaattcctcaacagaaaacgtcaaccgcaaccactcaaaaaattgaagtacagcaagaacataatgaagataaaaaaccagtagctgtagcaagtttaagtggatgtgtttgtaaagattatgatttaatttgggggaaaactacaaaatttgtaaattgtgagtttagaaggctttgttgcacaaagatttga

SEQ ID NO: 47881 - DNA, 1419 bp, Acinetobacter baumannii
atgtcagagaaaatttcacgccgagaattaattcaaaaaagtctactcggttttggggctttatctatacctgttgcttttacaggttgtaatgatggctcagatgatgaaagcccagaaatacaagcagattttcttcatggtgttgcaagcggggacccactacaagataaagttattttgtggacacgagtaacaccgacacactctggggtgcgcttaaaagttgtatgggaaatttcaaccgataatcagtttaaacaaaatttaaagacgggaatggttgaaacaagcaagactgatgactttacagtgaaagttgatgcagctgggttacaagcagatacggtgtactactaccgttttaaatttggtaataaagtttcaccggttgggcagacgaaaacattaccaacatccaccaataaagtgagctttgcagtatgttcttgttctaactatcctgcgggttacttttatgtttatcgggaaatggcaaaacagaatgttgatgtcattattcacttgggtgactatatttatgaatatggggcagatggctatgcgacagaagatgcaaccaagttaggccgtaatttacctgccgataataataaagaaattattaaattagatgattaccgcaaacgttatgcgctttatcgtcaagataaagatttgcaagcagctcatcagcgccatccttttattgtgatttgggatgaccatgagttggcaaatgatgcttggcgtgagggggcggaaaaccatcaaagtaatgaaggggccttttcggaccgtaaattagctgccctacaggcctattttgaatggatgccaattcgtccagtttctagtacagatcatttaaatatttatcgccagtttaactttggctctcttgttcagttaaccatgctagatacgcgtattattgcgcgtgataagcagcttgcatatacagactacatgatggctacaggcttggatattgctaagtttcaggcagatttaactaatccggtgcgtactttgatggggtatacgcaaagagattggttagtcgataaattaaagcaatctacagcaacatggaatgtagtaggacagcaagtattaatgagtaaaatgtggattccagctgagttgttggcgtctttagggcaaattacttcaggaggaacttcgcctgaagcgcttgccaagatgaatgcacaaattaccgagttggtcgctttaaaacttcgtttacaacaaaatgatccgacattaacagcccaagaaaaagcaagaattatgacggttgcgccatataatctcgatgcttgggatggttactatgctgagcgagagtttgtgtacgataaattggcagagtttaataaaaagatcattgtgttagccggggatacacattga

SEQ ID NO: 47882 - DNA, 1164 bp, Acinetobacter baumannii
atgcgtgctcttacctatcatggtgctcgggatgtacgagttgaatctgttccagatccagtgattcaggaaccagatgacgttattttaagggtgacagccaccgccatctgtggctcagatctgcatttataccggggaaaaatcccggccactgaagacggtgatattttcggccatgaatttatgggaattgtagaagaagtcggcccacaagtaaccgaagtcaaaaaaggtgatcgggtaattattccctttgtgattgcatgcggtcactgttttttctgtgaacatgaactaatggctgcctgtgaaaataccaataccggccgtggtgcaattctcaataaaaaacagattccaccaggggcagctttatttggctttagccatctgtatggtggtataccgggtggtcaagctgaatatgtgcggatccccaagggcaatgtcggaccatttaaagtgccaggctccctgcctgatgaaaaagtattattcctgaccgatattctaccaaccgcctggcaagcagtaaacaatgcccaagttggtcgaggttccagtgtggcgatttatggtgctggcccagtcggtctgctggctgctgcctgtgcgcggatgctcggtgccgagcagatttttatggtcgatcaccatccttatcgtctgcgtttcgcacatcaaacctatggagtgattccggtcaattttgatgaagtcgatgccgctgaatttatcattcaaaataccacgggttatcgtggagtcgatgccgtcattgatgcggtcggttttgaagccaaaggcagcatgctggaaaccataatgactaacctgaaattagaaggttcgagtggttcagcgttaagacaatgtattgcagcggtccgccgcggcggtgtggtaagtgtacctggagtttatgccggtccaattcatggcttcctgtttggtgatgcctttgacaaaggtttaacctttaaaatgggacaaactcatgtgcataattacttgccgcagttgctagaacatattgaaaatggagatctgtctccagatctgattattacccatcgcatgaaactggaagatgctgcggaaggttaccgtatttttgataaaaaagaagaagactgtcgtaaagtgattctgacgccataa

SEQ ID NO: 47883 - DNA, 603 bp, Acinetobacter baumannii
ttggatgtaaattcaacatcgatagtaggaacgtatggaactttaactgttaatttagatggaacctatagttatcaagctaatggtaaaattgctgatcttggtaaagatgatgtctttacatataaaattgagacattggatggtactgtaaacacgcaaactttaacaattaaggtagatgctgataatgttttgattggtacgccaaatgcgggcacagcagggaacgacattgctgtaagtcaatctacaaatgaagtcttcacattaggtgatggcgctgatttgttaatttacaatgtacttaatggttcaagcccaacaggtggaaacggtactgatcaatggctggattttaatatgtctgaaggcgataaaattgatgtgtcatctttattatcaggtgcaacagcaactactattaataactatcttagtgtgagtattagtgggaatcaggttactttattggttgaccgagatggtagtggtggtatttcaactcctaccgcactgttaactttaactaatgaagaccacgcaacaaatcctattactagtttagtagatttgttaaataacaactcaattatctattaa

SEQ ID NO: 47884 - DNA, 1176 bp, Acinetobacter baumannii
gtggcggtatttttagacttcaaaagacagctcaagctttggttagaacatatcgttcaccatgtttcagaccttcaagaagaaactattttatttatatcatttggccctaaagatcacagatgtagcgtatggcatagtgaaaaaacagtgcttacacaagcaactctacaattatttgattttattgatgatcagttttcgccagatcaacttccagactacataaaaattgatgttgcgtacaatttagaaaagcaaagttggaaccaaatagagcagcaggttcatcaccaatttcacaataatcattaccgcagaggtattggatttgatgattcctgttcggtagcttttctggagcaagaaatatatggaaaagccattattcggggcttaagttatgacaagccgaacttttttgatgaaacaaatctgaactatgcaattaaacaaaaatattgtgcaacaaagccggaaattaaacttcagtcactacaagaagtgtggactttcgatacctatgcaactttttatgaaaatggacaatttattaatttagcaagtcgctacgatgcaaatggtattagagccattgctagcaataaaaaacagcactttagagacctcattgaaaaaaatgcagcgtttttacatagccagattcaagaaaatggcaaattcatttatggatattttcctgcttatgatcgtgatatacggaactataatacggtacgtcactgtacttcgctttacgcgcttttagagacttttgaagtacaagataaacctgaatattggcctaaaattgttgcagcaattcaatacgcacttactactttctataaagaaaaagacccaataactgcgtttatgattgatggtaaagaagggcagctagaaattaaattaggtgcaaatgccgcagctattttaatgttaacgaaatatcaagaaatcacaggaaaagatgattatttaaaatatgcagagaaacttgctcatggtattttagaattagtggatccggatggattaactactcatgtactaaattatccaaattatgatttaaaagaaaagttcagaatcatttattatgatggagaagcagcattagctttattaaggggcagagtaaaacttgaagtgcgacataaaccacctaattaa

SEQ ID NO: 47885 - DNA, 1281 bp, Acinetobacter baumannii
atgattagcgataaaactcttagacaattaaattcaatcgattgggacttcattgagccattacatggtacaagtaaaattttacattggtatcctggtacatttccttcagagcttccatgttcgttaattcaaggattaagcaatattgatgatctagtacttgatccatacgctggggtaggcactactggcctagaagctctacgtttaggtagaaaagtttggttagttgaaaataatccaataggctgtttagctagttatgtgggtgggtgcttattattaataaaaaattatgattccagtctagtcacaccaatattcaaaaaaattaaatatctcttacaaaatgtattctctgaatcatcttctgaattagatttccctattgattattcattactacatgatatcgataatattatagataaactggttaatcctaatcctagtatctttttaaattacttattaaaaaatcatcctaagttagaaaatttgagcccatggatagaaaataattctctagataaggtctctcgtataattaatcagctttatctgaatgacgagcttaatagttttgatcgtttacttattattactatgctttccgctgtattaaaatcatgctcatcccaaactcaaagttggggtcatattgcagatcgtgtactaccaaaagaaatgatcgaaaaggacgttgtattaaactgtctaaaatggctaaataaaactgaaaaaagtattacgaatacagacgttatttctgataaaaaattcaatgaatgccgcctatgggtttctcactacaattggggaaatgatatttcttctctagaggcacctccatttccagtagatttgctagtaacctctcctccttatgctgatgcaattgactatacatttgcacaaagactatccctatacctaattggatatgatgattttcaaattaaaaatataagtaatgtcgaaattggtgctcgtagaaaaagggccaaatcgacatcaacaatcaattgggcaaaggaactatctgaagccttaaatattcaaaaaaggtttctatcagaaaaaggtttcttatcctttgttttaccccataaagacgctggccgaaacattggagtagaagctattacagctaatttagaagccgatagttatgaactcatatttgaagttgatcgtgctattcgccagttaaaaacaaggcaatcttggacatctattaagaaagaaattgttcaaatttatggtaaaaaaagatga

SEQ ID NO: 47886 - DNA, 423 bp, Acinetobacter baumannii
atgaaactcaacaaatctactgttgatgctattccattaactgaaaaaggtcaaaaaatatatagagatgcagaactgatcggttttgctgttcgggtaactaataaaagtaaaacctatattgttgaaaggaggcatgaaggtgaactctatcgagtgacaattggcaaaactaccgatattcctgcaacaaatgctcgagcaaaagctcagatgattctggcgaaaatttcaaacaatgaatatgaaaagcctatcaaattaaagaaggttgctaatcctttagatattacagtgaatgaagctcttcaaatttatattgatagaaatgactttagaccaaaaacaattaggcagtaccgtaagtactttgatttatatttggtgaaccgtaccgggtttgtcggagagtcaatattctga

SEQ ID NO: 47887 - DNA, 864 bp, Acinetobacter baumannii
atgtcaaaaaaatttgaagattttgataatccaagacaaaaggcattactggggatgaagaatagtattcctacagaacagtgggaagaaaatctaaaatttctcaaacaattaagagcgagaattgctgaattaccagtatgtaaacatccggcgatcgaagttttaaataatggattgcttgataaattcactttaacaagaattcatttagaatatcgtcatgcgattgttcagatctttactgatgccttattaatggcccagttccagacaaaacaattggagcctaaactccattctggagctaaaatgtttccacgtgttttattaagtttaaatgtacttgatgaatttggttttagaccaggaacagacccagacaattattatctaggtaatccggagtatgcacattatcctttatatgaagatttattaaatgattatggtttgagtgagaaggatcgtagagagtatcatccttcaaaaattgcagatcaggtaagaaattttctagaatcatcttatgatagttatattaaagtagttgctttacttgcagtagcggaagaagaagtgattctttttagcccaccacttcgtgaagcgactaaagccattggcgtggatgttgaaggtgacggctattaccatgttcatggggtatctactgacgaaacctcagaagcagcagatgatgatcatgaagatgatctctggtttgcgttagcgcaagcaataactaaagaagactatgagagcttaacaacgctttgtatggattattgtgctttatggaatgagttttgggatgcacaaattgctgatattcactacttagaagcaaagaagttagcataa

SEQ ID NO: 47888 - DNA, 1329 bp, Acinetobacter baumannii
ttgcaatcaacgtctaacgctcaagccttaggccctggtgcacgttatgaaattgatgccacgatcgctgatatttatcttgtttcaaattcaaatccagaaagtatcgttggtagacctaccatttactttgtgattgacgtctttagtagattagtcgcaggcttttatataggttttgaatcaccttcatatttagctgcaatacaagcattgaatatagcgatgaccgataaggttaagtattgtgctgagtatgggatctcaattcagcaagaggattggccatctgttggtctacctgatgctttactcgcggatcgaggagaactactcggttatcaaattgaagccttagaaaaaactttcgctgtaagactcgaaaatgcgccagctagacgtggtgatgctaaaggcatagtggaacaagctttcaatacatatcaggcttattttaaaaaagaaggtaagggaaaaggtgttgttgaaggcaccactgtaaaaaagactggtggtaatgattaccgtcaagatgccacattaaatattcaccaatttactgaaatcattcttgcctgcatcatctcgcataatcaatttcatgtactaaaaacgtatgatcgtgagccagacatgcctaatgacttaccaactattcccttacatttatggaattggggtattcaaaacagaacaggaaaattgagaagtgttccagaagaagctctcagaatcgcattattgccacgtactaaaatcacaatatcagacttaggcatcaaagcatttggtctttactacctagcgaaagaagtacttgatctcggttggttacatcgtaaaacaggaagttctcgccctcaaaaccttgaagctgcatatgatccttactcaatgaataaaatttatatttttcctaaagataatagtcttgaatattggatggggtctctctccgatcgatcgagagaatttatggattgtactttgtgggaagtcaaagaaaggcaaaaagcccaaaaagagcaccttgtacagcacgaactacaggcttcaaaaaaacgaagagagcttgaagcttttatcagtgagaaacttaaaactaagcatccgaagagtccaattaaaccatctcaacgaaccgctgaaataactgaaaataaagcaaaagaaaaaaatattgaacgcaaagctaaggtaaaacagcaagaaatattggatacaaatattattccaatgcctaaactgaaaaccgcaattaagcctcaagatgctgaagcggttcattatccagacttaacagacgaattatttggtgaggatgactaa

SEQ ID NO: 47889 - DNA, 237 bp, Acinetobacter baumannii
atgactttgccattaaattttattcaagcacgttacacgcctagttttggtgaatataaagacaatccatttattgaagctctaccaccaatcatgcaagaaattgcagatatcaaagctaatctgattggtaaggtggactttaagcccgaagatattctgagatctaagaacgaaagaattcatctttcatctcaacttcttcatcagttttttcaacccattactcggcattga

SEQ ID NO: 47890 - DNA, 1401 bp, Acinetobacter baumannii
atgaaaaaaacattattatttgtgtgggctatagcatatttgtcagtcacttatgctgctgatctagctccaacaatacaggacgctcaatatcagatttctaaagcagttattactaatagttgtgaatctggttttgacttactttcaggaagtagatcattctctcaacaagagattagtggccctttgccgtatattcgctcttattcaaacccactattaccagataaagaagggacgatagatttctataataagttagggggctatggaggatggagtgataactatacaaattatttaatatataggggaacgagtacaagtgggaaaaagatgttttcacttagactgcctgacgaatcaaaaagaacgttcttctttgaatatttagaaggtggggtatataaatatcaacgtatagcatcaactgcaacaagaattgataatgttccgatgcctgatagtgtcacattaatgagcaatttaggaccatatagcttcaaaaaagtgaatggactaatggttgtgaataaaaatggtgtggactatacctttaatagcgcaggacgcgtgagtaaaattgataatcagccatctgggcaaatcattaaatatacctatgtgaataatcaaatttcaagaatcaatgataacaggaataatgaacttgtatttacctatgacccagcaaatggtgcgtatcttaaaatcgtacaatatcaaaatggggtagaaggacagtccgtcatatatgatggctttatggagtcaacagaaagctatttgggaggaagttatactcatcctgttattagtaaaattacctctacattaacaggtatcacggagtttgaatatcaatcaggatttcatccgctagtccgtaaagctatttttgatgaactggggactatacctgaagctgagaagcaaaaaatttatacagcaacatttctttcctttatgcaaaccgtaaaaagaaatggtaactctgtgatttttgtaaattctcaaaattttggtgatgagtttgaaattaatgcaattaccagtattaataataaaatgaaggttcggtattcaagcaaaaatgaccaaggtttaatcaatgtaacacacgatttagaaggggctcagcaaacatattcatttactactagtgggaaagatcagttttcaaccacaactgctagtggtagttttccatgtatgactgtgaataacttacccattagtcaaattgtaacggataactggaatggtttaactttatcttcaactgataaaaaaggagttctgacaagttacagctatgatctacgtaatcgggtcacaaaaatagaagaagctgttggtactccagcttacagggctacaagctatacgtatggttga

SEQ ID NO: 47891 - DNA, 1161 bp, Acinetobacter baumannii
atgtctaattctactttcttgcaccatgatttaaagttattaaatccatcttttgactctagcttagtagatattttgactgagttggaacatttaagacgttatcgtttagatgatggaagtacaccaacatatatttttaatgagttgcgagatattttccatatcctcgaaagtttatcgtctgctcgtatcgaaggaaatcatacgactctagctgactatgtagaaagtaagttagaggaacagccgcaacctagtgatcaaattgctgaaattgcaaatattgaacgtgcgatgaagtatatagaggaaattataaagccaggggatactattactgaaactcttataagagaattgcattcaattactgtcaataaacttatccgtgaaggggataaaaccccaggagcatatcgttcaggggcggtacgtatctctggtgcagaacatttacctccaccggcacatgatgtacagatgtatatgcatgagctggtcaattttgtgaataatgaagatccttctaaatatgatctaatgaaagtagccttagctcatcatagatttggttggatccatccttttggaaatggtaatggtcgtgtagttcgtctttttacttacagtcttttaattaaatatggatttaatgtaactacaggtggaggaattttaaaccctacggctgtattttgtaatgaccgtaataagtattatgaaatgctttcgattgctgataacggcgatcctgatagtcttgaacagtggtgcacttacgttctggagggcatcctaaccgaacttaaaaaaattgatcaattaaatgaatatgattggctaaaaagaaaaattttactaccagcattgcaaattgctatagaaagacaacgtgtgactgaactagaagctcaaattgttaaatatggaattgaaaactcagaatttaaagcggcagatatagaacatattttaaaaggaatgactaagactcaacggacttatcaaattaggaaactaaatgaagcgaaattgattcaaccgatatctccaggtgctagaagttattacatttgtttcctgcatcaaagtctttttaggggagttatcgattgtctgagaaaagaaggttttatatctaaacctcttgaaggctaa

SEQ ID NO: 47892 - DNA, 495 bp, Acinetobacter baumannii
atgtttaactatttaaaggaaaaaaactttattattgctgaaaaaaacaaaggggaatttaattttatctcattattaagatggtctcttgtaattatatttatatggtttggagggatgaaatttacacattatgaagcaattggaatagctccatttattgaaaatagcccaattgttagttggttgcataatctatttggtattcaaggagctagctactttttgggttgcatggagttactaactgcatttattttattacttggtgcatttaagccaattttatctgcattaggtggtttaatgtctgcaataacatttttaattactctaacatttatgcttacaacaccaggtgtgatagaaccgtctgctggaggttttcctgctctttctggtgctccagggcaattcttattaaaagatctagttttattagctgcttcattgtgcattttaaaggcatcaataaatcgaagaaatccttattaa

SEQ ID NO: 47893 - DNA, 441 bp, Acinetobacter baumannii
atgacgtataagaaaacaattgagagtattgataaattaaatgtagatcaatatcgtgtgacacaaaataatggcacagaacgtccatttgaaggtgaatatgataagcactttttacctggtatttatgttgatattgtgtctggtgagccattattttcctcaacaaaaaaatataactcaggttgtggttggcctgctttttctaaacctatagaaaatgttactgagcatgctgacttttcacatggaatgcgtcgtgttgaggttcgctcaaaacacgcaaatagccatctaggtcatgtctttacagacggacctcaatctgatggtgggcttcgttattgtattaattctgcggctttacgttttattcctttgctagaaatggaaagacagggttatgctgattatataaaatatgtggaggtaaatacctaa

SEQ ID NO: 47894 - DNA, 486 bp, Acinetobacter baumannii
atggaacgtgcaatattagctggtggttgcttttgggggctgcaagatttgattcgtaaattaccaggtgttgaacatacacgcgtaggttatacaagtggtgatattgccaatgcaacttaccgtaaccatggtacacatgccgaagcaattgaaatcatatttcattcaaatataattagttaccgtaaattacttgaattttttttccaaattcatgatccaagtacgctaaaccgtcaaggtaatgatattgggacaagttaccgctcgggaatttactacactactgaagaacaacatcaaattgcattaaagaccattcaagatgtaaattcttctgggatttggccaggtaaggtgcgaacagaagtaaaggcggcaagtgatttttgggaagctgagccagaacaccaagattacttagagcgataccccactggatatacatgccacagagtccgtcctgattgggttttgccttaa

SEQ ID NO: 47895 - DNA, 492 bp, Acinetobacter baumannii
gtgcaacaaagccttttaaataatgaaattggtacagtggggcaggatattaaatatggacaagtcgcaagatttaatattttaaattctttaagtgaagcagacttggttacacctgccacgtgtaagcgtttattcggtgaacgtcctgatggtaaagaatggcaacccggctgtttgaaaataaaacaaagtacggatacaccattttctaaaggcagtgtaactatagatcaaaatggaaatgtaatttatacaccaaatggtaattggcatggtgcagatatttttagtattcaagtcgttacaagtgtatcgagatttaacgatggttcagatttccaatatatctcgattccagcaactgtagtccaggaacctgtatctggtattgaagataaatctgtgagtacgggtggtgggggaagtgtcggtggtggattaattttagggttatttggattaattgcattacgccgtttcaagtcataa

SEQ ID NO: 47896 - DNA, 1116 bp, Acinetobacter baumannii
atgaaaaattataaaaaagcagtattagcattagctgtactagcggctatgcctctttttgccgatacagcaaatcaaagaatcgaagtaacaacttttgcagatgaagatggtgaaaaccctaatgcttgttcgttaagggaggcgataaaagttgctgaaacacgaagatctgattacggatgtacagtttataacacttctaaaagtcaggtcatccagctaaaagcaggaacttataacttaaataaagaactagctccaaatgcagatatagcgatttatggatttggtgaaaaagatcaagataaaaattggtcagagaagagtgttttaaccaatgattatccagcattacaaccgttacagacgagaattaatgctgctggtaaatcacgtatctttaatacggcagtaaataaacaacccttattccttcaaaacattattttggaaaatggttcagctccagattttggtggcgctatttatgcaggtggtaatgttaccttattaaatagccaaattttgaattcacaagcatctaaaggcggtgccattttcctcggtggcgataatgttaatttatctgcaactcactctttgattcaaggtaatactgcaacagcaggaagtgtactttcaatgagttgttggaatggtacagcctatgcaaaacgggaagtaacatttacctcttctagtattatgaataatggttcaaatagttccaataatacttttgagttctgtggagagccgaaagcaacctttacaattaatacaattgctcgaaatattgcaaatacagtcaatggtagcattttgaaatttactggtgatgctactcctaacgggacacctaatccttcgaccatacttagttctaacagtagtttaaccttaaagaataatactattgttgaaaataatgcttataccacgtttttatatgacacattaggaagtaaagaattaagatttaacttaattggttataattctggaatttatgcgtgtcattattttataggaccggccactgatttaaaaaatgctggtttcatactatcctttaatagacctcttgcgaaagtaaaaaccacctcaatctaa

SEQ ID NO: 47897 - DNA, 1662 bp, Acinetobacter baumannii
atgaatgttgagttttctgttcctagaaatagcgcggatattggtacaggtcatgaaggtgatgttgttattcaagtaagccaagacaatttgatagcagttgcttctggttttagtgtattggtggaatattttgatggaactaattgggtacagtacaccacggctacaactacaaatggaggtttaattgctgatgcgctaggtttaggggttctagggattgtagatgatggcaaaacaatagctgtgcatctgacaggcgtgccagaaggtcaatatcgtgttgtagtgcagaacgatagtagtgctattggtgatttgttagacgacttaacattagcacaactgggtgaccaaggtattttattaggagctgacaatcaggatgctgtattagatgcggtagaaactgccttaaatggtcaagtattaactttaggaactttagtaagaaatgttttagaaccactgttaaatgctgctaatgctgctggtgaaaccttggctgtaactgatatcgttgcagcaattgtgcaaataccattagttggtagtctcttgggaggtgttgatactgttttagattttattgctgatgccttggttgataatctacttactgtacttgagtttaccaatgtaaccatcaatggttcagaaacttattacactacaccagaattagcgggtaatgtctttgctgacaatggatctggagcagatgatcgtggtaatagtaatgcagcacttgtaaccaaagtagatggagttgatgtccctactgatggtacagatgccgtgattaaaggtttgtatggtaccttgtatattaataaagatggtgtttatcgttatgtgctgaatggtagtgtagattctaatggtcaggtagatgattttacttacactttatcagacggtactcaatcagatacagccgttttaactataagtgtggaagatgttattgcaccaaaagcaccaattgtttcttcattggatgaaaccaccgttactggtgttgccggagctgcggaagctaatagtgttattaatgtctatggtggtacagacagtgatggcgacggcatcccagatacattacttggtacaactacagctaatcctgatggtagttatacagtcacgttgaaccctgcaatcgctttaggggacacagtggttgttacttcaaaagatgcggctgacaatatttctacaccaacaattgcaagtctgcataatattgtcgcgcttgatgatcctaaccaaactaactatgagttatctactacagcagatcgtccaaatattagtggtggtatttttactttagctaatgctggtgttcttggagatttaattgatttagatctgagtgctacatccgctcctggtgtgattgtcggtacaaatgaacaaatcactttaacattaacggcaagtgggtctactggtttagatataagtgcagttgggaatttgattgatgctattttaggtggaaatattggtggtagtcttgatttgattattgctaaacaaacatcaacaggtagctatgaagtttataatactattgctaatgcatatacgttaaacaataatgtttggtggtgtttcaaaaagtatgctgaaacaaagcaggttgaattttga

SEQ ID NO: 47898 - DNA, 267 bp, Acinetobacter baumannii
atgcgtcaagcaatgttaatgagggctaaagcattgaattgcacgtttgataagcaacgtggcacttggattagtccacctgaatttaacggtatctcagatcaacaaagagatgaacttcaaaactttattgctgaacgtggcctcgatgtaaaaacagtttgtgagcacttaggtatcgatgcccttatccaaattgaagcggcaaaacttaaggcagttaaacaagaaattgaaaccttagcgaaaacggggatgacagcatga

SEQ ID NO: 47899 - DNA, 975 bp, Acinetobacter baumannii
atgaataatctaatcactgcagctgaagcatttgcagctcttcaaaaaggtaaaactgttctatgtcgtccaattggagacatgttggactttgccgatttagatcaattccccgcttctgtttttggcaaaccgggttttgaattctgcatcaaaatcgaaactattgaactggctggcattacattcacaaagccattaactattgatgagtatgaagacggtcaggaagtttttgtaatcagtacatattcacctacggtctatgttttagatttcaaaactaacgcattaattgattctattaacagtggcttcgttcaacgtgatgcagaaaacgccaagcttcaattaaaagctttttcaaaagcactcggtattgaaatcaacaatgatttaagtgttattcgtcttggtgaggaacctaaaaaacagagaggcaaaaaatcaaaagctgagacaccagctaaagtaataccttctgaagtttttcctaccaataataagtcaacgattgttattacagaacaaactaatgtcacagcttccgaggatctattaactccagtatctaatgaacttgaatcagatccagaatatcagaagacattagatacccttctccagcgtgttaaagagtcaaaaacaccagctgaggtaaatgctgtttatcgatacacccgtacatggtcagataaacaaatggatcctctactcaaagctactcacaagcgtttgactgagcttgcagatgaaaagcctgtagagagtgaaccaccttcactaatggtccagatccaaaacgcgcccgaccttacaacgctagatgctttggaaatagatgtggccgcacgagatccacagattcaatcacgactcatggattttgttaagaaacgtcgctttgagttagaaaatccagcagtttctcaaccagaagcagaccctgattatctattagtggatggcttctaa

SEQ ID NO: 47900 - DNA, 570 bp, Acinetobacter baumannii
atgttaactcaaagtcagcttatgcaaagtcaggcaattactgctatggcacaactgccttatagcccgaccacatgcattaatagtcttcaacaaacttgccagcaagtattgaaaatcaaatctatttactcattacaaactgatgaggatggtcagaaacgtatggatttaaatcaagctggacaccagtttgcttcaagcatgtcaatcataaaagatagtcctttcatgaatggacggatgatgcatgccaagatgagtccgttcctagaaaccagctcttgtttcttcaatcagagtggactcctatatatcccacccaatcaagagcttaatcaggattttattctgaatagtattcaataccttaataattccttattaacacgcgaatatgatcaacagcttaaccactggaatgagcagtttaatgaaggtgaacaacagtatgatcagttcatgaaagaattaaaaaaagctgttaaaggttgcgacatgagtgaggtggtttgtgtctatcctttaaatcaacacttgttttccaatgttgcattttccagccaatga

SEQ ID NO: 47901 - DNA, 471 bp, Acinetobacter baumannii
ttgcatattcatcatggtgatattgaacatatttttcctaaagcactagatcaatccaagcgttatgaatggaataatttaactctttcatgtgaaatatgtaatcagaataaatctaatcatgatcctaatttgaatcatattttaaatccgtatattgataatcctgagagtagccttattttttttggtaccttcgcgcatggtatggataacaaaggtgaagcgacaagatttttattagagctaaatagaacagctttggtagagaggcggcaagaacgtctagataaaattagactgatagtgaaggagttaaataacacaggtttaccaatagtcgctagaaaagctatttatcaggacttaattgagaacgaggcttctcatgagagtgagtatacttctatggttaagctcgcgattaggtgttttgatgcaagtattccaactgaagtaaaagctgcataa

SEQ ID NO: 47902 - DNA, 705 bp, Acinetobacter baumannii
ttgcattggttattacgtcaatgcaagtttaagaaaaaagactttcctaaactctaccaaaaatatggttatgtaaatattgctgcatttattcgatggtgtgcaaaccaagaaagaatgctatcgaacattaatgatttggaagaagaaaaatcagataaaaaaattctgtcctatacagtgaaatggaaaaatattgaatggacattcgactgttctccaaatgactttgagggacataaaggaacatcaattgactacccacactaccactttcaaatgagaatcgatgggcagcagtttattaacttcaatgactttcatttaccattccatgaatatgatttatttatattaaaaataagtatggaacaaggtgattggtttagacacaatttcggtgctatcggttccggtatgcaagaagctattgatgttgatttaaatgatatacttgagaatacaactatctcagaaaatcaagtcgaagctacatatcacttctcaacattcattgatgctagcaataatcctatctctggcgaagaaatatatgatatacagaaagaagcagaacgaaccggaaaatcttttgcttatgtagctcaacataggttaaaagaacgtgcaagtgttcaaacaattattagcccagcagattcaatacctgacatcgcatctagaacggaacacaatcgaagatag

SEQ ID NO: 47903 - DNA, 216 bp, Acinetobacter baumannii; identical to SEQ ID NO: 42270

SEQ ID NO: 47904 - DNA, 198 bp, Acinetobacter baumannii
gtgagcggtcttttagtttttataaccattgcttttcttactttatcaagcccaggcccaggcgttttatttacagtaacaaattcaataaattatggtgtgaggacagctttatttggtattagtggtttaattattggtatgtttattatcgccgtgatttctgcaagcggtgggctttgttgcacaaagatttga

SEQ ID NO: 47905 - DNA, 1392 bp, Acinetobacter baumannii
atgactaagaaaattagttttaatgcttttgaaatgaattgtattgcccaccaatctcctggattatggcggcatcctcaagatcgatctgttgaatataaagatttagaatattggacagatttagcccaaattcttgagcgtggtttttttgacggtatttttattgcagatgtgcttggtatttatgacgtttatcatcaaagtgctgaacatgctttaacaggtgcagtacaagttccagtcaatgatccgctacagattgtaccagcgatggccgcagtcacaaagcacttgggttttggtgtcacgacctctatttcctttgaacatccgtatccttttgctagacgtattagcacgctagaccatttaaccaaagggcgagttggatggaatatcgtgacgtcttatttggaaagtggttcgaaaaacttgggcctaaaaactcaggtcaaccatgataatcgttatgatattgctgatgaatacttagaagtcctttacaagctttgggaaggttcttgggaagaaggttcggtactgcgtgaccgcgaaagcggtatctttgctgactataaaaaagtgcatccaattcagcacgaaggtaaatactttactgtaccgggcatccatatttgtgaaccatcaccgcagcgaacgccagtactctaccaagcaggtgcgtcatcacgagggcagaagtttgccagtcaaaatgctgagtgtgtatttattgcggcgccgtctaaaattgccactaaaaaagtggtacagggtattcgtcaaaagttggttcaagaaggccgcgacccgtactcagttaaaatttatgcacttttgtcgattgtcactgatgaaaccgatgcaaaagcacaggctaagtttaaagaatatcaaagctatggaagctatgatggggctttaacattattgtcaggctggtcaggtgtggatttttcacaatatcaacccaccgataaagttgaatatattcaaaccaacgcgattcaatctttattagattcttatgtaaatgcagatccagaacgtgtctggaccattgaagaaattgcaaactggaacagcttaggtggtaatggacctgtacttgtaggttcggcagaaaccgtttcggatgctctacagcaatgggttgaagataccgatgtcgatggttttaacttagcctacattttggcgcatcaaacctttgccgatgtagttgagtttattgtgcctgagttgcaaaaacgtggggtatatcaaacctcatatgcacaaggaacattaagagaaaaactatttggtgctgggccatatttgcctgaaaatcaccgcggtgcaaaatatcgtaatttaaaagaattaaaacttgctgaggcgagttaa

SEQ ID NO: 47906 - DNA, 264 bp, Acinetobacter baumannii
atgaaaaataaaattttgatgggtttggtaggtgtcagtattttgttggttactggttgttcttctgatttcgaaaagggtatgaaacaaagctgtaggaatacgggaggaagtcgcagtttctgttcctgcttctacgacaggatggaagaacattatggcaaagagaggctggaggcgattggcatgatgcaagtcaggatgccagaggatttcgaagaggtatcttttaagtctggtcagcaatgtgcacataaactttga

SEQ ID NO: 47907 - DNA, 723 bp, Acinetobacter baumannii
atgaaaagtgaaaatgagatatttgcgttagttgacgtgaataattgctacgtctcgtgtgaacgtgtgtttaaccctgccctaaatgattgcccaaccattgtgctcagcaacaacgatggctgtgccgtggcaagaagccaagaagcaaaagacttaggtataaagatgggggttcctgtatttcagattcaggatttgatcaaacaacataacattcaggttctctcgagtaatttctctctgtatggtgaaatgtccagacgctttatggagcttctcgggagttatgttgcacctggagagcaagaagtctattcaattgacgaatgcttcctaaagctcacaacgtatgagcacttatttgacctgacagaatatgcgcaagatatgagaactaaagcattccaatggttaggcctaccctgctgtattggaatcggtcgctctaaaactgaagccaagattgccaatcatttagccaagaagaacaagtattttggtggcgtgtgtaatttagttcatatggaccagtgctctgctgagactttactggcgcaagtcgatgtatctgatgtttggggagtcggcaggcagaactgcaagaaactcaatgctatgggcatccagtctgttctagatctgattaacgccaatcctaaagaaattaaaaagcggtggtgtttcaaaaagtatgctgaaacaaagcaggttgaattttga

SEQ ID NO: 47908 - DNA, 627 bp, Acinetobacter baumannii
atgtctaagaagttgcctatctacttctctgatgacgcatggtcatctttgcaagagctcatgggtccagagggtaagccaagccctaccatcaatacagttctagagcaaatcgctgttcaaaatgaacttgttgagaaattagggttaaccgcagtactacccaaatccaaagtctcaattccagtctctttagagcgcattcctgctggtcctgcatttagtatcaaggatgaacaagagaaagcactcgatctgaatgaattccttattcataaccctatttctacatttatcgcttacgtagacagtgaatcgatgcttgatgcaggttttgagattaatgatccgatcattgttgatcgcagtatagaagcaaagcactacgatatcgtaattgcattaattgataatagtgcttcgacaattaagcggttaatgattacaagcaagatgtctaagtctgaaatcaaagagattttcggagatgaagactaccctcttccagacctttggttaaaagctgagaatcctagatacaatcacatcattcccaacgacagtcagacaatatctatttggggtgtagtgacttttaatttaaaacgtattcatcaccgttcataa

SEQ ID NO: 47909 - DNA, 1152 bp, Acinetobacter baumannii
ttggatgatgccggtgtctataaatttattcttgctccaaattcctcaacctcgagtgctttaagtaacttattatctctgaacttattaggtaatttagtattatcgtctgacgatgtagtagcaaccattaataatacagatcttattactggtaatgttttatctaatgatactgctgcaccgataggtttagatttgtcaattgtttccattaaagaaactacagcaggtgtagatgaaactgtagtgtctggagctcctaaagtcattgaaggcaagtatggtactttaactatagattcaactggtgcatatagttatcaaatgacggctaatgcaactgctttaggtaaggttgaagcatttacttataccgtacaagataatgatggccactcaaaacaggcacctatttatattcgtttggactctaatttagttacattagattggacgggtaaaacaggactacaagaagctgataagttagtaacgcaactgaccgctgataataaggcttctgcaggtacagttactactttatttgatcaggtattaaatggttctggtgattctttaaatagtattcaggtaactggcagtaacggtgcattacctacttcacctcctgcgacaggtagtacggcaattccagatgattctgggcgttttaccctaggtgtagggcaaacagcatatatttctttcacatcaatattaccatcaaatgtgactcagaattttggtctaggaggaaatcaaaccagtgcttataatgtggttattgaactagagagagatggagcagtactagatactcaattggccacttggacatcaaccatcagtggtacaaaatattattataaagtgactaatacaggaacttcatcggctgattatgatttaaatattgcttatggtgatggttcaggattgtttaactggacgaatactactggtaagacatttggtattaataatattcaattagatattacaggtacaacatatacagcatctactgtatcaggtgacctaatctctaatgacttattgtattcaagtgaaccgtaccgggtttgtcggagagtcaatattctgagagactatcccgatgacaaaaccaaactatacccccgaaattag

SEQ ID NO: 47910 - DNA, 1404 bp, Acinetobacter baumannii
atgtcgcacttcaagttttactctgccggtaaatcgaataaagttatttggttggcactgattggggtgtttattgatgcctatgatttaacaacgctgtcctttggtattgagcaagttatctcagagttttctttaagccctgtgatgactggggtggtggcttcagcaattgtctgcggaaccattgtaggtaacctgattggtggttggctgacagataaaatcggccgttatcgggtcttcatggcggacatggtgctgtttgttattgctgcaattgttgctggttttgcaccaaatgtttgggttttgattttagccagatttattatgggaattagtgttggtattgatttgcctgtcgcaatgtcatacttgtctgagttttctaagtttaatggtagtagtaacaaggcagcgcgtttagctgcatggtgcccaatgtggtatgccgcttcttcggtgtgttttggtctagttttggcgctttattttcttttaccccctgagcatagcaactggttatggagagcatctttaattttcggagcagtgccagcgttactcattatttttattcgcggtaaatatttgactgagtcaccaatctggcttgcaaaccaaggtgatttaaaaggtgcagctcaagttctacaagaatcctatgcaattcatgcagtcgctacagttgaaaaagtagaaagaactgctgaaaagaaaaagcgtgagggttttgcagttttatttaataaaacctatttgccaagaactattgtggcaattgtgattcacatttcggtggcatttcagtacacgaccattgccttctttttaccttctattttaacgcgtttctttcataccgatgtcttgacgaccattaccaccacacttggacttaatttactatttgcatttacgggcgggctgttaggtgtatttgttgccagcagatttaaatctcgtcatgtgttgcttacaggctttttactccagtttatagccttcattgccttggcattcattggtgaacccggtaatagctttttactctacactgcaattggcatgctcgggctttggctttttgctgaaggttttgggccaggtgcacaaatgatggtttatccaaccatggcttatccagcttcgattcgtggcgttggggttggctttaaccgtgcggtaacaggtgttgctcaagccattgctttgtttgttttaccaatctggatggcgggatataaaaccgatgtttacctgattatttctatctttgcatttattcctttaattgtgattggattactgattaagtttgagcctactgcccaagatgttgatgtgatcgatgaagataaaacagaacttcctctcaataattcaccagtaatcgactag

SEQ ID NO: 47911 - DNA, 489 bp, Acinetobacter baumannii
gtgcaacaaagccatccccctgtattaacctatacaggtactcatgtgttaattggttcagactatttagagcctttagataaagaagtgatagaaacaatttactcagcaacagggcgaacctattgggcaaattcagaatcccaaagtgatgcgattattgctttatcgggttcaggaccagcttacttcttctatattctcgacagtatggtgaaaacaggggtgtctatggggctagataagcaatttgctttagatctaatacttcaagctgcatcaggcgctatagaaatggttcgtaaaagtaatgttcagcctagtgagttatgtggcaaggtcacattagcgaatggtattacagagtctgcattacgaatgtttgaattaggcaacctctctgatgatattcggctggctttaaaagcagcttaccatcgtagtaaagaaataagcttagaaattaatgcagaaattacgagacactag

SEQ ID NO: 47912 - DNA, 1284 bp, Acinetobacter baumannii
ttgtattcttattcgtttgcgcctagtgcaaaatggagtcacttatttgcgcgtcagccggaaatcttaagttatttagaagatgtaagtaatgagtttaatatcacgtctaaaattgagtttaacaacgaactactcaatgctgcttgggatgaatcacgccatttgtgggtacttgatacaactactggtcaatatctatctcgaactgttatttttgcaacaggcccaattaccgaagcccagattccacgtcttgaaggtttggatacctttacaggtgaaatgttccattcagcgaaatggaaccatgattatgacttaactggaaaacgcattgctgtaattggtacaggtgcatctgccatccagtttgtgccccaaattcaacctaaagccaaagagctatttgtgttccaacgtacagccccttgggtattaccaaaaccggatacagacttaggcgagtttagtaaatcagtcattgccaaatatccagcgattcaggcaagttggcgtaaaagtgtagcgctaactctcaatgcgattaattttggtttacgtaacccacttgcactaaaaccagtaaatgtattgggtaagcaattactcaaacttcaaattgcggaccctgaattacgtaaaaacgtaacgcctaattttgatattggctgtaaacgtattttgtttgctaacaattactaccctgcactacaagcaccaaataccacgcttattccacatggcctggttaaagtcgaaggcaatacggtgattgcagctaatggcgaacgccatgaagttgacgtgattatttggggtacaggttttgaagtgtctcatccacccattggtaaacgggtacataacgaaaaaggggaatgtctggcagaactctggaaagactcctcaccggaagcttacctaggaaccaacattgaaaatgtgccgaacgcatttcttatgctagggccaaatgtcttggtttacgactcattcattggtcttgctgaagcccaactgcaatatattgtagatggtttattgcaaatgaaagcgaaaggtattgctaaactttctgtaaaatcagaaataattaaaaagcataatgagcttgtacaaaagcatttacaaaccacagtattcaatagtggtggttgtaagagttattaccttgatgcaaatggtcgtaactttgcagcatggccatggtcattgaaaaatcttaaacagcgtttacatcatttaaatttagaagaatatgaggggcgaattcaaacatga

SEQ ID NO: 47913 - DNA, 195 bp, Acinetobacter baumannii
atgaatggtttaattaggcaatatttacctaaagggattgatttaaatcaggcagatcagcattatttaaatcaagttgccatgtcactgaatactcgtcctagaaaagcgttagattggcttacaccattagagaaatttgctcagcttgttgattatcataagacttttcaaactgtcgcacctcatgtttga

SEQ ID NO: 47914 - DNA, 483 bp, Acinetobacter baumannii
atgaaaattgtttttttgtattttttattgatgcttccttgtgtttcttttgctaataacattagtgaattttttttaaaatttcaggacagtaataattattatatttataaagataaaaaagataagtggatatatgagtgtagtgtggaggcgaataggaaaaaaaattcaactaacatcaattttgtgagctttgatcaaaagaatcaatcaattaaattctcatttgatactcctgatcaaccattttataaagtaactaaaatattgaaaactaaacctaatgagtatgaggtgtatttccaagataagaatatgggaagtaattttaactttgatgttactttaaaaaataatggtatttcagagtgggtttttcatgctcccaatgaagattcagaaaacttcatcgatagaggctttaccttagtaagttttaataaatccccaaagtttaatataacgaataagtgtaaatag

SEQ ID NO: 47915 - DNA, 426 bp, Acinetobacter baumannii
atgatgatgaagaaactaataagtttgttagtacttataatagtagcatttcctactgtagcaagaattcctaagggtgattatattatgattgataagaagaaagggggatttgttaggctttgtaaaagtgaatcaactgaagaacttgagaacataatcttaacagataaatctttacatttagcattaccagagagtacagaatatttaattcttaaggaaaaaatgaacaaaaatgaacatatattagaggttcgtaacccatataatattgtatatacttataaaataaaaaagattaataatagtgatgtctataaatgggatgcttatttaggaaataagaggattgaagacttatcgttcttttctattgctaaaaataaagctaagaatattatcagcgtaggtatttgtaaatga

SEQ ID NO: 47916 - DNA, 216 bp, Acinetobacter baumannii
atgagtgaattagaaatacttgaatcagcacccaaagatgctacccattattttcttgtgcctaatggatctggtgaaccttattacgttcttgaaaaagaaaaaaagttctactggtttcacggtcaggatgaaataactaagccacacattttgagttggattaagtcaattgaatcactgaaagaagttaaagcggaaagtaaggaggagtaa

SEQ ID NO: 47917 - DNA, 765 bp, Acinetobacter baumannii
atggacttggttagctatttttggtcaggcaaacaccaccgatccgtcaagggtattaatctcattaccttgtatgcgacagatcagaatggtcaaaatattccaattaatttccgaatttatgacaaatctgaaagtaaaaccaagaatgattactttatggatatgttaagtgaagtactcagttggggtgcaaagattcaatttattacaggtgatagttggtattcatcgactggaaatctaaaaaccataagaaaatatggtattcgatttatgtttggtatcgactgtaaccgtaaggtttccccagaaaaaggacaatggtttcaactgcgtttattgccaaatttccatcagggtcaagtggtctggctcaaagattttggctttgtacaattatttaagactcagttaaaagaacagcagaggttttatattgtgcatcaagatgaagatgatttattgtcctttgagggttttcatgaattacattcaagtcattggaaaatagagcaatatcaccgggtgattaaacaggtttgtcatattgaaaagtttcaagtaagacgatctaaactgattttgaatcatattttttcagccttgatggcctacgtcgagatacaaaagaaccagtttgagcggatctttgaaaatgtatatcgttggcagaagaaattatttagaccagttatcaaaaacttcattgatgactttattctcgataaaaatcatctgctaccacagagaatctataaataa

SEQ ID NO: 47918 - DNA, 1170 bp, Acinetobacter baumannii
atgatgcagactcaaatatcagtagagcaaaatttagatcatatcggtcaaaagaaattttcatgtttttctacgaagaattattatcttgaggtcaacgaattcgttaaaacgttaaatacacctgcagcaaataccgcactattgaatgaagagattgcaaaatgctttgaagaaattaaaaagcaaggccatcaaaatccagttttaattggtgctataccttttgatattacaaagaaaagtagcttaaatttttatgctgatcataaaaaaataacacaagcatcttctacgattaattcattaaaaaatcgtaataacattgagataattaataaatcattactcattcaacgacaaaaatttgaaggaacagtacagctagctttagatgcttttgagaaaaagaaggtagaaaaagttgttctctctcaggctgttgaatatgagtttaaccgtcatcaagagcctgaaaatttattggctgctttattaaaacaaaatccaaatgcttataattttgtgattccagtcgagcataataattatattctaggtgcaagtcctgaactgcttttatcaaaacaagaccgtattgtaaccagtaatcctttggccggttctcgtcctaaatctaaaatttctgaaaaaaatttcgtcagccaacaagaattaaatcattctgagaaagatcaacatgaacatcgaattgtagttgaaaatattattagaaatttagctactcattgtgtagagcttaaggtttctgaatttccagatattttagaaacttcaacgatgttgcatttatcatcagaattccaaggtgtgcttaaacaacaggctcccgatgccttaaaccttgcattagaattacatccaacaccagcagtttgtggctcaccaactcatgttgctaagcaatttattttagatcatgaaggttatgaccgacattattacacggggttagtcggctggatggatgccaagggtaatggagaatgggtagtgacaattcgatgtggtctactcagtgaaaataaaatgcgcttatatgctggtgcggggattgttgaagggtcagatgctgaagctgaatggctagaaacagaagctaagatgcaaaccatgttaaatattctaaatacaaaagttgctgtgtaa

SEQ ID NO: 47919 - DNA, 516 bp, Acinetobacter baumannii
gtggcacattttgcctgggtgcataacaaggcattcgctgatcgtgataatccagtagtgccaaaatatgaaactgaaagaacagattatggacttaaaacgatttatatctctacagtaagtaactttcctcatagtttgagacatttagagccagagaatttcttatggaaacgagaatttgatgtatatcctccattctcggcaacacttactgtctattttcctaacaatgggattttaaaaattttgaatgcttgttgtcctgtttcgcataatcaaaccaggctatttgttccgttgacacgtaattttgatacgacgggtgacctacaggctgtatatgacttcaatgcacaaatttttgcagaggatcaggatattgttgagagtcaaaaaccggaagaacttccattagatgtttcaatggaggcgcactttgcagcagacaaatcttcaacgacatatagacggatattggcagaatggggattaagtaaaagatatgtggtctag

SEQ ID NO: 47920 - DNA, 270 bp, Acinetobacter baumannii
atggtaaaccaatatggtggaagtagagaaggtgcaggacgcaaagctctctatgatgaggctacaaaagttattcgtattcctgaatctcgtatagttgaaattaagaactatctcgcgaactcaaagaaagccaagttcaatgatgtagcatctatcaccttggtcaatccaagtgccgttatgcatattcccttagcctctgaaaaagttagctggatttccatctcctgcccaagattatgtagagaaaactctagatatgaatga

SEQ ID NO: 47921 - DNA, 1158 bp, Acinetobacter baumannii
gtgctttgtcaggaaatctttggggtgaatgcagcaatgcgggaaaaggcagattttcttgcagaagaaggctataccgttttagttcctgatctattttggcgtgtagcacctaatatagaactcggttatacaccagatgattttcaaaaagcttttgaactttatcagcaatatgacgaaaacctcggtgttgacgatattcaagacagcttagcttttttaaagacacgaccagaatgtgacacctctacaggcctcggcgtggttggctattgtttaggtggaaagctagcttatttggcaggctgcagactttctgaagtggcatgtgccgtaggttattacggtgtaggcattgaaaaagcgttagatgagttagctaacgtaaaaggacgtttggttttacatattgcagaactggaccaatttacaccgccagatgcgagacaagcgattgtcgatgcagttaaccaatattcaaatgtacaagcttatgtttacgaaggtgttgatcatgcctttgcacgaccaaaaagcaaccattaccacaaaccttcagcacgctttgctcacgagcgtacagtaacagctctacatgaaacgattggaccgaaatatgacctagtcgcgctctgggaagagcatatccgtcatgagttcgatacgcgtgacgtccccgcaactatggcaacaatggtcgcagaaccttatgtcaaccatattccaacgttaactggtggggtaggccaaagccagcttgctcgtttttatcagtatcactttgttcatcaaaacccaaaagatatgaagatcacttcgatctctcgtacggttggctcaacgcaagtggtagacgagttcattatgagctttacccacgatgctgaaattgactggttattaccgggtgtaaaaccgactggtaaatatgtcgaaattccaatgttaggtgtaattcagttcagaggttcaaagctgtgccatgagcatatttactgggaccaagcgtctgtacttgttcaaattggtttattagacccaacaggcttaccagtagcaggtgtcgagacagcgcgaaaacttcttgatgaagatcttccttccaatacgttgatgccatcttggtcaagtagtgaaggcaagccagttagttaa

SEQ ID NO: 47922 - DNA, 939 bp, Acinetobacter baumannii
atgtttgaattcgccgagcatggcctacagcacactacaggaaattatgaaaaattttatgcgcaatatcagtcccaaatcgaggctttagaacagtcagtacatcagcatcaacgtgaagttaagcacataaagcaaaagcagcatgaagttttaatgaaagcccaaaaacgtgagcgtgctggcaacaaacttcgtgactcaaactcgcaagctaaaattttgctcgattttaaaaaagaacaggcggggcaaagcctaggagcaatttattctcaacatcagcgtcaaatcgatcaaagccagcaagacttgaagagtaaaaaagtacttctagaaactgttaagccccaacaatttatattcccctctttacacaaaagaacaggagaaattcttagaattgataacttaaaactcaactatgggacacaacaaccaattcatctcgccttaaaagcttgtcaaaagattcatttggttggccgaaatggtattgggaaatcaactttgctgaaacagattgatcaatctgctgtaactgctacagatgaaattaaactgtttgtaaattgcttttatctcgaccagaacttcagctttttattagaccatctctctgctattgaaaacttaagaaatattaacccaaatatttctgagttagagtggagaaatttattaggtcagcttcggattcgtggtgataaaagcacatatcccttagctcaactcagtggtggtgagaagttaaaagttgctttactaggtttgagccatgctcagcctatgcctgaacttttactacttgatgaaccagaaaaccacttagatatcgagtcaagagagttatttgcaaatgctatttctagttatgaaggtgctgtgctattagtttcacatgatttaagttttgttgaaaaatgcgggattgtttga

SEQ ID NO: 47923 - DNA, 282 bp, Acinetobacter baumannii
atgtccagaattgctttattctttagaaaagaatggatcaatatcatgaatgttttttctatggaagagttgaggtcactactcgtggctactacacaagagaatgaaaagttaagggaagacaatcaaagactattactcattgtcgctgatgctactaagcaaataaaagaggcgagcaatatggcggaaaaatatcaacgaatgtttaataatttatctgaatctgttgaagctaaatatgacaatgaattcagcattgataacattccagggcagtaa

SEQ ID NO: 47924 - DNA, 177 bp, Acinetobacter baumannii
atgaactacgcactcaccacaagtgatgatgtagccaaactcacacttaaccgtcttgatcaggatgagctttataccattcctcaaatcgatgcgaagttgttctggctgatgaaacgtgcatcaccaagtttgtataccaagtttcttggtacctcttacaaattatttaaataa

SEQ ID NO: 47925 - DNA, 618 bp, Acinetobacter baumannii
gtgattgataatcatgttgcaattattcaatccagatcattaacagcaagaactcttgagtcttatttaggttggcttttgggtgaagcagctaaagccttaccagcgaatagtgccttaatcttaaaagatgctccgaacccggcaattaaagaaaaattggaatcaacgccagccaagaccatctcaatctcatctggaattggatcaacagaattgcaaccgattcacaaaatagagtcgaacgtaccagctaagattgattacaaaatcgaagaaaatgtggttgatgttttaaaaactgcatttggtgtcgatttggatgatttaaaacttgaagatggccttgatgacgctaatttaaagcttaaattaacactcacctataatcgaaaaacatccaaaagcgggcaaaaagtaattgatactgttgcatcatctatgagacataatgatgattatgttataactcttgaagatggtactaaggtcacagcggataacttaaagatgagtggaaaaatatctgttgaaacaatcaataataaagtttataacgacggccttaaagttcaattgtacaattggatgactaccaatattaattttggtgattaa

SEQ ID NO: 47926 - DNA, 852 bp, Acinetobacter baumannii
atgaatgaagtcacggtatcttctgcctgtaaatacctaggtgtcagcacttcaggctattatgcctggcgaaaacgtcaggccaatacggtagagaaatataatgatttaaaagccgtatattggcagcatcatgcacgattgggtgcaccttcattggtacatgacatgcatgatttaggttacagcatgagtgaacgcactgttggaagaatgctgaaaaatctgggtttacgcagcaggattgcgcgtaaatacaagcatacgactgattcaaaccatcgtttgcctacagcacccaatctgttagagcgtcaatttacagtcattcagcctaacaaggtttggacaacggatattacctatatccgtaccaagcaaggttggctgtatttatgtgtgatgctggatctatttagtcgtcgtatcgtggggtggcaaaccagccatcgaatagaccgccagttggtgtgtgatacgtttaactatgcaatggctcgtgagggttatccaactggtgttatggttcattcggaccaaggttcacagtactgtagtcgtgattttagagcgctgttactgacaaatgattgtactcagagtatgtctagacgtggaaactgttgggataatgcagtgactgaaagcttctttcatacattgaaaggtcatgtggtccatggcagtgtgtttgccactcgaaaagaagcgaatgctgtcttgtttgactatattgagatttattacaatcgggtcagaagacattctgcaaatggctggttaagccctgaagcctttgagaagaaatattttaagaatttagagggatttgttgtccacgatactgtctag

SEQ ID NO: 47927 - DNA, 294 bp, Acinetobacter baumannii
atggccaaacgttttagtgctgaatttaaacagcaagcaattgattatgcactttcaaactcacacgagcctatagctgcaatcgcccagaaattaggtgtgggttattcaactttagacaaatggattcgtgaaaccaatccagtgggttcaagcaaacgtcaactttcaccagaacaacagcggatcttggaattagagaaagaagtcaaacagctcaaggaagccaatgacatcttaaaaaaagcgcatgtgtactttctaacagatcatgccaagaaaagtacacggtaa

SEQ ID NO: 47928 - DNA, 906 bp, Acinetobacter baumannii
atgaatgagcgcatacatattttaagacaagcaattgttgtcgttacccaagcactgactaactctgatattgcagtaacacaagaaggcattgaggcaggtgtgcataaggatccaaagacaggcaaacctgtgcgaattaaccttccatatcttccggacaattcaccagattcgctgattgatgcggttcaaggttttcttgatcaagaggtagcgaagtatctttttaccgatttttctctcaagctaaaaggatctgaagaggtaaagactttaacttcattgttagaagaagcgcgtgtagaacgttgcatggctgaaaaatatcgcggttcaaatatcaatatgaaaaatgcgagccaatttttcattgatgaattgattgacgataaataccaaaaacttgtaaaggaaaaagcttctgatgaagaaattacgcaacatttaatgttgccaatgttacgtgcgttaagtggtccaattggggcgtttgcaagcattgaacctagtgagccttcagcgaaagacctctcacgacgaaaggatcaaatgaggctattaccaggattaattattgattctgtaaaagcagatagatacacagatacctcagagccattcctgcgagcttcgttggtcgagcatatgcgcgattgcaagcaatgtaacggttgcgaccttgctggacaggttcatccagatattcgtttgggtaaaaagatgcgatttatggtcgtggctgactgcccaacttgggaagaggaaaagaaaggaaaacttcttgaaggcgagacggcccaatatgtgaaagctgcaattaaagataatgaattagcagtagcggacggttattacacaacgctcgtcaaagccaaaaaagggactgttctaaattttgtgtaa

SEQ ID NO: 47929 - DNA, 303 bp, Acinetobacter baumannii
atggctaagaccctacaagaattattggctaatcgctctccagagagtcaagctcgtattcaacaaatggcggatgaattattgttggaaactcagcttcaccttattcgtgaagagttagagatttctcaaaaagaactggctgcaacccttggaatcaaacagccttcattgtcagcaatcgaaaatcgtggtcatgatcttaaaatttcaacgatgaaaaagtatgtcgaagcaatgggcggaaaacttcgtattgatgtagagcttccaacaggaaaacacataggattcaatgtctaa

SEQ ID NO: 47930 - DNA, 489 bp, Acinetobacter baumannii
atgtcatcaatatcaaagccactgaccgcctcgctaaacgtaaagctgattgttgtcgattcagtcgcagtgagtgcagggtccagggccgtaatcaccaagcccggcgccaatgtatcgaccgtaaggctctctgttgcagtcaggttggcattacctgccacgtccgtaacaatacctgccggtacgttcacaaccacatcgccttcaaagtccgcagccggtaccagcgtaccgctgaagctgccatcgccgttgtctacaaggtcagtcaatgtaccgttagcaatgtccagcaatccctcaagcgcatctgccgtaagcggactgccatcaaccgcattgactgcttcaccaaagtcaatcgtgattgcattcgttacaggatcaatcgtaatcaccggtgccggagctagcgtatcaaccacaaagccgtccgtaccatcgagtacatcgcctgtacccaagttacctgcaaggtctgtatag

SEQ ID NO: 47931 - DNA, 594 bp, Acinetobacter baumannii
atgcttggagccgcaccactgccgtcagctgtaaacgtagctgtccagacattcgggttggttgtactttggaccagattgctcagcgtaccgcctactggcgtgatgtcatcaatatcaaagccactgaccgcctcgctaaacgtaaagctgattgttgtcgattcagtcgcagtgagtgcagggtccagggccgtaatcaccaagcccggcgccaatgtatcgaccgtaaggctctctgttgcagtcaggttggcattacctgccacgtccgtaacaatacctgccggtacgttcacaaccacatcgccttcaaagtccgcagccggtaccagcgtaccgctgaagctgccatcgccgttgtctacaaggccggtcaatgtaccgttagcaatgtccagcaatccctcaagcgcatctgccgtaagcggactgccatcaaccgcattgactgcttcaccaaagtcaatcgtgattgcattcgttacaggatcaatcgtaatcaccggtgccggagctagcgtatcaaccacaaagccgtccgtaccatcgagtacatcgcctgtacccaagttacctgcaaggtctgtatag

SEQ ID NO: 47932 - DNA, 489 bp, Acinetobacter baumannii
atgtcatcaatatcaaagccactgaccgcctcgctaaacgtaaagctgattgttgtcgattcagtcgcagtgagtgcagggtccagggccgtaatcaccaagcccggcgccaatgtatcgaccgtaaggctctctgttgcagtcaggttggcattacctgccacgtccgtaacaatacctgccggaacattcaccaccacatcgccttcaaagtccgcagccggtaacagcgtaccgctgaagctgccatcgccgttgtctacaaggtcagtcaatgtaccgttagcaatgtccagcaatccctcaagcgcatctgccgtaagcggactgccatcaaccgcattgactgcttcaccaaagtcaatcgtgattgcattcgttacaggatcaatcgtaatcaccggtgccggagctagcgtatcaaccacaaagccgtccgtaccatcgagtacatcgcctgtacccaagttacctgcaaggtctgtatag

SEQ ID NO: 47933 - DNA, 594 bp, Acinetobacter baumannii
atgcttggagctgcaccactgccgtcagctgtaaacgtagctgtccagacattcgggttggttgtactttggaccagattactcagcgtaccgcctactggcgtgatgtcatcaatatcaaagccactgaccgcctcgctaaacgtaaagctgattgttgtcgattcagtcgcagtgagtgcagggtccagggccgtaatcaccaagcccggcgccaatgtatcgaccgtaaggctctctgttgcagtcaggttggcattacctgccacgtccgtaacaatacctgccggtacgttcacaaccacatcgccttcaaagtccgcagccggtaccagcgtaccgctgaagctgccatcgccgttgtctacaaggtcagtcaatgtaccgttagcaatgtccagcaatccctcaagcgcatctgccgtaagcggactgccatcaaccgcattgactgcttcaccaaagtcaatcgtgattgcattcgttacaggatcaatcgtaatcaccggtgccggagctagcgtatcaaccacaaagccgtccgtaccatcgagtacatcgcctgtacccaagttacctgcaaggtctgtatag

SEQ ID NO: 47934 - DNA, 279 bp, Acinetobacter baumannii
gtgccaaccagtctgatcgagtctggtccttttcaatatcaatctctaaacaaagctttaatgcaccttgataacttacttgtaaaccatgtcccaaaaaggataatccaacttgagtatcaaaaacatttaataggttttgttcatcggcatagtgatagattaaatcaatatcttcaccacatgcatgaaaaatattttgttgagcaagaaagatttttttccaaaactcgcttaaatctaaagacactccatccagcaaatatacatttccgttga

SEQ ID NO: 47935 - DNA, 243 bp, Acinetobacter baumannii
atgatgtttactggagttatgaagcccaatggtcgtcccacttggttaggtaaaagatttattaaaatgaaaataaactgtaatactcaacaagcggcattggtagcggatgctgtcattaactctgatggcactgttgttaaagatataatttatagagagaaagataacgtaaaatggggagaaattagtatgttctataatacaaaagacttttttaaagtggcaaaagtatgtaactaa

SEQ ID NO: 47936 - DNA, 453 bp, Acinetobacter baumannii
atgaagaaatatttattaatttgccttttgcctatttttacaactgcttgtagtgctaaaccaagccctcaagaagaattagatctccaagctagatttttacctacagtttataatattgatgcaggtacttatgcttttgtttcaaaagaagcacctacacctttaacaaaacaaatgtatgaagatgcattatttaagcttggcttattaaaaagatatgatgaccaagcaagtgcaaatttcaagcttgaaaaaactatagagccaataaaattaaatactttatgtttaatgagtaagtttgttaataacccaacttatataaaagctgtaaagcatagtattgagcaagagcctgatttaaataaatggctcaaagaaaaacaaccaaaatggcaagaagctttgaaaagagaggacaaggaaatttttgatcatccttgtttataa

SEQ ID NO: 47937 - DNA, 543 bp, Acinetobacter baumannii
atgctcgatacagtgtcaaaagctgccaatgctcgaaaaataaaaaatatttttgtacaacaaggcattgctgaagatatgccttttactgatgaacaatttgatgtaatcattagtcgatattctgcccatcattggcagcatgtcccaacagcaatgaaagaaataaatcgtgtattaaagccaaatggcactgttatttttgttgatattattagctcaagtttccctattttagatacatttttacagactatagaagtgattcgagaccctagtcatgtaagaaattacagtattaaagactgggttcactttattgaagatgctgggtttgaattaacaactttagagaaacaaaccctcaaactagattttgatagttgggtacagcgcatgaagacacctgaagatcaaataaaaacgcttaggtatctccaagaaaatgcagcagatgttgttaaaaagtattttaatattcaaaaagatggaagttttgaaagtaaggtcgggtactttgtatttaaaaaactatccttctaa

SEQ ID NO: 47938 - DNA, 918 bp, Acinetobacter baumannii
atgatttcgagtcgagtccaatttggggtatatggtgcctgtatccccatcattcttgtttgtcttatgtatattggctttacggccactggtgaggtactcgctggtaaagcaattgcccatctagcacaggtgagtaatacaacaggtattttaatctatgcttgttttattattatatttgcggcaattggctatcgtttaattcattgggtaggcaaagttgcaagtgttattggtttaattgcttttgttattattttaactcaaattttagctctctctaatatttcagaattgcttgctgtacggcattttagctggtcatcatttttattagcagtttctctttctgcttcttggcaaatttcatttggaccttatgtagcagattattctcgttatcttcctacaaaaacatcttcaacacgcgtattttgggctgttgggcttgggtctttaataggctcccaaatttcaatgatgctcggtgtatttattgctcaagtctcgaatggtggttttgttggcaatgaagttcagtacgttgtaggcatgaatccaatcgctcttgtgattacttttttatattttagtattgcattcggaaaggtcactttatctacacttaatgcttatggcagttttatgtgtattgcgaccatttggaacagttttaagccaagtgctcaaatttcaaaattaacgcgacttacaattgttcttgcaatggtaattatctcaacatttattgcagttgtaggtgaacatacttttttaagcgcattcaaatcttttattttgttccttcttacatttttcattccttggagtgcaattaatttagttgattactattttatttctaaagggctttgttgcacaaacctatctgtaaaggctttttcagcgatataa

SEQ ID NO: 47939 - DNA, 294 bp, Acinetobacter baumannii
atgaaaatactagtactgtgtatcgtgaacttcataatctttacacaatccgctttagcactagagtatcgacagattagaaatactactgatgatcagtttgaagtaattgaaatttctcatttagaacaattacgcttatttctgaaaaatccgcaaactgatcaatattataaaagtttcgacaatattcaatatcaacttaaagaggctttgttgcacaaagatttgaaatgcaaagcgcccctaattgagccaaatttaaggcgtaacttgggtaagtggtcgacctaa

SEQ ID NO: 47940 - DNA, 228 bp, Acinetobacter baumannii
atgccatctaaagcaaagaaaactgaaaaactagattctgaattaaaaaagttaaataaagagattggtcgtagacgaattcaagtagagcatgtatttggaaggatgaaatgttttaagattttatcttgtgtatatagaaatcgtcgtaaaagattaaacctgcggtttaatttacttgctggcatatacaatttagattgggtgaaagataaacaattaaattga

SEQ ID NO: 47941 - DNA, 405 bp, Acinetobacter baumannii
atgaaattcaaagatattcaaaaattatcaaacgttaagtttcgtaggcttaccggtgttagttgggctacatttaacctcatgttggccgagctaaataagcatttacctcgtcatattggtaaaggacgaccgcataaattaccgttggaagatcgtttgctcttatgtatagaatattggagagaatatcgaacatttttccatcttggtatgagttacggtgtatctgaaacgagtgcaattcgtatcacacgtgttattgaagataccttaatccgttctggaaaattcaacttgccaaaacaacttcctaatcgagatgaagtggattgggaagttgttgtgattgatgccactgaaatattagttcaacgtccaaaaaaaacagaagaaatggtatag

SEQ ID NO: 47942 - DNA, 267 bp, Acinetobacter baumannii
atgcgacaagcaatgttaatgagagctaaagcattgaattgcacgtttgataaacaacgtggcacttggattagtccccctgaatttaacggcatctcagatcaacaaagagacgaacttcaaaactttattgctgaacgtggcctagacgtaaaaacagtatgtgagcacttaggtatcgatgcccttattcaaattgaagcagcaaaacttaaggcagttaaacaagacattgaaacattagctaaaacggggatgacatcatga

SEQ ID NO: 47943 - DNA, 264 bp, Acinetobacter baumannii
atgtcacgtttaacaaaattagatcgtatgacacatgcagaaaaagaggctgctaaaaaagaattttgggaagctgctgataatcagaccttcccgcctgaaacgattgcaatcgtaatgcacgtatcattaccatggttacagaagaaaagatgtgaaggtggcggcattccattctctaaaccgcataagcggcaagtaaactatatgaagtcggatgttttggcttatattgagcaaaacaaaatggcacatactgcataa

SEQ ID NO: 47944 - DNA, 216 bp, Acinetobacter baumannii
atgagtgaatttgaaatacttgaatcagcaccaaaagatgctacccattattttcttgtgcctaatggatctggtgaaccttattacgctcttgaaaaagaaaaaaagttctactggtttcacggtcaggatgaaataactaagccacacattttaagttggattaagtcaattgaatcactgaaagaagttaaagcggaaagtaaggagatttaa

SEQ ID NO: 47945 - DNA, 660 bp, Acinetobacter baumannii
atgcaacaaaaacaccctggtagaacactcgtcttatggattatcgcagctcatctatttatgggaatggttgcatacgagtggctgcctgtgagttttagaggaagttggatttttattcttcttcttttaatttcaggtgcttttttagaagtcggtttgtctttaattgtaggtttagtggcttttattggagttgccgtatactttttactcgacttaggcgcacaaacacatattgaacgtcagttacttttactattcattattcccctaattccgctctttctaagtgctgtacgccacaatattgaaattaatgtacagaaataccgtgatattcaaagctatgaccgaaattatcgccgcgatattttcccgctaagtgctttaaaatactttcagcgtagtttttttaaattacttgatcaccacaatgtacaagattatgaagtattcgaaattcgaattcttaatcgcagtctgattaaagaaatgttaggcgatgatgtctggaaaacaactcaaaatgaaatgattaaaattttgagccaacatgaacccaacgaaattgttttccagtttgcagatgatgatctggaaaatatttacagtattatgattcgccagcagaaaacagaagaagaccctgtattctag

SEQ ID NO: 47946 - DNA, 183 bp, Acinetobacter baumannii
atgaaatttgaagagtttaataaacttgtagataagctttcggaacaggaagaatatgaaaaagttgatgaaatcctagatgatcaaatagatgaaataataaagttagatagtaaagaaatcgaaaaatatttaatacttggcagagtaaaacttgaagtgcgacataaaccacctaattaa

SEQ ID NO: 47947 - DNA, 399 bp, Acinetobacter baumannii
atgagatatcagaaattaaatcgtttttcagattctgaattccagcgcttggttggtgtacctcgaccagtttttagtgaaatgatcgaagttttaaaagaagtagaatcacttaaaaagaaatctgggcgtcctcatactttagctatagaggatcaattattattaacactcaattacttacggaattacagcactcaattggagttggctgcaaattaccatatcgctgaaagtaatgtgaatcgaaccattaaaaaggttgaagatgcattgatgaaatcaagacggtttactctgccaaaacgaagcattaccacagcagacgaacagtttaactgggtcattattgatgcgacagaatgttcaatagaacgtccgaaaaaaaaatcagagtaa

SEQ ID NO: 47948 - DNA, 264 bp, Acinetobacter baumannii
atgaccgatttagggtactacggattagagcaagatggctttaaattattgatgccaataaagaaaaagaagaatttacccttatttgatgttgagaaaaagtacaataaaatgattggaaaaatacgagttgtgatcgaacatattaatagtcaattgaaaacatttagaatattaagtgaacgctatcgaaatagacggaaaagattcggtttacgcattaacttaatcgctgcactggtaaatcggatgaacttgcaataa

SEQ ID NO: 47949 - DNA, 639 bp, Acinetobacter baumannii
atgtgtgcaaattttaaaccccttaagagagagcattcttatcaattagacttacttgaacccacctttgattacaaatcagatgtctatccaagtgatgattgcccaataatcttacctcatcaaaatgaatgggaatggcgaaaagttaaatttggaatgttgtcaccatatgcgaaagaagtttcatttaaatatgcaacttataatgcaagaactgaaacggttgatcacaaacgttcatttaaacatgcctggtcaaatgatcaatttggcctagttcctgttgaagctatttatgaaccgaaatatatcaatggtaaagcacattggtatggcatctttcgtcaagatggaaagccatttacgcttgcagcaatttatgaagaaaccataattgatgagcagaaagttagaacaatgtcactattaacaatcaatgcagatcgacattcgtttatgaaacagtttcataaacctgacgatgaaaaacgttcaattattgtaatacctgaccatcttagaaacgattggttaaactgcaaacacactgacgctcctgactttttcttagatatgccattaaatgaatttacgtctctgcctaaagcagaaatgaacaaatcaaaaaatagttag

SEQ ID NO: 47950 - DNA, 276 bp, Acinetobacter baumannii
atgaaatatgctattacttctggtcaatgggtagtgattgacaataagcctattgaggcagatttggcgataccaaataaatatttcatgcaggatgtgattaccaaggagttctcaatttatcaccaaggtaatattctgcctgcaacatatgaggaaattaagaatttagaatgtgcagcggtctgggagccagagcatgtggaagatagattgagagattatttttcaggtgtacctaatgtatgggttgaagatttaaaaccaaagccttaa

SEQ ID NO: 47951 - DNA, 423 bp, Acinetobacter baumannii
atggatactttaaaagccattcaggtctttgtttctattgcacaacacggtaatttaactaaagccgcagagcatcttaattattctcgtgcaatggtttcgcgttatcttgagcaccttgaacatacgttctcaactcgactatttcagagaaatacccgaaaaatctctcttacacccgcaggtgaaaaagctctgctctactgcgaaaatattttacagcagcaacaacttttacaagaactcgcagcgcctgaacaacacaacggtacaatccgttttacatgcggattatttctatttgaacttggggttgcggaatgtattcggcaatttaagagacagcatcctcatattcagtttgatgtatacctgactgaaagcacgattgatcttatagatgcacaaggctttgttgcataa

SEQ ID NO: 47952 - DNA, 576 bp, Acinetobacter baumannii
ttggttcaagcttggattgatgatggaaacgctaaatcaactcccgatgaagcgaatgtcccttttatcattacaccacctatttcaagagtagaaccctctaaagggcaaactttacgaattactgcactacctaatgcttctcaattaaaccaaaataaagaaagtgtattttggcttaatgtattagatataccaccaaggccggaaggtaacaaacaagaaaataatgaagtattaaccaataattttcttcaattagcgatacgttcacgaattaagttcttttatcgaccagtaagtctaaaagaaaatattaatacattaagtgaaaaaattcagtgggtaaaaaatggtgaaaactttcttattaaaaaccctactcccttttacattacaataagctcaatttttcaagaaataaatcatcaaaaaacagatttattaaaacagggtttaatgctttctcctttttcagaagatcaaataaaacttaaaaatagcaatataacaaatatgagctttgtttatataaatgattatggtggaagaattgaacaagtaataaggttctaa

SEQ ID NO: 47953 - DNA, 204 bp, Acinetobacter baumannii
atgatggattattcttcgagtcgcgttttgacatcaatgcatccaagtattcggcatctgaatattcgcaatgtagctaaaattgtgacgtcaaaaattattctaaatacggcgttacagctacaatataaccctgatttttgtaggcagcttggcgtatctacttatctagggtgtgttgacacttttagcttaaaaaaatag

SEQ ID NO: 47954 - DNA, 345 bp, Acinetobacter baumannii
atgacacttgaattagacccgaatgaatttaaaattcgattgaaagaagttagaaagatacgaaagctaacacagctagaacttgctgaaaaaacggggatacccgtaacctcgattgcgcattttgagtcaggctctcgtaaaccctctttagaaaatttctataagctcattgtcgtgcttaatgtatcatccgattacatcttgggacgctgtgaaaaaatgagtacctcagcgattgatcctattactaatgctttacaggacctaccagagttggagcgtaaaatgattgagaaattcattgtatctttgacgaatgagaacattaaacagaatgattag

SEQ ID NO: 47955 - DNA, 543 bp, Acinetobacter baumannii
ttggctgcaaatgcagctcctaaagctgtctggtatcgttattatgatcagcatggtattgcgaatattagtacatccgtaacaccggctcatattcgctatggatatgaagcactcgaccagaatatgcaggtcattaaaagaaatcatccttataattctgaagccgatttaaatcagtcctcacagcgtgcattatcagctcgatatagagaagaagataacaaattaaaaagagcatatagcaatagtaaaactgcgacgattaaaagagaccaagcattattggcaattaaaaaacaaataaattatcagcagggccaactgagccaattacaacaagacaaaattttatttaaacggcaagaaatggaatattttcgtaagggtgaacaagttcccgaaagacataaaaccttgattgaaaacaatcttatgaatattaataaggttaaacaaacacttgaaatactttcgaaaacctataatcgcaccaataaagattatgaaaatattatcgaacgtttaaaaaagcttgaataa

SEQ ID NO: 47956 - DNA, 147 bp, Acinetobacter baumannii
atgactattattctatattttttaaattcttttattaaacctacttacattcaacttcttttactcaagcagtcatttcttagagttctttctcatcctctgtttaaaagaactacctactatagagttcgaaaaatttttacttaa

SEQ ID NO: 47957 - DNA, 465 bp, Acinetobacter baumannii
atgactcctgcatgtagactgttaaaaagtaacaaaatcgaattttctatccatgagtatgaacatgacgcaaatgctaaaagttttggcttagaagctgcggaaaaattaaaccttaatgtaaatgaggtgtttaaaacacttctggttaccgatgagaaaaattattttgttgcggttataccagttaaccatcaactcaatttaaaaaaagtagctacggcagtggggtgtaaaaaattacagatggcaaatcctaaagatgcggaacggttaacagggtacttagtgggcggaattagtcctttaggccaaaagaaacgtttgaagacagtaattgatgcctctgcgcaagagctcagcaaaatttatgtaagtggtggtaagagagggttagatattggtgtaaatcctaaagatttagcacaaatattaacggcgcaatttgtagacgtacttgattaa

SEQ ID NO: 47958 - DNA, 543 bp, Acinetobacter baumannii
gtgtcaacacaccctaaattactacctataaatgcaaaaactaaacaattagataactatccaatttttattgctggtgatgcgtacacctctacgcctttacaacatgaagctgcccatgaaggcaaaaaagttgttcataactgtttaaattatccacagcttaattcagttaagaccctctctcccttaggaattgtatttagtcatccagaaatggcaattgtgggacaaagttataaacaacttaaagataatagagtagattttgttacaggtgaagcatcttatgaaagacaaggtagagctatcgtactcgggaaaaataagggtgctattgaagtttatatagagcgagaaagtcagaaattgcttggtgcagagttatttaccgaagctacagaacatatggctcatctattaagctggattattggagaagagctaactttaaatgatattttagagaaacctttttatcatccaacactagaagaaggcctgcgtactgctcttaaacatgctcgcaggcagttgaaataa

SEQ ID NO: 47959 - DNA, 195 bp, Acinetobacter baumannii; identical to SEQ ID NO: 47913

SEQ ID NO: 47960 - DNA, 162 bp, Acinetobacter baumannii
atggatgaggatgaaattaatattatagcctataactatgtgggttatattaaattaaaaaaagatattatttttcctgctgatgataataaaaatgatgttatttataaccaaagtggagtcaataggcgagttttttctggatatgttagctttccctaa

SEQ ID NO: 47961 - DNA, 171 bp, Acinetobacter baumannii
atgtcgcacttcaagttttactctgccgagctttacaaagctggaaatgagatagtatccatttatattcttgataaattaaaagaagatgatgtttggaattgggtggtagaggagaaattgggtgtttctccattacttaatagagtttacattaagggtagggattaa

SEQ ID NO: 47962 - DNA, 456 bp, Acinetobacter baumannii
gtgcaacaaagcccgaaaaatgtaattcgtggaaagtatcatccggaatttttgcagaatgaagtcttagccgatatttttactcatactgcacaaactcttcctgataaaacggctttaattgaagcagataaaacgctgagttatggtgagctgtatcagcaagccttaattatggctcaacatctggttttaaaaggggtaaagccaggtcatattgtagggctatggttgccgcgtggtattgagcttttaaaagctcaactggccatttgtttaagcggtgcagcttggcttccttttgatatggatacgcccgcggaccgtattgcggtatgtcttgaagatgccgaagcggtgggaatgattactacagatgaatggtatgaacatttagcggaagtgccgcaaggctttgttgcacaaagatttgaaatgcaaagcgcccctaattga

SEQ ID NO: 47963 - DNA, 306 bp, Acinetobacter baumannii
atgagccatgcttatagtgtgacatttgataatggcaaagaattttccgaacacaaaagaattactgatgctggcatagagacgtattttgctgatccttacaagtctattcagcgagctagaaatgaaaatacgaatggtttaatccgtcaatatctgccaaaatcatcatcgtttgatgacgtgtcaaacgaacaaatagagcagatagaatttgcactcaaccatcgtcctagaaaaacactaggttggtatacaccgagtgaagttatggctggtttttatactgttgcacttgccgcttga

SEQ ID NO: 47964 - DNA, 489 bp, Acinetobacter baumannii
atggtgtcatttttatttattggacttgtagtcactattttgttgactccaggaccaacaaatacattattagcctcggctggcatacaagcaggggtaaagcattctcttaagttgattccggcagaggtaataggttacctgatcgcaattacctcatggggggttttacttgaatcggtgtctcatttcattccatggcttccagccatattaaagctgatgagtgcgggctttatactctatcttgcttttaaactctggataacatcgtctgaagatattaagttagaccgaccgcttatcacgccaaaagctttatttcttgcgacacttttaaatccgaaagctttactttttgcttcagcgatttttccacatgcagcgtgggaagttcctcatttatattttattcacattgttgtctttttatctttaattaccccaattgcttttttatggattatgtttggggtaaaagagacttag

SEQ ID NO: 47965 - DNA, 486 bp, Acinetobacter baumannii
ttggaaacgtttgaaaatattaaaaagcgtggtgcaaaaattggcagtaacacgggctatgcatctatgatgatcggtcgtttggttaaagatgctgccgatcagggctatcgaccagactgtatcgttactgccagcgacgtgaaatatggccgtccatatcctgaaatgttatggaagaacttaattcaactcgacgtatcagacatcaaaactgttgtaaaagtagatgataccgtggtgggcattgatgaaggcttaaatgcgggatgctggacagtcgggcttgcgattagtggcaatgaagtcggtttaagctatgaagagtggagtgcattatcggccgatgaacagattgtgctaaaagataaggcataccaaaaaatgaatgcgtcgggcgctcactatgtgattgatagtgtcgctgatttgccaaatgtactcgatgatattgaacgccgtttggggcagggtgaacgaccttaa

SEQ ID NO: 47966 - DNA, 513 bp, Acinetobacter baumannii
atgttcaaattacatactggcgtgagaggggccgaattgttattggctgagcctcatcattttgatttaaatgaaaaaatctggaaaatacctgccttgcatattaaacagtttcgacgaaaagttatattaggccatgagattccagattttttagttccactttcaaatcaggctttagagattttgaaagacgtcatgcagtggtcatacggtgaaaaatacctttttgctagccctcgcaaacacaatcaaccgattcattttaatactctaaatatggccatacgtaagatggggtatggcaaacatcaactatcttctcatggattacgttctacttttagtaccattttgaatgactcaggtttgttccaagataattggattgaggcacaactttcacatattgataagaaccgtacccgtgccagctataatcacgctgactatttagctcaacggactgaaatgatgcagtggtggggtgattatttaagtactagtaagtga

SEQ ID NO: 47967 - DNA, 633 bp, Acinetobacter baumannii
atgcaaaagctaggtatacaaggtgtttggcgtggtaagaataaacaaaccacccgtaaccgagatgaccaaaaacgggcagatgatttagtgaaacgtaattttaatgctgatcatccaaaccaactatgggtgggtgactttacgtatattcaaactcattcaggctgggtctataccgcctttattattgatgtgttctcacgagcaattgttggatggaaagtatctacacggatgaatacagatatggtgctcgatgcattggagcaagcattgcatgatcgaggcatgccaaagaatgtgattcatcattccgatagaggtgttcaatatctttctattcgctataccaatcgtttagaagcagcaaatttaagagtatcagtcggtacgactggtgattcatacgataatgctttggctgaaacagtgaatggcttatacaaaacagaggtgattgaatatttaaaagcagattggcaaggtttagcagatgtacaacttgcgacactaaactgggtagattggttcaataaaaagcgtgtacacagtgcactgggttatgtatcgccttttgagtttgaagcaatgtactatgataagattaacccgttaggtcaggtggcttaa

SEQ ID NO: 47968 - DNA, 354 bp, Acinetobacter baumannii
atgactgcttataacgtaacgaaagcgggtgttcgtgcgttgtctgaaacactttcggctgagcttcgcaaattcaacattaaagtgaatgtgctctgcccgaccttggtgcctaccaatatcattaaaaatggtcgtattccgggccgttattccaagcttgcagaccatgcactcatgaactatgccatgacaaccagtgatgcagttgcggctttaacattgaatcgattagatcgtgggcagctctacaccacgccacagatcgacgccaaattattctggcttatgaaaaggacatctccaacgctatatgcaaagttccttgggctttcgtatcagttatttaaataa

SEQ ID NO: 47969 - DNA, 489 bp, Acinetobacter baumannii; identical to SEQ ID NO: 47930

SEQ ID NO: 47970 - DNA, 459 bp, Acinetobacter baumannii
atgactaaacttatagctttaaatgagagatctaaaaataaaatagatgcacttgtatttgatcaatataaaaatatagagtttaatcttttttctggttttaatcaggaaagtgctgttttagaggctattaagcatatattaaatgtttgtaattttatacatttaaatttattcttagagaatgaagattcatgtataggtaatctaaaatgctctgaatttgagatagatgaaaatgcatttcctatatattgcttttcaaaaaataaacacattttaaaaacaataaattctgcttacttgttagaagatgaggcagtattttttttgaaaaatttgtttaatgagaaggttgtttctatagagggaaatactaacactagaacagtttcagaaatggttgttaatccactgttggctgctggattaattaagaaaaaatcatatgcatactaa

SEQ ID NO: 47971 - DNA, 489 bp, Acinetobacter baumannii
atgtcatcaatatcaaagccactgaccgcctcgctaaacgtaaagctgattgttgtcgattcagtcgcagtgagtgcagggtccagggccgtaatcaccaagcccggcgccaatgtatcgaccgtaaggctctctgttgcagtcaggttggcattacctgccacgtccgtaacaatacctgccggtacgttcacaaccacatcgccttcaaagtccgcagccggtaccagcgtaccgctgaagctgccatcgccgttgtctacaaggccggtcaatgtaccgttagcaatgtccagcaatccctcaagcgcatctgccgtaagcggactgccatcaaccgcattgactgcttcaccaaagtcaatcgtgattgcattcgttacaggatcaatcgtaatcaccggtgccggagctagcgtatcaaccacaaagccgtccgtaccatcgagtacatcgcctgtacccaagttacctgcaaggtctgtatag

SEQ ID NO: 47972 - DNA, 489 bp, Acinetobacter baumannii
atgtcatcaatatcaaagccactgaccgcctcgctaaacgtaaagctgatcgttatcgattcagtcgcagtgagtgcagggtccagggccgtaatcaccaagcccggcgccaatgtatcgaccgtaaggctctctgttgcagtcaggttggcattacctgccacgtccgtaacaatacctgccggaacattcaccaccacatcgccttcaaagtccgcagccggtaacagcgtaccgctgaagctgccatcgccgttgtctacaaggtcagtcaatgtaccgttagcaatgtccagcaatccctcaagcgcatctgccgtaagcggactgccatcaaccgcattgactgcttcaccaaagtcaatcgtgattgcattcgttacaggatcaatcgtaatcaccggtgccggagctagcgtatcaaccacaaagccgtccgtaccatcgagtacatcgcctgtacccaagttacctgcaaggtctgtatag

SEQ ID NO: 47973 - DNA, 318 bp, Acinetobacter baumannii
atgctaggtaaaaatcatcattttttaaaaaaattttcgatcagtgatgctgctatagcgtataaaaaacctcgctcgactatacttaaatatataaaaagcggagattgcgcacttgactacaataaattgattgaatacagtcagttagttaggaaatttggtgaacttacttaccctatacaggacgaaagagagcaacaaatcaaagaactaaaagatgaagttatgcatttaaaaaaacaacttaacttttttaaatatacttcaatctcaaacaaaaatagactattaatttctcataaacattccatttaa

SEQ ID NO: 47974 - DNA, 318 bp, Acinetobacter baumannii
atgctaggtaaaaatcatcattttttaaaaaaattttcgatcagtgatgctgctatagcgtataaaaaacctcgctcgactatacttaaatatataaaaagcggagatttcgaacttgactacaataaattgattgaatacagtcagttagttagaaaatttggtgaacttacttaccctatacaggacgaaagagagcaacaaatcaaagaactaaaagatgaagttatgcatttaaaaaaacaacttaacttttttaaatatacttcaatctcaaacaaaaatagactattaatttctcataaacattccatttaa

SEQ ID NO: 47975 - DNA, 318 bp, Acinetobacter baumannii; identical to SEQ ID NO: 47974

SEQ ID NO: 47976 - DNA, 318 bp, Acinetobacter baumannii; identical to SEQ ID NO: 47974

SEQ ID NO: 47977 - DNA, 477 bp, Acinetobacter baumannii
gtgattatttggggtacaggttttgaagtgtctcatccacccattggtaaacgggtacataacgaaaaaggggaatgtctggcagaactctggaaagactcctcaccggaagcttacctaggaaccaacattgaaaatgtgccgaacgcatttcttatgctagggccaaatgtcttggtttacgactcattcattggtcttgctgaagcccaactgcaatatattgtagatggtttattgcaaatgaaagcgaaaggtattgctaaactttctgtaaaatcagaaataattaaaaagcataatgagcttgtacaaaagcatttacaaaccacagtattcaatagtggtggttgtaagagttattaccttgatgcaaatggtcgtaactttgcagcatggccatggtcattgaaaaatcttaaacagcgtttacatcatttaaatttagaagaatatgaggggcgaattcaaacatga

SEQ ID NO: 47978 - DNA, 318 bp, Acinetobacter baumannii; identical to SEQ ID NO: 47974

SEQ ID NO: 47979 - DNA, 270 bp, Acinetobacter baumannii
atgtttggtatcgactgtaaccgtaaggtttccccagaaaaaggacaatggtttcaactgcgtttattgccaaatttccatcagggtcaagtggtctggctcaaagattttggctttgtacaattatttaagactcagttaaaagaacagcagaggttttatattgtgcatcaagatgaagatgatttattgtcctttttctggggaaaccttacggttacagtcgataccaaacataaatcgaataccatattttcttatggtttttag

SEQ ID NO: 47980 - DNA, 327 bp, Acinetobacter baumannii
atggacttggttagctatttttggtcaggcaaacaccaccgatccgtcaagggtattaatctcattaccttgtatgcgacagatcagaatggtcaaaatattccaattaatttccgaatttatgacaaatctgaaagtaaaaccaagaatgattactttatggatatgttaagtgaagtactcagttggggtgcaaagattcaatttattacaggtgatagttggtattcatcgactggaaatctaaaaaccataagaaaatatggtattcgatttatgtttggtatcgactgtaaccgtaaggtttccccagaaaaaggacaataa

SEQ ID NO: 47981 - DNA, 483 bp, Acinetobacter baumannii
ttgatttatggcaatcagacaattgatgattttaaaattgatcaatccaaactaagctttggcaatattgaaaataattttgtctttaactatttggatttcttgatttattgtgatgcggaaaatagcaatgataaggtaatcaaaaactttaaatttacgcaacggagttcggttgagcatttttatgcacaacagatagagggagagcgtgataaattagatcatgaaaatttacatcgctttgggaacttgtgtctcattagttcaagtaaaaattcaagcatagggaatcgcttgccaagtgctaaaagtgattattttatgcctgagataaggaagggtaaaattgatacccttaaattgtatttgatgattcaaacgcttgaagaagaaaaagtttggaaaaaagaacaaatcctagatcatgagaaaaagatgcttgatttgtttgagttagattaccaagactttgtgaaatga

SEQ ID NO: 47982 - DNA, 261 bp, Acinetobacter baumannii
atggaagtagtacaactttacccatccgttaaaaatcctattaatgaatatagagaatggctctatgagcttgttttttctattttaattaaaattcaggtagaagacgcagctgcattaaccaatctatttcttaatatcctcgatggagttattaatgatggaacaattgataaaaatttaattaatgctgaaaaaacttggtcttatattaaaaaaataatcgatcttgagaaaattgaggaattagtcgccatttaa

SEQ ID NO: 47983 - DNA, 441 bp, Acinetobacter baumannii
atgtattatggtcttcaatctgttcaagataaaaaagccgtaaatagcagtaccatttttgagctaggttctgtcagtaaattatttaccgcgacagcaggtggatatgcaaaaaataaaggaaaaatctcttttgacgatacgcctggtaaatattggaaagtgctaaaaaatacaccgattgatcaagttaacttacttcaactcgcgacgtatacaagtagcaacctcgctttacaatttccagatgaagtacaaacagatcaacaagttttaacttttttcaaagactggcaacctaaaaacccaatcggtgaatacagacaatattcaaatccaagtattggcctatttggaaaggttgtggctttgtctatgaataaacctttcgaccaagttgaaccgtaccgggtttgtcggagacttttttatttaagttaa

SEQ ID NO: 47984 - DNA, 171 bp, Acinetobacter baumannii
atgattacaattaaagtaaatggaatgaataaagaaatttttcaagatatagtttttactagtgaaagagaaaaaactattagtaaagagggcgaattcaaacatgaggtgcgacagtttgaaaagtcttatgataatcaacaagctgagcaaatttctctaatggtgtaa

SEQ ID NO: 47985 - DNA, 198 bp, Acinetobacter baumannii
atgaagcttgaaaataaaattgctaaatttcctgcactattttcacctttgagtaactatgtcgttttgacttttattggcatgattttatatatcatgtggactcaaagctttgaaaagtcggtaattctcattccaatctggattgcttttatgtttggtttatatacaattttgagttggaaaaaatcactctaa

SEQ ID NO: 47986 - DNA, 339 bp, Acinetobacter baumannii
atggatttagattttgaagatgaagtttgtttgaacaccgtcattctttctatgagtcaatcatttgattatattaattttaatgatttttaccttgaacgttttgatggtgattatgatgagagcattgttgatgatgttgtgagctttgtgaaatcagtaagaccatcaaagaagaaaaaacctctaaatttttcactcgcagccaaaagaaacctgtatcaacgtgaggaaaggaaaacatggagctattgcgaagtatgtgatagcgctttataccttgaatcgactgaagtagatctgaaccgtaccgggtttgtcggagagtcaatattctga

SEQ ID NO: 47987 - DNA, 249 bp, Acinetobacter baumannii
atgtggaagaaagccgtagatttcatgaaatccaaagttccaacgtggattagcgtgactgatgaattgccacctactgacataatggtacttatttgttgggcagatgctcctgatgtcaccccagaacaagactatatgactattgatgaggatttaaatagcgtatgggcaaactatcaaaatgatccaccttcacattggatgcattttcatagtgtgccaaacgtatcgggagctgaacaatga

SEQ ID NO: 47988 - DNA, 177 bp, Acinetobacter baumannii; identical to SEQ ID NO: 47924

SEQ ID NO: 47989 - DNA, 174 bp, Acinetobacter baumannii
gtgcaacaaagccgttttgatggaaaacctcacatccaatttattccaagtgagtgttggattctaaatagtgagaatatagtaagtattattgctgaccgtgaaggtcctaaaaaagaacttttacctgatattattcaagcagcagtaaatcggttagctaaagcaccctag

SEQ ID NO: 47990 - DNA, 279 bp, Acinetobacter baumannii; identical to SEQ ID NO: 47874

SEQ ID NO: 47991 - DNA, 162 bp, Acinetobacter baumannii
atgtctgctgaaactgtgcctgtacctggcaatgaagtgttgcctgcagggtcagtcgctgttgcagtcactgtatcgccatccaccaggttacctgggtttggtactgaccagctaccatctgtgcctgctaccactgttgcagtggtgccatcaggataa

SEQ ID NO: 47992 - DNA, 144 bp, Acinetobacter baumannii
atggtaagaatcgtttgtgcagtaagtatggtgttggcaattgctatgggtatgagtgcttgccaagatcgtaattcaaaaaatgatggcatgcatgaagcaagtgatccagccacatctcatgacatgaataaaaactcgtaa

SEQ ID NO: 47993 - DNA, 2412 bp, Acinetobacter baumannii
atgaacaaaaataaagaaagtcacggctcaaagtttattttaaatacattaacagccagtatgttgttagtgagcggacaggtttttgctttagaagcgttaacagacgctgatttgagtgccgtgaatggccaagatggtatatcgatccagacgacttataatgaaattaatatagacaatgcctattgggacgatcatgcaggaacttcaaatagtgcagatcaggttttgagagcccaagctggtggaataaaagtacaaaagagtaatgcttccacacaaacattaggaacaaactaccgtttggatgtgggcagtaatccaacgacaggaaaaactggtctagatttctccttacagagtaatccttctcttattactgtgaatagttttaaggtctgtaatagttcgtcaatttgctcacctacaatgggacaactggctattcagacttcttcacctttgagtttggcccttactacacaagatggcttatttaatgcaaatagccagtcaagcatgagacttggcctaaataatgcgaatatttatttaggacaagtagatgcacgtacgcaacttaaccaattaattttaaaaaactttaattttaattttgttggtaaaggcgctatgttaattgaccctaaccgaggtctggttttacaaaccaatacggggtctaatactgctgcggttgggcaaactccaaatagtacctatggctatgtcgattttaatcgtgtcgccgattctgcttctggtttaactgctggtacatatgtagacagtagtgggaaagtaaccaattcaggtctaaatattgaggtaatgcttagctcaaatgttgataagtcaaatccttatgccctagacacgacaaatagcccacagaattctaaaggcttgattcgtttaggtgctagcggccgtatggtcaatagttacttacaagtccgtggtatggatggctcttcagataaaacaacattaggtactgccaatacggcttcaggtacgggatcaagtaatagtattttaggtaactctggaattgcctttcgtatgaaaggggagttcactaaagataatgattcgatgttaggttcagatggcaaagcaactaccttggaaattggtggtgcaggtctgaatgcttatggttttgaattcggtaatttaacggggctgaactcggctacacgcggttattttgacagcggaaatatttatctaaatcttgctgatacaaaaactttattaatgccaaataacgcaacgttaaatgcaattcgtttaggatccggcactttaaccactgctgccgattatcagcataatattcatcgtgatacggtgactaatccatttagcttaattcttgccatgcgtggagcagagttccaggcattctcaagacgaggtcgttttaccaccagtgcaaatgtcgttgctgctaatcaatttgcagataatggtttaaataaccagtggggtttggcattacctttttataatttaaatgcgaatgccgctgtctatggtgtagatgcgcctgcaaatagtgcttattactatacaaaagatgccaacggtaaaccgattcaaaatttagttgcaacatctggtacaacttcacgtttaggttttggtatagctgtcggaacgacaggtcgagatgcaggcggtactaaaacaacttcaattttattaattgatggttctccaaatgctaataatgcgggcaaccctaccgattattatatggggttacgtaatattgatatgttcctcaaaggcaatggcactattggtttagaaaatggcagtttaaatatcggtttaaaagatatgttacttgctttatcaaccgaaattgcagcaggttatttaccaggagctaaatataaaacttgtccggcaaccgggtcttgtacttcgccaatcgataactttgccaaaaataatgatgtcttatttggtttaaaactacgtttaggcggcgatcttaatttatcgatagtgccgaatagttcaattgcagatggtagtgctttaactgtactaggtgattttacaatgcctgcgacagcaactggtaatactgtacaaattagcgacccgattgatggttctgcaattggttttgacaatattactggaaagctagcgtttaataccgctttagttgtgggcaaagataccgcaagtggtttaggtaaagttggtgtaaataccgcggtttattttaatcctgataagagtattgacggcgcattacgtgtgaaagatattaatttctatccaccttcaacaggtgcaggagcacgtttaggtgagcttgcaattacgggtggacgtctaaatagcagctttagcattgtgcctagaaatggcgcctttaactaa

SEQ ID NO: 47994 - DNA, 228 bp, Acinetobacter baumannii
atggcaatttatatctcaacaccagagattttacagaggtacaaaatttctaaaggtactttaaaaaatatgcgggaaaggggttccgacccctttcctgagccaattgttagaggtcatggaagagctactaatttatatggtgttaaagcagtagcctcttgggaaagtagaaatggatacttagaagcacttgaaattgagcctttaatatcaaatctttcgtag

SEQ ID NO: 47995 - DNA, 195 bp, Acinetobacter baumannii
gtgagtggaattgactttgagcagctttactatttagcgattcagaatgcaactaaaaagcgtaaatcagatacgaattgggttcacgttagtagattgggaccgggttcaactaaggctcgtcagatatgcgaatattttggagttgatcctgaaggtactgtttttagaaaagtggaaaataaggaggtctaa

SEQ ID NO: 47996 - DNA, 507 bp, Acinetobacter baumannii
atgattattggacgtagtatctttgaagaaaacttcaaaaatacagaaacattcaaacatgaaagttctattcgaaattccgacattcttgtttttagtaaaacaatgaatggctactttaatatagtggttaatgaggcttggcatctttggaataaagaaatgcaagctcatgctgattggtataagaatgatgacccaattgcatttgagtgggctaagtcaggcagtcccgagtatgaagctgacttttatacaagtgcgaaagcttgggcagccgccaaatttcaagctggtccgacttggattagcgtagaagtagatgtaccacctatagataaaatggttctgatatgttgggcaaattcgccagacattgaccctgaaatagactacatgactactgatgatgatttaaatcatatatgggctaattactacaacgatccgccttctcactggatgcattttcatagtgtgccaaacgtatctggagctgaagtgtga

SEQ ID NO: 47997 - DNA, 354 bp, Acinetobacter baumannii
atgacagatttgaataagttaagaagtgagtttgaggaactgccagaggttaagcaatggattgagagattaatctatggtgataattctgaagtttacataatggtagatgaaacagaagaaaataatgccattactacatggattaatggcgcatggtttgtttggaaattaaaagccaaagctcaggcggtgccagagggtttttgtttagtacccaaagagatcccagacaatgttgttagttgtttagaaaatagtggatatcattggggtgatatgacccgtgaccactatgcccctatttattcattaatggtagaagtagcaagcgaatcgggagttttagaatga

SEQ ID NO: 47998 - DNA, 294 bp, Acinetobacter baumannii
atgatgaagtacatacctgactctatgtcatacccattcactgtttggatgtcagaaagtggcttctatccttcttataaaaaaggatacatcgttatgaagcgtggcaaagaagtggcaaagatttctctaatagaaacaaaaaaaggtttcgaaatgaatgaagtctgtcaaaaaagatttacttcattttgccgggtttggatgaataaggataaacgttttattaaccagcttcgaatgcgtggcatttctaattcaatgaaattcagttatcaaaaggtggcagcatga

SEQ ID NO: 47999 - DNA, 372 bp, Acinetobacter baumannii
atgaacactaactaccttcgtggttctagacgttataacaatagtccaaatggtcaagcaaaccttaaatcaactttccgcgaattcgtaggaaaggatgaagaacgtggtttatacaaagtccgtcttggctatacagtttatgctgcaaatcacactttaactcgtgtttatacgattaatgaagctaatgaactaactccagtttcacaatatacgttgaatacaaatgaatggattctacgtaatttacaaactgaaattaaatatcgtagaagacatgagttagatcaaatccttagtaagacgcacattccttcccctgatcgtaaagattataaaaaacgtcgtggttttcttggtacacgctag

SEQ ID NO: 48000 - DNA, 330 bp, Acinetobacter baumannii
atgaatcagaaatatataagcagtcaatcttcaccatccactccaatctgttttgttcctgaacttagcggcaacaaaacaaataaaccagcaatttctaaactttatcatcatccatcagctgaggatctcaagttcaaaaaagatagtaaattgccgtatgtcttactcttcctcgtagttagtgcgatagctgttgcatttatatatgcatgtgatgcagaggctcaagtacgtgagcaaaaaacaaagcaatggcagcaacaatttaactcagatgaaccagttgaagttcaagtacgtgttgttaaatcaggtggtgccgaatga

SEQ ID NO: 48001 - DNA, 261 bp, Acinetobacter baumannii
atggataacaaccagaacaaagttacagatgaacaaggcttaattagcgttacagaggcattgcgagctatggcttgtggtcgtcttgttcaatgtacaagtgaaaactttcctaattggatggacttagaaatcacaaaaattaatgcgaaagactttattgatgaagatcgcattaaaaagaacagttttaagtacagatataaaccttcgttaatctctgtaaacgctgaactaacacatatgaaaaagcctcaatga

SEQ ID NO: 48002 - DNA, 276 bp, Acinetobacter baumannii
atgccgaaagttactgaaattcaaggtgttaatagtgtattaacaactttcgctgaggaagttataaaaattcaaccagaattagctgctgacattcttctaaacattaagaatatctctattgaccatcaccctttagttgaacaatcatttatcttagataattttgaaaatcatgaattggcagcacttaaaataaaagaagctttacatagttttaatcaggaattaactagattaatggttatgacaaagaatcatttgattcaaaactag

SEQ ID NO: 48003 - DNA, 690 bp, Acinetobacter baumannii
atgcatcttcaaaaaaacgttaagtacctgttaaagaagtacagcaccaccactacaggtcttagtaaaaagtctggagtaccacaacccacactttttcgttgggagaacgggcaatataaagaaccaaaaatttccactgtagagaaattggctacatgggctggttatgatgcaaatacccttatcaatagcgatttagaagttattgaaaatcaaaaaattaatgaaaatgctgggttgcttgataacaatgtaaatttatcaaacaaattaaaattagatggggatcaagtacctgttatttcatgggttgcggcaggttcatttacagacgtacaaactgtattaaaagatacggaagtacttgaatggctccctccaatgaaaaaggctggaaaaaatggctatggccttatagttacaggcacttcaatgttgccaaaattcgaaccaggtgatcgaatttatgtaaatcctgacttcccagtttttgatttaaaaaccaatgatttagttattgtctcatgtgcaggagacactcaagctacttttaaaagattaataatcgaagaaggtgaagaaaaatatttagagcctctaaacactaaatggcctgaacaaataataaaacttacagaagaatgtaagttagttggaaaagtcgttggtatgcacagagaattttaa

SEQ ID NO: 48004 - DNA, 234 bp, Acinetobacter baumannii
atgtgcatgaatattcaagataaggttatttacctttcaaatagccgaggtttgactcaacaacaaatctccgaacgtactggtatttctcagagctctgtttcaaaaatttgtcgaggtgaacaaaaggaagttgcttataacaaaggtgcagctttagacactttagtagcaaatgaacggatgaaagaagaagttgaaacaaagtccaaaactctaaaagcatctgcttga

SEQ ID NO: 48005 - DNA, 375 bp, Acinetobacter baumannii
atggctgaaaaacttttagcgaatgcttcagcaaaattatctttagaagaaaaagcgaagatggaatggattgccaaattagaaggcagtgactctctatcaaaactcatccggtctatgtgtaagaaaaaaatttcagaagtagaaggtgagatggctaataaaagctctctagatgtaattaaaaacatttgcacaagaaaaatctcagcagcagaaactgaatacgagtttctcagaaatctttttatagggtcaaaagaaaacgggtataccgcagatacttttgaattagtgcctttacgggcagaaaaatcacggcattcaaatgcatgtgacaaatcagtccagctggatctacttagctggaaataa

SEQ ID NO: 48006 - DNA, 642 bp, Acinetobacter baumannii
atgactgtacgaccaattttatttaatactgaaatggttcgggctattttaaatggctcaaagactgaaacacgtcgagttattaagaataaggttctaaaaaatattggaatagctgagcatcttggcgaaatctttgggatcgaagattctaaatcaaaaatatcatcttactttcagaaatattgtccttttggtgcgattggtgaccagctttttgttcaagagacgtatggctcgaaaattcgaagtttaggtggaacacctcataagtcttttgtctataaagcagataacccaaatgaaattgcttattacgactgtaatggaaagggttatccagttagatggaagccatcttctcgtatgcctcgtaaagcatcacgtattttgcttgaaatagttgatatccgtgttgagcgattacatgaaatcagtgatgaagatgctaaggctgaaggttttgataagcctaaaggtgtttcaactaagcaaagctattgttctcataacccagtgcttagctttcaaagacattgggaatctataaaaggtaaagaatcttggaaagaaaacccatgggtttgggtgattgagttcaaggttaagaatgttctaattttttcaatggggaacttttaa

SEQ ID NO: 48007 - DNA, 1680 bp, Acinetobacter baumannii
gtgaatcaagctttaccaaagtcatttgaaaaaacatccaaagcattcaaaactcaatttgctcttaactttagtgaaaaaattattgttgatttctttgctggtggaggcggagccagtactggtctagaaatggggcttaatcgtccggtctatgtagctgtaaatcataatcctaaagctgttgcaatgcatgcagcaaatcatcctcatacaatccattatgttcaggatgttttcgcagttgacccagttgagatttgtgacggctatcaagtaggttggtttcacgcaagccctgattgcactcatcactctcaagctgctggtggtcaaccgcgtaagaaagaaataagagatttatcgtgggtagttattaaatttgctgggaaaacgaagccagatgtaatcaccctcgaaaacgttaagcaaatcctcaattgggggcctttaatagctaaacgtgataaagcgactggacgggtaatcactttagataaagttgaagttaaaggaaaattagttaaccgagttgctgagcccggtgagcgtgttcctagaaataatcaatttttaattcctaaccctaagaagaaaggaaaaacttggcgtcactttgttcgtagcctcgaaaaattaggttatgtcgttgaatggaataaacgcattattgctgcagactttggggcacctactactagagaaaggcttttcttgattgcaagatgtgatggtcaacctattgtgtggactgatgcaactcattttaaaaaggcaaaacgtggtcaggaaaaatggcgttcagctgctgaatgcatagatttctctgacctaggtaactcaatttttgaaagatctaaacctcttgcagatgcaaccttaaaacgtattgcacgtggtttacaaaagtatgtaatcgaatctaaaaagcctttctttgtgaattcagctgtaccatttattgggcgtgattttggtacgtcaattggtcatagtattgaagaacctttagcaacagtgacttcttcatttggcggtcatagctcattaataagtcctattttagcgccgtttttaactgaatttgctaactcatcacatcagcgtaattggtcaattgaagagccactaacaacaatctgtgctcaagtgaagggtgggcatcatggtttagttgccgcttacatgatgcaggcaaatggtggcttttgcgagtctgatggaagatctcttcgagaacctttatcaaccatcacgaatactggtagccagcaacagcttgtttctacagttttaagtaaagaaaacttagacggagctttaaaagtagcagctttcctcattaatttttatggcaatggggatgcgcgtgatattacagcgccaatggacacactaaccactaaagaccgcttagctttagtgaccgtttgggttaaaggtgagccttgggtaattgtcgatatacgtatgcgaatgctatttccaagagaactatatagagggcaaggatttcctgaaacttacattattgatagaggacttgataacaagcctttgagtaaaaaagaccaagtgcatatgtgtggtaatagtgtttcacctttgcctatggctgcaattgctcgcgcaaatgatcccttctttaatcgcgttgcaaaggtggagggagcagcatga

SEQ ID NO: 48008 - DNA, 1077 bp, Acinetobacter baumannii
atgaataagatcttatttggtgattgccgtactttgatggcacaaatgattcaagagggtttgaaagctcaaacttgtgttacttcacccccatattttggtttaagggactatggtgttgatggccaattaggtttagaaagtacagttgacgagtacgttcaaaacatggtcgaagtatttcgcttagtacgtgaacttctgcatgaagatggaaccctttggttgaatcttggggatagttatgcaggttctggcagaggtatgactcgcactggactaaacgatggcaagaacccaaaaacgaaagggttaattttacctaagcaaaatgcagctcaatcaaatttaaaaccaaaagatttgattggtattccatggaaagtagcttttgcccttcaagctgatggatggtatttacgccaagatattatttggcataaaccaaatcctatgcctgaaagtattacagaccgttgtactaaagcacatgagtacattttcttattcagcaaatctcgaagatattactttgaccatgtagctatcaaagagccagttgcagaaagctctatcaaaagactttctcaaaaccttgatgaccagcaaggtagtgaccgtgttgttaataagcataacggtccaatgaaagctgtttactcgagatcttcacgagacagttttaaacgctcaaatagcaagagagctgttgctcatcataatcaaagtatgggtactcatcgagcagatcgccaagaaagtaattatgacctacttacaagaaataagcgttctgtatggcaagtctcgactaagccatataaaggcgcacatttcgctacgttcccaatggatttaattgagccatgcattcttgcaggatctcgagttaatgacgttgtctttgacccttttatgggtagcggtactacagctgctgtagcaaagaagttacgaagaaaatatttaggctgtgaattaaatcccgcatacgagcatttgcaaaaagaaagactgtctcagattcaagagcaatcaaatatggaactgcctttagaggaggttagccatgtctaa

SEQ ID NO: 48009 - DNA, 1038 bp, Acinetobacter baumannii
atggcaagatctagaaatattaagccatcattctttatgaatgaagacattattgaattaccttttgaagctcgtttgttatttatcgggctatggatactagcagaccgtgaaggtcggttagaaaatcgacctaagaaaatcaaaatgtctttatttcctgcagacgatataaacgttgcagaacagttagagaacatttctaagttcggttttatcgagttatacaacgcggatggtattgatgttatccaaattattaattttgttaagcaccaaaacccacacggcctagagaaagatagtgaactaccaaaccgtaatggtatctatacagcgtactatcgtaacccgaaaaacaaaacgattgtaggaaagccaattcagttaaataagactgatttgaagcatttttacgataaaacaggtccatttgcccctcaaaatagtaattctgctggtgaaaacagttatcaagataacgaattgaaccaatcaaacagtattgagaataaacaagaacagttagataacggttctaaaactgtttctatctcagaccaaaacgccctgaatcctgaatcctttaatctgaatcctgattcactgaatcctgaatcctttaatccagaaggaaataataactccgccgttggcgaagttgattcatcgactcaagcaaaatttagtttcaagagtgctttgaaaaaaaatggtgtacctgagaaagacgctgctgagttcttacaagttcgtaaagcgaagaaagctcaaaacaccgaaaacgcttttgacgcacttttgaatgaagcccttaaagcaggaatcactcttcagcaagccgtcgaatattgtttgaaaagacaaaatccatggggagcattcaaggcttcttggtaccaaaacgaaaatcccgatatgactactggtcaacagcaaaatcaccaatcattaccacgcaacgtaaatgatcaatggggagcaccaaaacaatatgagccagtagctcacacagaagtagagggtgaattgatatga

SEQ ID NO: 48010 - DNA, 543 bp, Acinetobacter baumannii
gtgaacgcatttgttgatatgaaaaaatcggaatacgcattagttgcttactcaaacgttgcagctaaatcaaaagagcgtaaagctttagaaaaagcagttaaaaaatggttaaaaaaaccaggtaataaaattaaaaaaattacctctgatgaagttgaaattattgcagttactcatggtacagcatcaacgtataaacgtatgggttgccgctgtgaaatttgtgttacttgggccatttcatcaggttttgtaaaaacgaagccgaagtctgaaataaaacgtggtccagatgagcgtcaattgcgtattcaggcacaaaaacaaggtttagataggtttgctcaggtatttaaagaagactggcaattactggcatttgagatcgggtatgcgattacagcttttcaacttgaacgggtttatcaaggtaagtctgaaattgatcaatatttcacatggaagtatgtgaagaaagttgcggatcagttagttgctgaaaagttaaaagctaagggggggtgtgaaaatgaaatctaa

SEQ ID NO: 48011 - DNA, 732 bp, Acinetobacter baumannii
atgaaatctaattcagccagcagaaaacggttaaaaaaatacaatccaaataagctaacaccagcgcaagttcaagctaatcagagaaaggctgaattgcgtagagaagctgctcaagaatatgagttcagcatgcgttttgtttcgaaagatattcgggagtttattgaaaataaaaatatcgaagaggcagctttactagagcgcttccctaatcgtttatcaattccatatcacttctgtatcgctgcatatgattatcaggatttggcaattgttcaagtgcttgagcatgttaatgaatgtgaacaatggaatgttgagctcactattacgatgtctgatagaaccgatatctatgaaggttcaataattgtaaatcaacctcttacagctccaaagatgaattactttgagttttggtctggtaaaaaggattgttatgttgatttaggtggtggcatacgtgtcaaaggctggaaaggcttaaatgatgagattttgagagccttagaacataacaaaaaaattccagatggttttggaatagatcgtcttgaagtctatgtaactacatcagccagttttaagagcgttgatacctatcaagagttcttgattgtagctgaatggataaataagggtatagccgaggagcaattacgcaagctttggattgctgaccaactcattggtaacggcagatcatttggttatgagggcgcggcatga

SEQ ID NO: 48012 - DNA, 372 bp, Acinetobacter baumannii
atgatgagaagattaaaacaacgccagcgccaacaaagaagtatttttgcgatgttgcaaagcaactctagggagacaagtactttcaaaagttcggagactgttactccaaaagaacagcaagcgcaatctgcaaaacctagatatatcttcacagaactggggaaagagaagctttgtaaacattgtcaagaatattggcccgttgattctgaattttggttcatggttaaagcaaaacgtaaagatggatcagttgtacatcgtccagattcagcttgtaagggatgttatgacagtacctatcgtccgaatttatctaagggtaaatatcaaaaacgctcaaatcatgaaaagggagctgcggcatga

SEQ ID NO: 48013 - DNA, 408 bp, Acinetobacter baumannii
atgaactgtttccaagaaaagcagttaatacaaattgacgaagagcagaaagttattaagttcactcgaaaacgtgaattaattgaatgtgatcataaacatattcaaatttcggaagaagagagcgaagtactttgcattgattgcaaaacaaaattaaaccctgttctttggatagctaaatacctaagacaacttaaccaagttacagatcgtaataacagaatgttagctgaggtaagggtaattcagtcaaagcttgaaaagaaaaacaagtttatgtgtaaaagctgtcatgcggttaatgaaattgactttaagaaattaccttctcaagccgctattacacgtggaatgtctgtaattgagcaagagtttgacggaatgaaagtggagttctgccaatga

SEQ ID NO: 48014 - DNA, 285 bp, Acinetobacter baumannii
atgaaatacaaaattggtgatagagtctatgtagatttcaaatcatgtaatcgaatggaaactgatggaactcatatttttggtgaaggccagattgatagggtcgatgaagacaatgattttctaattggaagactcgataaaggtggttattttggttgtccatcttcagatgtaaaacctattaataagtcatgtgtacacgggtacgatgttgcatgtttattatgtggttttggtcaatctgaaactactggtgaaagaatctggcatactcaacgatag

SEQ ID NO: 48015 - DNA, 780 bp, Acinetobacter baumannii
atgactttagaaatatgtaaactttgcggagaagaaaaagagttacaacgctctcatgtaataggtaaagttgtttttagtaagattttaagagaagtagaaaatgggtatgcaatcaatatctcaattggaaaaaatcaaataaagaaaagtacagatacatgggattcaaaattgctatgtaaggattgtgaaagattatttaatcaaaaatatgaagactactcttatcatgttttaagaagagaacaaaaaggcattttaacaaatgaaggtccacacggaatttattttagtaaagtaaatacctatagagttattctctatttcttctcaatctattggagagcgggttattcaactcactcagcttattccaatgttgtaatcaatgaaggtattagtaatcatttaaaacaagttttcaaagatgaagcaaacttaaaccctaaagccttcagtgttagagttaggttgttaaaagatgaatccggaggattccctccagaaagcctaaagcgaattatcataaatccatataatagaattcaaggtaaagagtttgttttatgcatgatttacgaaggattcttttttgaactattttgtaatgctagtacttttaaagatagacaagcacctggttttttaaatagagcaaaagattcattttttgtaccttatgtagatttatttgatatccccgaagttgtgcaaacacttgctgatggtctaaaaattcataatgagacacccgatgaaaataaaattaaaatataa

SEQ ID NO: 48016 - DNA, 216 bp, Acinetobacter baumannii
atgaaaatatgtattggtggtgatcttaatggacaagtggttgagaaggatgtttattcatttaaagcagctgatatagatcctgagaaaaagtcagagtatttcacccagagttttatactgggtgataaaactcatagattctggattagtaacgatattgattttcatgaagcctgcaaaatcgttgaaaagatgattaggcatcaagcttaa

SEQ ID NO: 48017 - DNA, 264 bp, Acinetobacter baumannii
atgacattcattacagcagctgaagctgcaaaaattgcagaagcatctcaaccttttacttcaagttatttacttgaagaaattaaccgaaatattgagaaccttgctaaattaggagagcgtgaagtttactatcctacactgaaaactcgcacttctttagatactattcaaaaagttgaaagtgagttagtaaacttgggttataaagtaagcctagattcaagagacaatgaaaaatatgtacttcatattgtttattga

SEQ ID NO: 48018 - DNA, 2244 bp, Acinetobacter baumannii
atgacagattcaaatcacaataatccagttttatcttacgatgagctgggcttcatcatcgggatgaaacgagttgaaaaaaaagtaagtacgattgattcgaatattgaaaagattatcgaaattcttactcaaagctttgaagagcaaaaagcacagtttgctaagcctcagacaaaactgactgaatttcaaaagatgctaaatgctatcaataatagaccacctttagaatttgaagatttattaaaaggaaaagcaaatcctgttacacagtcttttgttgtagcagacaagatagtcaaagactttgctgatgttttggaccaatcagttattgaccttactacagtagataaaaaacaaatcaacaatgctaaaggacgaaagccagctatagaaattaatagtcatgaagacttatcaaaaattgtaaatcctactgttcctgagcgtgatgaaaagggccgttttgtatctaatccaaatgaaccccaaaaccaatcatcgattcgtaaagttgcccaaacgatatctacggcgattaaaggggtaatgccgaactcaccacaaggtgtagatcctacagttgatgctatcaatgaagttagtcatttactttcacctgtacgccgtgcagcaggattagctttgcggccattaactggattaatgcgtagtaaaaagcgaaatgagccattacctcgggaacaagagaaccataaccgcaaacaaataaagttattgcagcgtattgccgataatttagcttctaagggtggtttgttaggttcactagggaaattactttctacagctctatctgctggcagtgggcttctaggcggtgttctaggcaaaggaaagaaaggtgtagggaaattaggaaagggcttgggtaaacttctcaagtttggacgtggtctacccgtaattggtgcactggctgctggtgcatcattgttagattggaatgaacaaagtacacaagaaaagggcggtaccgttggtagtcttgcaggtggagtaattggtggtactgtcgggtctttatttggtccagctggtactttgattggtggtatggctggttcttggataggtaataagctaggtaccgcagttgcgccgtattttaaagaatggaccgattcattaattgctgcagatgtaccaagtattattaatactgcttggaaaggatttgtaagctatgcgtctaatgcttttgatcaggcgaaaggtactgcttcaaaagttatagacggcgttaaagatactgctggtgatgccttagacttcattaaggataaatttaaccggtttaatccatttcatgaaggcgttccaacatggggaatcggtcaaggagtttataagccgggttttggagcaaatgctggtgtagctcaatatggcgctacaattgcacaaccagttaatcgatcagctgctagagatgaggcattaaagtttttcacaagtaaggaaggaggaaattggacaccagagcaagctgctggaatagttgcgaatcttgaagcagaaagtggctttaaacatacggctattggtgataatggtaaagcttttggaattggtcaatggcatcctgatagacaagcaaaatttaaacaaaagtttggtaaagatattcgtcaatcctcatatcaagaacaattagcttttgtgaactgggaattaaataacaatgaatcatctgcaggtaaaaagttaagacaatctaaatccgctaatcaagccggtgctattgtctcccgatattatgaacgacctgcagcagttgaagctgaagctatgaaacgttcagcaatggcacaaaatatccatgttgatgcaggcaaaagatctctacttacagataagcaagataactctaaaacattaaaagatgtagaagctaaaacagtgaagagtgcttctggcattgagccaaagcaaggaaatatctataaccaaacaagtagaaaactctcaggcgttttaagctctcaaactccacatataccaacttcaaaaagggatcttagctcaagtggtactagtctaaaaagtactcctataacaaaagtaccagcttttaaacagccacttaatactccaaatcctcaggaagtcgttgttgttaatggtaataatggtaatatcggtcagaatgtaaatgatagattcctagcacatgctttaactggtgggataggaatgggaaacttagaaggttag

SEQ ID NO: 48019 - DNA, 2472 bp, Acinetobacter baumannii
atggactcaaaaaccacaaaattaccagcatatagtgaaacactctcaattgagggcatgacttgtgcctcctgtgtaggacgtgtcgaaaaagcacttaagaaagttgaaaatgtagagattgccaacgttaatttggcaacagagaaagccgttgtttattcaaatcaaccgattcagcgtgaagccttgattaaagcagttgaacgagcaggttatgatgttccaaaagctgcaccagtagagttgtctattgagggtatgacctgtgcatcttgtgttgcacgtgttgaaaaagccctcaaaaaagtagacggcgttcaagaggcaaccgtcaacttagcaacagagcaggcttgggtacaagcagatgcatcagtcaatgttgaagacctaattcgcgctgttaaaaaagcaggttacgacgcgaaagcatttgaaaaaaatcaagatgagcaactcgataaaaaagcgtcagagttagaccagcttaaaaaagatttgatcatttcgattgtgttagccttacctgtgtttattctggaaatgggctcacatctcattccagcttttcacatgtgggtcatgcacaccattggccaatacaatagctggcttttacagtttgttttgaccacattagtactcgtttttcctggtcgccgtttttaccgaaaagggattccagccttatggcgtttggcgccagatatgaactcgctggtcgctgttggaactttagctgcctatagcttttcagtcgtggcaacctttatgccgcaggttttaccacaaggtacggtcaatgtttactttgaagcggctgctgtaattgtcagtttaattttactcggacgatattttgaagcaaaagctaaaggacgtacttcgcaagcgattcaacatttagttggaatgcagcccaaaacagctcgtattcagcgtgacggtcaagtggtggaagttgctgttgccgaagtggtcagtggaactattgtagaaattcgtccgggtgaacgtgtgccagtcgatggtgaagtagttgaagggcacagctacattgatgaatctatgattacgggtgagcctgttcccgttgaaaaaataatagggcaacaagtagttgggggtacagtcaatcaaaacggtactctaaacattcgggcaaccgcagtcggtagctcgtctgtactttcacaaattattcgcatggttgaacaagcccaaggttctaaacttccgattcaggggttggttgataaagtcactatgtggtttgtacctgtagtgatgttaattgctgcaatcactttcttggtttggtttatttgggggccagagcctgcactcacttttggtctggtaaatgccgttgcggtactgattattgcgtgtccttgtgcgatggggcttgcaacaccaacttctattatggtcggtactggacgtggtgctgagctaggtgtcttgttccgtaaaggtgaagctttgcagcttttacaagaagcgcaagtggttgccgttgataaaacaggaacgctcaccgaaggcaaaccgacactgacagactttaatgtgcaatctggctttgaacgtaaccaagtgctgactttagttgcctctgttgaagccaaatctgaacatccaattgccctcgcgattgtgcaagcagcagaaagtgaaggcataaacttattaccagtaatagcatttaactcgattacaggttcaggtattgaagcggaagtttcaggtcaaaaagtacaaattggcgcagaccgttatatgcaccaacttggtttagacaccagctcattccaagcgattgctgctcaattaggtgaagaaggcaaaacaccactctatgttgccattgaccagcaacttgcagcaattattgccgtggcagacccaattaaagaaacaacctatgctgcgattgaagccttacataaattaggtctcaaagtggccatgattacaggagacaaccgtcatacggcgcaagcaattgccaaaaagctgaacattgatgaagttgtggcagaggttttacccgagggcaaagtggatacagtccgccaactgcaaaaacaatatggtcgcttagcttttgtaggtgatggcattaacgatgcgccagccttggcacaagcggacgtgggcttagccattggtacgggcacagatgttgcgattgaagctgccgatgtggtgctgatgtcaggtagtttaaaaggcgtaccgaacgcaattgcgctaagtaaagcaactatgcgaaacatacgccaaaatctgttctgggcatttgtatataacgtagccctgattccaattgcagcaggggcattatatccagcatttggtgtgttactttcacctatgtttgcagcaggcgcgatggcactttcttcggtctttgttttaggcaatgcattacgcttaaaacgttttcatgcgccagtacagtaa

SEQ ID NO: 48020 - DNA, 621 bp, Acinetobacter baumannii
atgaataagtttaataaatttaatttattggcaattggtacttttcttttggttttgtgtgcttttttatcatatgtaggagaaaaatggttaaatttacagggagattacttatctgcagctgctacactattcgctgctgtaattgcatttttattgttcaacgattggaaagaccaatttttaattacaaaatttgaaaaatattcagaagaaatagagtctctttctaaacaattaagaggtgagatgcatgaaattgggtatttaaaaaatagaaacgatgaggaatctaataaaattttattagcgaagtatattaaagtaagaagaatactaaggtttttaaatcaaacttttttaatatatgtgtattttctggagaattttgaaaaggacaatttagaagagtataaaaaacaaattcatgaattgctcacagatattcattttctcgtggaattattgaatgagatcaatcgattggaaagtgatgaagttaaattgcaaaatttaagtcatcaaaatataaatagaaaactacaaaatgtagatatacaggtattcaatttatcaattgactctcgtactagaatatttaatctccttttgaaaaagtaa

SEQ ID NO: 48021 - DNA, 450 bp, Acinetobacter baumannii
gtgaagagttatcttgctcaatggttaatagatcttgggacaatatttagcataattggtttttttataactatatggctactctgggaagctaaacagttacgtaaatcttttttcagaagagcgagattaccagaagtaatagaaaatttaacaattgcttctagcaagttatcttctcatttaaaaaagtgggaaacagaagataaagaggcgattcatcaactttctatttgcaaagctgtgatcgaaaatgttacacccaaactacctgataatgcgcaaaaaaaatgcaaaatttttgtaaaatcagttaccccaacgacttttctaatatggacttttggtagttcagatattgataaggataaagcgtgggatctgtacgccttgctcagcgaagtagtaacaatgcttcaagaattggaaaaagatttgaaatgggattaa

SEQ ID NO: 48022 - DNA, 363 bp, Acinetobacter baumannii
atgaatattgacgaaaaagcaattctattaattacaaaattagtcagaaagacatctgctgatgaaattaaatggaaggtcgcaaatccaccaaaatctttagtttctgcaacagaggatgagatttttacattctttgaggcaaattataaagaaaaaaaatttgctatatttgagcgtaaatctaaatatttttttgatgagcatgagttttattggacaagtgatgatgtctttgcaattttagacaataatgaaaatgtaattttagaatattctaagaatacgccagtcttagttgatctttttacaactgttagagaacaagtagcagatttagataatcttatagatgatttataa

SEQ ID NO: 48023 - DNA, 1212 bp, Acinetobacter baumannii
atgagtcatttacaaaaggtagccgcagataagcaatcgcttggttttgaatttcaggattttgtttatattgaaaaacttattgaacttaagccaacacaatctttaggattagaggtttatgatgacattcatgtaacgactaatgatgagaatggagatactaaagaacttctccttatccaagtaaagcactcaattgacgctagtaatattagtgacagagatattgatatctggaagactttttataattggctaaagctagttcctgagttaccagatcatttacaacttaaatttcagttatacactaataagaaattaaatagtcaagaattcgttagtctactgaaatatcctaccaagaatattaaagagatacttaactttattaatcaaactaataaagaaatttctgaagctgaatcaaaaaagaagcctggggattcaagtaacccaattgcaaaatatgtaaaagccatcgctgaagctagtgatgatgatgttagatttatctttgaaagattcgaatttcattcagataattctgcaataattaatagaatatctctagcattaagacagttagctattccagtttcacgtattgatgaaaccagaaaatatataataggttcattcaaagaatctaaattttcaagagttataaagggggacaaggtagaaataacttttgatgatttccgaattgagatgggctttgacagaattattagatctgctcgtgctttacctgcagattttgatgaatttcttgatatctactacagctaccaacgtccagatactctttcatttaataatagtaaatttcatgaccaactcaaagatattggtattgacgatgaggaaattgtggataggggaattgaaatgatgcttgctgatcagtttatgaagtctttagaagatgccggttcatttagtgcaagtgaaaatgtgaggttagaacatagagccgtctctgattggaaattaattcataatcaaatgcatagagcaaatgctggagatgatgaagttaaacatttacaagcatcactcgattgctattatcaaacgatgagaagttctttaaaagcgggcaatgttgagcttccaagtaatttgagttgtgggaaatatatcaagctttcaaatctaccacggataggctggcgcaaagattggaaaggaaaatttgaataa

SEQ ID NO: 48024 - DNA, 453 bp, Acinetobacter baumannii
atgaatcgtttatttcacaatgaattaatgggtgtagttgcaatacaaagtgctttagagaactcaaatgaacatcggttatccctagcaaaagtaatgctagttctacctttgctttttgataaaaatattcgttcgatccttaaaagaaaaaatagtgttgtgttaagtagtaaagatctactgctttctaacccggaagcttttattaatgtacgagcaaggtatgaagatttaattataacttcattaaatagtatgattcttatacaagaattaggtattgcagcactcacgggtgaatatttgacactcgaaaagcaaatattttttcaaaataaaaatgaaattggaaaaattgcctcagatattttggctgctggccctaaacttgggctccttcttaatgaaactaatataaatctttatcaaacttttaggattgatttgtga

SEQ ID NO: 48025 - DNA, 1854 bp, Acinetobacter baumannii
gtgagtaatattcaaatttcaaatattgtactttggcaaaagaatggtattaaacgaacccttgattttctacctaatcgtgtaaatgttattactggagattctggtaaaggaaaatcttcaattttatttattatagattattgtttgctagcaagtgaaaccacaggaatatcaaaaacaaatattgattcaaaagttgaatggtatggtattaagctttctatagatggcaaggaaatagttatagcacgcccttcggaaagcaaaggtgcaaatgatcaagcatattttagtgaaaatggtgttatcccgcccttaccatttttaaatattagaattgataatttaaaaagagtcttaagtggtgcatttggtattgatactgatttacgagtgccttatggaggcaaatatatccaagcaggttcgaaagtctcttttcgcaactttctagcatatagttatcaagatcaaaatactattgttgcacctgatcatctttacattcgaccgactgatggccgatatcaggaagcaattgaacgcacatttagaatggctataggtgctgagaatgtggatactgcgttatctcgtagtcgtctttcagaactagagcggagaagatctattcaaataaggaaaattgaatcttatgaaagatctgcaaaaatattttctgaagaggtgggaacgttatctaaagaggctcatttgcttggaataattgaaaatattcctgaaacttatgacgatagtattaccgcactacaagagttggttcagtcgcctatcattcctagtaatcaaaatcatgaaattgagaagattgagtgtgaaatatttcgtttaactgctaaaaatcgccaattaaaagcatttcttgataataaatctatttatattgatgaacttaaagcagttgaggattcactaaaaccagttagtatttttaataaacaagccgataatttatttccatcagaatttgctaataaaattattgctcgattaggtcaagaactttcaaatataaaatcttcactgaaaaaccgtaagagttttccttttatggatgaggtgaaaaatattattaatcagaatgatgaagaaatacgagctcttaagaataaattgtattcaataaaagaaaaccaactcattgcttgtaatcctaatgattattataggtatttagggcgtcttgaagctaaacttgaagtttatagccgtattgaaaataatggatatcaggtacatgacgactttgatagtgcaatagcggctttaaggcgaatagttgatgagaatgaagaaaaaagtaatttagctaaacaggaattaaatcatttaattaataaacgacttgctaatctacctttgaaaggttatgaaggtttctctgcttcatattatgaaaaagagaagctgatccatttacgttctccagactttaatattctagagaatatgcctgatgtaggaagtgcttcaaattatctttatcttcatgtttcatattttctcgcaatacatgaaatagcaaaaaagatgcgaattccttgggttccttcttttttagttctggatcaagttagtactccttacttttcaagtaatggggaaccaaatgacgatattcgtagcttagataaagtattaatagaattgaatcaatttgtgattgatatggataaatatgagggattccaaattattttattagaacatattggtatggaacattggacttcactgaatttagatagatttcatctagtagataaagagcttcgtgatgattatggactcattctcgacatgcctggaaataaagatttagaagaataa

SEQ ID NO: 48026 - DNA, 900 bp, Acinetobacter baumannii
atgagattggatcgtattcaggcaatgcagttttttgttcgggtggcagaagctgggagctttatccacgcggcagaagcactttcactacccgcttcaacagtcaccagcacagttaaaaatcttgaaaagtatttacaggtacgcctattaaataggacaacgagacgggttagcctgactccagagggagcagaatatctcatccagtgccgagaaataatcgacctcattgaacacaccgaatccaacctgactaacgccatcaaacagccacagggccgattacgagttgatatgcctgcgggcattgctcattcggtcatcatgcccaatctgcaagagtttcaacagcgttaccctgatatttatctcatgataggtgtcagcgatagacaagtagacctgattaaggaaggcgtggactgtgtaatccgcatgggaaatttagagaactccacgctggtagcccgccctcttggtgagttccgctgggtcacatgcgcttcagctgcatatttaaaagaaaatggatttccacaaactcccaatgatttggaacatcaccgagctattcattatttttcagggagccacagacacgctggtgaaatgcgctttgtacgaaatgaagagaaaaaaaccgtacaaatgaatggtactgttgccgttaatgaaactgagctttatatcaaaatgtgccttgaaggatatggcctcgctcaacttgcagaaagacttgtgatagatcacttaaaagaaaaacgactaatcgcagtattacaagactggtgtccaccacctgttgccgtgactttactttatccacatcagcgttttctttcaccagcagtacgggtgttttctgactggatagacgagctcattaggaattattaa

SEQ ID NO: 48027 - DNA, 1389 bp, Acinetobacter baumannii
atgactgattacaacagaaacatagtgcagctgactaagtcttcaccaaatagaacactgattcgcggggcgacgatcctaagcatggatagcgtaattgggaacatggttcgcggagatattcttatcgagaacggtacgattatcgccgttggtgaaaatttagaagccgaaggtgcagctattattgatgcatccaatatgatcgcgatgccgggtatggttgatacccatcgacattcatgggaaggacaattacgacggattaatccgaatgccgaaagcttagaagactattgcaacgcgacgcattattcttttgccaagtattatcgcccagcagatatgtacatcggtaatttgcttacagctctaggttgtatagatgcgggtatcacaacattgattgataactcacacaatagtcgcagtgcggcccactctgatgcggctgttgaagctttactagatgctggtattcgggctgtacacgcttctggtgcaccagtaacaggagattgggatagagcgaactggcctagtaatctcgaacgtcttcaagaaaaatattttaaaaatagtaaaaacggtttggtatcattagctgccatggctcagttagaacccgaattatgggctgaggcacgcagattagggctaccaatcattactgaattttttggtggggaaatggctgctgcactagagggtctgcatcaacaaggtctgttagggccagataatatctttaaccactgtacctcgctgccagatgctggatggaaaattttgcgcgaagctggagtgcgagtaaacgtatgcccacgatcagatgctcactatggtatcgaagacggtatgtttgccatgcaatcggctctacgtcatggcattagacctggtttgagtgtagataatgaaacgtcttatagtggcgatatgtttatggaaatgcgcgtagcattttacttacagcgtgtaatgggcatgcaccaaaacaaatgttgtggttcggcacattcgccagtgacctttcaggcgcaaaaccttctcaaagctgcaacggctgatggtgctacttgtgcaggtctgcaagaaaaaatcggcagcctgacacccggtaaacaagctgacctgatattaattcgaacggatgacattaacctttatccgtctggtaatgcatttggcacggttgttcatgcaactgaacgcagcaatatcgatacggtgatgattggtggaagaatcgttaaacgtgacggtaaagtgttgggtgtggacagtgagcaacttcgtgcagcgattgatgaatctcgccagcatcttttcgttgcggctggttatactccagatatttttaccgagacgtttctacctctggaataa

SEQ ID NO: 48028 - DNA, 462 bp, Acinetobacter baumannii
atgtctataaatgttatctattacctcatggcttttggtgcggggctggggattactctacaaaccacattgaatggccaactggctaaaggtataggcgggaattctgtcgctgcggcattattttcatttactgctggtgcggtatgccttgggatttattctctaatgcgaggaggaatagctacttcgctgatcgctattccaacccagccgtggtggacccttttaggtggggttctaggttcttgcgcattactgagctacgtagtccttgcacctagaatcgggttatcggctttgctggggctggcaattgctggacaaattatctcgtcattgttgattgatcattttggattactaggggtggccgaacgaccagtttccatgtttaaactatgtggaacactggtcatgctgataggtctagggattgctcttttcggtgacaggggatga

SEQ ID NO: 48029 - DNA, 279 bp, Acinetobacter baumannii
atgttttccctgccccaagtttcaagacagggagacttatatatatcaggtgcacaatttaattgggacaaattagcaatttcagaagatgcaggtaagacttggcaaatgcatgaaataatggctcctagttctatcgttactttaaattcaggagcacttcttaacatcctttattctggccaatatgcattggttaaaatatcgaatgataaaggtaaaacttgggagactctttatagtacccataacagaaatttaagagacttatcaaaatag

SEQ ID NO: 48030 - DNA, 1410 bp, Acinetobacter baumannii
atgagtaaatttaatttaagattaggggttaccttaatagcgatcgcacttttacaggcatgtgcaacgacgccacaaccgaaaataacgaataaacaagcaaaaggagtgctggaaactataaaatcggatgaaaaactaaatcctattgtactcagtattagttttaatagtggaataatttatccttctttaaaaatagaaagccttacagaaaaaacggcaatacagaaaaataataaaatttatgaaattaaaatgataaattcagatgtctctcgctctacatttatttatagtggacaactaccagctggtgaatatcgcattgttgaattgagcaactatcaaccatctccaaatccttttctttcaggtaaaatccaatttattaatttaaatgataaagataaacctcacccgatgggtacttttaaagtactagaaaataccacaactgatttaggacgtattaacttaacccatgctaacgatgcctacttcatagcaagatctgaaaaacattcttcaaataaggatttaattaataaattaaagaatagttatctagaagcaatttataaagataaaattttgaatggatggacacaaccagttacaactttagaaaaaaatataggtgatgaaagcaagatactcccctttggtatgcagtgttttaaagagctaaaagataatactattatagcatcaagcaaaattggctcagtttttttcttaccctcacacgatactaataaaaaaactaaaatttttcaaagtaatgataacttagcttttgattgtataactgtaaaagaaaattataactttgattttctagcttatggtgaaatgaatactctttataaacacttaaaaggaagtgatgttcttaccccagttgacagtggtaatttaccaatcggcgtaatttcctctatcgtgggtgatgatcaaaacgggtggtttctatctcatatagtaggttataaagctacagtttataaaagtaatcgcttagaaaatggtgattggcaaccaattgtacaaaaagaaattgttgataatttttggggattacgtggattttggttatgggaggatgagcaaggatttagctatgcggatatgtatggaaaaattaaccattatgattatataacaaaaaaatggtctgaaaataaagtaccagataatgagaatatctctcaattaatagttaacccagataaatcaattagcgtaattacttcaaagcgtggttttgcaggtatattttcaaatctatttaactctaatgatcatggtataacatggcaaaaagttaatagcccttttaaagtaaatgttttccctgccccaagtttcaagacagggagacttatatatatcaggtgcacaatttaa

SEQ ID NO: 48031 - DNA, 699 bp, Acinetobacter baumannii
atgacaaatacattttctgaccacaagcaagttgaagtggtatctacttttgctgaacttgtgaatacacattttcagggaaatacgaatgctatttgttggtacagaaatttggtaggcgactttaaagaaattgtggctaaacttgagttaaaagaaaatattaccgaaatttctactgaagacctgttagcacttgagctttcagaacaaggtgatttggctcgagatattattttaaaagacatgcagctcttaactgatatgggtgcgtcacctgtacttaatttacttaagcattatgaacgtgatgaagagctcgattttatttcaacagatgtctattcatttcatgttgatcgttcccctattgaaaccgacacattcttatgtacttatcacggcgctgctagcgatattgtgccgaatgatcaggttgaacaaaaagttttaattcctgaaattagagaaaagctcaaagctttacatgacggcccagaagccgaatttgaaagctttttaacagagtatttttttgatttacattatcagcctaaacccgatgcacaacctataaatttaggtattggacatatttggcgtttagcagtagatcatcccactcaaaaggttttaccatgtgtgcatcgggcacctgttgaaaaagatggtgaatatcggttgctgttgatttgttaa

SEQ ID NO: 48032 - DNA, 951 bp, Acinetobacter baumannii
atggaaggaattaaaacaatcggtgtggttggtgtcggtgtcattggtgcaagctggacagcattatttttatataaaggctttaaggtaaaggtatatgacccttatccaatagacgaagaattatttaaaaagagaatacaggcaaatcttagtgatttgctcgctttagatcagcaaacagattcaagtcatcatttacaagatattttcctaaatttagagctttacaacaacttaaaagatgcggtgattgatgccgattttattcaagaaaatgcaccggagaggttagatttaaagcaaaatttatatcaagaaatcacttcatattgccctgaaaaaacattaattgcttcaagttcttcaggcctaaaagtttctgactttcaaaaagatgcaactcatcccgagcgtatttttttaggtcatccatttaacccgcctcatctattacctttggttgaaattgtgggtggaaaattaacagatccgcaaattttaaagaaagcttccgagttttatcaaagtttgggtaagcatccgattgttttaaataaagaagttaaagggcatgtagcaaatcgtttacaagctgctttgtggcgagaggcattttcactggttaaagaaggggtgtgttcggcagaagatgttgatatcgcaatcaccagtgggcctgggctgagatgggctttatttggcccctatataaatatggaacttgccaatcagaaggggtttaaagaggcaattcaccatttaggaccgcctatgaccgaatggtggaatgatatgcaaaattttcagcactctgaagaaactactgagttgctagaagaacaaactaaagagcttttaagacattataaagatatcgatttatctcaaaaaagggataaaggactagtcgatattttaaaattgagacaacaattagagttggattaa

SEQ ID NO: 48033 - DNA, 231 bp, Acinetobacter baumannii
atggaagaagttcaggcgcgtggcggtgagttattcgtttttgctgatgaaaatagcggtgtagtcgaaaaagatcgtcaacacgttgtacaaattccagcagtaaacgaatggcttgcaccaatcatttatagcgtaccagttcagttgttgtcttatcacgttgctgtattacgtggtacagacgttgaccagccacgtaacttggcgaagtcagtaactgtagagtaa

SEQ ID NO: 48034 - DNA, 570 bp, Acinetobacter baumannii
atgggtgcaaattctgcgctaatttttggaattttaattaacgtcgcgattttattggtctttttccgttttttaatgcaattggcggcagtaagtccttataatcctgtggttttatcgacagtaaaggcgactaagattgttgatatttttggccgaatttttccaacggtcgcaaaaggccgattcaatctggcagcgttggttcttttaattattttatatttactgaaaattttcggtgtaatgtatctttcgggttccatgccaaatagtccggttcatttagtgattctgacttttgtgaccatgattcaggatttgattcgtttctgccgttacttaatttttgcaacaatcatttttagttgggtcgttatgtttactcaatctcgttcaccttatattgaggtgattcaagatttagctgaaccgttactcgccccattccgtcgtttattgcctaatatggggatgattgacttatctccaattctggcatttttggcactctatattgccgagatcttaatgaatgaagtcgctaaagttttattaactggactttaa

SEQ ID NO: 48035 - DNA, 2772 bp, Acinetobacter baumannii
atgccaccatttgtcttggttgatgggtcctattttttatttcgtgcatatcatgcattaccaccattgacgacctctacagggttacataccaatgcaatacgtggagcaatttctgccattcaaaaattgatgcgtcgtatgcaaccgacacatatggctgtcatttttgatacgcctgagccaactttccgtcataagctttcacctatttataaaggtgaccgcccgactatgccggaagaattgtctcaacagattccatatttacatgcattgattaaggctcaagggattcctttatatagtcttccgggtgcagaagccgatgacattatcgggactctcgctaaacgcgctgtaaaagaaggtcatcatgtgcttatctcaaccggagataaagacatggcccagctggttaatgactatgtaaaacttgaagatagctttaaagatcgagtactagacaccgacggcgtatttgaaaaatttggtgtttggccaaaccagattatcgattacttaacccttatgggtgatgcatctgacggcattatgggtgtacctggcgtaggtgcaaagacggctgccaaattactgaccgaatatgggacattggataatatcattgccaatgtagaccaacttaaaggtaaactaagccaaaatattaaagataatttagacaatattaagcttgatcaccagttggcaagcattgtctgtgaccttcctttagaactcgactggcatgaattaaaacttactgatccaaatgtagatgccttacgcaatctctatacagagcttgagtttagaaaccagttacagtctctcgatcatccaaacaatccaaatagctcaagctataagcagcaagcttcacaaactattgtccaaaatgaagttaaacctgctcaaacgattgaaacagaagatcaagcaagcttgactagtcaagatgaccagcttggaactgcaaactatcatactgttttaacacaagaagcatgggatcagctctggcaacgcatgcagaatgccgatcattttgctattgatacagagaccacaagtcttgattaccgtattgccgagatggttggtttttcaatcgcatttgatgcgaaagatgcctactatgttcctttagcacataattacgaaaatgcaccacaacaactggaccgtgaacaagttttagcgcaaatcaagcctgtacttgaaaatgaagcagttaaaaaaattggtcatcatcttaaatatgatgcgcacatttttgctaatcacggtattgaacttaaaggttggtatttcgatagcatgctggcatcttatgtactaaatgcagcagctactcgtcatggcatggatgatgttgctcgtgtttacctaagccatttgaccactacttttgagcaaattgctggcaaaggtgcaaaacagaagacttttaatcaaattgagattgaagttgcagctcattatgcagcagaagatgcacatgtgacctatcgtttatatgaagtactttcaaataaacttaaagcacatcctgaattagaaaatattttatataacatcgagatgccagttgctcgaatcttatcgggtatggaagaagatggaatccgtttagatcatgctttcttagataaattaagtgttgaatttgcgaaaactatggaagaccttgaaaatcaggctatggaaattgcaggtgaaacttttaatattgcttcgcctaaacaagtaggtgaaattctatttgataagttaggcattaaaggtggtaaaaaaactgcaactggacaatacagcaccagtgaaagtgttcttgaaaaaattgagcatcctttaacggaaattattttagaacaccgtggattagcaaaattaaagagcacctatactgaccgtttaattgagcagtcgcataatgacacccatcgtgtacataccagctatcatcaagcactaacggcaacaggtcgcctatcctcttctgatcctaacttacaaaacattccaattcgtagacagattggccgtcaaatccgtaaagcatttattgcaccggaaggacgagttttgttagcagccgattactcgcaaattgaacttcgtttaatggctcatttttctcaagatgatgccttagttcatgcattccaacacggtcaagatgtacaccgtagaacagcagcagaagtgttaggtattgcaattgaagatgtgaccaatgatcagcgccgtcaggctaaagctgtgaatttcggcttactttacggcatgtccgagtttggtttaattcgtcaacttggctttactcgtgaagaatcgcaaaactatatcaaacaatacttccaacgctatcctggcatttacgaatacatgcaacgtactcgccaagtagcatcggaacaagggtttgttgaaactattttaggtcgccgtctgtatacaccggatattgacgcccgaaatgtgatggtacgtaaagctgctgaacgtgctgcaattaatgcacctttacaaggtagtgctgctgatattattaagttagcaatgattgaagtagataaaatcctgccaaaagatcaagcaaaactattacttcaagttcacgatgaattggtgtttgaagttgattcaaacattgcagatgaactttcaaaacaaattgcggatgtcatgcagtctgttctggaaatttctgtaccgttagtcgtagaagtaggccaaggtaaaaactgggatgatgcccattaa

SEQ ID NO: 48036 - DNA, 1251 bp, Acinetobacter baumannii
gtgagtattctcgcttcattatctgtgttcttaggactagataaaggggtcaaacgtttatcagagctaaacttagtattagctttaatattattagtattcgtttttatcgctggccctagtatttatttacttcagaccactattcaaaacactgggcagtatatctctaacctttttaccatgacattcaatttatatgcttatcagccgaatggatggattgggggatggactattttatattgggcttggtggatttcttggtcgccatttgtaggtatgtttatcgcaagggtttcacgtggtcgtaccattcgagaatttattgttggggtactcctcattccaacaggctttaccattatctggatgggctttttaggaaatgctgcgttatttagcattatccatgaacatcaaaccactttgattcaggctgttcagcaagactcgtcagttgctctatttgagtttttaggacacttgccatggtcaggtgtcatgaatattctggcgactattttggtggttttattctttgtgacttctgctgactcaggggcattggttactgactacttaacagcaaaaacagaaaattcacctacttggcagcgcctgttctggacagtacttatggcggtgctggctattattttactcttggtgggcggtcttgcggcgcttcagtcttcaatcattatgagtgcgttgccttttaccgtagtcatgctgttaatgagttggggcctaataaaagccttgcatcttgatgtcactaaaatgatagcaattcaagaggctcgcattacaccacgcgccattcataaccctagaagctggcagcagcgtcttggtttaatcatgcattatcctcatagtgaagaagaggtgaagcaatatattgaaaagcaggtttcacgtgcttttgaaaatattcagcatgagtttagacgccgccatcttgaggtgtcgattagtgaagtggaagatggtatgcagcttcgagtcgatcatcatcatgaaattaattttatttataaagttgtttcacgtgaaacagtacctccaagttttttaattggtcgtacagaagcagaagacggtcagtattttcaagccgaagtgtttttaagagaaggtggacagaactatgatgtaatggactggactcaggaagatttgattcaggatattattgatcagtacgaacgtcatttacatttcttaaatatcgtacgcagttaa

SEQ ID NO: 48037 - DNA, 1707 bp, Acinetobacter baumannii
atgaatgtattagataaagaaaaaagattaaaagaattattagaaaataatataagaaatgaaaaaattggtacagcaattgcaattacaggatcttggggcattggtaaaacttttttttggagaaattttttagataaacaattatctgatgaacgagtttataaaaaagataatgtattcaatcggaaatatgcttatgtatcactctttggattagaatctttaagcgatctcaaaactcaaatttatagcaatatagaaagttatcactcatcaatagaaattcctaaatggattaaaagtctaccttcaatttttaaagatactcgtattacacaattaggaatcaatgcgccagttaagttgattgatagtttaatgtttgcacaagtcaaagatgccatcatttgctttgatgactttgaacgtatgtctaataagctagatattaaagatgttatgggcttggcaaactatctaaaattagaaaaaaattgtcaaattattctaattttagatgaagataaaacagaggccgaaaataagaataaatatggtgattacaaagagaagttagttgatgaaacaataatcttaaactctgttgaacctttgattcgggagaatactaaaggtatcgatgagaaattaattaacctaatgattgatttttctgaaaaattagaaattcataattttcgtttttttcaaaaagtgattaaattatttcgacactttcttattgagctaacaaaagatattgcctattcaacaaaagaaattatcttaattcggattttacaaggttacttaattcaagattttccaaactttgaatatagttgggatgattgtaaatatgttaccgaaaaggagagagaagcttggagccctataaagaaaaaaatttatggaaaattacaaaatatatcttactcattcaatcgtgaggatgagtggcttatcgaatttaaaaaatggttcgagcagagagatgtaattaactttagtgaattgagtaagttagctaactcagaattaatatctgaggaaaatcaaaatgtacgtaataagatttggagaatttttgaaaaaagacataatttggaattgaatgaaaaagatctagagtatattgcgtctttagaacctaaatatttaggaatagagggatttcgcaattctgcatttatgtatgaaattctacgtaaatatctaccaatcgaagagaaagctgagaaatttaaagcaggaattataagttatattcactcagacttaacaagagcgattgcccaagcaaataaagagcggcaattatggggatatgaaagtaatattttttatgagtatattgatgatttagctaaagattatgttgaagaaaaaactttaagtaatattgcatcttattttttaaagtggggtaattttgagagtgaaaatgataaggatctgttgcgaaaattttcatttgatgaatggtttaaatatttgactgaagaaatttataaggaacctttttttatagagggggatgatagcctaatacagtatttaaaaagattatatttaataaccagagaagatgattctatagattcaataattgtaagggttctacagaaaattggtcaggaatcggaatttaataaaagatatatgcaggatattattgaaaatcatttaatgacaaagacttaa

SEQ ID NO: 48038 - DNA, 528 bp, Acinetobacter baumannii
atgaaaaagccccatgctttacgtgaatatttgctgaatgcgattccggatctgcctcaagatccggatcgcttactcatctttgcaaatgacggtaaattaatgagtactgcagcaaatgggtatagttttgaaatggcttatacgctagatatgatcatcactgattatgctggtgatgtagatgtatttggtgttgtcctattcacatggattatggataaccaatccgaactcatggctaatctagataaagtaaaagaggccattacttttgaagctgaactcattgataacagcaaatatgatctgcattttaaaatccctttaactgaacgtgtcattgtgaaaaaaaatgctgaagggaaattcgagatctcttacccgactgaaccacaatatactgagtttggctcacctacagattttgaattaatagataaggatggatctacactggcaacatggcgcacggccaatattcaaggacgttctttggatatgccctttccaggtaaaaacccatga

SEQ ID NO: 48039 - DNA, 831 bp, Acinetobacter baumannii
atgattttaaaatttggttcaaaaggtgatgccgtcgcaactcttcaaaagcaattagctaaaatgggttacaagggtattaaaggtaagcctctttccattgatggcctttttggagagagtactgaatttgcagtggttcaactccagcgtaaatttggcttagtagttgatggtaaagtcggtgataaaactcgccaagctttagctggtgattcagtaagtaaacttttaaaagatgaagactataaaaaagctgcaatacgtttaaaagttcctgaattagttattcgagtttttggagctgtcgaaggccaaggtgtcggttttcttcaaaatggaaaggctaaaatcttatttgaacgccatcgaatgtatttttatttaagccaaacattaggtaaaacatttgctaataatcaggcaaaagtaacaccaaatttagtcaatacattaacggggggctacaaaggtgatgcagctgaatatacccggttaagtatggccataaatattcataaagaatctgccctgaagtctactagctggggccagttccaaattatgggtgaaaattggaaggatctcggctattcatctgttcaagaatttgttgatcaacagcagattagcgaaggccaccaactcgaagcatttattcggtttattgagtggaagcctggcttattagaagcattacaaaaacaagattggcatacagtctttacactctacaacggcaaaaactataaaaaacttggctatcaagctaaattccaaaaagaatgggatcatcttgaacctatttatggggggaaaactgcagcatga

SEQ ID NO: 48040 - DNA, 270 bp, Acinetobacter baumannii
atgatcgaattgttatttcaagctgttgccgttttagcttatctcatttgcggttttcgtattgcaacctttagtcatggtggaaatttccaccgtggctattcattctttgcagcaactttgattgcagcttttttaggccaatcagtgcatatcttattttttaaggatccagttacgctctgggatgccatttttgcaatccttcttgcagtgctcatctggcgaacaaaaggtaatgtggccaaactcatttggagtacgacatga

SEQ ID NO: 48041 - DNA, 351 bp, Acinetobacter baumannii
atgccagaaccaacaacttctacagcaaccattgccactctaagtgcagtgtcattgcttccatttattaatggtaatgcgttgctaggtgcagtacttggggcagcatttattgcaacttttgaaaaagatttaaatgcttaccaacgtattcgcaatatgttattggccactggtattggttatatcagtgcaccactaattacagaacatacattattaaaagctgatgcagtggcggcccttatcacttcaacactttgtttattcatattaatcaaggttgttgattgggttaaaactgcgaagctttccgacattcttaatatctttcgaggtggcaagtcatga

SEQ ID NO: 48042 - DNA, 210 bp, Acinetobacter baumannii
atgaaagaaatctatgcaatccaaaacgatacagttgatgccatttgctggcgtgaatatggccgtagcactggtgtagttgagcgagtattagaagcgaatccacatctctcagaatttggaccattcattccaatgggtacaaaagttcaattaccagacatcccaactccacaaaataaagttcaaagcattcagctttgggattga

SEQ ID NO: 48043 - DNA, 453 bp, Acinetobacter baumannii
atgtctggattaattgcaaacggtactttttcaaatcaagacgttgaaatcaatagtgatccgttctttccatcggtatcaagcaaccatatccgtgaagttttacgtttagattcaagtgtcacaaatcaacgtcttatttcagctatagaagcagctgtaattcatgtcaatgaacaactggaaagtttactcagtaaagctccaactttagttgaaattacaactaaacaggtcaatggaaaatctattgctgctgttttgtatttccgggcaatttctgctgcaactggtgcagaactttgtgaacgttatcggtcttatgacactacaaacaacggcagccaaaaagctgaagaactgacaccgacgatagatgactataaacgtgatttgcgttttgcaatccgtgatttaaaaaaagtccgtcgcttgaatgtggagttggtttag

SEQ ID NO: 48044 - DNA, 702 bp, Acinetobacter baumannii
atgttgagtccagctcgacgtcacctcctgaaagctaaggcagctattgaggctgccaaggctgatgaatttggtggtgtacgtccagacgcaagcgtctaccaattacaactgactgagctcaaaaatgacatccatgtcttgcgttcaattcagtcacaagaaaaacgtgctgaagcaaaaaaagatttgattccaaagcacatgccatatgtggaaggtgtaattaaatcaggagccaaagttgaacaagatgaagtgatcacgaccatcatgttgtggtgctttgactgtggcttgtttgatcaaggcttaagtcttgctgagtatgctttgcagaatgaactgaaaatgcctgattcattcagtcgttcaactgccactgtcattgttgaagaaattggcaatgctgcacgtgtagcacataaagccggtgaagacttcagtttagagactttagaaaaggcttttgaactgactgctgaacatgacatgccggatgaagtccgtgcaaagctttatgttggtcttggtcgttcaagttttaataaagagtcttatcgtgcagcagtttcttattttgaaactgctttgaaacttcatgaaaactgtggctgtaaacaagaactccaaaaagctgaaaagctattaacagaacagcacgtcgaagatcaagagagttcaaattctgatccgacgtaa

SEQ ID NO: 48045 - DNA, 1011 bp, Acinetobacter baumannii
atgaaaaaactcacacgtcaaaaatttaatcatgctactggttcaatcgcctcattaaatggtattgataatgctgctgtaaaatttgcagttgaaccttctgttgcacaaaaaatggtggatacacttcaagaatcttcagagtttttgcagaagattaatatccaccctgttgatgaacttgaaggcgatacgattggtctgactcaaggctcaacgattgctggccgctcaaatactaaaggcggtaacaaacgcacaccagtagacccaactggcttaaagtcaaatacatacaaatgccataaaactgattttgatgtcgctattcgctatgaaaaaatggatgcttgggcgaaattcccagacttctatgcacgttggaaaaagttcgttgaccgtgcaattgcattagacatgattatgattgggtggaatggtaccagcgcagccgtagatactgaccgtgccgcaaatcccttacttcaagatgtaaatattggttggcttcagcagatccgtactaaagcgcctgagcgttacatgaaggaagtcgttgaagcttcagggaaagtaaaaattggtgctactggtgattataataatttagatgctttggttaccgacgtagttaataacctgatcagtgaaattcaccaagacgatacagatctcgtcgttatttgtggtcgtcaattacttaatgataagaacttcccattagttaataattcaaaagacaataccgatgctttagctgggcaaatcttattaagtcaaaaacagatcggtggtttaactgctgtacgtgttccattctttcctgaaaatgcattgttagttacttcacttgataacctttcaatttacttccaagagactggtaaacgtcgtcaaattattgatcgctcggaactagatcaagttgaagaataccaatcttcaaatgatgcctatgtcattgagaactacgaaaaagtaggtttcgtggaaaacatcgaaattttataa

SEQ ID NO: 48046 - DNA, 828 bp, Acinetobacter baumannii
atgaagaagtccaaatttttccgtgttgctgttgctgggtccacaactgatggtcgtgtgattgaagcaacatggattcaacaaatggccaaaaattataatccagatacttatatggctttgggaaatttagaacattttcgctcaattagccctgacagtacttttggatcatacgcaaaagttattggccttaaagctgaagaagttgaaattaatggcaataaaaaatgggcattatttgcacaagtagatgcatacgatcaattaatcgaactgcataagcgtggccaaaaactttttacttctatcgaagtaaacccaaattttgctgacactggagaagcatatcttgtaggacttgcttttactgatacacctgcctctttaggtactcagatcatggagttcgcatcaaaaaatccagaagcaaatccatttgtaggaaagaaacaagataaaaataatttatttactgctgctgaagaagctgatctccaatttgaagacagtcaagatactccagctaaagggctgttctctaaagttttggattggttaaagccacaacaagaacaactggataatcaaaataaagaccaattcaaagaagtagctgactcactagaagcgattgcgaaaacatttggtgaaaaccaaaccaagttgaaaaaggtcgagactaattattcagaactgcaagacaagcattctaaattagcaaaagaattcaatgatcttaaaaccaaattagaaagtgaagaaaacccaggtaccccacctgcacctgaaaacactggcaacttctctgaacaaatcgagtgctaa

SEQ ID NO: 48047 - DNA, 1815 bp, Acinetobacter baumannii
atgcttatgtattggcttaatgagccaatggataaagcactcaataccccgacaaacttgacctttgataaccgtctcacagccaaatttctatattggatgggatggcgaatcagctcgattgcagaattcttaaaagagaacgataaaaatgttcatgcttggaagtcccgagatgaatgggataaggatgcacctgcaggtcgagttgcccaggcactggaagcacagctggtcaagctaattattcttgagaaaaaaacaccaggtgatttcaaagaaattgatttgctcatgcgacagcttgagcgtatggcacgtatcgataaattttctaatggggggaatgagaccgatcttaatccaaaactaaaaaatagaactgctgggccacgtaagccagttgctaaaaatcagcttacagaagaacaaattgaaaaactatgtgaagactttgacgacggtttatttgaatatcaaaaagtatggtaccgagcacgtgaacagcgtaaccgtgctttattaaaatcacgtcagattggtgcaacattctattttgcacgtgaagctttgattaaagctgttactactggtcgaaatcaaattttcctgtctgcttctaaagcccaggcacacggttttaaaacttacatcaaaaactttgtcatgcagtctattgaaattgatcttcaaggtgatccgatttcaatcacgctgccatgtggtaatacagttcaactgatcttcttggggacaaatgcaaaaacagctcagtcctatcatggtgatttgtattttgatgaatttttttgggtacatggctttgccacactgaaaaaagtcgcatcagcaatggctgcccaaaaacaatacaaaaagacttatttcagcacaccttcaagtaaaacccatgaagcatatgcattctggacaggtgatgccttcaataaggggcgtactaaagaaaaccgtgtagaaattgatactagccacggcattttaaaggatggtgctttatgtggtgacaagatgtggagacacatcgtcaatatttatgatgctgagcgacaaggctgtgatctattcgatattgaagaattaattgctgaaaacagtccagaagaattcgcaaatttatatatgtgtgaatttgtcgatgatggccacagtgtttttcctctgtccataattcagccatgtatggttgattcttgggaagtttggtccaaagactttaagcccttggcattacggccttttggtaataaaccagtatggattggttatgatccagcagaaagtggcgatagtgcagggcttgtggtcattgcaccacctgaaccagattatccaaaattccgactattagaacaccatcaattcaaaggcatggactttgccagccaagcacaatacataaaaaaattaacgacgaaatataacatcaaatatatcggtttagataagtcgggtatgggtactggtgttgctcaactcgtccttgaattcttcccaaatttaacgaccttcaactatagcgtcgatgtcaaaacacaattggtcataaaagcaatggatgtgatcaacaaaggacgttttgaatttgatgccggatccactgacgtggccatgtcaattatggccattcgtaaaacactgacggcttcacaaagacaaatgacatttgaagcatcacgtgcagaaaacatcggtcatgcagatttggcttttgccattttccatgcgttcgcaaatgaacctttaacccttgatgaccatacaaaatctaaaaaatcctctatggagatttactaa

SEQ ID NO: 48048 - DNA, 999 bp, Acinetobacter baumannii
atgtccgacagcaaagtgcaggcatttacattcggtgatgctgaaccggtaatgaacagccgagatctatcacaattctatgaaacttggttatgtggaaattattacgaaccacatatcagtatgaatgctttggcaaaatcatttaaggcaatgccgtatttgtcgactgcagtgttttataaaaagaatcaactggtatcttcattcataccaaataagctaattaagtcagcagaatttgaaagaatttctttcgattatttggtttttggtaatggttatttacaacggattgataaccgtttgaatgagccacatcattatgatgggttgatggccaagtacaccagacgcatgaaaaacgctaatgaatttttgcagctgcttaatggttttgaagaacacatttttaaacctggtaccgtttgccacattaaaggtattgatgtcgatcaagaaatttatggtacgccagaatatatcgctgcacttcagtcagtttggctaaatgagtcagcaactttattccgtcgcaaatattataacaatggatctcatgctggcttcatcctatacatgactgattcaggtatagatgatgatgacgtggagggcctgaaacaagccatgaaagactcacgtggccctggtaatttccgtaatttattcctgcatgcgcctggtgggaaaaaggatggcttacaacttattcctattagtgaattggctgccaaagatgagtttttaaatattaagaatgtcactcgtgatgacgttcttgcatcccaacgtacgcccccacagttgctgggcataattccatccaatgctggtggctttggatctatcagtgaagcacgggaagcttattggtattccgagattgttccccttcagaatttatttgcgaacacagtgaatgaatgggcaggtgatcagatcatccgtttcaaagaatttggtcaactgcaattcaaacaagaaaaacaacaatag

SEQ ID NO: 48049 - DNA, 1839 bp, Acinetobacter baumannii
atgtctaaatcttttcaacctactcgtctggtaggggctatcgctattgcgatggggtgttcacctgttatttttgctgaagatgcaacaaatgcaactcagcttgacccaattgttatcactgcttcaaaaagtgctgaaaaagccagtgaagttccagcgcgtatctcagtgattgatgaaaaaacaatagaacagaatccaattgcagatttgccctcgctattaagaaaagaagctggcttaactattcatcaaacaggtggttatggccaaacagcctccgtatttatccgaggagctagtgctggacacactctatttttacaagacggtatgcgttcaaatactgcgactgtagctggtcaaaatattcacttatttgatacaacagatattaagcaaattgaaatattacgaggccctgcttcagttcagtatggtactgatgctattggcggtgtaattcaattaatttcaaaaactcctacacaaaataaaatctttacgacgatcgaagctggtgaaaagaatacttataaatctattttaggtatagatttagcccaagatggttattacgctcaaattcgtggtcaacgttttgaaacagatggtgatcaaatcattagcaatgacgatcgcaaagctggatttgatcaaaaagggtattcagctaaagttggtgttgataaagagcaatatgctttatcagctgaaatcaaagaaaataaaggtactggtgactttttttcttatggcgcagcgcaagcgtatgattttactaaccgcttatataatgttaacgctcgccttaatttaactaacaatattatttggaatactcgtctttctcaatttgaagatcaatataatttaataaaagcagcgtatccttcaattgtaaataccaagcaacaagaggtagattcaaatattaaatggcaatttacaccaagccaaaatattttatttggtgtagagcataataaaacaactgcagagaaagtagttgcttataatggtgacacaggattcgataattctaataagacgactggctattatttacaacatcaatatcaacatgatggcattaatacccaagcaggcattcgtgtagaagataatgaccaatttggtacacatacagttggacaacttgctggtcgtttccttgttacaccaacaactagcgtatatgcaaatattggtacagctttccgtgcaccagttgtaggtcaaattattacagagccagcttggtggggaggtaatccagatttaaaaccagaagaaagcgtgtcatatgaacttggatttgatcaaaaactaaaccacggcttcaatgtatatggttcagtttatcaaactaaagttgataacttgatggtatcttctgctgcaacaaatttcgtattttataatattgataaagcaaccttaactggtgctgaattaggtttaaagtggtcactagataattggtttatcaatgcggaatatgcttatattcaacctaaaaatgatgaaactgatcaagatgcgccaaatcgcccacgtcaaaacttcaatatgaatattggatgggataatggtgtatatggcttcaacactgctttcgttgcaaaaggcaaagcaaaagatatacaagatgttccaggctacactactcttgattttaacgcttattggcaaatgagcccaaatgttaaaatctttactaatattcaaaacctatatgatacagactataagactgcatggaataaagaggttggttcatactatattgccagcggccgccttgcatcagctggtgtgaccttaagctactaa

SEQ ID NO: 48050 - DNA, 1050 bp, Acinetobacter baumannii
atgcaagaatttactatctcaaatggttacttctacctttggaatacgtatttaaaagaaaagggaatagattggcagacacttaatttaagtgaaattcaaacacgtcaagtccaaaacattttatctgcttctatagatgctcaatcttctttagacctttttattgaacttttagagataactgaaacgcgattatatgtgactaatttggctttagagatggcagcctgtattacccctgccaactttggggtcttgggttatatggcgtccagaagtgataccttaggtcaagtggtggagtatattgcaaagtttcaccggttggtcattgacggcgcgcaagttgtccctatacaaattgaacaggatgcttccaaaattcgcctatattggcctttagtcgacgacagtaatattctactaagtgagctgaccttggctgcaatggtacagcttgctaaacagattgcccctgtacatgagtttcttttacagcatgtagagttcgtacaccgagcgcgtggggcagtagttcactatcaacgtttctttcagtgcaaattatcatttgagcggccttactatgcattaacttttgcaagtgaaagtttaaatgttcgccctcaacatgcagatccaactttagtgcaacttttggtgaaacaagccgaagaagctttagttcagcggaaaatacatgccgatttagttcagcaaatacattggatcgtacaggaatactttaagcataagcagcaagcgcccaaaatagaagatattgccatcgagctgaatgtttctgttagaagcttgcagcgccaattacaggcattaaacacttcatttaaattaattttagatgctgagcgtatgaaacgctgcgagatattgttaagccaaaatgaaagtctgactgcaattgccgaccagttaggttattcggatcagtctgcactagcaagagcatataaaaatctaacagggcaaacattattaactcgaaaaaagcaattacagctcatccagaaaaatgcaacgaaatag

SEQ ID NO: 48051 - DNA, 309 bp, Acinetobacter baumannii
atgttagaaaatcttaaggaaaagatgtgtgcattaaatgatgtctttatagaatatcctaaagtttttaataggatgatgttctatttcatactcattctaggggtgatactggcttatttcccttcaattaaatggctcgttaatttagaaatatttaatacttatccattccatgatttgattatgaataactttcatttagttcaatggggaatattgattattccactagttttaatctttattgcaatttctaatgcagctgacctttatgagcaattgaaaaagagaaagtacggaagatga

SEQ ID NO: 48052 - DNA, 342 bp, Acinetobacter baumannii
atgagaaacgcaatattatattcttgtttattgatttctttgtcttttgttggttgtacaaaacaagctgaaactaaaccgcttcctccttcagttgaagagcaatatctaacttcaaatcaggaaataggtaagatgcttgatgcattaaataatcatgatgtaccaattgatgagaagcgagagatattgtgtaagacttatccagaagtctataagaaccaatatatgccagctctactcaagctttcaccaaatgtatatacaaaggaaactctcttaagggattatgaggctgtgattagcttttataaaaaagcttggtccattcattgtgcctaa

SEQ ID NO: 48053 - DNA, 636 bp, Acinetobacter baumannii
atgaaaaatttaataattattttcttaagttttttttccttttcatttggaacttatgcaagtgactctgatgattatataagagagatgccaccaaatttaaaatggaaggaattgcctaagatcaatattatagatggggatcttgaagggtatgataggattataacgatttcggctgatgcaaatgagagagggataattactcgagcaaaaatcattaaaagtagtggtatagataagttagataacaaaatattgatagcaataaaaaaagctagtttttacccgtaccaagaaaatggaatttattatcctataagatttacgcaaccaatggacttgaaactttctagaaaacctaaatttaaaaactttcctgaaattattgttaataaaagatatcttaaaggtcaggaacgaaaaattacgatctattctgaagctgataaaaatggaaatttaactgtagcaaaaattcagaaaagtagcggagtgcctgagctagatagttatgtattggaagagtttcgaaagaaagcacaattctatcctctacttgttaatggttctccatttcctatacgagatgtttcacattatatcttttcagataaggtaaatacttttgattaa

SEQ ID NO: 48054 - DNA, 543 bp, Acinetobacter baumannii
atgaaaaagattatttttttaagcttagttcttggtttggtagggataaatggttgctcaaaggtggaaaaagagtcaaaagaagctgtcttaagcaccttaaaagatcctgattcagcccagttccaaaatataaaaggatattgcggagaggtaaattctaagaatagttacggtggttatgttggttttaagagatatgtctctattgatggtggagtcttaatggaggattcagaaggtgttgaaccagagacatttgcaataatttgggaagcacactgcactccaaataaattatctttaaaagagcgcaatgagtgtgtaaaggatgcatacaatcagtctcttataatggatgcaaggcttaaaggggtttccaaggaaagcttaaggaatgaaatactagcagacaaaaatgcatcaaaagcagaaattgaagaaggcttaagagatattgatcgtgcgtataacagtaatttcaaagataagggtctatacgcacaggatgttgttgctaaatgtgtaaagttgattgattag

SEQ ID NO: 48055 - DNA, 4341 bp, Acinetobacter baumannii
atggcacaagaatcccgtttggtcattgttattgattcgcaaaatgctgaacgtaatgcgcgtaatctaggcaatgagctcattagcattgagcgtaaaggtgaatttgcatctaagtctatggatagcttatctgtagccaccagagctttagctggacacatggctggtttattaacagtaggttcagccatttcaaagatggatacatatactggattacaaaatcgccttaagttagtcactaacaatcaagctgagttaaacaaggctacggaagacactttccgaattgctcaaaaaacctattcagcttgggattctgtgttacaggtttaccagcgttttagtgataatgctaagacgttaaacctgactatggatgatactgctcgtttaactgaaacggtatctaaagccgtggccattagtggagcaaacgcagaagcggctgatgcagctttagttcaattcgggcaggctttggcaagcggtacattacgtggtgaagaactcaactcagttatggaacaaacaccagctctagcaaaggctattgctaaaggtatgggtattactgtaggtgaattacgttcagtagcagctgaaggaaaaatcacttcacaggaaatcgtgaaagcacttagaaatgtagaatctgatgttgatgcgctttttgctaaaaccgatataacaattggacaatcactcacacttttaaataacgaaatcactaaatttgtaggggaggctgggaagggctctggagcagctcaaacattggcggaagggattcaaattcttggtaataatctcaatttaattattaatggcgcaatcatttctggagttggtttaatcacgaaagcaattgcaacaaaaactattgctattcaagcaagtattgccgcttcagctcaacaaagagcagccaatcttgctgaagctcagtctcaggttcaattgcttggtgtagaggcaatgcgtgctaggcaatctgcagctttagctttaactgaaattaatttagccagagcagaatataatgccgccacaagtgctaatgcccgcgcagcagctgtacaaagactaacagctgctgagattgctcataatattgccgttaaagaggccgcggctgctacctcagcttattcattggcccaatcccggttaaatactgtggctactttgggtagccgagcattaggtttagtaggggggccaattggtgctatcactattggtatttctgccttagctactggttatatgtattttcaggataaagcagcaaaagcgaatcaaagacttgaggaacaagcaaaagttgcagagagaacagatgaagctttaaaaaaattaactggcaatgataaaactaaagcagttaatgatttaacaaatgcttttaatgcacaaaatgaggcattaaaaaaatcatcttttactataggttcagtattaattgatatcgagaactatgcacgaggaaatagggaggttgaaaaaatttcccaagatgcaagaactgggactatcagttatacagaagccattgagcgtctaaataagattaagttacctgcagatctatatgagaatctgaaaaaacaggctgcacagtatgatgaaaactcgtctaaagcaagtttgtctgcagagaagctaaaattattcggtgttgaagtaagtcttgctggcaataaagcacaaaatgctgcagctcagcatcaaaaacaagcggatgctttaggaaatactgctactgaagcagaaaaggcaactaaggctttgcaagattatcaagccaaacaaaaagatagcgttattgattcaatctataaatcaggttggcttgataaaggttacactgttgctcaagctaatgccattttagaactgcaaaaagcaaaaggaatgagtgcgattttgtctaaagatgaaattgatagtgcgcttagaaatctcaagatcattgaagcgcaacaggagagagaagataaattaactgaagctaaaagaaagcagacacaggaaattgaaaaacaagcaaaacttactaaacgcttggttggtatttccggtcaatctggtattggtactggtccacatcttgatgttcgatatgggggctcaatgtcgggccagaaagtttctaatgaacacctcgctcgattacaagcaggtggaaaaccattatcttcgtataagatcagttcaaattatggtccaagacaagcccctactaaaggggcttcttcatttcataagggtattgatttttcgatgcccgaaggcacaccgatcacgaccaatgtcgcagtgaaagatatcaagacatggtatgacagcaagggtggtggttatgtcagtgaagtgatctttgaggatggagtatctcttaagttgcttcatcaatctccaaagatgcaaagcaaggtgaaaggtggtgcgagtaagggaagtgataaagcagcaggtgacattcagtctcaacttgatcgtcaattagatgctcagcggtctcttgaaaatgaagtagcttctgaagtacagcggatccagaataatttgaaagttagattggaagacgttgataaggcaggattctcgccagaacgaacagctgaaattaaggcagaattacagcgccgtgctgataatgatgtggatattgccaaacaagcaattagaagcaagctggaagactacaaggagtttcgtaaaaccgaggaacagttactagaagattcctttaaccgtaaaaagttcaatgcagctcatgacattgaattaagtaagtctgagcagaagcaagctgttgaattgctggaacagcaaaaacagcaagagttagggttattaaaactagctcaggaacagcgtttatttcaggcacgcttatcattgctttccgaaactcaagccatgcaggagaggtacagactcgaacgggaggaaattcttaagaataccaagctttctatagaagagcggcaaaagctaatcgcattatctaaagccaatcaggataaagagactcgcgataaagtgaataacgctgttcaaaactggggtggtattcaggctgatatgaatggcaccagcgagttcttcagacaggatcaggagcggtttagccgtttaaatgctgcaaatgatttagcagatagtcaatttgctgttactgatcttgatgaaaaaaatggtttagatagtctaaatgcacaaatggaagcaggactcattaagcaacaggattacgaaaaccagaaaacagcaatcattcaagctgctcaagatcaacgtaatcagattgctgccgaatatgcaaagaatgctcaggatattgaagataaatatcagcaagatcgtttgaacactcaaattgcatttggtggccaaatgatgggttctcttacatctatgtttggttcaatgtttggagagcaatctaaagcttacaaaataatgttcgctgcagataaagcttatgcgattgcagctgccggtattgcgattcagcaaaatattgcagcagcttcaaaagctggttttcctcttaatttaccattgattgctggggcggttgctcaaggcgctagcatcattgcaaacatccgggcaatcaaagatcagggttttgctgaaggtggttatacaggtcgaggtgggaaatatgaagttgccggagctgtgcacaaaggcgaaattgtatggtcccaagaagatattaaacgctgggggggagttggtttagttgagaaaatgcgtaagagtgcaaaccctgaagcttttctcaataacaatgcttcagctgatagtgtcatgcgccgtgcaatgatgagctctaatgcctttatagaaagccaaaagcaatctgatatctttaatcaaccagttcaagatactcagattatttataagggtaatagaagcgtacctattgcttcttcttcggccagttctgatctattccacgatggcaaggtctacttctcatcaaatggtttagttcagaatcgatcaaatcttgaggatgttcaagacttcacgatgggtcaagctgctcgacctcaagctgagattatgccttcaattgagccagcttcaccaacaatcaacttcaaaattgaagtgattaatcaggtgagtggggcgacagttgaagccgaacaactggatgagcaaacagtccggatcattgttaaagatgaactggataagcagcttccaagaacggtaccgaagcttgtaagtgatcaaattgggaatccaaactcaaccattagtcggtctttgactgagaatacgacagcgagaagaaatcgtacttaa

SEQ ID NO: 48056 - DNA, 477 bp, Acinetobacter baumannii
atgcatcagagtgaggtcggattttggggtggtggtagtatgtatgtatcaggtgtacctaatgatttacagaagttctttgaagcactcacaaaattatctttaaaatttccaaatgattttgagtggcctttggtacttaatagattatataaaaagtatgttctatatgaagatattaataaaactaaagagattatggatttctgtaaatcaaaattgacggaaccatctgaaaatgaaaatacgaatatatttttaaagtactttagacaatttgattctgcagtagagagcgcaatttatttttacgagtatttcaatgattatgtaccagttagaatagctgtggttgacttaccatggcaaatggttgaagcccgaagacctcttcgtgaatatgatcaattagaaggcgtaccttattggttgactgattatagttgggaagaaatggaacggttaggcaacttataa

SEQ ID NO: 48057 - DNA, 399 bp, Acinetobacter baumannii
atgtacaagttaaagctaaatcctcagaccagcggctatggcgtaacaccaggtgatgatgtgaaacgtcagcagatggatggcggacgtggtcgctattacatcgatgtgaagcgtaatagccatattgttgatgtgaactggaatttaagtaaaaccgatttcaataaaatgatgtcgttctggcggatctaccagaataagccggcttcattttatgcggatctggtgattgatcagggagcacggcagcaatatctatgcaatttcattccaaactctttcaagaccaatgaagtcaacggcaacctttaccgggtaaatgcgcagctcgaggttgttcaaaaccagcctaaccttactgccgatatcgctttgattaaggattgggaggtctga

SEQ ID NO: 48058 - DNA, 507 bp, Acinetobacter baumannii
atggataacgaatatgccaaattctttttcaatcgaaaagttgatgtttatcaactggaatgtattgagctatcacatccttcttttatgaatacttaccgggtagtccgtaatgatgaccgaggtgtctatgtacaacataaggaaggatccggtcaggtctattatgagttcctgccagtctctatccaaagatccggaatgcttggtgatctggaccagacattaaccgtttctatttctggtctaggtgatgttatgcctgatgagtttgaacgggtaatcgaagggcaatatcccgatgtaaagccaacagtaaattaccggatttacagttcagacaatctgaattctccaatgttttatttactcggactgcaactctccagtgttgccatgaaccataaagctgtgacattcaaagctgaatcaccacgattaaataccactaaaaccggagatatctttgcactggatcgctttagtggcttgaagggggctatatga

SEQ ID NO: 48059 - DNA, 363 bp, Acinetobacter baumannii
atgaaaagtcacgatcatttgctcgataggcaatatgacgatgaacactacaattgtgttcactttgttcatgaagctgcaatggacctatacggtatagatcgggcggaagcgcttgaactctttatgcagcctaagggcaaaattacttttttatcttcacggttaaaacttttaaatccgctgcccatgcctaaggaaggctgcatagtcgccttccatcctagacaaagaaataagcccccgcatgtggggctttttcgtgggcaaaagattcttcacctcatggaaagcggagtcacttatttgcctgaagaggtcgtgatgggaatggggtttaatcgggtcagttattatgattaa

SEQ ID NO: 48060 - DNA, 312 bp, Acinetobacter baumannii
atgattaaagataaaatggctgaagagaatgctgctcttatggggcgtgcattaattgagcttccaggtatcggaaaaaaagaacctaatggaaatatacatgttgatcgtaaaggggttattaaagctttttataaatttgtatcatttaccgatgataagtatggtaaacctgaagcaaaagaacattcaaatggagatattgagtttattctaggagagtatagttacttgtggaatcttagtgatccatttcaatctaactctgctatatataaaatactgtatgaagttttctataaacatcagtag

SEQ ID NO: 48061 - DNA, 534 bp, Acinetobacter baumannii
atgaacattgaaaaatatcttgatgaattaattaagcgtgagggcgagtacgtaaataacccagcagatcggggcggtgcaaccaaatacggtattactgaagctgtagcacgtgaaaacggctataagggcaatatgaaagatttgcctcttgatgtggccaaagcgatttatcggaaacagtactggattgaaccacgttttgatcaagtaaattctattagctcagcagtagcagaagaacttttagacactggtgtgaactgtggtatcaacttcgcaaaaccacttttacaacgtactctaaacttgctgaataaccaaggtaaagccgggtatgcagatttgaaagttgatggcgtttatggttctaacactttaggtgctttaaaaacctatctggctaaacgcgggaaagttctggtgcgagttctcaatattatgcaaggacaacgctacattgaaatctgtgagcgtaatccaaagcaggaacagtttttctatggctggattgctaatcgcgtggtgatctaa

SEQ ID NO: 48062 - DNA, 393 bp, Acinetobacter baumannii
atggaattaaagtttatagataaaatgaaaagagaaataaacatctcattagatggtgaagatattattgctttttataatggtgaaaaaattggtgaattaatattcgattatgtcgaaaaagatcttggttatggtgactatgtagaatatatatcacgcttaaactgcatgcaggttgattccaactttagaaaagctggaattgcatctaaaatgatggaattagctgtagaatatcatggtaactttatccgaccaaaaataaatgcagtaggtggaaaagataaggaatgtaatgagtattacacatccgaaggaaaagctttaattgaatcatgtatacgaaatgggattttaaaagatgatcctgatgaaggatttgatgaataa

SEQ ID NO: 48063 - DNA, 645 bp, Acinetobacter baumannii
atgaatagtaagaaagaaaccctgttttcagttctattatgtggtgttgttgtatatgcaatagcattgctaatctattgtacttttaaaaattttattggtgcttcagctgattttatttcagcttttggctctattctaggggcatgtgctgcaatctttgcggcatttgtagcagcctatttatttaatgattggagagaaattcataaccaaacaacatataaagatatttgtacttctatctttaatactcaaactaagttgaatgtgagattaatatctataaatgataattttagcaaagctaaaaatacttgttttattcctcccaatagttatgacaccaataaaatagctgatcttattgaaaaagatattcagcaagtgggtgatttaatgactgaattactttatcaaatagtttatttaaaaaagctgattaaaagttttaataatcctactgtagataaaatgactgatttacttttagattacatgacactcatggatataacacaatataagactataaataaccacatgctatttctagaaaaggaaaaagtacttaaagaaagatgggatgatattgagggagattttttagaattgttggcaaaacaaactatatcaaaaatatag

SEQ ID NO: 48064 - DNA, 135 bp, Acinetobacter baumannii
atgaactttacacggctaattgacgaacaattaacacaaacacttattcctaagcgttttgttccacctacaccaccagaatatgaaggtaaaaatatggtctatgtttttgataggaagattcttttaatttaa

SEQ ID NO: 48065 - DNA, 1932 bp, Acinetobacter baumannii
atgaaccctctaaatgatttaacagtaattttagttgatatctcaggaagactaaacttactgaaagaaatatcagtaaatttaaattgtgaaataaagataagacaagaaattgaaagaagtttaaactttataaattccttaaactctgagattaataataaaagcgatagaattccactccattatattgaaaatattgtagagaatataagaaattatagagataacatcccagcttttactgaaagagaaaaaaatgaaacctcccctcaaattgttgagcatattaaatccatcataaacggagcttttagtactgatagcttcctagttgatatgtttaatagattagagtttatatctaatttctttaaagaactaaattttctttctgacaatatggttctacttggagcaaatggatcaggaaaaagtagtctagcctcatacttaaaaagtagtttaggaataaatagcttaattatatctgcacaaaagcttctatttattccttcttttaatagtctccaaaatcccaaaaacacccaaagtacattaaactctcagcagaatataaataataatatgaaatggtcattttcagcagatgaccatattgtttcattaacccctctaacaaatatgactaatcacttcaaagttttactaagtaacttattagctgaaaaatcaaaggaagagcatgagttttacgaagaacataggaagaatcctcaagccgtacaaaagggatcaaatttagataaagtaataagtatatggaactctatttttcaacatcgaataatattttgtgatcatttaaatttaggtgttatgactaaggatacaaaagaaaggtatgaagttaactttatgagtgacggagaaaaggtcgctctctactatatttctgaaattcttcaagctcctcaagacgcattaatcataattgatgagcctgaaatgtatttgcacaaaacagtactgtgcagattatgggatactcttgaactagagagaagtgattgtaagtttcagtatttaacacacgatattgattttgcaacttcgagaacaaatgctgaaaaatattggattcgttcttacacgaatcctgatcaatgggctattgaaaaattaaataataataatgatctacctgaaaacttacttcttgaactaattggaagtagaaaaaatatcttgttttgtgaaggagatattggtagtgctgatgaggaaatatataaattaatgttccctaactttttagtaaaacctgtaggctcatgtactaatgtcataaattttactagagcctttaataaaattagtagtctaactactcaggcattcggacttatcgatttagatcattccccagtagatagatcggctaagctaacagaagatagaatatattcactacaagttgctgaagttgaaaatttactattagaagaagatctacttaagctaattattaatcaattaaaattagacaatgaagaagagataattgataaaattaagaattcagtgatttcttctcttgaaagaaatttagaaatacaaacagccaattatataagttctcaaatagatttttattttgaagaagctaattttaataaaggtaataaaaaggatgaagttaaagaaaatttttctactttcatttcaaaaataaatattgatgaaatgtatgataatagaagatctcaaattgaacaaattatatccgaaagaaattatacggatattttaaaaatttataacaataaaggtttaagtgcagaagcccataatatcttacagattaggtcatatagaaatttcgcaatcaggcttttaaaatcaagttctgaagctaaagaaagtttgaaaaaacattttccagaacccttactagtagagggttgttga

SEQ ID NO: 48066 - DNA, 621 bp, Acinetobacter baumannii
atgtgtgcaaattacgaacctataagtaaagaccgggtacacctactagatctatttgaaccgacatttgactataaagctgatgtttatcccggatatgactgccctcttattttttctaaagatggcaacatcgaatggcggcaggtaaagttcggtatgattccaccatggaaccacgatctaaagttttcgaaatatacttataacgctagaaccgagacagtcgataaaaaaccaagctttcgacatgcatgggctaaaagccagtttgcactaataccagtcgaaaagatctatgaaccgagatatgtgaatggtaaagcagaacgttggggaatttatagagaagacggcttacctttcaccgttgcagctatttacgattctactgtcattgatgggcaacaagttcgatcaatgtcaatgctgactattaatgcagacaaccaccctttcatgagtcagtttcacaaacccgaagatgaaaagcgttcaattatagttattcctgaagagtatcgtgaagactggttgaactgtaaaaaagaagatgctgatcaatttttctttgagatgccactaaatgaatttacatcgaaatattttcaaaaatattga

SEQ ID NO: 48067 - DNA, 1149 bp, Acinetobacter baumannii
atgggatatttttctgataaagctattgagcaaaacgaagattttaatctttctggattaaataaaacaatttgttatgagtgtgtcaaagataaatatttagctaaagtgattttagaaaattcagtttctaaaaaatgctcatattgcgataagaaattcagatccaataaagctgcaacctatgatcttattatgaataagatttatcaaactatttttatgttttatggtgatgctcaagaactgaatgtatctgttgtaaaaggacaatgggttattaaacctacggctatagaagatatccttgctaattttgaccccggttggagcgatagttttactattgatttagcagagagtttaaatcctgaattatatttagtaaaacattcaaacggcgattggcttggggttccggaaaataaagttctaatgtacagctgggatttttttaaaaatcaaatcttatataagactagatatttatttttaagtgaacctattgatgagatgggtgataaagagattatacctgcaagtattatgctaaattctttagcagaattatgtatagagtttaatttaattaagaacattaaaaggaatagtattttttatagagttagaagtcattttaaaaatgaaacatttgacgaatttgatcaaatgggtgtcgcccctaaaaaaagagcaagcgcaggcagaatgaatcctgtaggaatcccatatttttatattgctgattcaaaactaactgccaaattagaagttattaaagatcaagaacattggagttatgcagcgtttaaactaaaaaaagatatagatgtaattgattttagtagcctacctgaagttccaagtatttttgatatagagaaatataaaattaggcaaaaaatcattttcatgtacgatctagtcgacgatctctccaaacctgtcggtccagatgacaatgaacacatagaatacattcctactcaagtagtctcagaattctttaggtatagatttaaaccggaagttaaaggtataaagtatagaagtgttaagaatccaaaaggtttaaatatcgcattctttgagtctgaaaatgagaaaattaaagagtttttcgaattgttaaatattgagaagaactag

SEQ ID NO: 48068 - DNA, 126 bp, Acinetobacter baumannii
atgaaagattggatctatttttttattgaacatactattaaatatggtgaaccattctataaagaaatcggttggtcattaggtttgaagaataattatatagttgtgagcatgatacgaagctaa

SEQ ID NO: 48069 - DNA, 939 bp, Acinetobacter baumannii
ttgcttgcggtactcatcgcagcgattgcctaccaacttaaaatggttttaccgtatacgctgttttggaaaaaacaggttaaaaaggtcaaacagcatcagctagatcctacaaaacagatttcactgatagtttctaatgtgctcaccccgaatgataaatatcatttattacttgagcatgtacggacgttgaaacctgatttattgcttactttagagagcgatacaacttgggaaaatgctttaaaagagatcgagaaagattatccataccgtgtgcccgtacctttagataatttatacgggatgcatttatatagccggttaccgcttaaaaatactgaggttaaattcattttaagtaatgaaataccttctattcataccacggtaattttgcgatctggcatgcctgttcagctctactgtttacatcctaagccacctagcccaactgaagcaaaagattcaacactgcgtgacgctgagcttttaattgtcggagatcaaattaaagatcttgatgaaagttgtattgtgatgggggatttaaacgacgtagcgtggtcacgaacaacccgtttatttcaacgtattagtgggctactcgatccacgagtggggcggcattttattaatacttttcatgcggactatcctttattgcgctggtcacttgaccatatctttcatagtacagacttcggtttagtaaaaatgcagcgtttatctcatattggatcagaccattttcctgtctatgtcgttttacaaacaggtcgaatatttgaagagattcacgaggaactagaacaaactcaagccgatgaagaagaagctcaagccgcgatacaagaaggtattgctaaagctgaaaaagaagaaaaaatcgtgactgatgaaattgcacagccttataaagagaaaaatatataa

SEQ ID NO: 48070 - DNA, 1287 bp, Acinetobacter baumannii
atgaagaattttaaatttagccttgcatggcaaattttaattgctttaatcctagggatagttgtcggggctgttttacataaccagcctgaaatcaaagatagtattgtaaataacgttcttactccattaggtaagatctttattagcctgattaaaatgattgtaatcccaatcgttttctctacattgattttaggtattgctggtgttggcagtacaaaaagtctagggcgtcttggttttaaaaccattctctatttcgaaattattactactattgctattttggttggcttgtttgcagcgaatatcttccatccaggttcaggcattgatatgtctcaactggtacaaactgatatttctcaatataagcatacaactgaagaagtacagtcacagtctcatggtattatccagacgatattatcgcttatcccaacgaacattattagttcaatggcgcatggcgaaatgttgccagtgattttctttgctgtgctatttggtattggtttatcttcattaccagcaacaacaaaagacccattattaaatgtatttcatgctgtatcggaaacaatgttccgtgtaacacacatcatcatgaaatatgcgccagtgggtgtatttggcttaatcgctgtaactgttgcaaacttcggttttgcttcgcttattccattgggtaaattggttgtattggtttatggtgcaatcttattctttgctttagtggttttaggtattactgcaaaaatgttcagcatcaatatctttactttgtttaagattttgaaagacgaattaattttggcgtattcgactgcaagttcggaaacagttttaccgcgtattatgcaaaaaatggaagcttatggtgcgccaaaagcgatttctagtttcgtaattccaactggttattcatttaaccttgacggttctacgctttaccaaagtatcgcagcaatctttattgcacagctttacggcattgaaatgtcaatcagccaacaagtgattttagttgtaacgttaatgattacttctaaaggtattgcaggtgttcctggggtatcatttgttgtgttattggcgacattaggtagtgttggtattcctgtagaaggcttagcatttattgctggtgttgaccgtatcatggatatggctcgtactgcgttgaacgttgtaggtaacgcgcttgctgtacttgtaatcagtaaatgggaaaaacaatacgactatgaaaaagctgctgcttatgaagcatctcttaagtaa

SEQ ID NO: 48071 - DNA, 1335 bp, Acinetobacter baumannii
atgcaagtaacgactgaagcggtttcgggcgttgcccgtcgtttaaatgtttctgtaccgacgagccgtattaacgagcaatttgaagctcgtttgaagcgcactgccaaaactgtgaagatcaacggcttccgtccgggcaaagtacctgcaaacgttgttcgccgcgaatacggtgcaagtatttatcaagaagttgtgaatgacatcattcgtgacagcgtatttgaagcaattcaacaagaaaaaatcaatgcggtaggtatgccgaacattgagaaagttgaacataaagaagatgctttagtttttgaagcaactgtagaagtttatcctgaagttgaagtaaaagcatttgacggtttggaagttgaacgtaaaacagctgaaattaaagacgctgacgttgacactatgatcgaaaacttgcaaaagcaacgtcaaacttgggctgtaaccaagggtatggcgaaaaaagacatgcaagtgacttttgacttcgaaggttctatcgacggtgagaagttcgaaggcggttctgctgaagactttaaacttgtgttaggttcaggccgtatgattcctggcttcgaagacggcatcattggtatgaaagctggtgaagagaaagttattgatgtaactttccctgaagattaccaagctgaaaacttagcgggtaaagcagctcagttcaaaatcactgtgaagcaagttgaaaagcctaaacttccagagattgatgctgaattcttaaaaatcttcggtgtttctgaagaagaaggcattgaaaaattaaaagctgacgttcgtaaaaacatggaacgtgaagttcgcaatggtttacgtaaccaagttaaacaagctgcatttgatgctcttgttgctgctaacgaaattgaagttccagctgcaatggttgctcaagaaattgaccgtcaacgtcaacaaatggttcaacagttcactcaacaatttggtggtgcaggcgcgcaatcttttgacaagagcatgcttcctgacgaattgttcaaagaacaagcagaacgttctgttaagcttggcgtattggtaagcaaagtattagctgatgctaaacttgaagttgaccaagcacgtgttgatgcttacatcgacgacatggcttcttcttatgaagatccaactgaagtgattgaatacttcaaaaatgatgctcaacaacgcgctcaaattgaagctgttgtgttagaagatcaagttgttgatcacatcttagcttctgctaaagtgactgacaaagcagtatcttatgaagatttattgaaagaacaacaagctcgccgtatgggctaa

SEQ ID NO: 48072 - DNA, 327 bp, Acinetobacter baumannii
atgagtaataaagaatggcgcgaactttttaatagaaatgagtatcatgaaatcacgggatcttatcttttagttattgaggatgcaaagagaaaatttgaggagatttccaagggggaatgggatctgaagaaatatgtagtatggctacaaatctcaactaatcaaaaatatgcatcaataggttttattccaaatattgaaaacttcattgatggaataccatttgaaattcctaatcaaggaatgtatcaaaacggacgaggtgtacaattttattatgaaattgataatgtggagcttaaagaaacgatctttatgagatga

SEQ ID NO: 48073 - DNA, 264 bp, Acinetobacter baumannii
atgaaatttgaagagtttaatcaatttatagataagcttttggaacaggaagaatatgaaaaagttgatgaaattttagatgatcaaatagatgaaataataaagttagatagtaaagaaattgaaaaatatttaatgctttatgcctcattagcaggaggtgccgaatctttagctagatttgataaattatttaataaggcagtatctttaggaaaaattaaacagactgatttaaaaaaatgtggaattatcaccagctaa

SEQ ID NO: 48074 - DNA, 312 bp, Acinetobacter baumannii
atgaattgggaaatcacaaatacagactttttaaaattgagttttccaaatgaaattaataatactgtgataaataaaattgtctcaaatttgaaatttaaattattaaatgaggagagcgtatatttatatttttctggatctgaaccagtgattaagacaaacactaacgaattttttctaaatttatttaattttatggatgaatttagttttctggattttatttattttttaagtatagatagttccaaaaaagatataaaattagtggagttgagaatttttgaatatatatgcgggaatttatga

SEQ ID NO: 48075 - DNA, 1173 bp, Acinetobacter baumannii
atgaatactaagtttgaatttcttggaagtccaataaaagacatagatcatcttgcagaaattttagatttagatataaatgatatcttatttgctgcacaattagatgatgctgatcgttatacctctaggtctattacaaaaccagatgggcgagagcgaatagtttataatcctaaacctatatttcgtaaaatacaaagaagaatcaaaaataggctctttaatcaaatttcatggcccgattttgtatttggttcaattccagcaaaagaaagatctcatgattttattgaatgtgctcaacagcattgtttagctcagtcaatcttgaagttggatatagaagattttttcgataatattacaatgagattagtacaagatatatttgaaaaattttttcattatccagaagatgtatctgaagttttagctcagctttgttgtgtggatttaaaagtacctcaaggaggaataacttctagttatttggcttctattgctttattttctttggaagaaaagttgtttttaagattaaaaagcaaaaagttaacctatacaagatatgtagatgatatcactatttcctctagaaatagagattttaattatgattctataattaatattgttgaaaatttattaaatagtataaatttgccacttaataaaaggaaaattgaagtaaatagattttcctcgaatcccttaaaagttcataatattagaatagactttaaagaaccaaagtatgataaatctgaagtaaaaaatatcagggcagcaatacatagattatctgagttagcaaaaaagcctaatcatagaacacattatttttatcgtatagattttaatagatgtcaaggactggtaagtaagttgaaacgagttaaccatccttcttatttgaaattacaagatagactgaataaaatcgctccaattcctaataatgctgatgtgaagtatataaaagattcaataattgaattaataaaatattttcctcagcaaaaaggagagggaagttatgtatataataagagattttttaaaactcaaagtagaattggttttttaaagtctcatcctaaaaagatatatgataatttggcagtccagttaaatacagagctgcaattatatcggatgagggaaaaataa

SEQ ID NO: 48076 - DNA, 720 bp, Acinetobacter baumannii
atgagtagtaagttaaaaaaagaagctgatttaatatataccattataaatatattatggggaataacaatcatcattacttttgttttttttgttggtaatttttttgaaaaaattaaaggaaaatattcttttagtattactaatgatggtttgattaaatttatagaactcaatcaacatattttcaacttttttgttttttcgacagcagtaacaacattgttgttggggtggattactgttaaaatatatttaagtacatattttactactcatgaaaataatttaaataatcaggaagtgaatagatattctacatatcttcaacactatgataattttttaatgatgattgatataaaaattaataaattaaaatacttatcagttgctaatattgataagttgtgcctatataattttatattcccagatgttaaagatggtgttttattggtttcggatgattatagggaattaattggtttacttgatcaatctatagagtatttaaataaaaatttgccaagaaaaataggttatagtgatcatattgaatttttaataaaacaagcaaataaaatgggtatagaattaccatattatgaaaggaaatactttttaaaaattgaacatgaactatatagtttaattaaccatataaatcataatataagagttgataaattaagcgagcctaaatatagtatatattaa

SEQ ID NO: 48077 - DNA, 684 bp, Acinetobacter baumannii
gtgttgaaacgaagtattttgatactttttttgactggaaacattatcggtctatcatatgctcaagcagcagaactagagcctgtaaaacttaaaaaaagttgtattaagaagaaccctctagcagaaggccaaaatgaccctgagctattgaatatttttaaacaagtttgtgatagtgataatacaactcaaaaaaatgatttattagctaaagctgctatgcggttttatcaaaccaatcaaccagttaaagcattgaatttagcaagtcaattgcaaagccaaaatatacgcggttcattaatcacagatgtcttatttttatctggtgtgagcattgcaaataactcattgcaacaaatgcgtaatcaggaaatgcgatatttaacgaatgacataacatatcctcctgcaaagcagttagttgaaaatattcatactgcaatgccagctcctgatccatcgagtttcaaaactaacaactcggaaagcagttcaactgataatgaaaaaagaagttataaaaaacagtacgcaacgcgtaataaagtgagtgcttctagaacatcaaataaacgagtagtaagtccagcaaaggccaccgcagtaaaacctaaaactgcacctgcagccactgtcaataaatcaaaaagttcgccttttgaccctttaattaaataa

SEQ ID NO: 48078 - DNA, 999 bp, Acinetobacter baumannii
atgcagtcagaacgttggtggcaagactcttctataacggctgagttgtttcaacgccctaagtcttttgagtttattcaagcaacacgtttattgcgtcatatgcctgccaatgacgcagctttatcatggtctgaccattttaaatttgagacctcatttaacttaaattttccagccactgaaattgaaagtttagagttagtagatgagcgtgttcatttaacaaacctgatcgttggtcttaccggtatacaaggtgcattaccttatacatatacaaataaaattaagcaggctccaaggcaacaacgcgctgaaacgaaagagtttttaagcttatttaatcataagttgaccagtcagtatgtagagtcaagtattacttatcacttgcctgtgcgctatgaaattgaaaataaaaatgattatttggatattctccatgcattgaatggctatgttcgctcacaacatcagcaacaagacttggatgaatatttcgctgaattttcaggcctaatgcaagggcaaaataatacggttcatgctttaaagacgatgttgagttgtatttttaagcatgaaattacaattaaagagtttgtacaggaatcgtttaagttagcgggtgatcagctaaccactttgggtggaagtcaaccgagcttacttggtattaacacattttgtggggaaacgattcaacaaattgatggaaaaaatgagattcaaataggaccgcttaagcgtcagcaatatttaaaatttttacctcatcaagagcttagcttaaagctcaaaaaaatcgtagaaacctggtgcagtccaactttatcgatagatttaagattgatattggatgagtctgaaatacaacctgttcgcttaactcaaggccaagaaagtggcctagggcaaggcgcttttttaatgtctcgtaagcctaatacacataacgatgaaacatgttatagccttataggagagcaaatatga

SEQ ID NO: 48079 - DNA, 1902 bp, Acinetobacter baumannii
atgattcaagaagctgagcagatcttatcttatgcaatgacattggcaaatgataaacaattcccgatcttggatgctgactctcaacttgtagatcagacacgtcaagtattgctctctgttattagaggtatgccagcacgtgaccgtgtttataatgaaattaaaatgcgtgctgctgtgcgcttcccagctttaactgtaagccagattgtaggtgacgcaaataaaaatattgtattgggcagttatgcattaccaggggtatttactcaaaaagcttggaacgagtatgtagaaaaagcaattgaggaagcagcagacaaacctacagatactaaagactgggtgcttaatagccgtcaatctgatgatttaactttctcaggtagtccagagcaaattagaaagcagcttactgcattgtataaacaagaatatattgcagagtggagaaaattcttaagtggtattcactatgcaaaagcaactcagtttgctcagcaagttaaaaatattgatgtattgggcgaaccacaaaattcaccaattcgcacacttattgaacgcgtagccattgaaacaaattgggataatccggtcgttcaagccgagttagcagcacctcaaaaaggatttattgcatggtttaaacgtaaggttttaaaccatgatgataaacaattagcaaatcaggctgtaacgaatgctcaagggcctatttctcaagaatatcaaatgttctatcaattggttcgtaaacgtgatgatcagcaaggtaaatctttgcttgatgaatatatgacgaatctagccttagtacgtagtaagtttaatgaacttaagaatgcgggtgagatcggaccgaatgcgatgacattggttaagcaaactttaaatgagcagacatcggtatttaaccagactcaaaaaattgtagatgaaaagatggcggttggtttcagtgaaattgatcagcaacttctacaaaaattagtggtgagtccacttacccaagcctttgaaagcttaattacacctactcaagatgaaattaataagctatgggtaatgcaagcttatcaaccatttactgcaaatcttgctaagaaatatccatttaactcatcagcttctttacaagcaacaagtagtgaaattggacaaattcttggtgaaaacggcagtatttcccgttttgttaaagagagtttagatccgtttgttatccgccgtggttataccttaacctcaaaaacatggaaagatttggggattagtttaaacccacaatttgtcatgaacttccaacgttatgtcgcacctacaaatggaatggcaacaggtgagttaaatagccaagcaccagctgctccggtaaccaatcagtctaacttccagttctacccaattcaaaacccgcagttactttcatataccgttgatattgatggtcagcgtatgacttatgaaaatggggtgcagcaatgggttaactttatttggccaaatcaaggcagtattccgggtgctcgtattacggctgtagatttacaaggtcaaacacataccatttttgatgaaccaggcgaatacgggattaaccgtttaatcgatagtgcacagcgtaaagagcaaaacggtggttttgaaatgctttggcgcagtaagacagatccatcactctttgtgaaaatgaacttccgtcttattagtagtaattcaggaagtatcggttcaagccgtggctactctggtatgcaactggttgacaaagtaactgcggataaggctgctcgcgttgtatccgcacagcaagcaccagctcaggcagctgctcctgccaaaactgaaaatccagtttctgcactagcacaacctgctgcgggggttaagccatga

SEQ ID NO: 48080 - DNA, 852 bp, Acinetobacter baumannii
atgacaatgaacgatgcagttgatgcagaacagacagaaaaattattagcgcctttaaggcatgaattattacatccgattgaagatatgcaggatgaaaatgatcgccaatttattactgcattagcacgtggtttagagctattacgttgttttacgcctaaacatcagcatttgggcaatcaagagcttgctcagatgacaggtttgccaaaaccaaccattactcgcctcacacataccttgtcgcgtttgggttatatcaaacaagtacctaactcaagcaaatttcagctttcagttggagttcttgcgtttggttattcgatgctgtctaacgtatcgattcgctctattgctcatccatatatgaaaaatttggcagactatgctggtgctgctgtagccatggcaacacgcgatcgtctgaatatgatttatcttgatgtggtgcaaggcaaaggcaatatgaccatgcgccgtcaagtcggaacgtatttaccgattcatttaagttcgatgggacgtgcatgtttagctgccatgcctgaagatgaaagagagttcttgcttaatgcgattcgtaacaagcacaaagaagactggatcaaaattaaccgtgatctagacaaagcctttaaagactaccaagattttggttattgtttttcaattggcgaatggcataaagatgtcaattcggttgcggttccactcattcatgaacaacatggtttattggtgtttaactgtggtggtccaagctttattatgaaccgtgaaaaactcgaagaagatattgcaccgcgtcttttacatatggtgaataatattcgtaccgagattagctaa

SEQ ID NO: 48081 - DNA, 972 bp, Acinetobacter baumannii
atgaagaccaaaattacagaattatttgaaattgagcatccaattattcaaggcggtatgcattatgttggttttgcagagcttgctgctgcggtttctaacgcaggcgggttgggtattattactggattaactcagcgtacacctgaaaatctggcaaaagaaattgcacgttgccgagaaatgaccgataagccttttggggtaaatttaacctttttgcctaccgtaaatactcctgattatccgggttttgtagaggcaattattaaaggtggcgtaaagattgtagaaacagcagggcgtaatcctgaacaggtgatgccatatttaaagactgctggtattaaagtaattcacaaatgtacttcggttcgacatagcttaaaagctcagcaaattggatgtgatgcagtttctgtagatggttttgagtgtggtggacatcctggtgaggatgacgtgcccaatatgattttattgcccttagcagccgatgcattagacatcccgtttgttgcctctggtggtatggcagatgggcgctcacttgctgcggctttagcgatgggagccgatggaattaatatgggaacacgctttattgcgactcaggaagctcccgtacatgcaaatgtgaaacaggcgattttgaatgcaaccgaaagagatacacgtttaattatgcgtgctttgcgaaatacagaacgtgtcatgaataatgcggccgtagaaaaaatcgtggcaaaagaaaaagcactcggcgataacattaaatttgaagatattattgaagaagttgctggggtttatccaaaagtcatgattgatggagatgttaatgcaggagcatggtcatgtgggttggtggctagcttgattcatgatattccgacatgcgatgaactggttaaccgaattgtcaaagaggcagaagatattattcgtggtcggttattaggggttttataa

SEQ ID NO: 48082 - DNA, 1026 bp, Acinetobacter baumannii
atgccctttgatctcaaagtgagcttgcagcaaaggtctgagccgtctgcacagcagaaacagcagaaaaaactgaatcgcctgattgataaaatagagcaacaaaaagttagcctgagcacatggcaaaatgcacaagctgagattcaacagtacattcggcaaaaactgatgcctgtatatagcgatttgcatgaagtgctatttcagcagttagagcaactttggaatatgctgcatagccatgagttttccaaagcagacatgcaacaactggatgaaaaaattgcccagcttgcacaaatgttgaagcgctccaaaatgctgtctgctgaacagttagagttagtgaaacagatcgataccttttatcagcaacatgcaggggaatcggtaaaaaagaatagaaaagctcagtcaataaaatctggatacgatgaaagtgctgagcaaagtgtagagttagaagaagactttgagcagtatgctgctgagcaacaacaagcgagagaacaagccaagcagcaaagacagcaacaaaaacgtgaacaagctgagcaaatggcagcccagtcactcaaaacagtttatttaaaaattgccgcgatgattcacccagaccgtgagcaagatgaaacaaagaaacaggaaaaaactgagttgtttcaacaggcaagtcaggcctacgaaaagcaggatttgttttatttactcaaactccagttacagcttgaacagaataaagggctaggtgttaaagagttatctgccgagcaattaaggttttataaactggctttagatgcacaaagtcagcagcttgaaagtcaaattgccgagattttagattcgtttcagttagccaagaatgtaaaagcagagcatgtacatattagtgatgtgtataaagctgtagatgctgattgtgctgagctaaagcagcagttgaagtgggaaaaggaacgtttaaagcatatgaaaaaggtaagtggggtggagatgttattggggcatggggtgctttag

SEQ ID NO: 48083 - DNA, 438 bp, Acinetobacter baumannii
ttggaaagagctataagtttcagacaatcttggatttcttatagaagtactagattgaaagagaaagaaagccatcagcctaaacaggctaaggatggtgtaccagttctatctttaaaacattacttagaatctttatcacatattttagatcagagttttagggcttttgaagatcgagagcacctaagtaaccaaatttattcgaaatattctagacgaactgaacttttatcctattttgatttcgagtctgaagttaaacaggagattgcaaagtcagctttggtggtatgtcttaaaaatttaggaaaacgtgcattaaatgcagacatacttttattaattcttaaattatttctattaatatttttaccaattatttttataactactcgtaatttttccattcaaaaaaatctctctatttctgcttga

SEQ ID NO: 48084 - DNA, 177 bp, Acinetobacter baumannii
atggctagacgtaaaaagtcaaaagctaaaaaacgaactaatattgctaaacctcagccaatcatcattattaaagagcaaccaaaaagttcgcgatattggcagcaggtgttaatggtattgatagttcccttatttaattggatgaaagaaattatccaaacatattggaattaa

SEQ ID NO: 48085 - DNA, 2769 bp, Acinetobacter baumannii
ttgcaagttattgcattctattcaccagataacaacctatcagactctgacattaaagactacgtaaactcgtcaattaaagaaccgcttagccgtgttgccggtgttggtgaggtacaggtcttcggtggctcatacgcaatgcgtatctggcttgatccagctaaattaacaagctatcaacttactcctagtgatattgcaactgccttacaagcgcagaactcgcaagttgccgtaggtcagttaggtggtgctccggctgtacaaggtcaagttcttaacgcaacagtaaatgcacaaagcttattgcagactcctgaacagtttaaaaatatcttcttaaagaacacagcatcaggtgctgaggttcgattaaaagatgttgctcgcgtagaattaggttcggataactatcaattcgactcgaagtttaacggtaaaccggcagctggtcttgcaattaaaattgcaacaggtgctaacgcactcgacacagccgaagcagttgaacaacgtttatctgaactacgtaagaactatccaacaggtcttgcagataaactggcttatgacacgactccatttatccgtctttcaattgaaagtgtagtacacacattaattgaagccgtgattttggtattcattgtcatgttcctattcttacaaaactggcgtgcaacgattattccaacgcttgcagttccagtagttgtattaggtacatttgcggtcattaatatctttggcttctcaattaacaccttaaccatgttcgctatggtattggcaatcggtcttctggtcgacgacgccattgttgtagtcgaaaacgttgaacgtgtgatgagtgaagaccataccgatccggttaccgccacttctcgctcaatgcagcagatttctggtgcgttagtaggtattaccagcgtattgacagcggtattcgtaccaatggctttctttggtggtacaacaggtgtaatttaccgccagttctcgattacccttgtaactgcaatggtactgtcgttaattgtagcgttgacgttcacaccggcactttgtgcaactatcttgaaacagcatgatcctaataaagaaccaagcaataatatctttgcgcgtttctttagaagctttaacaatggttttgaccgcatgtcgcatagctaccaaaatggtgttagccgcatgcttaaaggcaaaatcttctctggcgtgctctatgctgttgtagttgcccttttagtcttcttgttccaaaaactcccgtcttcattcttaccagaagaagatcagggtgtggtcatgacacttgtacaattaccaccaaatgcaacgcttgaccgtaccggtaaagtgattgacaccatgactaacttctttatgaatgaaaaagataccgtggaatctattttcactgtttctggtttctcattcacaggtgttggtcaaaacgcgggtattggcttcgttaagttgaaagactggagcaaacgtacgacgccagaaactcaaattggttcattgattcagcgtggtatggcattaaatatgatcattaaagatgcatcatacgttatgccgttacagcttccagcaatgcctgaacttggtgtaactgccggatttaacttgcagcttaaagattcaagtggtcaaggccatgagaaactgattgcagctcgtaacacaattttaggtttggcatcacaagataaacgtcttgtaggtgtgcgtccaaatggtcaggaagatactcctcagtatcaaattaatgtagatcaggctcaagctggtgctatgggcgttagtattgccgaaatcaacaatacaatgcgtattgcatggggtggctcatacattaacgatttcgttgaccgtggtcgtgtgaaaaaagtttatgttcaaggtgatgcgggcagccgtatgatgcctgaagacttaaacaaatggtatgtacgtaataacaaaggtgagatggttccattctcggcatttgctacaggtgaatggacgtatggttctccacgtctcgaacgttataacggcgtgtcatcggttaacattcaaggtacacctgcacctggcgttagctctggtgatgccatgaaagcaatggaagaaattattggtaagttaccatctatgggcttacaaggtttcgactatgaatggacaggcttatcacttgaagaacgtgagtctggtgctcaagcgccgttcttatacgcactttcattgttaatcgtattcctttgcttggctgcactatatgaaagctggtcaattccgttctcggttttacttgtggtaccacttggtgtcattggtgcaatcgtattgacctacttgggcatgattattaaaggagatccaaatctctcaaataacatttacttccaggtagcgattattgcggttatcggtctttctgcaaaaaatgcgatcttgattgttgaattcgcaaaagaattgcaggaaaaaggtgaagatctacttgatgcaaccttacatgctgcaaaaatgcgtttacgtccaattatcatgaccaccctagccttcggtttcggtgtacttccacttgcactttcaacaggtgccggtgcaggaagtcagcactctgtaggctttggtgtacttggtggcgtactcagcgcgacgttcttaggtatcttctttatccctgtattctatgtgtggattcgtagtatctttaagtacaaaccaaaaaccataaacactcaggagcataaatcgtga

SEQ ID NO: 48086 - DNA, 462 bp, Acinetobacter baumannii
atgaatgcacaaaaaggttttacattaatcgaactcatgatcgtagttgccattattggtattttggctgcgattgcgattccacaatatcaaaaatatactgcacgttctcaaatcacagcggcattagccgagattagcccggggaaaactcagtttgaattggctttatcagaaggaacagctgttacaactcctgctaatattggtttaaatgcaacgactaataactgtagtgctgttacagcaacctcaactgcaggtactacagggactattacttgtaccttaagggggtctgcaacaatcactagcggggtgattacattaactcgtactgctgaagctacagatgcttctggagtaactactgatactggtggttgggcatgttcaattaaaaacaatggttcatcagatattacagcagccattgctccgaaatcatgtacagtttcttaa

SEQ ID NO: 48087 - DNA, 1305 bp, Acinetobacter baumannii
ttgagtgaagcgcatcaggcacttcgtgtaaatgacttgcgtggcaaagtacgtgtacaaactgacggtggtttaaagactggtcttgatgttattaaggcggctattttaggtgctgaaagtttcggttttggttctacaccaatgatcgcattaggttgtaaatacctacgtatttgccacttaaacaactgtgcgactggtgttgcgactcaacaagatcatttacgtcaagagcactatattggcgaaccacaaatgctcattaatttcttccactttattgcagaagaaacgcgtgaatggttggcagctcttggtgtagcttcacttaaagacttgattggccgtgtagatttacttgaagtcttaccgggtgaaacagagaaacatgctcatcttgatttaagtgcattattaacttctcatcctgctgctgaaggtaaagcacagtattgtgaagtagaaggtaatgcaccgtttgacaagggcgtattggctgaaagaatggtcgaagaaatgcttcctgcaatcgagtcaagcgctggtggtcaattcaattttaatgtcgtgaactgtgaccgttcaattggtgcacgtgtatcgggtgaaattgctcgtcgctatggcaacttgggtatggaagcacatccggttgtaatgaacctaacaggtactgctggtcagtcacttggtgtttggaatgctggtggtttgcacatccgtcttgaaggtgatgcaaatgactatgtaggtaaaggtatggctggtggtcgtatttcgatcttcccaccaaaaggttcacctttccagacacaaaatacagcaattattggtaatacttgtttgtatggtgcaactggcggtaagttatttgctgcaggtacagcaggtgagcgtttcgcggttcgtaactctggtgcgtttgctgttattgaaggtgcaggtgaccactgctgtgaatatatgactggtggtgttgtgactgtgcttggaaaagtgggtcataacttcggtgcaggtatgacaggcggttttgcttacgtgcttgacctcgataatgactttgtagattactacaaccacgagttaattgacttaacccgtatttcaacagaatctatggaagatcataaagaattcttattgcgtattattgacgagcacatcaaggaaacaggtagtgcttgggcttacaaaatccgcaatgagtttgacttctacagccgtaaattctggcttgtaaaaccaaaagctgctaacttgcaatcgcttttgaaaactacacaagctgacccacaataa

SEQ ID NO: 48088 - DNA, 327 bp, Acinetobacter baumannii
atgagccaatttcctaatgatgcaacaggagatactttaaacgaatttaagaaaaatgggtttgatctaacaaagccgatggaaatagatttctttattgtaattccttcagaagagattggagaaaagatttctacagaggttaaaagattaggttgtaaagccagtgttgagcaagataatgatactaaggaatggacttgttattgtacgagtacaatgattccattttatgatgacattataaaattcgaagaagatctaaataatattgctagtcaatatggtggttatactgatggttttggttcctttggtaatgtttga

SEQ ID NO: 48089 - DNA, 384 bp, Acinetobacter baumannii
atgaaaattagtcaaaagcaaatagatgctgtaatagcattagatggtgctaaaagatataagcatttcataaaagttattgtcgatacgcaagaagtttggggtttatataatgatggatgggcattggctggaacagaggataatcaaaaagtatttcctgtatggcccgccaaagagtatgccgagttatgtgctgagaatgaatgggaagaatatgaagctgagctgatttctttagatgacttcatgaatgaattgttgcctacattaaaagatgatgaggtattaataggcattttttatactcctttaaataatggtgtaactccagagatagaacaggtactaaatgatttagagcttgaattggaaaattattag

SEQ ID NO: 48090 - DNA, 486 bp, Acinetobacter baumannii
atgaatgatgcagagaagtttcagctcaaactggaattaacattaaacttaaaatctgctcaagacattcaaaaatgggctatagataaattagacaaaaacccagcagatcttttagctttagacatttgttttttctctaaagatgaggaaatcttagattattgcaataatattagtattgctgaaactaatgtagaacctactcttaagaaaaaaattctttatgaaatattaaaaaaatatacagagataacgccctctatcggatattcaatagaattcatttctaatttatttgcaatattaataaagatatctagatttgctgaagatgaagatctatacaattttataaattattatgatgatgaattatatttggcttcagaaggtatatctaaattagaactaaatgagatatggcctactttcttgaatgatcttaaaaattggctttcattacaatgtgagcttctttcatag

SEQ ID NO: 48091 - DNA, 1479 bp, Acinetobacter baumannii
atggtgcgatatcgtctttttgatttgattttagctaacggactaaaaaaattactggagtgtattcataaaatgtcgaatcaaaatctgagcgaccctcatgaacaaggtgagctccatcgtagtctctctaatcggcatttacagctgatcgcgattggtggtgccatcggtaccggattatttatgggttcaggtaaaacaattagtcttgccggaccttctatcttatttatttatatgattattggtttgatggtgttttttgtcatgcgtgcgcttggcgaacttcttctgtcaaatttaacctataaatcatttattgatttttctaccgatttaattggcccatgggctggttactttgtgggttggacctactggttgtgttggatcacgattggtatcgccgatctgtctgcaattatttattacttacagttcttcaataatggcttacctttctcgcctgttgaaggcgcaatgattagtgttgccgcgattgtgttcattatgggattgaacttattaacagttcgattgtttggtgaattagagttctggtttgcacttattaaaatccttgcgattattattttaattgcagtgggtctgtggatgatctttacaggctttacgtctactacaggtgaagtcgcttcatttactcatctttgggcaaatggcggtttcttcccaacaggtgtgcatggcttcttggctggtttccagattgcaatttttgctttcgtgggtgttgaacttgtgggaacaacagccgcggaaactaaagaccctgagcgtaatttgcctaaagcgattaactcaattccaatccgtatcattattttctatgtattggcgctactcattgtaatgtcagtaacaccatggaacagaattgatccggcgatcagtccatttgtaaacctgtttagtcaagcaggggtagcggcagccgcgattttgatgaacttggtggtattgtcatcagtcatgtcatccatgaacagtggtgtattctcaacaagtcgtatgttgtttggtttatctcgtgaagatcaggggccaaaagcttttggtaaacttaacagacgtgcggtaccggcaaatgcattgtatttctctgctgcgtgtttattgttaggtgcagcattacagtattttgtaccaaatacagttgaagcatttacgcttgcaacaacactgtcaacgattctcttcatctgcgtgtggttgcttattatttggagttacatccgttattacaccacgcgtcctgaactgcatgccaaatcaacatttaaattgccagggggcttatttacatgttggatcacgattattttctttattggtatgatttacgtattgtctttagagccagacacttttaaagcacttaaagtcagcccaatttggtttgttattttgatcattggttatttcttcttctataaaccacgtcataaaaaataa

SEQ ID NO: 48092 - DNA, 1707 bp, Acinetobacter baumannii
gtgaaatttaaatacaacaacatcgtattttcaataattatggcttttagtgcttcgggtttgacagcctgtaataatgaaagcaatagcagtactttagcatcaacagaaactactgaaagtagtatagatagtactttaaaatttgatgcttccaaatctcaagtgaccactgtcaatttaacggtcgatggtcaagcaatgaaagtgactcaatatcgaatcgtttatgtagccaaacctgtaaaaatggcttctactcaagcaacgctcggtggtggaacaactactatttcagatccatatgcttatcaaactttaattatttctattcctgaagggaaagagaatgatcaaaaaacagcaatgtatcttcaattcaacaatggcggatggtgggcaagccctgtaaaaacaaatatcaatgaaggggcaaatttagttagtaccaatgatactgataactatggcgcagcgttaaaagctggttatattgttgttgatgtaggcacaagaggacgaggtattcgttcttatgatggtacatgggcaggaaaagctccagctgttattgtggatgctaaagctgcgatacgttatttacgtctcaacgacacccttctacctggttctgctgaaaagataattattacaggtacaagtggaggcggtggtctcatatcaacggttgctgctagtggaaatagccctgattacttatcttatttagcagaaattggcgcagcaggtgttcgcggttcaggtacatctcttacaagtactgtaaaagacaatgtttttgctgtagtagcttattgtccaataaacaatttggcgaacgctgatcttggttatgaatggcaatacaatgcttctcgcaatgatagtaatactggcaacttaaatggtgttagttactctgctggaccacaacttaccgcatctaaagaaattgctgagaaatttccaatgtatttacaaacattgaatttaaagctccctaatggacagcagttaacagctgagaatatgccggatcagattaaggaacaaattaaatctgaaattgagcgccaacttgcgaaaggaacacctgtacctaatttcggtgagaactttgtctcaagcaaagcaactctcgttaatgattggctcaaacatgatggcagtaaagttaccgaaattgattatcaaaaatttctaaattatgtggcagcgaatcaagcactcaaaactgtagttgcattcgatgccgtcggcgttaatggcaatactgcaattagtggagaaacaaatctttttggtgacagccaaaatgaatataacaactttacacaatggtcatgggatcataacagcaaaacagctgatggttcaggtcaagatgatacagggctcagttgggaaaattatttaaacagtaattcaagcactgcaaatctgttaaaagaccaattaaagatggttaatccaattgcttatctaaacacaacaacagatacggcaccatactggtatatccgtcatggaatgcttgatcgagatacgtcttttgcaatgcaaatgatcttatattatgcggttaccaatgatcctaaagttaaagatacaaacttcaaactcccttatctaactggccatgctggtaactacgatgtacaggaagcttttaaatggataaatgaaaagttaaatacaacacagtaa

SEQ ID NO: 48093 - DNA, 1362 bp, Acinetobacter baumannii
atgaataaattattaatatctcaacaccaaagaaaacttttactagttgcattaatgacactatttaatggaacagcacaagcaaatgacccatggtcatcagatagaaaatggctttttggtgattgggatggaaacagacagcaattagaacaaaagggttataaatttaacttttcagtaatgaatcaatcagcagttaatttcgatggtggctacaacgatgatcaagaattattaaatgcctatcaattaactcttggggcaaactttgatttagaaaaaatattgaattggcagaatacccaagtaagtttaatgattacaaaaagagatggtcagtcattagcaagtgaacgtattggggatccacgtgcagcacaactgagttctgtacaagaaatttatggtcgtggtcaatcatggcgtctaagccaagcatggttaaagaaaggttttattgacaatactttaacttttaaaattggccgaatgggtatgtcagaagattttaatgcttcccagtgtgaatttcagaatctagttctctgtggtggacaaatcggtaaagctgtaggcagtatttggtataactccccagttagcgtatggggagcgaatgtaaaatatcaattttctccaacgtggactatgggcattggagtttacgaagtgaatccagaaaacgctttagagaaacatggttttaatctttctatggacgatactgaaggagcacttattccaattgaattaacttggaagcctaaacttactctttttaataacttagcaggagaatacaaattaggcgcattttactcaacagctgatgctactgatgtaaaaaccaataatgaaggagaaatatctctaaatccttctgatcgtacaattcatagtagcaagcatagcttttggtttaatgcacaacagcaattaacccaaaaaggtagcaattcatcacaaggactttatggaactattaacttaactttcaatgataaagcgacgaatagtattcaagacagccaacaagttgccttttggtacaaaggcttattagacaatagacctaatgactctattgggttcggacttgctcgttatgcagtgaatgatcgaattaaagatcttcgaatttatagtaatgatattaattcgcttactacagaagattactcaaacctagcttataagcctttacaaaatgatgagatagatgtggaactaaattatagttaccaatggtctccaagcattatgctccgtccgaatattcaatatgtatatcaacctggcggagttaaagaagtagatgatgcttgggttgctggacttagcgttaaattaaatttctaa

SEQ ID NO: 48094 - DNA, 1341 bp, Acinetobacter baumannii
atggatatttttaatgaattaaagactcgaccaatgaatagctatcgctggctacttgttggtttgtgtatcttactcaatatcgtagatggatatgatgtacaagtgatgtcatttaccgctgcttccgtatcaaaagagtgggctttatccggttcagtattgggcatcctgattagcttaggactagtgggaatggcctttggttccctcttcattgcccctatagccgataaagttggccgccgtacaattattttatcttgccttcttctgtctggcataacgatgctattcagtagccatgtaatgaacccatatcagttaggaattttaagattcattacaggcattggaattggcggcttgctgactaatggtgcggttatggctaatgagttctcaaccacaaaatggaaaaacttgtcggtagcattactatctactggttatgctattggtgctgtagtaggcggtatgattgcttatcgacttattgggactgttggctggcgcagtgtatttatgtgcggtgggatcttcactcttaccgttttagttctagtctattttgttttacctgagtctgtagaatatcaactcattaaaagacaacctaactcgattgaacgtataaataaaacattggcaaaatttaatattcaagcaattcatagctttccggcctataaagagcttactcatggaaaagtatcaataaaaacgctttttaaaggtaatttcaaagcacgcacgatttttgtatggattgccttcttttcagttatggctggtcaatactttattttaacgtggactccaaagttattaacgatggcaggtatgactccagaacaaggggtaagtttaggaattatcttgaacttcggtggtattctcggtgccattttaatggccttcctgacagttcgttatcaaatcaaccttgtgctttctagtttctttgctttgaccgcaatttttattacagtctttgttcttaactcagggaactatatatattcaatgtggattgctgttctcgttggtatatttaacaacggttgcgtcgctggaatgtatgctcttgcaaatagtacttacgacactgagattcgtgccactggagtcggttctgctatcacaatgggtcgtttaggaggaatactttcaccattaggtgcaggttatttactagatgccggtattaaacctcttcatctctataatattgatgcgattctatttgcaattggatgcattgttatctttattatgtacttaactgttaaaaaacagaagcatataaaagatctaaaacaagtaaatagcttgtcttaa

SEQ ID NO: 48095 - DNA, 360 bp, Acinetobacter baumannii
atgaatcctcaattggatggcattgataaattatcaggcacgtatatttttgatgttcgagtgtgcaacaaaagactgaatattaataggtttttttggaaaatgatcaatgctgaatggcgtgatcgtttttatcaaaatccaacacaacttatgcagaaagccaatcttactgaatatgagcagaaattagttacagatcaagactggattggaatgattcagcatggtgtgaacttttttgtattagagaaatatgcacgagttgtaaaaaagaccaacctagaggtttatgccctgatgtgcggcaaaacatatgaagagtttatgcaaactcgtcaagtccctggggcaacatga

SEQ ID NO: 48096 - DNA, 837 bp, Acinetobacter baumannii
atggctagaattattggtgggatcggaacctcccacgtgccaacaattggtgtggcttacgataagggtaagcaagaagatccatcatggaaaccaatgttcgatggttataaaccgattgcgcaatggttagaaaaggaaaaacctgatgctatggttatgttctataacgaccactgctcttcttttttcttcgatttctacccaacatttgctttaggcattagtgaagcatttccaattgcggatgagggtgcggggctaagaaacctaccgccagttcgtggcaatattgagctacaagcacatattgctgaaagtctagtcaatgatgagtttgatctaactatttttcacgacaaaccactcgaccacggatgtttgtctcctttacccctactttggccccatgaaccagactggccaggcgttatcgtcccaattgaaatcaatgttttgcagtttccattacctactgcccgacgctgttatcgtttaggacaagcaataagacgagctattgagagctatcctgaagaccttaaagttgttgttgtaggcactggtggcttatcacatcaagtacatggtgagcgtgttggatataacaatactgaatgggatcatgaatttttagatttgttgctaaacgatcctgaaaagcttaccgatttaaagcataaggattttattgaacgtggaggcgcagaaagtgttgagcaaattatgtggctagctatgcgtggtgcattgggagactcaattaaacaaacgcacttaaattattaccttgctacaactaccgccatgacagcggtgttatacgaaaatgcatag

SEQ ID NO: 48097 - DNA, 705 bp, Acinetobacter baumannii
atgaacttgaaaaaacatatctacttcttatcaggccttttatgtgatgagacagtatggagtgcccaactacaatcactgcctacctcttttattcctcatgttttctcttttcatgaatttgattccattacagatatggccgaatatgtgcttccttatcttcaagaaaaaagtattatcgtcggacattcaatgggagcacgggtagcactggaattatatcgtctatcaagccagaacatctcagcgattgccttacttgattttggaatacatgagaaaaaaactggtgaaacagaaaagcgcttaaatttagttaatgcagtagaaaaatatggtatgtcatatctaatcgaacattggcttaaaacaatggtttatgaaaagaatattaataatgatcaattatttgaaccaatgcaaaagatgatccttaaacaatcagctaagagttttaaaaaacagatttatgcattgctaaatcgtcctcaagcagagaacatttttagttcaatacaagtacctctatatattggtgttggccgtcaagatcaatggagtacgctagagcaacatcaaaaaatatgtgagcttaattgcttagcacagttacatacttatgaatgcagtgggcatatgtcccccgttgaagctgcccatcaagtcaatatctctttaataaaatggttgaatacactatga

SEQ ID NO: 48098 - DNA, 1230 bp, Acinetobacter baumannii
atgggatcggacacacaattatctattaatttgatgcaactaaaattctttttagttgtcgccgaatttcaaaatatatctaaagcggctgaacacttatttcgcacccaatcagctattactcgtgcaatcagtgatctagaaaaacaacttcaaattgaactatttgagcgtcaccacaacggcgtcattctaaccgatattggaagttctcttcttattcaagtcaaaaatgcaattgaagaacttcgtcagattccccttattgttcaaaaatataaaaatcttgatagtgaacaatcacagcccatcaatgaaccattttttttatacaatacgcgccgtttagaaatcttctctaccctttatctaactaaaggaatgaaaaatactgcgtccttactcaatattactcagcccgccgtcagttctgcgattaaattattagaagagtcattaaatatagaattatttattcgaacccctaatggtattagggcgactgaagtatgcgaacttctacagcaaaatataaaacgatgtttaaatataataaatgatctacctaatcaaatagctaattttattggtaatatgcaaggtacggttcgtataggtgctttaccgcttattcgaacatttcttttacctaaagcaatcgctgctctagccaatcaatatcctagaatccgctttttaacatttgaaagtgcatatgaaagcttagttgcacaactacgttcaggtgatattgattttattgtgggagctatacgcccccaagaacaatcttcagatctatattcacagattttatttgatgaaaatatgtttatggttgtgcgcaataagcatccgttactacgtaagaaaattcagctgcccgatttactggatcagcaatggattttaccacgtactaattctcctgcccgtattttgttagagaacaactttaaaagcctaaatttaatacctcccgagcctacagttgaaacaggtgacttagctcttagtcgaggattacttttagaatcaaatatgattgcagtcgtatcagagcaacaaatgaaatatgaattagatcagggcctcataaaaaaattaccttttgatttgccacaaactacgcgtcaaattggacttatttttcgtaaaaatagtattcaatcttctgtaacgaaagcacttatccaaagcttagaaaatatatgtaaagaaagagtctaa

SEQ ID NO: 48099 - DNA, 741 bp, Acinetobacter baumannii
atgaatgacaatacttccaagaaagcaggtttagtaatcagtgcccactcagcagactttgtatggcgtgcaggtggggcaattgctttacaccaagagcgtggttatgacatgcatattgtctgcctatcttacggtgagcgtggtgaatctgcgaagttatggcgtcaaacagggatgaccgaagacaaagtaaaagaagttcgtgagcaagaagctcgagcagcagctgaagctttaggagctagcatcgaatttcttaatttaggagattatcctttaccgagtactaatgacatcatttttagattagccgatatctatcgagaattacaaccaagctttgtgctgagccattctttacatgatccttataattatgatcatccacgagcgactcatttagctcaagaagctcgaattattgcgcaagctgaaggacataatcctggtcaacagattattggagcacctccattttattgtttcgaaccacatcaacctgaacaatgtaattggaaaccaaatgttctattagatattacaagtgtttgggacaaaaaatatgctgcaattcaatgtatgcaagggcaagaacatctttgggaatattacactcgagtagctttacagcgtggtgttcaagcaaaacgtaatattggaattactagctcgaagaatattgtctatgccgaaggctatcagagcatctttccgcgtgtgacggaggacctttcatga

SEQ ID NO: 48100 - DNA, 714 bp, Acinetobacter baumannii
atgagtcttttaggcagaaaaggagtagttgttcgaaatattaagcgagcagatcctgaagatattaaaaaactagctacttatggcgtggctacagtacatgaagctcaagggcgcaaggggttattagcaccacgtattcgtcctatacagcaaggtgtttcgattgctggttcggccgtgacattatcggttgctccaggtgataactggatgtttcatgtagcagttgagcaatgtcagcccggagatatcgttgtagtttctccaacatcgccgtgtacggacggcttttttggagatttactagctacttcaatgaaagcgcatggcgtgattggtttagttggagacattggtattcgagacagtcaagtattaagagagatgggctttcatgtctggtcacgcgcagtgtattcacaaggaacagtaaaagaaactttgggttcagtaaatatacctattgtttgtgctgaccaattcgtaaaccctggtgatgtcattgtggcagatgatgatggtgttgtcgttgtacgttacgatgaagtgagtaaagttcaagaacttagtcagaaacgtatggatttggaagagtctaaacgaattcgtatggctcaaggcgagcttggactagatatctatagtatgcgtccacggcttgaggaaaagggattaatttacgtcgatagtctggatgatttggaggggtag

SEQ ID NO: 48101 - DNA, 1080 bp, Acinetobacter baumannii
atgcaaactaaaataccttgcatgctcatgagaggaggaacctcaaaaggagcatactttctcgaatctgatttaccccaagatccaataaaacgtgatcaagtactattggctgtaatgggatcacctgatcctcgtcaaattgatgggttgggaggaggtgactcattaactagtaaagttgcgattgttagtgtttcagaaaactctcaagctgatgtgaactatttatttgctcaggttaatgttaatcaagcaattgtagattacggacaaaattgtggaaacattttgtctggtgttgccatgtttgcgttagagcgaggactagttaaggctcaagagggcacaacttctatacggattttcatgcaaaatactgaacaattagcagaagtatctgttgcgacacccaatgctgaaattgcttatgacggttttacttcaatcgatggcgtaccaaatacagcttcagaaataattttaaatttccagaatattgaaggttccacctgtggaagtttacttccaacaggtcaagtccaagatattattaataacattcctgtaacttgtattgataatggaatgcctgtagtgcttatccgcgctttggatctaggtattcaaggtaacgaaagcaaagaggagcttggtggcaacgaagtattaaaacagcaattagaagctattcgtttaattgctggtccaaaaatgaatcttggtgatgtaagccaaaaaactattcctaagatgacaattatttcaaaaccaagtgcaggcggagcaataaatacgagaagttttatacctcatacctgtcattcagcaattggggtttttggagctacaagtgttgcaacagcatgcttgatcaaaggaactgttgctaatgatattgctgtaacaacgaatgagcttcaacaacgtctagatatcgaacatccttcgggccgttttactgtattgttagagcgcaattcacaatatcaatttactaaatgtggttttatacgtactgctagaccgattatggatggattagtgatgattccatcaagtgtttggcaaaaacattaa

SEQ ID NO: 48102 - DNA, 972 bp, Acinetobacter baumannii
atgttacgttatttatttcctagtttattttcaattatacttctaaatacagttgtaactgtaaatgcaaaaaccatctcttctaagaatgaattaaatcctattcctcaaggtggtccgacattagtacaagctcaattagtacctaactataaagatatctcttatagagatatctctgctactcaaaaattagatatatatctccctaaaaataaaaagaaatctattccagtagttatttatgctcatcccggcggttttatgtttggagataaaaccatggctagcgcgagtattgtccagggaattcttgatagtggttttgcatttgttagtgttaattatcgattatcacgtgaggccatattcccagctgccgtacaggatttttttgccgcagtggaatatattaaagaacatggaaatgaatatggtttagattcgaagaatattgtggtttatggggaatcagcaggagcaaatattgtggctctgaatggtgttgcttatgaccaacctttattccgttcgaatctgaaaaatcctaatgcaaatgtcaaacctcgtgcagttattgctctatatccgccagttgattttaataaaattgaagaatttacaaataatcaaaactgtaagaaaggagatagtaaagagaaactacctagttttgaagaaatatatattggtggagctttaaaaaatcatcccgaaaaagttaaacaagctaatcctgcaacctatgtaagttctaaatcaagtccatttttcctagaaaatggtggcaaagattgtaatattgggactgcgcaagcattgttattaaaaaacaccttaaaaaaatataatgttcctgttaggtataagctacttcctaatgctgggcacggcggtttggaatttgaaacaaagcagaacgttagtttaataacggaatatttaaaaagtatggttaaaaatggattatag

SEQ ID NO: 48103 - DNA, 1731 bp, Acinetobacter baumannii
atgtcagaacaagaaaaaaagaccccattacttcacattgaaaacttacgtgtaagctttaaaggtgaagataaacaatatatcgaaactgtgaaaggaatttcctttgatattccgaccaatacgactgtagctttggttggtgaatcgggtagtggtaagtctgttacttctttagcaactatgggtttattacctgtgggccaaagcaagattgatgagaaaagtaagattatttttgaaggtaaagacttgcttggcttatcgcgtacggagatgcgaaaaatctgtggtaaagatatcgccatgatttttcaggaaccgatgtcatcattaaatccggtttttacggttggcaatcaaattgcagaagtgttgtgtttacatatgggtatgagccgaaaacaggcgcggcaacgtgttttagagttgcttaaagaggtcggtataccttcaccagaaacgaaaattgatgcttatcctaaccagctttcgggtggtcagcagcaacgtgtcatgattgcaatggcaattgcttgtgaacctaagctactgattgccgatgaaccgactacggcacttgatgtcaccattcaaaaacagattattgatttacttgaatcactacgtcagcgccgtcaaatgtcgatgctttttattactcatgatttggctttggttggtgaaattgcagatcaagtgattgtgatgcgacatggtgaaattagagagcaaggtaccgctgaacaagttttggaacagcctaaagatgtatatacccgagccttactttactgtcgtcctcaaatgtcacaaagaccttatcgtttgcctgtaaccagtgattttatgcgacaagaaaacaatatattggttgagcaaagctttgatgtttcagaaattcctgagcgtaaacgtggtttaaatggcgatgagcacattattttagaagtaaaagatctgaaaaaaagtttttatagtcgtaaaggattgtttggcaaagaagaatttcaggcagtaaaaggcgtttcttttaaattggctaaaggaaaaacgcttggtttggtaggagagtcgggctccggtaaaacgactgtcgggttattgctcatgcgcttacatcaagcctctggggggcaggctttaattgaaggtaaagatattctttctttaactgaaaaagagtttgccaaatatcaaaggaagatccaaatcatctttcaaaatccatatgcttcgctaaatccccgctttacgattgggcagatcttattggaacctatgcaaattcatggaattggtaaagatgacgcggaacgtaagcaaattgcgcttggtttacttgagagagtgaatctgcctgaacaagcttattatcgatatccacatgagttctcgggcggtcaacgccaacgtattgcgattgcgcgctgcttaacgctaaagcctgaaattctaatttgtgatgaatctgtttcggcgttagatgtttcagttcaggcacaagtacttaatttgttacaagacttacaagatgagtttgggctgagttatatttttatttcacatgacttgtcggttgtgaaatatatctctgatcaggttatggtcatgaatcatggtgaagttgttgaaatcgccaactcggatgagctctatgcacatccgcaacatgactacaccaaacgactattgcaagctattccacaagggattcagcacgtttcgtaa

SEQ ID NO: 48104 - DNA, 1785 bp, Acinetobacter baumannii
atgcaagaacttgccaaccgattggcgatacaaaatttcgtcaacgcttatatgcaagagactggcaaaggatatttactttcttttgaccaacaaagttcaactcaacaagcgtttagctctggtttgacgctgttaactcttcctcttccttctatacaagcagaatgttctgtacctttatcttatgtgagtcgtgtaggacgccatcgtctcgctgctttaccgaaaatgtgtattgatggtcaatggcaaaaattcagtgcaggaaccattgttagtcttttacttgaagagttggttattgaatctcaattcaaattagatgctgcttcattgttagagaaatggatacaaagccgggacgcgctactacaattcttaaaacaacgccacaatgatttcgatgatttagtaaaggctgggcagaattttattgaaagtgaacaggcattaattttgggtcatagtatgcacccagcgcctaaaagccggaatggttttgttcatgaagattggttgaagttttcacctgaacatgctggaaaaacccagttacattattggcttattcatcagaattatattgctgaaggttgtgcaactgagcagccaatttcagatcaagttaaagatgcaatccgttggtatttgtccgaaagcgatttaaacctcttaaagacccatgttgaatttaaattattgccactacatccttggcaagctcgttatttacaaggtaaaccttggtttgagcaattaaaacaaacaggacagttaattgatatcggtttacgtggatggcaattttcaccgactacatcaattcggaccttagcaagttttaacgccccttggatggttaaaacttcactatcagtcatgatcactaattcaattcgagtgaatttggcaaaagagtgtcatcgtggcgaaatttcttatcgtttatggcacagtgatttaggtaaaaaaatattaaaacagtgcccaacattgaaagcagttaatgatccagcctggatagctctgcaaatagacggcgagattattaacgagacaatttgtattttccgtgatcaaccatttgcagtacagcaacaagtcacttgtattgcatctttatgtcaagaccatccaaataaagagttaaatcgttttaatgctttatttgaccaaattgctcagaaaaatcaacaaacgaattttaaagaaattgctttggattggtttgatcatttcttgaagattggcttggctccgttaatgtatgtttatcataaatacggtatggcttttgaatcgcatcaacaaaatgtattacttgagctagaagatggtttaccgaaaaatctctggttacgtgacaaccaaggcttttattatattgaagagtttgcaactgaaattgtagaagcattaccagatttactagaaaaagctcatgcggttggtcctaaagattttgtggatgaacgctttagttattatttctttggcaacactttatttggtttgattaatgcaattggagcaactggctatatttctgaagatgaactgttaatccatttgcaacaaaatttacttcaattattagagcaatatccagatagtacattattacagggtttattgtttaacgattctttaccgtataaaggcaatttacttacacgtttacatgaattagatgagcttattgctccattagagcatcagtccgtgtatgtgcagctaccaaatccactgtatgttgaacagaaggacgtgagctatgcttga

SEQ ID NO: 48105 - DNA, 174 bp, Acinetobacter baumannii
atgggcggtcccgataacctgcatattgctctaaaatgcggaatctatgtgccgagctttgattcaacaaatcatgtgcatttacccgatgttgttgtaataaatgatattgctttaaacatttttgcagctgctcataaaaggcttgaactttatcagtgctacactgattaa

SEQ ID NO: 48106 - DNA, 2061 bp, Acinetobacter baumannii
atgcatataaatttttcagaacatttttttaaaatccagaaacagcttgaaaaccctcaagctgttattgacgaaaatattctcattgacctagtcaatgctttacggccatccgatccccaagatacggatgaaatagagcaaaaaatacaagcctttattgatagcctattacttactcctaccgctccagcccttttacaaacctttttattacgtctcattaatcaatataagcaagtcagcttatatgcagatagcggtattttgtctttagatggtttctggaaccagcttgggcaaagacttggcggccattttctgccacttattgaagatgcaagccagctaaaaattctgattggaaaaattttctatttagaaagtgattcaatctggttaaacaatgtcgatgacaaggattgggcaactttgttcgggcttattgggcaaagtaacagtaatgtcgatgaaaagcatgccattcagcgagaaatgattaaggcaattactgtcttatcttaccgtattagtggtatcggtctttatcctgaatttattaatgctcaacctgaattaaccgaatatgaatcgccatttttggtacaaaaccgtgaaattattgagtttatagagaagtacaaaaaacaggatatttctagcaacgacattgctgtgcttccacctcctgatgcctctcaagcatttgtaatgctagagcagtgtcgagacgtcgttttaaaaatacgccgagcgaccaaaagaatcggtgtaagtttaagtttgacctatcttttgtctttacttgaacagtgtttagatcggattgaattattactctatctagttgtagacgatagcgagggacgctacgtttctttaggaaacttaatttcagacttaactaaagcccattatagtgaaaaaagtgtccgctcgttactcagcacgaccagtgagcttattgcctttcaagtcacagagaatgcaagccgtactggcgaacattatgtaagtacagacaccaaaggcttttggggcatgtataaagccgctgctggtgcaggtgtgattattgcctgtatggcctcattaaaaactcttgctgcacgtatgacgatggctccgctcatgcaagcctttacgttcagtatgaactattcacttggctttattctgattcatgtattgcactttactgttgcaacaaaacaacccgcaatgacagctgccgcacttgcagccacagttcagcaacgtaaaggctctaaaactgcacaaattgcagaattagccgcacttattatcaatattattcgaactcagtttattgctattttgggtaatatctcgattgcaattcctactgctgctcttattacctttgcttggcagttctatcttgatgagcctttattaactcataccaaggcaacttatctattacatagcctaaacccttttacctcattagccgttccgcatgcagcgattgctggggtgtgtttgtttttatctggcctaattgcgggctacttcgacaacatggcagtttatagaaaagtaggaccccgtttaaaagcacatcgacgtttaagaaacttatttggacaagaacgcctgaaccgttttgcagaatatattgaacgtaatttaggggcgctcgcaggtaatttcctatttggcgtaatgttaggaagtatgggaacaattggctttattttgggcctacctctagatattcgtcacattgcctttgcgtcagcgaacttcattcaaggtttaatgactattaatggtagtcctgatattggcttgattatagtttcatttttaggcgtactctgtattggtctcaccaacttatttgtgagtttcacactcactattattgtggcattacgtgcacgtcgagttcgctttgaacaatggaagccattagccaaactggtcatgacccattttcttacccgaccaagtgacttcttctggccaccgaaacagcctctagaattagaagaaaatgcccaagccaatagtggaaaaaaagcagaacactaa

SEQ ID NO: 48107 - DNA, 870 bp, Acinetobacter baumannii
atgtctgttgttgcatttaaacaagttgatgtttttacttcacaagcatttaaaggaaaccctgttgcggtcattatggacgccagtactttaacgtctgagcagatgcaagccattgcgaactggaccaatctttctgaaaccacatttgtattgccagccactgattcacaagctgactatcaggttcgaatctttactccacaaagtgagttgccgtttgcaggacaccctaccattggtacagcctatgctttgcttgaggcaggtctaattaaagcgaaagaaggtcggctggtacagcagtgcgctgctggtttggtgacgctgaccgtgaatgactcaaatcatatttcctttgagttacctaaacctaaagttacaccattagatgcactgcaaactgagaagttggccgagattttaaaatgtaaaatcaatactcaatggaatgccgcattggtggatgtcggagcccgctgggttgtattgcaagctgttaatgctaaggctgttttggcaagtcagcctgatctaaatgctttaaagcaatttagtttagatatgaaggtaacaggctctacaatttatggattttatgaagaaagtaatgagcaaaagcgcatagaagttcgttcatttgctccggcatatggagttaacgaagatcctgtttgtggtagcggtaatggtagcgtggcatctttcattcgttaccatggtattttgcctgcgcaaaatgatgtggtactttcttctcaggggcaagctttagggcgtgaaggacagcttcaacttgaattacatcaagataaaattttagtgggtggagctgctgttacttgtatcgacggtacgattaagttgtaa

SEQ ID NO: 48108 - DNA, 1461 bp, Acinetobacter baumannii
atgtacaaatataaaaaagtgagtgatgaccttactcttcaaattcagaatggcaggcaacctgtgggttctcggttgccatcaattcgagactgtgcccaacattatcaagttagtattaacaccgtaaaagaagcttatcggaagcttgaagaccaaggtttaattttagttcgcccacagtctggctactatgtttgtcatgcaccttcaaacttgccagatcttgaggagcgttatatcagtgaagaaaaagtgcccctttcaggaattagctgttttctcgcgcaaattgttaaaaagcagatggaccccgactatatcaatttggccctagcttgcccatctggtgaaaacttctacccgattgaacgcttaaaacgtttaactgctcaggttttacgaacacagccggatatttttaaaagctatactttaccgcccggctctataggtttacgtactcaaattgctagacgtagtttacaacttggtatgtttctatccgcagatgacattgtgctgactcacggcactatggaggccttaagtctcgcgattatggcaaccacccaagcaggtgacagcatagcgcttgagactcctacttttcataacttatatccacttctgcagaatttaggacgaaaaattgtagaagtgccgacttcgccgcatacagggatgtgcctagatgcacttgaagaactcttaaaatctcaaagcgtacaagccatattaactattccaacaggacataatcctcttggttttagcatgcctgaaaacaaccgacatcgtttagcagagctcgctaatcaattccaaattcctgttattgaagatgcgatgtatgccgaattacaactcaccgagcctcttttgcccaacgttaaggcatttgaccaaaatggatgggttttggtctgtggcagctacaccaaaactgtggcacccgactatcgaattggttggctagaagctggacgcttccgtaatattgtgcagcagcttaaatttacaaccactgttgccgagccagctttactcacagaaacgttgggactttttttagaaaatggcggatatgatctacatttacgtcagctcaaaaaacgctatcaacaacaaattgacaccatcaaatcttatatttgtcgttattttccagtcggtactcgagtcagtcgtccacaagcgggatttattttatggttagagctacccgaatcaattgataccctagaactgtttcatcaggccatggatgaaaaaatcttatgtatgccgggaattttgtgctcggctgataaacgttttagtcattgtttacgtattgcagcttgttttgagttaaatcctaaaatgttaaatgctttgatgcgtttaggagagttagcaaaaaatatgctacctgtacaaaaagctatagatcaaatccctactaattcagtaggttga

SEQ ID NO: 48109 - DNA, 1371 bp, Acinetobacter baumannii
atgaaaaccgaacttctctctcccgcaggttcacttaaaaacatgcgctatgcatttgcctatggtgcagatgccgtatatgcaggacaaccacgttatagcttacgtgtacgtaataatgcttttgaccatgacaatttaaaaatcggaattgatgaagcgcatgctttgggtaaaaagttttatgttgtggtgaatattcagccccataacagcaaattaaaaaactttattcgtgatcttgagccgattgtagctatgcaaccagacgctcttattatgtctgacccaggcttaattatgatggtgcgtgagcattttcctgatatgcaaattcatttgtcggttcaagccaacgctattaattgggccactgttaaattttggaaagattacggtttaagccgtgtcattttatctcgtgagttatcattagaagaaatcgaagaaatccagcaacacgtcccagatattgaactcgaagtttttgtacatggcgcactatgcatggcctactcaggccgttgcctactttctggttatatgaacaaacgtgatgccaaccaaggtgcttgtaccaatgcctgccgttgggactataaactgcatgaagcccaagaagatgcaaacggcgatgtaattccaaccactcagctaaatacaccagaaaagacttgctgctcatcagcacaatcagaaacaacctcggttcaaactttactcgtacaacgtaatgatgaagaaatgtttgctgccgaagaagatgaacacggcacctattttatgaactctaaagatttacgtgcggtacaacatgtagatcgtttaacaaaaatgggcatcgcctcactgaaaattgaaggccgtactaaatcctatttttactgtgcccgtactgctcaaatttatcgaaaagccattgatgatgcattagcaggtaaaccttttgacccaagtttaatgacccaactcgaagggttggcaaaccgtggttataccgaaggctttttaagacggcatgtacatagcgaatatcaaaactatgctgatggatcatcacatttcgactaccaacaattttgtggagaggttgtagaacgtcacggtaattatattcggattgaagttaaaaaccgttttgtggtgggcgactcacttgagctgatgacgcctcaaggcaatatcacctttaacttaaccgaaatgcgcgatttaaaaggtaacccaattacagatgctaaaggttcggggcattttgttgagattccactctcacaagaggttgatatcagttatgccctactcatacgcaacttgccgcatacaaaagaaagtattactgcatctacattggcttattcagcgagttaa

SEQ ID NO: 48110 - DNA, 1032 bp, Acinetobacter baumannii
gtggatctatttcatgccatgagagtattcaacaaagttgttgaaacaaatagtttcagtttagcagctgatagtttgggtctaccgcgtgcttctgtgaccacaaccattcaggctttagagaagcatttgcaagttcgattgcttaatcggacaacacgaaaaattagcctcacaccggatggcgccgtatattatgatcggacagcccgtattttagcggatgttgccgatattgaatcttcttttcatgatgcagagcgggggccaagaggtcagcttcgtattgatgtgcctgtatcgattggacgtttaattttaattccaaggctccgcgattttcatgcacgctatcctgatattgatttagtaattggtctgaacgaccgacctgtagacttggttggagaagcggttgattgtgcaattcgggtgggtgaattaaaagattcaagcttaattgcgcgtcgtatcggaactttccagtgtgcaacagctgcttcaccgatttatttagaaaaatatggcgaacctacctcaattgaagatttacaaaaaaatcataaagcgattcacttcttttcaagccgtaccggacgcaacttcgattgggactttgtggttgatgatttaattaaaagtgtgtcagtacgtggacgtgtttcggtaaatgacggtgatgcttatatcgacttggctttgcaaggttttggtataattcaaggcccacgttatatgctcactaaccatttagaatcaggtttgttaaaagaggtattgcctcagtggacgccagcaccgatgccgatttcagcagtttatcttcaaaatcgtcatttatcgcttaaagtaaaagtgtttgtagattgggtcgctgaacttttcgcaggctgtccattacttggcggtacagctttacctttcgaccagaaatgtgaatttgcctgtgataaagaaactggtcatgaatatacaattcgtactttggtcgagcagcataatattgctgaagcaagagtattaaaaacttaa

SEQ ID NO: 48111 - DNA, 1221 bp, Acinetobacter baumannii
atgtcattttcccgcaaacagtttgcactgtctgccatctttgtcgctattttagcaaccggtggcagttttatgttgttacatgaaaatgccgatgcaaaagctgcaccaaccgctgcccaacaagctgctactgttgatgtagccccagtaataagcaaaaccattaccgattggcaagaatattccggtcgtttagaagcaattgatcaagttgatattcgacctcaagtttcaggaaaacttattgccgtacatttcaaagatggaagcctcgttaaaaaaggtgatttacttttcacaatcgaccctcgtccttttgaagcagaactgaaccgtgcaaaagcccaactcgcttcagctgaagcacaagtaacatataccgccagcaatctttcgcgtattcaacgtctcattcagagtaatgctgtttctcgccaagaactggatttagccgaaaatgatgcacgttcagccaacgctaacctacaagccgctagagctgctgtccaatctgcacgtttaaatctggaatacacccgtattactgcaccagtcagcggccggatttcacgagctgaagtgaccgtgggtaatgtagtttctgcaggtaacggagcacaggttttaacaagtttagtgtctgtatcacgcctatacgcatctttcgatgttgatgaacaaacttacctgaaatatatcagtaatcagcgtaattcagcacaagtacctatctatatgggacttgccaatgaaacaggctttactcgcgaaggtacaatcaactcaatcgacaacaacctgaatacaacctcaggaacaatccgtgttcgtgcaacttttgacaatccaaacggtgttttattaccgggcctatatgcacgaattcgtttaggtggaggtcaacctcgcccagcgattctgattagtccaaccgcggttggcgttgaccaagataaacgttttgtcgtagtagttgatgcgaaaaatcaaactgcttaccgcgaagtaaaactcggtgcccaacaagatggcttgcaaatcgtaaatagtggattacaagcgggtgatcgtattgtagtgaatggtttacaacggattcgtccgggtgatcctgttacaccgcatctcgttcctatgccaaattcacaaatcactgctagcgctactcctcctcaacctcagccaacagataaaacatcaactccggcaaaaggttaa

SEQ ID NO: 48112 - DNA, 348 bp, Acinetobacter baumannii
atgtctagaacctatactttttttattcatttaagagctttgcctgcttggttggctttaccacgtgaaaagcgggctgagtttagtacacaaaagcttgaacctatttttgagaagtacccgactgtaaaagttcgctggtatgacgttgaagcgtttagtactaaagcgagtgatattgctgtgtttgagacgacatctctgcaagattattattttgtgattgatgcgattcgagactctgagttgtgtacggtgccctactttgagtttgtagatattattcctgcaattgaagatgggtatctggagtatgaaagttctttagagaagttgtggacaatctaa

SEQ ID NO: 48113 - DNA, 687 bp, Acinetobacter baumannii
gtgagtaaatttataaagtctttagcaatttttgcagcttctgctccaatcattaataataaagccactgctgctattggggtaaatgtagatacttatgataacttagagccagtttcgattcgacctcttaactatgagtatgagaatatgttcgctggtcatagaagtcactctagtcacagaagtcattccagccattctagccactattctggatctggttattcaggttactctggttctagaaatcctgtttattctgttcctacttatactccacctagttatgttagttcgagtagttctgtaaaaaaagtgactacaccttcatctaaacctactactttaagatctaattctaatattgtagttaaaaattattctaatattccaactagtagtaatacaacaagtcaatcctattatgataatagtgagaatttaaataatattgcagaagaaaatgatccagttctaatgcgtgttttacaagttaagcgtgtacaaatggctctagtaaaccgtggatattattcagggaaaattgatggtgatttaggtaaaaatacacgtaaagctatcgctaattatcaaatagataagaatttagctattaatggtcgaatgactacagaattgttaaatagcttgggtattttagccgttaattattatgaagagtga

SEQ ID NO: 48114 - DNA, 1191 bp, Acinetobacter baumannii
atgagaaaaataaaattagagacagttacacagcatgtgccacaaatctgtagggtacttaatcttaataacttatatgtagagtggttacctgatcaatctattcttgtgccaattaataatattcaagaagtcagaatttttgatagatatattgaatctggtttagataatctatatccaatttatagttcagatttaatggatattgttggcgaaaacaaactctttattccagaaggtcaagtattagaagctaatgatgtggttgccatcgatctatataaaaagaatctaaatgtgcttttgagagcaagtgatacccatcatactttattcctcactaatagatgcaataactattgcatcatgtgttcccagccacctaccaagcatgatgattcatggttaatagagcaggcattagaaataattaaacatctaagttatgtgccaatgaacattggtttaacgggaggtgaaccattattactagataaaaatttaagattgatcatagataccattcatcataaattcccttcaactaagattgatgtattaacaaatggccgtttatttagtaattctgaggtagcggaattggtgttatccaatctcgaaactaaagttaattggctcattcctttatatggacacgctgatctcttacatgattttgtggtgcaacagcatttagcttttgaagagaccttagaaggcttctatgttcttcaaaattatgagcagccaatacaattacgaattgttctagttaagcccgtgttagagaacttactcaatctttgcaattatatccgctctaatcttccctttattaacgaagtcgcatttataggatgtgagcctattggttttgcattagcaaatagagaacttagtcaagttgatattaaggagtggtggaaagagttagaaaatgctgctgatattttaataaactccaaaatccgctttatttttatgaatattcctttatgttgtttgcctgaaaatctatgggattttgccgcgcagagtatttcagattggaaaaatacttatgatccagtatgtcaggaatgtgatttaagaggaaaatgctgtggtttatttagttggtataaaaatggttggatgccatctactataaaaccaataaaattgttgaaaccaagtatgaataattag

SEQ ID NO: 48115 - DNA, 1455 bp, Acinetobacter baumannii
atgccattattagagcgagtattagtaagtaaaatgctttttagtaatactgaattaatgccatttaactttaaaagaatggcaaatgaaaactacctcataacaagtgttacaggtgattttgaatttatttctaatgaaaatttgagaaaattaatagcaaaagatgagtccttagatattgaactctatcttaaattaaaatctaaattttttttaataagtaaaaatgctctagggacaaaaagagctttagcatcaagattacattcaaaaaaatcgactgttttaaatggtcctgcattgcacattattgtggtcactattcaatgtatgcattcatgttcatactgccaagtaagtcgaaagcaagaaggagatgaatttaccatatcaaaggaagatttgtttttagcttgcgatactatatttgaaagtacttcagaaacgttgacagttgagtttcaggggggagatcctttactacgatatgacttagtaaaaactgctattgagtatattagtgagaaaaataagctgcacaatagattaattcgttttgtagtaacaactacattacatcagttaacatctgaaatgtgttcattttttaaagaacatcaagttgtattatctacaagtattgatggtgttgccgatttgcataataagaatagaccaattgctaatcgagatgcttatgaaagaactcttgaaggtttagaacttgcacgcaaagagctagggcaggattccgtttctgcattaatgacgactacacgtaagagtttggactatcctcatgaaattgtagatgcatacgttaaattggattttaaagaaatttttattcgtggtttaagtgattatggctttgccaaaaagaactcaaaacgacttgctcccacacaaagtgaatttttaaatttttattccaaagcattagaacgggttctttattggaataatgaggggtatgaacttatagaggtacatgctgcgattttgttaaataaaatcctatccccttttgatcaaggctatattgacttgcagagtccgtctggagctgggctgggttgcatggtttataattacgatggatatgtttatccaagtgatgaagctcgtatgcttaaagaaacaggtgatatatcattgcgtttaggtaagattggagagccattatctcaattattatcatctaacttacaaagaaatattattgcatcgagccttaattttaatgatccaagctgtagagagtgtgcttatttaccttattgtgggcctgacccaattagtgcctataatgaatttaaaatgatggctccacctactcatttaactagtcactgtaaacgatacatggggttatttgatctaatttttaataaatatcaagattctgtaagtttcagaaaaatagcaagacgatgggcttttagtaagtag

SEQ ID NO: 48116 - DNA, 273 bp, Acinetobacter baumannii
gtgactcaaaaattaattaagttcggctttgattttcatagcgaattattattggatgaaattttgcaggcattaaagttttgtccagttcaatacgatattgagcaaattagcgagcaacattacttttttgaagtcagtgaaccgaaagaaaagttacttatacttaattttattaatgatttttatttgcggaaagaactcaatgcaaaaatagcacctgagcaaaaatcatttatcgatgccattattagagcgagtattagtaagtaa

SEQ ID NO: 48117 - DNA, 1008 bp, Acinetobacter baumannii
atgccacagacagcaacggcactggctagctgggtgaaagcgattcaaaaagcgctcgaaaaagccggtgttgatagtcaacctttattagaacaagcaggtttagatattcaggctctgagtaatcctgatgcacgatattcattaaaacaaacagcaaatttatggaaattagcagttcagaaaactcaagattcatgttttggccttaaagttgccagccaagtcaatcaaaatacttttcatgtgttagggcattcactgattaccagcaccaccctaaaagagatgtttctaagaattattcgttattttcgtgtggttacggatattccagagctagagttttatgggcaaggaaataatcattatttcgtgattcatgttcccgacgaagttcagcccgagtcaatagatgcatttatttccgtttttattcgctcaagtcgtgccttacaaggctctgttttttcacccttacgcattgaacttagacgctcagagccagaagatctagaaacttttcagagtattttaaaagccccgattgtgtttaatgcacctaaagacatgattgtgtttgacacggcaaccatagaacaaccactagaaggtgcaaatccgactctcacccaagaatatgatgaaattattaatcgttatctggcgcggttcgataaagaaaatatattggcacgagtgaaagtaaaattaatcgaaaaattatctacaggtgattttcaacaacaagatgttgcgaaaagtctgggcttaagcatacggagtctgcaacgcaaactttctgccgaaaacacctcttatagtgagttactggatcagactcggcacgaactcgccttatcgtatattaaaaattcaagccacaatattactgagattgcttatattcttggctttactgatgtcagtagttttacccgcgcatttcgccgctggaccgatttatcacctatccattatcgagaaaaatatctggcttgctcttaa

SEQ ID NO: 48118 - DNA, 612 bp, Acinetobacter baumannii
atgacactagatttattttctccagaaccttgttcaaatttattgccttatgatggtgaggttcaggattatggatgtattttaactgtcgaagaagctgaacaatattttcattatttgtaccaccatttggcgtggcgacatgatgaagcgaagctatatggcaagcactttataacacctcgtaaagttgcttggtatggagatgagcattatcgatataaatattctggtgtctttcgtgattctttaccgtgggacaaagcacttgctcagctaaaacagcaagtagagaagatcctttcagaaaaatttaattcttgcttggcaaatctttatgaagacggaactcaaggaatggcttggcatagtgattcggatgtgtctttagccagaaccactacaattgcctctttaagttttggagcaacgcgaaagttctcttttaggcatattcaaactaaagaaaaagttgagatgtggttacaaccgggtcaacttattgtgatgcgtggtgagactcaacaatattggcaacaccgtttaaatcgttcaaccaagattttacaaccacgcattaatctgacttttcgtcagttcaaattttcataa

SEQ ID NO: 48119 - DNA, 261 bp, Acinetobacter baumannii
atgtctttatttatcggtggtcaccaacatggtcaattcttgtcgaaagacgagttggatttgaagccagaaagtattccaaagcagtacggaccaaaaacaggtatgcaaaggccaacagagtcatattatagaactcaagtaagcttccacggagaagtaaaaacgttttatgtaatttctggtaagcagccaattgaaatgagagatgaaataattaatttatgggatcaagtaaaatcagacatatatgctatctaa

SEQ ID NO: 48120 - DNA, 219 bp, Acinetobacter baumannii
atgaatatttgtgttggtggtgaacttgaagggcaagtgatagaaaaagaaggcagattactaaaagcttctgatatcgacccatcttttaaaactgagtactacaagcaagtttttaaccgcgacaacattaactatcatttctggctaccaatagggtccaacttgcatgaaatgtcaaagcgagttttggatattttgagagcatcaaaaaaataa

SEQ ID NO: 48121 - DNA, 942 bp, Acinetobacter baumannii
atgagcctagacgcatccatttgggccttcaaagccgaggttaaaacctcaagtcaaagacttgttttattagcattggctgatagagcgggagagtctcacaagtgctacccaagcattaaacgcatggtcaaagacacgcttcttaaccgtaaaacgattattaaagttttagatgaactagaagccggttcttttattaaatttacaggtgaaatcacaggtaatggcgtgaaggtttaccagttaattggcgtgatgggccgtgaagaggatagtgtaactagtcccaaaaatgggactagtaccaataacggaactagttccaatttcggtactggttccaaaaacggtactagtaccaatattgggaccgcaaccagtcccaaaaacggtaccgagaccagtaccaatattgggacacagaacctatcaaggaatctatcagatgaatctaaaaataaaaaaacatggttgagtttgaaaaaacttcgtgaagaaattcttttggcaactgatcaggaaacttacgagcagatcaaaaacgcgacttggttcgatcgagagttacgtgcttttgaactctacaacgctgagaagaatctttgtgatgaactcatgcattaccactttgcagactggttaatcaatgcatgtggcaaataccaagctcgtgagcaagctagaaatcaaaacaatacaacaacggttcgagtctcgcagggggagtcatatcaacttagcgacaaacaggttcatatcttcgctcaaaaactctcacaacatcctgagttcgcaagccagtttgctgctgcaggggaaagctatgatcaacttgcagcacgtatcgccgtaaaacttagtgatccaactcaagccaaacaatgggaaccatatcttaagcaagtaggattcaaaggcacattgcagggggctgcatga

SEQ ID NO: 48122 - DNA, 288 bp, Acinetobacter baumannii
atgaacacaaataatctatcaaatcaacagcaaataatccagagctggtttgagccggctctttatacgctgaatcaattgcttcaaaagagaaaggaaaaccttcgccgtattaatcgagatgaaaataatgctgcagtaaagcgtgatgaattcatgtgggcactttcacaagagcacagaatgccgctttatcacgccggagtgattatttcgaatctctatagagctaagaaaattcgatatttgggtagctttattcaaattattgaagaggaggaacaatga

SEQ ID NO: 48123 - DNA, 357 bp, Acinetobacter baumannii
atgagcaaattatcagttgatatatctgcaagcgcgagaaatggagtatcccgcatattgcatggtcttgatataagcaatcaaaaagagattgctgaacaattaaaagttgatccaagcactattactcggcttaaaacggataagaaaaacaatggcttgaatgagattgaaatgttttgcgagctattgagtttgcttggattaaaagtcgttcctaaagattatcagagcattgataaagaacgtgttgctgcacttttagttatgtctaaaagctggatgaaccgtatagaaacggtggatgacttatttcatgacgaaatcagtggtcaaaaagaaaagcttggatattaa

SEQ ID NO: 48124 - DNA, 648 bp, Acinetobacter baumannii
atgaatgcagcaattaatccagcagttttaaacaatgaaagtgctaaccactttgaacagttagcagcgattagcgtatctggacatatcgaaaagaaaaatggaatgtcttatctgtcttgggcttgggccgtagacaaactcatgcgcatagatccacaagcaaactggtcttttcgtgatcctataacttttccggatggatctatgatggttcactgtgatgttaccgtgtttggtaaaaccatgtatatgttcttgcctgtcatggactatcggaataaagcaattgccaatccaaatgcctttgacatcaataaggctatgatgcgttgtctagtcaaaggcattgccgtacacggtttaggtttatacatctatgcaggtgaagatcttcccgaagaagaaaagactcagcaaggggcagctcaacctcaacagcagcaaacaccacaaaatcaacagcaacagccgaaagcagctcagcaacttacggctgaattccagcaagcattacatgcgattcatcacacacaaaatgaggcagatctggccacaatctataaacgcttcaaaggtaccagctttgaaagccagattgtgaaggcatgtaaggcaaaaaaggacatggagggatggagcgcttaa

SEQ ID NO: 48125 - DNA, 213 bp, Acinetobacter baumannii
atggagcgcttaagtacctatatctttaggtatgttgccaaattacatggcaaaggcactctcaggggtcgcattgaagcgacctctgccctccacgctaagcaacgtgtcatgcagagcaatgagctaattaaggatgctcatatctctttactcaagaatcaggcttctgcccgtaaacaggcttttgaagctatggaggaattcatatga

SEQ ID NO: 48126 - DNA, 144 bp, Acinetobacter baumannii
atgagcttccgttactcatcctcagcccgaacccttattgtgttcggcaacctgatgaaccattactacgacaatgtaaacccgtctcaaatcgatagcttagtagatgaggcgaaatttaaagaagcgacttggagaaagtaa

SEQ ID NO: 48127 - DNA, 693 bp, Acinetobacter baumannii
atgggactcattattcgcttggcaccgattggtgtatttggttcagttgcttataccactgcaaaatttggattagattcactcctgcaactcggttatttagttttactcttttatgcgacttgcattttatttgttgtcattattttgggttcaattttaaaactcaccggactgaatatctttaaatttgtcggctattttaaagatgaactcgctattgttttagggacagcctcttctgattccgttttaccccaaatcatgaaaaagcttaaaaacttgggaattaaagattcaacagtcggtctggttattcctaccggttattcttttaatttagatggcttttcaatttatttaacattaggcgtgatctttattgcacaggcctgcaatattaatctctccatgcatgacttactggctattttattggtttcgcttattacatcgaaaggtgcacacggcataccggggtcagccttagtgattcttgctgcaacactttccgtaattccaagtttacctgcaattggtttggtacttttactatctgtagactggtttatcggaattatccgtgcctgcaccaacttaattggtaactgtgtagcgaccgtagtcattgcccattgggaaaaagacatcgatcatgcacaagcgaaacaagtacttaatataaaaaattaa

SEQ ID NO: 48128 - DNA, 618 bp, Acinetobacter baumannii
atgattagtcttactgctattactactgtattgggggccttagttcctttaatagttgcgtatatttcatcgcggcataactttaaaaaacatccaagattggagtttagcgaaagtattgaagctgctaaagagtttgatgcaattgtaatttctactgaatcacagttagtaaaagatcgggttgctcaaaaattgataatgaaaaagaatatcaattttctagaaacacagtatttctatagctacgtagatatggaactttgggttgaaagatatgtggatgttcggaaatacatagaaccaattattgatgagaataataagattgtggacttaaagaataaatatactatggcaaaggggatcctatttttatgcatgtattttttctttgccattttagccatgatcccactgatgtttctaaagcattatttagaaatcttgcagcgaactattgatactattagctttttaataacatttaatttaataatttggccaattctatttggttttatagccctaggtggtcttcataaagctaataaaatatctgatgcttataattttttaaagaattttgaacatcaaagaataaaagttaaggaatag

SEQ ID NO: 48129 - DNA, 396 bp, Acinetobacter baumannii
atgacgtatttaagctgtaaagaaattcatgagctcatgacagagctagggtatacacaaactaatactcgtaaatatgctcatgaatttgaattaaagaatggccaatatatttatattaaacgtttgaaagatagtcaaaaaagaaaaaaagaaccttcgaggcttatgatacatccatcttttcagaaatttaaagaagatttaacaaagctagagaaagttgagtttagctttgagcaaaaaggaaatatgaattctgcctttgctgaatttccaaaatgtgatctatcggaatgtgatggaaatcctacagaatatggaataggagttaactttaaagataaattagcattaattaattttctaaaatttattgaaagtagtaagtactaa

SEQ ID NO: 48130 - DNA, 2865 bp, Acinetobacter baumannii
atgtggagaaatttttcagtttcaggattttttgacgatgattctatatcaatagttaaattaatattggttgagtcagataagggtttgttacgagggctaattctagagttactagaaaatgcaagaatacttgaatctttagtactagacttagaaaaaattctattagatgagactattgataagtatattagaaagttagctggattaagaataagtgaaataattgattatgatattaaacaatctattgtcagacttataggaattggaacagaatcttcattagatattgctgctaatttgatagaaaaaagtaatattgattcggtacaatatgaaataattttaagttttctaaaaaaatgctcatttttatatccaagtcataataagcaaggtatagaaagagttgttggaaagcgttattttatcaaaagtcttatttctttatttaattatgaattagtctttaatttacttgatgatttaagtcatgatcttcaatgtatttgtaggaaagaatattatgaatgctattgtcgaaatggtgtgagcaaaattattggaacacttttagaccgatattttgaaattgaaaaacaatcatatgatgctagtcagatttggaaatggctaagaaatttgaattttcatcagggaaaaactgaaaaagatagtattgctgtaaaagttttacaaaatgaagatgcactacgtcagaatattgttctattagcatttgaaggactaaaatctctagaggaaattcatcgagtaagctggcaaacattatcttgttatactcattctggacttaacttaagattacaagattattattttattttagattgggcctttgagaataataatataaatttatggacgtattatattcagacacatcaatttcatgtagcaaatagaaatcaaaccaattttgaactacgtaaatatgcaaaattgcaggcaagagaaaagtctgagtttttaaaagcatggataagaaaaaatttagctgctaaagcaagctataaaaagacacaagttagaataagacgtcgtataagaaatggaaatttcaaacgaaaaacgataagaaatgaaaatataaattacatccagaataatcgtgaacttattgagaggggggagcattggggacttttaactgatttcgcaaacttaatgttaaatcaacctgaaagaataatagaagaatttggagatgaggaattagtaaagacatctcttagaaattgtctaccatttattgaaacttatgttcctaatttaattgaattagctaaggcacaatgtgactccgtacgttattcttcagaagaaattttaagtgctgcatgtttagaaatatttagagagagtggaaatcttgaaagtgttaaattagaattattgaaagtgttacgaacagatattgacactcgcccttacgctgttgatgaaaaagaatatcaaaaatttaaacaggaagttgatagaatactttttcctgacactgaaagtcgactacaatttctaaaagattacattgaacctcaactgacctataacgactgtcaatacacacaagtaagctggttacgttttagtgagacattcaaagagtttcaagatacgttaccattagaatggttatataaatatccaaatatcagtatagaaaccacaaaaacactatttgatctaagtgctcaattttgtgatcgaaataaattaaaaaatttaattataaaaagatgtgatgatttaaatacgttacttacaaaacatgctaccgattttgaaagtttaaattctaaagttatgttttggtttgtaagagcatttttctttcttgatgaatcagagattgtagtttattggaattttttaaaagagcaagaaaaaacaatatttcttttaagtgatagacatgaaggaattcgacatgggaatcatacattttggcctgcattaacatctacaaaaattgggtggattttagatgcatttatagatcagtggccgaaggttaatttacctgattcttgggggacaggggatcctcctaatgaaatagcctatagatttctaagtaatgtaatttggaattttacaaagtatattactgaaaatactttatcaattgtaaatagtttaatttcagattctagatttgaagctatgttattagatttaaaaagtattcgttcaacagttattcgaaatcttgctctaataacttttaatgctccttcgccagaggaaatagttaattttttagataatgacggagtaattactgtagaagggttgagatcattaattttagaggaattaaaaatatttcaaatagacttaaatagtagtgaaacaacttctaagaatattttttataatttgcaatataagacagctaaattagtcgaatttaaacgattaggtgaggttgaggctactttacgtgttgccgataggttgcggttgagattagagcataaaggaattactgtaacacccgagcatcaacttcaaaatgctaatcgttgtgatataactttctcaaagattattgataatcaaagaaaactcttggtgttggaatcaaaaggtcaatggcattcagaactctacaatgctgcaacaactcaattatctgaacggtactctatacatccacatgcagaacagcagggaatttattttgtattatggtttggcgcggatgaaaaagttgcaaactcaactaagcatggtattagttcagcacaggaattaaaagaaattttggataagcagttaccaattgaactaaaaggacttattgatatatttgttttagatgtttcactataa

SEQ ID NO: 48131 - DNA, 732 bp, Acinetobacter baumannii
atgaagcatgttttactattttttattattgtaggtttaattgcttgtacaaatttaaataaacaggataagttccctacacttgaggaagagtgtaaattagcaggaagtagtagtaaacagtgtgaaatctttaatctgaaagaattatctttggatgaaaaagagaatctaatggggtgggtttatctaaacggctcagataatatcatgcctaattatgataaagcttactattggtttgaaaaggctgcaaaatctaataacaatgaggctttgaactcattaggaatgatttactttgcaggtttaggcaaagataagaattttaagaatgccgaagaatattttttaaaagcaaataagtatggtaataaagatgctaaattgaacttagcagaattatatagagttaaggattttggtcggtcaccagattttgaaaaagcaaaaaattggtatttgttgggagttcaagataatccctctcgagcatatgaaggtctttcaaaaatgtacttagatcaagggaaatatgaggaggcatttgatttttctaaaaaagctgccgaactaggtaatccagaagctcaatataatttaggggttttctttgagcaaggagtatatgtaaaaaaagataaaaaacaagctgaatactggtatgaaaaatcagctaagcaaggacatataaatgctattaataatttaaatatacttaggggaaaataa

SEQ ID NO: 48132 - DNA, 726 bp, Acinetobacter baumannii
gtgattttttatttttttttatctttgattaaatctacttttgcttgtgaaaaaattgaatattctaatcaaattaaaaactctaattttgatctcaatattttaagtctacaaggaaatctaaaaaagattgataagataataaatggcttacctgatggattttataaagagtatattttaggtgtgagttttttagatgggaaaacaaagttggttgatttaaaagaagctgaaaaacatttgacaaattctgctaagtattgtttctcaccagcacattattctctaggatatttatactatttagaaaataaattagaagattctaagaaatggcttctttcagcaaagaaactcggtgatagtttagcagcatatcagttaggtttgatttatataaaagaacataaccctgagaagatgttagagagtttagattttgctgaaaaaacagattttactcctgctataacagagttgggagtacagtattatgatggtaaaattataaataaagacttaacgaaagcatttaaatattttgaaaaagcggccttaagaaatgatcctttagctcaaaataatgtaggctggatgtatgaaaatggggaagggggagttaaagtaaataaagaaaaagcattgtattggtatagaaaagcttatgataacggattttctggagtatatgagaattatagtaggctttcaggtgaaaaataa

SEQ ID NO: 48133 - DNA, 360 bp, Acinetobacter baumannii
atgaaattaaataaattgagttttggaatttttactatcttactactagtcggatgtagtagtaatgtttataaaccaccttcagataagtatgcatttgaaaataaaatgaaaaaattacttggtaatcaaatagaaattataaattcattaaaaaaagctgaggtacaaatttcatattttgaattgcctaagaatattaataaaattgaaatcatagtaagtttattagaaaaagatggatgggtattgaaaggaaaagggcagggcgttgatacttattgcttaggaaaaataatagaattaatattgttataccaacttctggtgggctttatgattttaaaggtgggaaattaa

SEQ ID NO: 48134 - DNA, 342 bp, Acinetobacter baumannii
ttgttcagtgaatatccatataaagttgagactgatagaaataaaggctctactcaattaattgtgataaaaataaataaagaaaatttttttattaatgattatgataaaattaaaaacaaactattaatcaagaagtgggattttgttgaatcatacaataattattataatttttgtaaaaccaataattattctatagatatattaaatcctattcatgatagacattatgcaagagagggtggtgaagttaattttaaaagcaaagattattggtattttgcattatactttaataaattaggagttaataattgtatggaatattatggtaagtaa

SEQ ID NO: 48135 - DNA, 342 bp, Acinetobacter baumannii
ttgagggatgaaggtattgcttttgctcctactcaaagctttcttgttgttcaaattcctgtagagagattaaatgaggaaacctatcaaagaaatattgttcctagaattagagagaatagttggattcttgagaagcgtataaaaaattcagatgttttttgtaatggtaagaaatatcagttagaggttattcggcctaaagattactctaaagaaactattaatgaagaagataggttaacttttacttcaattgaaaaagaatggaatattggtatgtattatcaagaacaaggaacattgtactgtggaaatgaattaccgataataaatatttag

SEQ ID NO: 48136 - DNA, 321 bp, Acinetobacter baumannii
atgaatctaggatgtttggggggaaactcgtctactgatggttatgatgaacttgggattagtttagattatgatagtaaggatggagttatagtattagtcttttatgaacctgcaaaagttgtttttaaaggaatagacctatttaagttttctgcatcagaagcttataaactaatggcttcattagttaaagatattgctattgatggtccaaattcatttaaatttgggataggcttttatgagccgaattatgaagaagaaccatttttaccagttgaagcaattataatattcatagaaggatattatgattaa

SEQ ID NO: 48137 - DNA, 1359 bp, Acinetobacter baumannii
atggataatctgcaaacaaatattgctgtagtgactcagcaaagagccaagcatacaaaaactcgctattacattcttgcgatgatttttttggtcacggcttttaattacggtgatcgtgcaactctctcaatggcagcaacgccaatgtctcatgaactgggaattgactcagtcactatgggatatattttctcggcctttgcatgggcctatgtgattggtcaaattccaggcggctggctactcgataagtttggtgctcgccgtgtatatttctggagcctgtttttatggtctttgttcactgttttaatcggttttaccgacattttaggtgatactgccaccatcattacttcgctctttatactcagatttttagtcggtctgtctgagtcacctgcttttccgggtaacagtaaaattgctgctgcatggtttccaacaaaagaacgtggaactgccgctgccatttttaactcatcctcttatttctcgaccgtacttttcgctcccctcatgggctggcttgttgcaaccgtccactggcagtctattttctgggtcatgggtggtttaggaatcattctttcctttatctggctcaaggtcatttatagcccgaccaatcatccaacagtaaatcctgaagaagtgaaatacattgcttcagaaggtgctttactcgatatgggcgaaaacagccaaaacgctaaaaaagagaaaattacttggagtaaagttaaacaacttcttgcctcacgtatgatgctcggtatttttattggccaatattgtgtaaatacactgacctattttttcttgacttggttccctgtttaccttgtcaaagaaagacatctcagcattttagaagcgggttttgcggcggttgcaccagcactctgtggctttgtaggcggaattttaggtggcttaatttcagataagttaattcgaatgaattacagcttaagcttttcgagaaagcttcctatcgtagtcggcttcttggtctcaacctcaattatcttatgtaattacgtagattctcaagcagcaatcgtattctttatgtccttatcattcttcggtaaaggaatcggctctttaggctgggcagtgatgtctgacgttgccccaaaagaaatggttggtttatcaggtggaatgatgaatgcatttggtaatacggcaggaatcgtgaccccaattgtgatcggctatatcttggcaagtacaggctctttcaaccttgcattgacttatgtcggtatacatgccatcgcagctgtcatttgctataccgttattgtcggtaaaattcagcgcttcgaattaaaacctacttcttaa

SEQ ID NO: 48138 - DNA, 1335 bp, Acinetobacter baumannii
atggcgacctctacacctattgttaaatcgattcgagcaatccctgttgctgggcatgatagtatgctgcttaatttgagtggtgcccatggaccttatttcactcgtaatatactcatcattgaagataactctggaaatattggtgtaggtgaaattccaggcggagagaaaattttagcgacattaaatgatgctaaagccttggtagaagggcagccgattggtgaatataaaaacttgctcaaaaaaattcagcaaacttttgctgatcgtgacagcagtggtcgaggcaatcaaacctttgatttacgtaccacaattcatgttgtaacggcttatgagtcagcattacttgatttgcttggtaagcatttaaatgtgaatgtcgcaagtttacttggtgaagggcaacaacgtagtgaagttgaagtattagggtatttattctttattggtgaccgcaaacagacttcattagactatgcgactacacctcaacataagcatgattggtataaagtccgtcatgaaaaagcgttaacacctgaggctgtgcagcgtttagcagaagcatcttatgaccgttatggttttaaagactttaaattaaaaggtggtgtattacagggcgaacaagaagccgaagctgttacagctatcgcgctccgtttcccggatgcacgtgtgacgcttgatccaaatggtgcgtggtttttagatgaagcaattgctttaggtaaacatttaaaaggtgtgctggcctatgcagaagacccgtgtggtgcagagcaaggttattcaagccgtgaaattatggctgagtttaagcgagcaacggggttaccgaccgccacgaatatggttgcgaccgactggcgggagatgtcgcatagtattcaattgcaagctgttgatattccattagctgacccgcatttctggacattggaaggttcggtgcgtgtttctcagttatgtaaaatttataacttaacgtggggatcgcattcaaataatcactttgatatttcccttgccatgtttacccatgttgcagcggctgccgtgggtaatgtgactgcaattgatacgcactggatttggcaagaaggtacagatcaactgactaaagcaccgcttgaaattaaagacggtaaaattcaggtaccaacagcaccgggacttggtgtcgaacttgattgggaccgaattaatcaagcccatgaactttataaattaaaaggtttaggggcacgtaatgatgcggatgcgatgcaatttctaattcctaattggacttttaataataaaaagccatgtttggttcgttaa

SEQ ID NO: 48139 - DNA, 336 bp, Acinetobacter baumannii
atgaaaaaacgaccaactacgagtgatttaaataatataaatgaaaaacttaaaaagcttgatgactcaataaaggatttattagaatcaacctatgatctttttcatgatgatcaatactatagcatagaatctgcatttctacttgatcatgctttaaatattaagatgcatttttacaagtcctatccagaattagcaccagaccatttaaagaatattgaatatgatcgaattgttcatattgaaactactcaagtagtacatgctcgtaaaaagaaaccagaagatagcttgaatcaaattcagccaaattatctacaaaataagagatga

SEQ ID NO: 48140 - DNA, 1134 bp, Acinetobacter baumannii
atggatattttaaaattaatcggcgggaatctgctcactgtggcttttataacgggaacacagacagcacatgcagaatttaaacggttttccgtatctgctggatggttgcatgtcatgccacaaggaaaggcaaatccattcaacataaatactgctgtagcaaatggaactactgccaaagttggaactatttctacttcagcatttatgaaatcaatagaccctaatgcaaaattatcaacaggtgaaaatgctaaagaaattcttgatatggtatttagtcacccagtagatgagaacggcaatcagcaacaatcggttggtcagctattagggcttgtagatgaaaatgacatggtttcatctgatataacaggtacagcaacgattaggggactagaacaatgggaagggcaaggtacaggtcttgaagcagaagatgtagacactctaggcttaatgttcaattactatattaatgagaaagtgtctttacagttaatcggtggaattcctccaaaggttgatgttaaagggaaaggagaaatcaatgcaccattatctggttttgccaatcctgaagggttagctgcattagtaattggagataaattagatttattgcaagatataccaatcacgaatcttggtaataaatctaaagctgcaactgtacgggcatggacgccagcattagaggcccaatatcagttcggtaagtcaggagtaaataaatttagaccctatattggtgctggagttatgtattcacgtttctcgaacattaagctaaatgatcaaatcaactcggatttaattgctgcgggccatatgattcaaaatgttctcgataataatgctggtgctgcgttagatggtaaaacctcaagtgcaaacccttatgttcgagttaaaacgactgatgcgattgccccaattgttagtctaggggctacttatgacatcactccaaattggtatgctgttggttcagtgtcttacgcaaagttaaataaccgagcaaatattgatgtaattgatggcaaaacaggtaaacagttgattcatgcatcaactaaagttgatattgatcctttaattacttatttgggggtaggttaccgtttttaa

SEQ ID NO: 48141 - DNA, 450 bp, Acinetobacter baumannii
atgagtaagatagtatcgattttattattttttatagctagttctgctttagcagctgaaaaatgtgattataaagttcagtttgatgatacgattcctgcaaatgtatccttcataaaattagggaaagctaaaagctatacgaaatttgaagttaagccggattattttgaaactacaatacaggactgtgcttttaaaaataataaatattatattttatctagttcaattacccaccctgcaaatacattagctcagtcaatattggtggtaagtatttttgataaatctggaagcttaaatgaacataaatttataaataaaaaatggacttgtgaaatagatgatggtttttataaaaaaaataataaattagaagtcctttatagttgtgcagataagtcagaaaatttgaagtataataaatatgcggttgaggtaaaataa

SEQ ID NO: 48142 - DNA, 2136 bp, Acinetobacter baumannii
atggcttatacatatgaagataaactaaattttattgcttcaatctattgttctgtaaggagagtagcatttaagaaggatgtaagttgggaaactatattagctcaagccgctcaagaaactgggtggggagaaaaaatattaataggtacaaataatatatttaatataaaggctgatagtaggtggaagggtcctaaaagtaagcatttagtctgggaagataaacctgatggaacacgtgtacaggaatatcatgattttagaaattataaagattttgatgaagcacttgaagatagggttaaatttttagaagaaaatcaaagatatcataagtttttcagtaatggggtgaggggcatatttgaaagggaagctcaagcattggaagatgctggctatgctacacataaggaaagaaataaagctacaggaaaatttgaattagtatatgcagataaattaatagaggtatttagagggccttcaatgagaagggctatagctagaggtgaatctagtggacaatgcactattgtgaatgctgtatttttggatgatgataatagcaaagaagtaaataaagaagttgaaatcgtcatagatggaaatatcaagataaaaaaagttacggatagtaatgcgattattaagggtatagttgtaaagccaaatggaattattagctttaagaaagataatatcattgttccagctaaaattccttcagctaaagctcctctaaatattaaaattactaaagcatcaacccctatagcagataaattagaccaacacaatggcaatccttctaagagagaaactcctgtagaaaactcaagacaaacacaaacttctataccagcaccaaatgctgataatggtctggtttcttttaaaataaaatttgtagaacatgatactaataaaagtattgaaaatttttcgtatggaattttttacaaaaataagatgaaagaacatgttgctgatagtagaggtgaagagcagatccgtgcagaatctggtgcaaaaattactatttatgttaaagatttttctgggaaacttactcaaaaaattgaagaatttaatgttcaagagaatgtattaaaaaccattaaaattccaattagagaaataaaagtgttgataatggaccactcttcaacaaaggctatgggaaactatcatattatttcagaatatagaggtttaaagaaaaataaatatacacgaaatgatggcagcatcactttaaagggtttagctggctttggagtaaaattaactataccctcaggtcaagtcgtgttaccggaaacgtattttgataataaagttttattttataaacgggctttgtttgaaaaatatgaacagcctgcttttgcaaaaacaactccaccattaaaagcagatggtgaaattgttgtttcaaaaaataaaactgcaccaatatcgcaaaatgatgtacgtggaaataatgggcatcctattaaattagtcagtaaagaaggcacatttgaagtagagacttacttggatactacaaaagcactagcatcgaatttaagttatgaaatagtttataaaggacaatctcgagtccatataagcggaagtactgggcgtaaattacataaatgtgagataaatcaagaaataagcataaagtataaaagtggtactaaaatattaattgagaagtatactgtaattgaaaatatgtctcctattaagatttatataacaaaatctaaaggagggtttaataaagcaatttttgcccaaactttaagagcaaactctacggcaaaaagccgcgggctgtgtgcaatgtatgttcgattagcttttgaagcggctggtggaaaagttaatcctagacctgcttctgcttatcaatatgtaagagttatgcaggataatgaatttagagaagtagataaggatggatatacgccacaaattggtgatatatatataattgatagatttggttcacatgtgcatgggcatatttctggttatgatgggtcacaatggatttcggacttcaggcaaaatggaataaatatctatagaggaaggcctaccattagttatagaatttttcggtattatgattag

SEQ ID NO: 48143 - DNA, 525 bp, Acinetobacter baumannii
atgcttactgatattaaaaaactactatatgtaatttttttaacatttttttgttttggctgcaattcaaaacaatctgcacaagagtctaaggaaaaatttgattctataagtaaagagagtacaaaccaaaaagaagttgatatagtatcttttgttctaaacttttataaaatatattccccttatgattttggacgagataacgaaaacaaattgagtgattttttatcaaaaaatggtgatgagtttttaacaaataacttgaaatcattgattttagaggatattaaatgtacagaagagggttatgtatgtaacttagacatggacccattttataatagtcaggataaaataatattaacaaatgtcttaaaaaaaagtgataaaagtgtagatattttgtttaataataaaagtaaattaacaattttattggattgtaataataaatgtttaatttcaaatgttatttatcctgatggatctaatttggaagaaaagttaaaacagaaagattaa

SEQ ID NO: 48144 - DNA, 1104 bp, Acinetobacter baumannii
atgaaaaaacaattgccaaaaatttctacaacaagtaaagcgcttgctaaaagtttattacttgcacaaggcgttttagaccaagcaaaaaaatattcaactcttccttttactcaaactcatatcatccgtccacgaattgacgaaaaatattatagctggacacactacggtatctttttcccacttttaccagagccgcatcgttacttaaatattatgattttaatcggtacaccaggtgcacttgcttttgatcatgatgacatcatcactggtaacccgagaaaaaccgctactttcttttcaagcacagctgctctggaacaagctttactgaaggcctatatcattcctaaaaatacaaaaattaataaagatggaaccttaatagaactaggtcaggaaatttcaattcaaggaaaatttccacacatccatattaatggacattatgatgggtttgatttcgactttgatatcgatatcacttcacatgtttcatggtttataaaaacaccaatctatgatcattttagtttattggcaaagtttaaaggttttttaaactatcaagcaaaacacattgaaacccaaggactttgtacttacgaatatgcacgagcagtgggtcctcattccattacaaacaaacttattcctgatgcatataaactgccacttgatttttttacttatcaaattatcaacttaaacgaggccactcaacttcttcttaccaaagccgatattgcaggacaaacagctgcatacaccctgcatattagacatctggaccagccagctgaaatttacacagatgtaagctttgatattatttcgcatcaagttgatgacttcgtttcacctagtgggcaaaaaatgcgacttccaaaatatttttcatggatcgctcgaaatgatgcaaagcaaattatcttaaacattcaggcagaaattgactgcccattccgctatggtcatgggcgaggttatgcaagtagctatatatttactggtcattattttggcaatgaagttcaaggccgtggatacatcgaatatgttgatatcgaaaatcctcaagcctttgaagatgaataa

SEQ ID NO: 48145 - DNA, 882 bp, Acinetobacter baumannii
atggctaccattgatttacccgacaatttagttcaaaccttatcacttgtattaaatcagttacagcaggtcttacctgaaccgaaacaagaaaccgattttactgcccctgcttttagatgggaaaaccagcagcttaaagctatttatacacctaaaaatatttatcttgatgacttaaaaggcatcgaaagacaaaaagaaaagatcattcaaaatactttgcagtttttaaatggcttaccagcaaatgatgtacttttaacgggttcacgtggtacgggtaaatcctctattgttcgtgctttactcacggagtatgcacctcaaggattacgtttgattgaaattgaacgtgatgatttagcagacttaccgaaaattcaaaaaattattcaaaaccgacctgaaaaatacatcgtctattgtgatgatctagcatttaatgctgaagatgaaaattaccgtagtttaaaaagcgtattagatggttccttacagtcgggttcaacaaattttattatttatgcgaccagtaaccgtcgtcacttgttacctgagttcatgcatgaaaacacccctgtaaccaaagtagatgtgcctcaatatactgagcttcatccgcaagaagcgattgaagaaaagatctctttgtctgaccgttttggtttgtggttatctttttatccaatggatcaaaacttatatttagaaatcgtagagcattatctagataaagcaaacatgccttttaatgatgaagttcgtgctgaaagcttgcgttggtgccaaatgcggggtcagcgctcgggtcgagctgcttatcagttttctaagcattggattggtttaaacgccttaaaagatttgtctaacaattaa

SEQ ID NO: 48146 - DNA, 1509 bp, Acinetobacter baumannii
atgtttgaaaaaatacgaagtgatatgaatccgcatcaggcttaccgtatcaaaaaattacaacgtcagttagacatggctgaatcttatgaagagtggaagtcttttgcattaaaactggatgaagaaactggggcgcaagagtggaagtttgataatagttcgccttacttcgatgccgagctcatttcttatcgttacactttactgaaaagatatcgtcagcaacatcgcactttagatttgatttatcttttaaaagaagggttgacctacgatattgcaaatattggccaccctatgttgtttgccgccacacatgtaggcacaaaaaaattaattgaagattatattgaagaagtcagccaaagcttggcttacattgcatctagtgaatgtattacattccaaagaagagaaaaaatcgaattctttgaaaactgtgaaaaagcatatggacaacctgctcttatgttttcgggcggagcaaccttaggtcttttccatactggtgtatgtaaagctttaattgaacaagatttaatgcctaaagtcctgtctggttcaagtgcgggcgccattatgacaggtatgttgggaatttctgccagtgaagatatccaaaacttgctaaatggtgagcaatttttcagtgatgcttttcactttagaaaacttcgtgaacttataaaagggaatggtgggattgccgatgttcactatttaaaaaaattcttaattgaaaatttgggtgatcttacttttgaagaagcattcaaaaaatcaggtttgaatattaatgtcgctgttgcgccgtacgatgcaactgaaaaccctcgaattatgaatgcgattatgactccaaatgttttggtttggagtgcagtattggcttcttgtgctgtgccagttttatttccacctgtgcgtttaaccagtaagcgttatgatggtgaacatactccatatatggcaaatactaaatgggtagacggtagtgtacgtagcgatttccctcaagaaagaatggcaagactttataatttaaactacaccattgccagtcaagtgaatccgcatgttgtaccgtttatgcaagatgatgcgcgccgtttccgtaaagacgttttaagttggcctgaacgaattttaagacgccaaggtaaagtactttcaatggggctgatggactttacacgtcaaagattaggtgcaatttcacccgtaagaagactgctcgatcatggatatggcgtagtagggcagcgctattatggtgatgttaatattattgctaaatatagcttaaaacattatgcctatacgctacaaaacccacgcccacatttgtttaaacgtttacagcgagaaggcgagcgcgcgacttggccaaaaatctcttctattgaaacgcacgcgcgtattggtaaaacgattcagcactgtttagaagttttacgttttgaagaaaagaaacaacagccagagtcttattatgctgaagcatga

SEQ ID NO: 48147 - DNA, 489 bp, Acinetobacter baumannii
gtgttgaataatatgactttctttatagatgattttattgaagtaactgaaaaaaataatattcatttttatacactatcacaagaagaaagcaggcatatttttaggagactatttgataagtttttttcaaataaattatctatggaaaaacctcttgaaattcctctttggcaattcttaaataaagaaaattcaataggagtacatttgccgaatgctgctggacatagagaactatttctaaatcaattaccgaatataaaaaatgtatatttcttatttgatttagagttttctaataaaatattaaagttcaaattcttaagtgatttggtaattgttttagaagattcatataactttaatttctatatatttgatgagtcatttaattttttattgtcatggaataaagatgaaacattatttggttcgggtgatgcaaaagaatttgtattaaagattaaggaatcatggaatctatga

SEQ ID NO: 48148 - DNA, 438 bp, Acinetobacter baumannii
atgatagatcaagacatatacccaaaaattggtgagttgttatggtcaataatgaatgaaaatgcccacataattttttgtaagggatatatttattcagatgctaagtcatatagttttgaatggatagaatctaataatcgaataggttggttcgactttgatacaattccacatgagattggttatgaaataattaatctcatggaaaagattaacagtagcgaaatatttaaagaaaaatggacacattttaaaatttctttaacagaggaaggtaaatttaatattgagtttgcttatattccagaagatgatcgttggcctggattatatatgaaagcaattagtgatttgagggaagatgaattagataaatacaatatcccttttgaggagtgggagaaacgagtaacgttgaaagagataaataaatga

SEQ ID NO: 48149 - DNA, 405 bp, Acinetobacter baumannii
atgatagatttttacattaagcaaaatttagagcaagataatttgcggaatatattaaaagaagttttaaatttaggagtggatgatttttgtcttattcattatgaggattttacaccagaaaatacagtttatgatttcaataagtttaaggttatatgtacttatcaattttgtaaaggtgatgtttctttgttaataaatataattgatggagatgaactagataatgattttatagttgaaaatttgaagaataaagcaaaagaggaacatttagatttttatcttccagatgaggataatatggatatgggatcttttgttctttatttatcaaatgagaaattaataaaaaacttagaaatacaagaggaggaagataattatatttttttcttgtag

SEQ ID NO: 48150 - DNA, 201 bp, Acinetobacter baumannii
atgaattatgtaatggatgagggtcatattattgatgcagctgaattttatttttacgatgaacttgatggtaaagtgccatttaaagtttttgcttcggttttagagttaatagcattagcatatgctgagtacaattcagaggaaaaggaacaaattattgatttaatgccacgccttaaaaaattttatgatatttaa

SEQ ID NO: 48151 - DNA, 399 bp, Acinetobacter baumannii
atgaataaattaatgagtgattggttgagtaataattggagtgcaattctaaaaaactatccagaagcagaacctttattatattattttagtgattattttaatactgttgcttgggttgatcctattattgatattattaaaagagctattagaggtgaaggggctaatattcaggaaacttcagcttatttactcatggatgatgtagttgatgaaggacatattatcgatgcggcagaattttattttaatggtgaatttgatggtaaagtgccatttaaagtttttgcttcggttttagaattaatagcattagcatatgctgagcataatccagaggaaaaggaacaaattattcatttaataccgcgccttaaaaaagtttatgatatttga

SEQ ID NO: 48152 - DNA, 777 bp, Acinetobacter baumannii
atggacgtaacgaagaactttgatgccaaccgtcaggaagcaggcattacagttgataatattgtaaaggcgctggaagtcacaggacaggcaatagagggtgctaaacagacactagctatagccaaacaagcacaacaagaaatccaaaaacttagcccagaagatcaagtaatatttgaaaatttcttgacagaacttgcacaaagtcaaagaacggatagaacagacacttattatgctcttgttttggcagctggagaagggttagcgatggctgcagcggcatgtgcaagaagcccggcttgcgctagtgcgacagtaaatgtattaggtgcagttggagttgcaattttaaatgaacagtccgatgacaagaataaaaaaactaccccaaaaccattaccttcaacatctgggaattctgcaacaggtatgcctcctaacaaagatgataatgaacgagattttaaatatgacaataaacaaataggaaaaaaattaggaaagcatgttagtgattttggccgaaatccagctaatgcaactgatagagaatatgtattagctcaaattgaaaatattgcaagacatcctgataaagttgtaagaggaacatttgcaggacaaggtccaatgaatacaagaggcgcggtccaattcagaataaaaggccaagatgtcgttgtaactaaacctgacggaacttttgttactatattgagaaatgggattaataatccttcagttaagcaagcattaaatggagctaaataa

SEQ ID NO: 48153 - DNA, 309 bp, Acinetobacter baumannii
atgaatatattccaaattacatattttctaagtcgtagttgtctaggagaaatttcaaagaactttcaaagaatttactttacagtaaataaaaaagtaataactgtatttttcttcttagaagagaataacgatgatgaagtggatgatattaagtatgagattatgccagattttgaaatgttaataggtgatgatgaagagttcgacggctatgaagttaattgtgaaataattttaggtgctgagaaatatcttaaagatgaggattttgagatattagtagaattttatcgtaggaaagaatga

SEQ ID NO: 48154 - DNA, 1428 bp, Acinetobacter baumannii
ttgacgtctgtaactacagatacagcacgtgagaatagtggagcactgcaaaacaactttgataaagataaagttctaaaagagattaatactcaagtttcagtgactcaaaaatttggtgaaaatgcccctaaagccgttgcagattatgctcaaaaacaagcattgattttacgagcacaaggtaatgaggcagaagcgaagaagtgggatgaagggggaatatatcgtgtagcgatgcatacagccttgggagcattaggtacaggcacacttgaaggtgcgattactacaggtacggttgcagcttcagcacctaaaataaatgatttccaaaacagtgtagctcaggctttaactcatacgggtatgagtgaaaaagcagccgaagctgttgcaagtggtgtaaccagtttgacacttgcaggtgtaggcgttgcatcaggtttaaatacgggtagtacagcaacagcagtgaatgtagatgcaaataacagacagttgcatgttgatgaagccaaagttctgaaaaaactaaccgaaggtaaaacggaagtggaacagactcgattaagagcagccgcatgtgcattggtacattgttcagaaggtgttccagaaagtgatgtcaattataaaactctgaaagcatttgaagcgctaggaaaaacctatattaaagagcaaaatgctttaaaagcaactgggttatttacctattcaaattgggataaagcgaatgatattcggacgaatcatgatgaagctgtaacaagagtaggaggtgcaggaaaggtaatcactggtggtgttacagcaattggtggtagtgcagcaggtgctgggttatgtaccacaggactcggttgtgcagtcggagcaccattggcaggggtgagtgtagttggtggtgtaagcacagcgatagaagggaaaaaccaagtttttggggagtatacgtctcaagaagggaaaaaagtcattgattcttataaccctaatcgaaaacaagaacttagtcagttaagccaagatggtttgaatggagcggtagctgttgcggaggctgttttaatcggtaaagttggggcgaaactttctggaagtgaggcaaaagtatcttcctctgtgacgagtaagttaaatcctacttttacaattgatcccaaaattgagaatcaaatgtcaacaagaggatggtctaataaggatatagcagatgttatgaagaaaggtcctgttggttatacaatagataagcgacgtgcaagtaagacgcctgataatctaccacgaaatgatacagcaacagtttacgggagtaaaaatggatatgtagttgtaaatgatagaactaaggaggttgtacaaatttcagataagacagataaaaattggattcctgatagtagaattcaatggaaataa

SEQ ID NO: 48155 - DNA, 330 bp, Acinetobacter baumannii
atgaacataaataataagatgttgtataacgatcctaatttggtattcaaagagagctcttttaacgggataattaggcttacacctgatgcagccttaacattatgtgatttagccatagaaaatgattgttatattgattggtatgaatgcggaatatggcatggagataaacaaggatatgaaggtcatgatgtatggggaaaaatattatcagagattaagtcgaattcagccattcaagaaaataatctggaagcaaaggaaaatattagatgtgatatagaggatggatataatgtatttgaattatgtataaaacatttatga

SEQ ID NO: 48156 - DNA, 327 bp, Acinetobacter baumannii
atgaattcatggaaaaatgaacataatgaaagacaatataatttaattttggaaatgatcttcgaatttaaaaaggagaagatcagtattaagcaacttatttcaagtttaaaatccttatttaatgctctggaatctgctcctgaaagttggaaaaattcttttaatgaggaatggtttacacttgaaacaatttatgccttagctttagataggcaagaagaaagtttagataaaaattttattctcactagtgaggaaataaatataattaataatacattagttaatttacaaaacttaatatctgagagaaaggctaaataa

SEQ ID NO: 48157 - DNA, 333 bp, Acinetobacter baumannii
atgagatttattgagaaagactctggattgaaagggatggtaggttctatatattttactgatggaaaatatcactacttgtcaatgatagaaaattatattgggctgagggttttttttgaaaatgaaatagatataactagtaatgattcatgtgagttatgtgagtttaaggctgccttatataacgatattcgtcaaatgcatcctgttctgtataatatattaaaagaggattgggatttatatatagatatagttgaaggtgttccagagtcttggcaaatttttctagaaaaactaaaagaatttgatgaggaaaggcgtatttga

SEQ ID NO: 48158 - DNA, 600 bp, Acinetobacter baumannii
atgcatatttctagaagtgattgggaaccaggttttggtgaaatatttacatggtttgctatggataaaaatggaaaaatagcagtaatggtgaataattgttggggacggctaccggaagcattgttggttatacctaactttgaagatttattagatgatcttaatgaatataaatggcaagaatcagagaagtatgcgagttatcctgcagaaaaaaatggagaaaccatactagatttgtattcatctttagtccatggggaaaattaccctagacaagatgttgagttttgggtgaaaagtaagcaaaattctgaagatttaaatgaaattaatatgccttcaaaaaaaggtttttttatttatcatagtcttgagggcgataatgctggcaaagactaccctgtgggttataatcgagaaacgaagataggagattattttagatatttaatgccaacagtgtatgcatcaattaataatttcccaacagaattacatcatggaatagctgtctctgatacagttgattttactgtggatagattatttgataacgagaaaataagtgaatacttcccaaaaatgtataggtaa

SEQ ID NO: 48159 - DNA, 375 bp, Acinetobacter baumannii
atgaaaaacgtcattattttaacttctatattgttattaagtgggtgcacaattaattctaagttattatcaccagcaaaaagtgatgatgacaaaattattgtagaagcagaaaagtacaagcaacaatatcaaaaaaagatctttaaaatttggaatgttccgccttcttcagtgggaatgagtgctagcgttaaagtctttttaagtgatactggtgagattgagcaaattatttttctagataaagaagaccaaaagtttaagtcgagtattgaaaaggcgatatggcgtgcaagtccctttgttttaccttctaatccggaagttagaaaacaagtaagaaggttcaatattaaatttactgcaaagtaa

SEQ ID NO: 48160 - DNA, 426 bp, Acinetobacter baumannii
atgattaacatcggttcttgtttatgccataaagtaaaattctctgtaccttgtgaaatcaaaacggtttatcactgccattgcagcttatgccgaaaacaaacaggtactggagcgaatgccgctactttagtaaaagaaaatcagtttaattggttgatgggtaaggaatatgtggctacctataaaaaagaaactggttttacttcatcattttgtaatagatgtggttcgcctgtccctaataaaattaatggtacaaactatatatggataccgttggggcttcttgaacaaccgtttaaatcagatttaaaacttaatttttgtatagagtcaaaacatgattgggttgtgttaggggatgctcataaaaactttgcacatttacctgagttagaagagttcttaaaatattttgaataa

SEQ ID NO: 48161 - DNA, 933 bp, Acinetobacter baumannii
gtgattgggggaacaggcggcacctcaacagcgtctatcatcgacatgctgcataccctaaaagaaaaaggcgcaagcgaagtatcacccgatttagcaccacgctacctcaccagcaccattagctctaacttatcacgcgcttttaacctaaaaggcgtatcccaatcggttgcgagtgcctgcgccacgtcagctgatgcaatcggttatgcatttcaccttattgccgctggcaaacaggatctcatgctggcaggtggcggcgaagaagaccattggtcccaaaccgcaatattcgatgcaatgggcgccttatgttctaaatataacgatgcgcctgaaaccgcttcacgcccatattcaaaagataacgatggctttgtgatcgctggcggcggtggcatgatagttttagagtctttaagccatgcccaaaagcgcggagcaaaaattttagcagaagtggttgggtacgctgccaatagtgacggtgtcgatatggttgccccaagtggtgaaggggcgactcgctgcatcaaactggcactcgcagaagctaagcaaaatggttcagacaccatcgactatatcaacacgcatggcacttcaacgccggcaggggacattcccgaactattggccatagagcgagcttttggtggcgaaaaagtcccgccgctcagttcgaccaagtcgatgactggccatagtttgggggccgcaggggtacacgaatctatttattctattttaatgctgcaaaataacttgatagcgccgagcattaatattaccgaactacgcgaagaagctaaaaagtttgatattgttcaaacaagccgagaaaccgaactaaaaacagtgatgagtaatagctttggttttggtggcgtaaatacttgtctggtttttagaaagtgggaagagtaa

SEQ ID NO: 48162 - DNA, 546 bp, Acinetobacter baumannii
atgaacattgaacaatatcttgatgaattgattaagcgtgaaggcgggtatgtaaataacccagctgatcggggcggtgcaactaagtatggaattactgaagcagttgctcgagcaaatggattcaaaggtaatatgcgagatttacctctggatgtggccaaagcaatttatcgcaaaaactattggactgctccacgttttgatcaggttaatgcaatttcctctgctgtagctgaagagcttctagacactggtgtgaactgcggtaccggatttgcaaaaccacttttacaacgtgcattaaatttgctgaataatcaaggtaaagctgggtatgcagatttaaaagttgatggcgtttatggttcaaatactttgggtgctctaaaaacctatttggccaagcgtgggaaagaaggcgagaaggttttagtccgagtgctgaatattatgcaagggcagcgttacatcgaaatctgtgaacgtaatcctagtcaggaacaatttttctatggatggatttctaaccgggtttcaacatga

SEQ ID NO: 48163 - DNA, 1158 bp, Acinetobacter baumannii
atgaaatttactgccgaacatgaagcattacgtcgcacagcgcgtcaatttgttgaaaatgaactgaatccgaatattccggaatgggaagaagctggacgtttcccgatccacgatgtatttaaaaagatgggcgatcttggcctattggggatttgtaagcctgaggaaaatggtggtctggctttagattactcttataacttggttgttgctgaagaaattggacgcgcagcttgcggcggtgtgcctttagccattggtgtacaaaccgatatggcaacacctgctttggcgcgttttggtagcaaagaattacgtgatgagtttttaacaccagccattgctggagaatatgttgcatccattgcggtatcggaagtgcatgctggttcggatgttgctgctattaaaacgactgctaaaaaagatggcgatgactatgtcattaacggcagcaaaatgtggattaccaactcactgcaggccgatttcttctgtcttttagccaacacatctgacgataaaccacatgttaataagtcgatgattattgtgccagccaaaactaaagggattagtttttcagagccgttaaataaattagggatgcgttcaacgaccacagcgcaggtttatttagacaatgtacgtgtacctcagcgtaacttggttggcgttgaaggtatgggcttcatgatgcagatgatgcaatttcaggaagagcgtttatgggcttgtgctaatgcgattggtggtttggaaaatttaattcaaaagactatcgcctataccaaagagcgcacgacatttggtcaaccactcattaataaccaatatatccattttcgttttgccgaactcatgactgaagtagaagcgcttaaagccttaacataccaagcgtgtgaacagcatattgctggtgaagatgtgaccaaactggcatctatggcaaagctcaaagcaggccgtttaagccgtgaagttgccgatagctgcttgcaatattggggcggcaatggctttatgtgggataaccctgcatcccagctatatcgtgatggtcgtttaggctctattggcgggggcgcagatgagattatgttggggattatttgtaagttgatggatatcttgccaaaaaaacaaaaataa

SEQ ID NO: 48164 - DNA, 1941 bp, Acinetobacter baumannii
atgaaattttcaaaaatactagttgccaatcgtggtgagattgcagttcgcgtgatgcaaacagccaaggcaatgggttaccaaaccgtcgcagtttattccgatgcagaccgtaatgctcgccatgtgcaagaggctgatgaagctgtttatattggtgcttcaaaagtatcagagtcttatctctccatcgctaaaattattgaagcttgcaaaaaaacaggggcggatgcagttcaccccggctatggttttttgtcagaaaatactgattttgctcaggcatgtatcgacaaccagattacctttattgggcctaccgcttctgcaattgagttaatgggcagtaaacgcctttcaaaaatcgccatgattgaggcgggcgtcccttgtgtgccggggtatgaaggtgaccgacaagatctcgaatatttagcaactcaagctgagcagattggctttccaattatggtcaaagcttctgcgggtggtggcggtcgtggcatgcgtttggtacagcaagcatccgagttgtttgaggcattacaaaccgcacgttcagaagctgaaaatgcttttggttctggcgagctcattttggaaaaagcagtcattgctccacgccatgtcgaaattcaggtttttggtgatactcacggcaattatgtgtatttgtttgaacgtgattgttcaattcagcgccgtcatcaaaaagtagttgaagaagctccatgtccggtgatgacgcctgaactgcgtcagaaaatgggtgaggcagccgtagcagcggcaaaaacatgtgcttatgttggggcaggtacagttgagtttttgctagatgcatcgggtgcattttactttttggagatgaatacccgtttgcaggtagaacatccggtcactgagcttattacagggttggatttagttgaatggcagttacgtgtggcgaatggtgagcagttacctttaaagcaacaggaattgaccttaaatggacatgcgatcgaagtgcgtttgtatgcagaagacccacgtcaggattttttgccacaaacaggaaaaattttacgttggaagcctgcagctttgccaaatgtgcgaatcgatcatggcatgttagcaactgatgaagttagtccattttacgatccgatggtagcaaaggtgattgcctatgggaaaacccgtgaggatgcgattcgcttactggctcgtgcagtcgatgatagtgttttacttggagtgaatagcaataaacagttcttggtcaatttactgcgccatccagttgttgtcgcaggggataccaatacagcatttatccaacagcatttcaaaaatgatccgagcttacactatcaagttttatctttagaaaccttagcaattgctgcggcattatttagccaaagtaaaggtcctgcagtatggcaaactgggcttggtgtgccattaccgttaaaattacaaactgccgatcagcaaattcaattgcagctttcatctgtaaataacacattcacggtacagttctgtgaacaagtagtttgtattgatgtgcttgagaaaacgccagagcaactagtttacttaattgatggtgtacgtcgccgtgttcaatatgtattagatgatgatcagctttatctagatcgggataatggcaatgttttgatacgcaatatgacttacgctgcaccagaagctaccgatgtagcgggagatggcaaaattcgagcaccgatggatggggctgtagtgaatatcctagtcaatgaaggcgatcaagtagtgaagggccaaacattattgattcttgaagccatgaaaattcagcaacagattaaatctgatgtggatggtgtagtcgatgaaattttaggtcagcaaggtcaacaagtgaaaaaacggcaaatgctatttactcttcatacttaa

SEQ ID NO: 48165 - DNA, 420 bp, Acinetobacter baumannii
atgcttagtattccagttcaaaaacgaaccgctccaacacaattgctacaacttgcaaaaagtgaagcccaaaaaattcttatgaatacacgtggtgtagactttgtcatgatttgttcttcagatgggtttgaattggcaacagtgagccacaagaactaccctaataccaccaaattagcagcggtgagtagctcgattttggccatggtcagtgcatttttaaaagagattcaactgactggctgtaataacatcacattagatgcagataatggcaaagccattttaacagcgattcctgctatccatcatccgatggttatggttaccctaagtaatagagatgtacttttagggcagctgctttatagcctaaaaaaagcaagccaagtgattgcagaggcagatggagaataa

SEQ ID NO: 48166 - DNA, 561 bp, Acinetobacter baumannii
atgattattcaacaatataaaattgtcttcgcaggcagtatgggggctggtaaaacagaagcgatcaaatcgctatctgaaattccaattttagaaacagaagcatttaatactgatgtacaaagtcaccaaaaatcacaaacaactgtagggattgattacggcgaaattactttagatgatggtattaaaattgggctatatggaacccctggacaaagccgttttgattttatctggtcagttatttgtaaaggtgcgattggtattattcttctgttagatcacaatagctctactccaattgctgaactagaaagttacttggaaacctttaaaaattataatgataatattgcgattggtattacgcatattgatgaaaataaagaatcttcactccaacagtatcgcaactggttagcagaaaacgaacttcaatatccattattttttattgatgcaagagaacaagagcaaattttaatgatggttgaatcattaattgcatcacttgaagttaaggtaggcgcaacatctcaagggaaagatcatgcttag

SEQ ID NO: 48167 - DNA, 966 bp, Acinetobacter baumannii
atggatagccattgcataaatattgcagtttctggtttaagcttaaaagtttcagatgaattaaaaatcttaatccgtgatttgatatctaatcaatatggaattaactgggttaacatttctagtaatcagattgatttattaattattaatgaaaacttttttgatgcagacaatattcaaaatattcttaataagaaaaaatttccttatttaaaaattacaaaaacacctttagaaaatggaggcactatacacgaacataccttacactaccctttagaaaaaacagaacatctccgttcatggttacaagcaaatgtattatctcttttaaaacatagtgatgttcgttccaactcaactttattaaatgaaatatctatcatagatgagcaatttataaaaaatttgcatagctctgaaaatattaaattacatttatttgatgacaagggtaccttggcaattattgataatagaactcaaattgcttggttagaaccttctcgtcaaaaaacacagaccaatatgagttttaactttacctttgcaaaaacatcagactttactaaggtttctcgtaaaaaggattattacttacaggattggttgtggaatttaatttggtgttcaaaagaatttgagaatttagcgtcagctgatggttactttaaaattaatcattggccacaaccctatcaaaaagaatatagaaaagtaagcctacagctctctgcctgttttattcagggagcaaaagtcactgaagtagctaaacaactcaaccaacctattgatgttgttctacgttttattacagcatgtttaatggcaaataatgggcaatatgtttccgcgaataagtgtttttacacgccacagactcattcagaaaacttaaatacagaaagtcattttttaaaaaattttatagggaaaattcgacgccgttttggcttttaa

SEQ ID NO: 48168 - DNA, 360 bp, Acinetobacter baumannii
atggctaaactttctttagatagcttaactgaaattgatggttttattgcatctgcacttgttgattcagaaagtggtttatcacttgctacacaaggcggtggggatattgatttagagctggcagctgctggaaacacagaagtcattcgcgcaaaacgaaatgtagctaacgcattaaaattaaatgacaatattgaagatattttaattacattagggaaggcttatcacttaattcgtcctttagaaagtaataataatttattcctttatttagtacttgatcgcgccaagtcgaatttagccatggctcgtcatgagttaaagtcctttgaaaaagagctcgattttagttaa

SEQ ID NO: 48169 - DNA, 1935 bp, Acinetobacter baumannii
atgtctcataaaacgattagcagcctcgtcgctgtatttggtctagtggtttcaccatggactctcgcggcaattaaggaatatcaccttaatattaatgaacaacaagtcaatgttacgggcaaaccccttaaacgaattaccgtaaatggaaaatttacagcaccactccttgagtttgaagagggggatgaggctgttattcacgtccataaccaattaaagaatcaagatacctctttacactggcatgggttgttactgccggggttaatggatggtgtgccgggttttaataattttaaagggattgctccaaatggagattttgtttaccgctttaaggtgaaacaaaatggcacatattggtatcacgcccatagtaaaggccaagaacaagacggtttatatgggccgcttgtgatttacccaaaaggcaaaataccagttgcggcgcatgaaaaaactgatcgtgattatgtagtgatgctttcagatttccatgattcttctagcgatagcattatgaagaatttgaagaaatctgctgagtattatcaaaaccgccgtgaaaccgtatctgatgttttgaagcaagttaaaacacaaggcttaaaagcaacttggcaagatcgttcaatgtggaatcagatgcggatgttaaaaaccgatatgtctgatgtgacgggttataccttcttagttaacggcaagacacctcagcaaaactggacaggtaactttaaagctggtgataaggttcgattgcgatttattaatgcatcagcaatgtcattttttgatgtcagaattccaaatttgaaaatgacagttgtaagtgcagatgggcagccagtcaaacctgttgcaattgacgagtttcgtattggtacagctgaaacctatgatgtcattgtagaacctaaacagccaaaatatcagattgaagcagagtctattgaccgtagcggttttgccattggtactctgcatgatgaaaatacccaagctgtcgggccagtccaaatgccagcaccacgtccacgtgctttattgaccatggatgatatgggcatgagccatggtggtggaagtaatgaacatgctggccatcaaatgaacatgcaacatgacacgtcggccatgcctgaaatgaaaaaagagacgagtcaggctaatcatgatcacacaatgatgaatatggatcatgacatgaaaaatatgtcatctggcgaacatgatcattccatgatgcacatgaagcatgatatgtcagcgatgtctgaaatgaaccatgatatgcaggcaatgtcatctagcaagcatgaccacgctatgatgaatatgaatcatgagatgcctgctcaatctgagaacaagcctaaaaaggatgaaccagtttatggctgggcaaatgcttcaacgccagcgggtatgaaggcactgcaatatagcgatttgcagtctttaaatcctcaaccagatacccgtgcaccggaacgagagcttgttattcgtttaggtggcaacatggagcgttatatctggaccattaatggcaagaaatttagtgataccacacctttacaagttaagtatggggaacgcatacgcttgaagtttgtgaatgacagtatgatggctcatccaatgcatttacatggcatgtttatgcaattggaaaatggtcaacaagctgaaaacttaccaaataaacataccattattgttccacccggaaagaccgttactgcgttattgacagccgatgctttgggagaatgggcgattcattgccatctgctctatcacatgagtgctggaatgatgaataaattaattgttgctcaagtcaacgatgggcaacaacccgctcagtcccagccaactgttcaatctgaaaatgagaaaggagctagtcatgcgcatcactaa

SEQ ID NO: 48170 - DNA, 432 bp, Acinetobacter baumannii
atgaaacttcaacaagttcaagatatgatttcggaaaaaaattggtttaaattagatggtgtagatgaatatatttgtaaagacgatattaatttgggcctcaaactagtagattggatagatattacagaggcggatttgcctactagtttagaaaatttcatttttcatttacaacaatattctaaggtttcttctatacaacaatgtacagcaatttttaattataactctatcaaattacagtctgttaaattatttaaatttacatgcagtacttataacgacagattgaatgtatatttttcaataccttcaacattccaacttatgaaaccaattggtgatttttatagtttagaattaataaaattcttaaataacgagaaggggattgcagcaatttataaagcatatggtgaaattaaataa

SEQ ID NO: 48171 - DNA, 627 bp, Acinetobacter baumannii
atgagtattgtcgagcatccaagttatacatctaaagatgtcgaagtaacatcacgtgaacctctgttcagtggttttattcaagttgaaaaagtcagccttcgacatcgtctatttaatcaatctgaatatactcctgtattgcagcgcgaacttgtgcatcggcctgaagcggctggcgttctactctacaatgatcaaaaacaacagtttgccctgattgaacagtttcgtgttggtgctttagatgactcccattcgccatggcaactcgaaattatcgcaggtgtattagatggcaatgaatcaccagaaagttgcattcgacgcgagagccttgaagaatcaggttgcgaagttcaggatttagaacatctattcagtttttacccatcagctggcgcctgttcagagttatttcatctgtatgttgccgaaaccaatttacctgctgtaggcggtgtttttggggtagataatgagggtgaaaatattcagctacatttgtttagttatagtgagattcaaacactactcgacagcggacgtttaagaaatgcccctgttattatggcattacaatggctggctcaacacagcaaaacgataataaatccgaagaggtag

SEQ ID NO: 48172 - DNA, 687 bp, Acinetobacter baumannii
atgcaagatcaatggaaaactaacgcacataacagacagtcaattgtctcctttagtggaggtaaagacagctctcttgcactttatcatgccatgcaaaccggtaacgtaattggtttaatcgttatgctggaagagcaaggacaacgctcccgttcacatgctatgccacttgatattatccgggcgcaagctcaagcaattggcttacctgtatttatggcatcatctagctggaatgactatgaaaataaattcatcaacttactaaatgaagccaaacaaaaaggtgctgaggtactggttacaggtgatttagatatgccggaacatggttgttggcatgatcgtgttactcaaacagtgggccttaaattaggaatgccgctctggctacggccccatcgtgaagttgttgaagaatttattcaacttggatttcagagtgtagttgtgactgtaaaccttaaactcgggatgaaggtggaagatttaggtcaagtgttatcgttagaatatatacaggaacttgaaaaccgtggaattgatccatgtggagaaggcggtgaatttcataccactgtgattgatggtccaatttttaacaaagctattcctgtaagaaagctcgatattgtttatcatgaagaatatgcttttttaccacttgaattagatcaaatttaa

SEQ ID NO: 48173 - DNA, 435 bp, Acinetobacter baumannii
atgaaaaaaattatctttcttggtttagcgcttgtttcgttaacggcttgctcatcagtacaacataaagattcaactcctccaaaaattggttcaccaaatcctgctagtcaatattgcgttgaacaaggcgggaaattagaaattagaaatgaagcaagtggtcaggtaggttattgccatttgccaaatggacaagtcgtcgaagagtggaaattattccgtgataatcaggcgaactgtgtttcagaagaagctcaaaaattagttgggcaatctggtttaaccgatgatcaaattaagcaaaaaacgaagtcagaaattgttcgtaaagttgctccaggtcaaccgatgacaatggattatcgttcaaatcgagtaactgtcacaattgatccaacttctaaaaaaattactcaagcaacatgtggttaa

SEQ ID NO: 48174 - DNA, 909 bp, Acinetobacter baumannii
atgaatgcgccaacagaagcaaaattttccctgacttattatacgggtttcttatctgtactatttgctgcttttctatggggtacggcaggcacagcagcatcttttgcaaagggcatcagtccacttgtaattgctaccatttctgtgggcttcggtggtttaattcacacatttttaagtttaaaagccattaaaaaagattaccgcaagctttttgactataaaactaaagttttgattgccgtcattgtttctattctttgcccgtttgctttttattcttcggtttcattagctggtgtttctattggtactgttatttcaattggctgcgcccctttgttttcagtcatgcttgagtggttattagataaacgtaagctttctttaaaatggcttatcagttttattcttggttttttaggagtcgttttactctcatatgcaggtgaacatagtcaccaacatcaagacgtccaatccgaacggttattaggtatattttttggtttactctcaagtctgagttatgcaacatattcgtggattatgaaaaacttaatccataaaggcatcgactcaagagctgccatgggtgtgatctttggcatttcagcagttctgttattacctactttattgattacagcaactcacctatttaattatccaaataatatttgggtagccctgtatatcccaatcgtaccaatgttcttgggctatttattttttagctttggtttaaaacgtattccagccagtcaagccatgacgttagctttggtcgaaattcctgttgcagctttattggcagttgttgtcgtaggcgaaagtttaacaatgaatagttatttaggtttagttttaatattcctctgcgttagtgttctcactaaaaaataa

SEQ ID NO: 48175 - DNA, 1917 bp, Acinetobacter baumannii
atgagtgaaaagttgtattattgggccaataatttagaagactatatatcagacaatgatacagactatgatcaagctattgaaataaaaagacttaacttctttattggcaaaaataatgctggtaaaagtagatttttacgccaactatttcaagattctactcattttaaagaatttcagaagtacgatgtagaaaatgaagtttctgaacttatagcttatttaaatcagaataattttagaagacccactatacacggacatgatactacttggtcttcggatggtacctctcctgtatctagccgtgagaagtttgagattgaggctaatttaaatactctctcttctcttaaatttaattttaatgaaattaataatcaaatttcagaagtgatttacgcactcaaatcttttaaattagcatcaggcatgccaaacgaagacttaaacaactacgtacaaaaaatagaaaataaaattgcacgaatcgagtcacaaaaatggttttcagatggcaaactttatataccaattttacgtggtatgcgtcctgttacagatatagataacagacaaccctatatagaacgtgctcgaaaagactattttgataataataaagattttaattcttcaaatattattacaggtgaaaatttatatcatgagctaaaagttcatctacttggtgaacctgaacaacgcgacttaattaggagctatgaagagaaattaagccaatatttttttgataatgaagcagtttctttaatacctaagcatgatcaagatgttgtcaatatcaagattggtacagataaacaattcccaatttcccaactgggtgatggcctacaacaagctattatcttaacttatgaagcatatataaaaagaacagacgaacagggtaataagcagacctttgcattttttatcgaagaacccgaactacatatgcacgcaggtatggttcgtcaattaatgaatttctatttaaaagaaacagatcattattatttttttacaacccactcaaatcaccttttagatatggcagatgaatcggatcaagtcataattcaaaaatttattaaacagcctaaagatgaaaataattttatttttaaaatttttcgttgtggacgagatcgagacttactttcatcattaggagtaaaaccatcatctgtatatttagcaaattgcacgatctgggtagaaggtattactgatcggctatatatcactaaatatatggagaaatatcttaatgatttagaaagctcaaatcctgatttatataagaagtatcgccgctttatgctaaattatcactatgcttttgttgagtatgcgggcagtaatttaactcattggtcatttgatgaggaatgtacacataatcaaggattaagtgcaaaagctataacaagtgaaatgcttcttctcgctgacggtgatataataaacaaaggtgatcgtgtaaaaactttaagaaaagaacttaaagcagaaaactactttattttaaaatgtaaagaaactgaaaatactctacccaaagactcaattattcgtgtagcaaaatctagattttctcgtatgaatagtgaaactaagaaaagttatgacatttctttaatagatgaaattacagatgaacattacttcgatcataaagagtatggcattgggaaattaatagatactcaaattaaaaagaaaacttctaaaactacaaaaaaagcttttgccgatggtgaaggtgtaggaacaattaaatataaacttaatttttgtcatgaaattattaaagatttcgaggcaaatccaagttggcaattgacacctaaagctaaagaaatatgtgagcgaatattcacacacatagaaaaatgtaatatttaa

SEQ ID NO: 48176 - DNA, 4203 bp, Acinetobacter baumannii
ttggaacgtgcaattaattttcttcaaaaatttgtagtgaccagttactccgaagatgcctatcaacggaatgagctaatagataaagttactatacttttttttgatcaacctattaatgtaatcaattttctaaagacctatccagttggctttaatagacttagacaaaaaattacagcttctcaactattgaatgatctaaatactcacggctttagtctcaaaattattcctaatgatgaaagaatcactactgttataagacaactttcagaagaattcgctaattctattgaacctcatttgattacccacaatgtaattccacgcccagaaattaatgaaattattgactctgtaaacgaaaaagccgtcactcttattaaagcagaagctggtatgggtaaaagtgttctcttactgaacctacaccaccagttacaagcacaaaatatcattagtattcccataagactggatagaaagcatcctgaaaataacatagaccaatttgggcaagatctgggctttccttcttcccctattagctgtttaaagaatttttcgaaaaatcagaaagtagttattattttagatcaactagatgcgatacggtggacaggatcgcattcaagtaatgccttagaaatatgtcgtcaattagtaagacagcttcttagcttacgccaagaaaaaattcaaattagtattgttcttgcttgtagagattttgatgtacaggaggatgcagccctttcaagttggatcagcagtctgaccagtcaccttaataaaattagtatttccaaattagatgaatcaatagtcagtaatctcattaaaaattatgaggtttatagttctctgactgaagaaaaaaagaaaactcttcagattcctttatggcttaatatctatttaacaattgcagaaagaatccagtccgctccccagtttacaaataagttagaattagtacggctatttagagagaaccgtttagatctcttagaatatagtcaccatattactaaacgagatgcgataaaacttatcgatactattgttgaccaaatgtctcgtaactcacgtttaaatgttaatgaaaatacattaccttcaggcagtcaaaatacattacaggctttaatttctgtaggattattatccaaacaaaacactagaatcagtttcagacatcaagctctctatgattatcaaattggccttaagctctttaatgaagctataacatctgccgataatctaattcaaatgcttggaaaccgtaatgaacaaaccctaacaatgcgtgagcatttaaaatatgctctcaaccttctacttgaaacagaccaaacctcattctgcaatagtattagagcaataatttttaatgaacatataagatttcatttaaagtatttagctctaaactcattgaaaaatataaaagatttaaaaaaaccagctaagcttttaattaatgacattattgccgaacccagcttatttattaattttttaaataatagctgttatgagaatgtcgccattttatcgtatctttcagaaaaaaaatatttgaatgactggttaaatagtcaaaatccagagctactagatattactttaagattacttagatcaatcgcagactattcacctgatcttgttctctctgaaatgacaccatttatagggaagtctgaacaatgggatatatatgtctataataccttatgctgggatatagcgaatgactcagcagaaatgtttgaagtacgaaaacagctcatactatcaggttgttatgtcaattttatcaactggaaagagctttctagaaaaagtcctttaaaagccttagatcttattgaattaatgttagaccattacaaagatatcatagagattgactactattcgaaagaacgcactaataagcccaaattttcaaatagagataactggtcaagtatcgaactagatgaaattattacacttgctgatataattcctcaagaaactcttcgaagattacttgatcacttatgtagtctcttaagtagcgataataatgaggagcagcattaccaatggctatctaaaaataacagatataatgataatcctatagctagtttaattaatggaataattaaactacttgaaaaatcagcagaaaagttaagtgatcaatctaatcttttgtttgaattaattcataattatagtggcaaccaaaatttggtattcaatcatgtatttgccagaattattattcatttatcactagattattcagattttgttatcgaatggcttttatctaatcctgaagtacgttttaagtgtggaaatacttacaaagaaccagcatggatattatctggaaaaataatagaaatattttctcctgcctgttcagaaaacttattccatgaattagaaaataaaattttatttttttcttcatttgattatgaagaggtaaaaatacagtttagatatagaaaacaaggttattttcttcattactggggagagacacagtacttcttactaccaaaacttgataaaaggagactctctatagagtcagaacaaatgatccaagtactcaatcgtaagtttagtaactgtaagccatcagacttttgtaaattatacgaaatgagtagtggatgggtaacttctcctatacgcgaacctaatcaactttcaaataaggcgtggatcgaattgattctcacacctgctgctgaacttaatccatttcgactaaaaaaaatgaatggaaatacgctggcagaagcaagtataaatcaattttctaatgaactaagtactgcgacaaagaatgaacctattcgcttttgccaattggctttaaccttacctcataatattgataaccaatatattgaagcattcttcaaaggcttacgtgactctagcttgacgaatgttaatgaacaataccgtgataattggcaacctgcccctattgagttagttgagcaagtattagcccatttttctatggtagatgatgggaatgccttaatagatttattggcaagtcgtataaaaatcttatctccaaaatatattgaacagattggatatttagcgataaattcaaaggatccaatacagggtaagcttaaaatatacaaccctcaaaagggaaatgatccagaaataatttctgctgaagaaattagaggcaataagatgagttgtgtaagaggtaaagcttattcggctattgcagatctcttttggaatgataaagaatatgctttatctcataagtattttgtaactttagccataaatgaccctcacccagctgtaaatatggcagctttagagttattggcccctttattaaattacgatgaagactttgcattcactcaatttctagacttatgtaataaagacttgaggatgacttgcggttatgaatcacattatttttttaataatggatttaaaggtaaatatcagaacgctatggtttcacttgttttaaatatgctaagttctgaatatcaagatgtacgtaaagaggctgcacgtcaaatttatgctcgttggtacttttatgacctttttcaagatgaaattaaaatcatttttaaagataacagcgttctaaaagaaggatgcacctcagtagttaaacaactactatgtgataggcacggtgatgaaaatttagaaaaactgcaaacttcttttgagatattagttaatgacaacaacaaaaatacattacattccattagtacttgcgctggacataatgggttttggaataagactaattcagtagagctatttaaaatatttgctacctctaaagccgctcattttaatctatatagtttatttcgttactttgaaaactccgctgaaagttacaatgtctatagttcatcacttttatcactaattatcaatataactaccaaatcaaccgatactagtgagtctaggaatgctaatttattagatgcggaaataataaaagttgttcaacgtctttatgatgaagcaaccgaggatgaggatagtgaaactcttaatatttgtttagatatttgggattacctatttcaatcagatacttactcttcacttgttctaagaacaagcaaccatatagaaaatggtcttttaagttaa

SEQ ID NO: 48177 - DNA, 444 bp, Acinetobacter baumannii
gtggcattagaagcaggtggttttgctgagaaactaggcaattattttgaaacgaactggattgcctatcaattcataagacttcttgaagaaaaaattgcttatgtcactgtagaacctataggcactgatgaagtaggtgttgatgtcattattgggcgcctcgatggaaaaacagaacatcatcaatgcaaagcaggaaatggaagtaatgaattttggacactttcagccttaaatagttcaagtatattaaaaaatgcaaagttccagattgaacaaggtactgaagagtttaatcttgtttctcctttaacttgtaaattaatggcagacttacgtttaattgcattgaattacaatggaataccacaagattttttaacttaccaaattaactctagtgcagaaagacaaaaggatttttcccaactatgtacataa

SEQ ID NO: 48178 - DNA, 594 bp, Acinetobacter baumannii
atgaatctggctttattcgattttgatggcacgattacccataatgataccttcagtttattccttaaattttctttgagtaaaaaaactcaaatattaggtggcatccgtcttgcaccttatatagcgggttataagcttgggtgggtaacggataaaacgatccgtactaagctctgccaagtgggatatatcggctatgatgcagcttctttgatatgcaaaggacaagagtttgctaaaaaagtaattccttcctgtattcgtgaaaatgctttagaacgcattctctggcataaacaacagggagatcaggttgttgttgtatctgcttcattaagtgtttacttggaaagttggtgtaaatctttagatctggatgttatctgtaatcaacttgaaatagataatggtattttgacaggttattttattgatggtgattgtggttatttagaaaaagtaaatagaataaaaaataaatatgacttaactcaatatcctataatctatgcttatggtgatacacctaatgattatgcaatgttggagttagctcatagaaaatattataaatggcaagagattaattaa

SEQ ID NO: 48179 - DNA, 837 bp, Acinetobacter baumannii
atgcaaagaggtgatttaccaacgactggagaaattagctttgtagttgaagctggtgcgctggtttcaagctcaagttcttatcgaccggaaaccagatttgtctataaattcgactataagtctagtcctgcaaaacgagagtatatcgttccagctgcctcagaattaccggcgatagatacaggggagttcccgcctgatctggtggtgaatctaaccattaaaggcgctgttgttggacgtggtggagatggcgggttgccacatctagcttacggagattgggaaaaagattcagacttcaattttaccaaaacccggcgtgatggttttcagggagcaccaggtttattgaaccggcacagcaaactaaacctgattatcgatggagggacgttagctcgaggcggctcaggtggtggagcaacaccaagtggtatttacactggatcatcttatggggttcagggaattcctggtggtgctggagcaccatttggtcgggtcatgactggacagccgatttcaaatgactcacaagattatcgcctctatctggagagttatttattggttatgaaaatcactgatgctgaagcttcggtacccggtaaaggttaccgaacccaaaatgaccgttatgggtctccattatcaggcgatggcggaaactggggcgaacgtggcaccaagtctaccaatgctggaacatggaactggcaataccatggcacaactgaaggtcagccggggccgggtggacctgcaattgttggggtggcaccgcttacaactcaattgattaatggggggaaaatcttacaaaccctttaa

SEQ ID NO: 48180 - DNA, 390 bp, Acinetobacter baumannii
atggaaccagtttccacaagcggtttaacagcaattttaaaattttatggtgcagcaataatggtgactttagcagtcggtttggttgcagcagtggtattaatgacacgtatgccgcgctcaccacaagagtgggcagtgggcttgatctgtactgttgtatcaagtcttgctggcggctcattcattattgtgaagtgggggcttcatgaatgggttactgatgtatgggggatgattgcacttggtggattcttctttatttgtgggattcccggctgggctttggtccgatggatttttaactttattgataaacaggagggcaagacaattgttgaagtaatcaaagaagttaagaaagccagaaaagacatcgaaaacacttaa

SEQ ID NO: 48181 - DNA, 579 bp, Acinetobacter baumannii
atgaaatttatcaatctacaaagaacacttggtgttgcagttgatggaaagattggacgcagcacccttacagccttatttaagaagctaggcgcaaatcaaagccgagctgaagaactggcattagctgctaacgtacacttcaaagattatgcgattctctacaatgagttgcgctttgcccacttcattgcacagcttgcacatgaatcaggaaattttcgatacatggaagaaatagccagcggcgcagcttatgaaggtcgaaaagatctaggtaatattatggctggcgatggtgtgcgttttaaaggccgtggaccgatccaattgactggccgtgataactaccaaaaatatggtcgagcattgggcattgattttgaatcacatcccgaacttgtagcaattccgagtatcggcttgctagtcgcttgtaaattctggactaacaacgggttgaatgaacttgcagatcgtgatgacgttttaactataacccgtcgcattaatggtggtacaaatggcttagttgaacgtaaagccaatctagccaaaattaaaagttggatgtcatga

SEQ ID NO: 48182 - DNA, 417 bp, Acinetobacter baumannii
atgcaatacgaaaaggtgcaccagataacgagctctgctcttaagttttttgaagaccatctaaaatctccaatgatatggcaagtttttcccagaaacttttgtgaggaagcaagtagcttactattaataattcttcaacaagaaggcataaatgattttaaactcatgaaagggacaaatattgaaaatgaacatcatttttggttagaaaatgatgagtatgttattgatcttacagcccatcaatttgatgaaatcatttcacccttcttgctcatagagaaaagtaaataccctttaagtaaagtattttcactggatataagtgaaattattgattttcaaaactggggtggactagatccatttaagcctaaaattcaaagtattttttatgtggattattacaaataa

SEQ ID NO: 48183 - DNA, 747 bp, Acinetobacter baumannii
atgcctcgtaccatgctgacagatcaacactggcaaaagttgaaagttattctgcgtaatttatccattcaccacaactcaaatttacgcaattttattgaagctattctctatagaattagaacaggctgttcgtggcgagatattccttcttgttttggtcattcaaactctattttcaaacgttttaatcgttggtcaagcagcggtaagttacttagattattcaaattaatagcctcatgccccgatatggagtggatttttattgatggctctcatgtacgtgctcatcaacattctgccggcatagcgaatcaatctatttctaaaagtgtaggaggaaactcctcaaaaatacatttgattgttgatgcacatggcaatcctattgatttcatgattaccgatggaaccacacatgatgttaaagttgcgcctgatttaatatcaacattagatttaaaagagacaaaagtggtatgcgcagataaaggctatgattcagaaccactgcgtgaacagatcaggaaaacagggactaaagcgaatataccaaagaaaacgaatagccaatcgaacaatgaccatatggactggtatttatataaaatcaggcatttagttgaaagtatgttttgtagattaaagcaatttagaggaatagctactcgatatgaaaagctcaaaagaaattatcaaagttctgttgccttagcctgtatatttttatggctacctttatag

SEQ ID NO: 48184 - DNA, 636 bp, Acinetobacter baumannii
atgtgcgctaattatgagccaatttcaaaagaccgggtacatctattagatctcttagaacctaccttcgactataagaatgatgtttatccgggttacgactgccctcttatattttcgaatgatggccacattgaatggcggcaagtaaagttcggcatgatcccaccttggaaccatgatttaaaattttcaaagtacacatacaatgcccgcactgagacggtagataaaaagcctagctttcgacatgcgtgggctaaaagtaagtttgcactaattccagtcgaaaagatctatgaaccgagatatgtgaatggtaaagcggaaagatggggaatttatcgagaggatggcttaccttttacagtagctgctatttatgattcgactgtgattgatgggcagcaagtaagatcaatgtcaatgctaactattaatgcagataatcacccttttatgtcacagtttcataagccagaagatgaaaagcggtctattatcgttattcctgacgagtatcgagaagattggctgaattgcaaaaaagaagatgcagatcaatttttctttgaaatgcccttaggtgaatttactgcagactacttcccaaaaccaaaaaaaagtgcaaattag

SEQ ID NO: 48185 - DNA, 438 bp, Acinetobacter baumannii
atgttctcaactacacttatggatttatcaaaactaagaaagcatctttgtgtacccttatttttatgtgcaattttgactgaattggcaatgtcaaagagtccatggtttttaattttaagtactctcggaagctcttccttatttattaaaattatggtctatatagtggtatgcattggacttggattaataacttacttctttgtagctttgattgaacaattactatttcaactagatatttatcttccaaatactttgtttttttgtagttatgcttttattggtttaggattacttgtaattggaaattttgtaacaggtctgccaagtggtgtttttaatactttttggcatttgggttttcttgcctttggtattgatcttctttcatcagatatttacttcaataataaaaaaccagtagaaagctaa

SEQ ID NO: 48186 - DNA, 270 bp, Acinetobacter baumannii
atgtctttatttttattgcataaaaaagttacatctgaattaactaatttttcagtttcagcgatgcgagccttccgtatgagggggctcgctttttttatttgtttttatgactttgctatgcattgggtgtcgtcaacgagtggaaagaatgggttccaagcagctatacgctttgtgatgttgatacgtttctcggtagagcacaaggcaaaacaacaatgtctatttgagaacgcaagaacgcagcttaaaagcaacgtgatttga

SEQ ID NO: 48187 - DNA, 2547 bp, Acinetobacter baumannii
atgaaattggtaatgattggtcatggtatggtgggccacaaattcatcgaagccattttagaaaaagcagatgatgaactggaaatcacgattcttgcagaagaacctcgtatcgcatatgaccgcgtgcatttgactgaatacttctcagggaaatcggcaaaagatttatctttagcacgctttgattttgctgatgcgtatggcattgacctgcgtttaaatactaaagcagtggcgattgatacgactgcacaaaccgtaacaaccaattatggtgatgtgattagctatgacaagttggtgctggcgactggttcatatgcatttgttccaccaattccgggtaatgaccgcgaaaactgttttgtttaccgtaccattgaagacctagatgccattcgtgcagcaagtttaaaggctaaaacaggcgtagtaattggcggtggtttacttggacttgaggcagccaaagcattacgtgatttagatttagaaacacacgttgttgagtttgcaccacgtttgatggcagttcaaattgatgacttagggggcaaggttttacgccgtaaaattgaagatttaggtgtaaaagtccatacacaaaaagcgactcagtctattgagtctggggtaaataccactcatgtgatgaagtttgccgacggtagtgaactcgaaactgatgtgatcttattctctgcggggatccgcccacgggatgaattagcgcgtaatagcggacttgcgattggtgagcgtggcggtattgtaattaatgattattgccaaacatcagatcaaaacatttatgccattggtgaatgtgcgctttggcaaaataaaatttatggcttggttgcaccgggctatgacatggcgcgtattgcagcaaaacacattttagatgaagagtgtcattgcttcgctggcgcagacatgagcaccaagttgaagttgatgggcgttgatgttgcttctgttggtgatgcacatgccatgaccccaggtgcattaagctatttctatgcagatgaacatgcactggtttataaaaagattgttgtaaatgccgacaaaaccaaattgcttggcgcggttttagtgggtgatgccaaagaatacaacgaccttttacaaatgatgttgaatggtctggctttaccggaagtgcctgaaagtttaatcatgccgggttttgagcaatcagcagcaaaatctggtggcagcggagtcgatttgctgccagacagcgcgactatttgttcatgtaacaacgtatcaaaagcagacatctgtcaagcaattagtgatggttcgacctctttaggtgcattaaagaaatgcaccaaagcagcaacagcatgtggtggttgtgcaccattagtgactcaagtattgaagtcagagttacaacgtcaaggtgtgactgttaacaatcacatttgcgaacacttcccgtactcgcgtcaagagttgtatcacttggttcgtgtcaatgaaatcaagacatttgatgatttaattcatcaacatggtcatggtttaggttgtgatatttgtaaaccggcggcagcaaatattttggcctcttgctggaatgatttcgtacttaagccaagtcatgcaggcctgcaagacagtaacgactactacctaggtaacattcaaaaagatggctcttactcaattgtaccgcgtatggcaggcggagaagtcactccggatggcttaattgcgattggtcaaattgcgaagaaatataacttgtacaccaaaattactggtggtcaacgtgttgatatgtttggtgcgcaagttcatgagcttccatttatttgggtagagttaaatgctgcgggctttgagtctggtcatgcctatggtaagtcgttgcgtacagtgaaatcttgtgtaggtagcacttggtgccgttacggggtagataactcggttggtttggcgattgaacttgaaaaccgctacaaaggtttgcgttcaccacataaattgaaaatggcagtgtctggctgtacacgtgagtgtgcggaagcgcaaggtaaagatgtaggcgtgattgccactgaaaagggttggaacctttatgtgtgtggtaacggtggtatgaaaccgcgtcatgcagaattactcgcatctgacctcgataaagaaacacttattcgttatatcgaccgtttctttatgttctacattcaaacggcagaccgtttacaacgtaccagtgtatggcgtgacaacatggaaggcggtctagactaccttaaatctgtgatcgttgatgactctcttggtttagctgccgagcttgagcgccgtatggaacacattattggtacatatcaagatgaatggcgtacagctgtcgaaaaccctgaggtgcgtaaacgcttccagacctatatcaatgcaggagtgaatgaacaagctgatccgcacattcaatttacaactgaacgtggtcaaatccgtccattaaccgatgctgaacgttcagaagaccgcattccaatggttgaagcataa

SEQ ID NO: 48188 - DNA, 1623 bp, Acinetobacter baumannii
atgaatattgtacaagacaaaaatatgcttcctgatgatcaatggattgacgtttgtgcactcgatgatttaaccccaaacactggtgcaggagcgctagtgggcggtcaagcggttgcaatcttccgtgtggggcatgaaaaacgtgtttatgtactgagcaataaagatccgtttagccaagcgaatgtgatgagtcgcgggattattggtgatttacaaggcgaacgcgtcgttgcatcaccaatttataaacaacatttcagtttagctacgggccgttgtttagaagataaagaccaaaaattggcggtttatccgagcaaaattgttgatggtcgtgtttgggtcaatgcggtgccgcaaaaaacttatattaccaatacaggtgtatcacaagacaaacttagactggtgctgatcgggaatggtttggcagggatgcgttgtctggaagatttactcgatatggcaccagaccgttatgaagttacggtgattggtgaagaaccatggggtaactataaccgtattatgttgtctccggttttatcgggtgagaaaaccattgaagatattatgttgcatccacctaagtggtacgacgataaaggcattaaatttattgctggtgataaagccgtaaaaattgatcgtccgcgtaaagtggtttacaccgaaaaaggccagacagttgattatgaccgtttgattctggcaacaggctcggcaccatttattccaccagttcaaggtgttgacctaaaaggggtgttaactttccgcgatatttatgacgttaacaccatgattgaatactgtggttcaaaaactaatgcagtcgtgattggcggcggtttgctgggtttagaagctgcctatggtttaaagcaacgtggtatgaatgtcacggtattgcatttaatggaccgtattatggaacgccaacttgatgggcgtgcgagtcaattacttcgtcatagtattgagcaaaaaggcattcaaatcattaccgaagccaataccgaagcgttaattggtgatgaaaatggtcatgtcaaacaaatccgtttgaaagatggcacagtgttagatgctgatcttgtggtgtttgctgtaggtatccgtccgaatattgctttggcgcaaagtgcaggattacgttgtaaccgtggtgtattggtgaatgacaccatgcaaacatttgacccaagtatttatgccgtgggtgagtgtatcgaacaccgtggtcaaactttcggtttggttgaaccactgtggggccaagcttttatttgcgcgacccatttagcagagcacggcagcttaacttttaaagcaccgaccgtaccgactcagttaaaagtcagtggtgtcgatgtattctcggcaggcaattttgaaccgaaagatgattatgaagacattattttaaacgatgaaaaacgccagatttataagcgtattatcattcaaaacgatcgggtaatcggtgcagtattgtttggagatactgaagatggcatgtggtatgcagagttaattgcagatcaaactcctgtttcttcatttagaaataagctgctatttggtcgagattttgcattaaaaaatgcaggctaa

SEQ ID NO: 48189 - DNA, 2781 bp, Acinetobacter baumannii
atgaatagtattccaagcgttgaaatcgatagctccgaccatgttgcaaaaacaactaaaacaacatgtccatattgcggtgtaggttgtggtgttagtgtaaacgttcaacaaaaacctcaaggacctgtggtgcaagttgagggggatgctgagcatccttccaactttgggcgcttatgcattaaaggtagccgacttgcggatactttggggttagaaacacgtctacttcaaccgatgtttggtcgtaagccacttcggactgtaaccacatggaatgcagcaatcaataaaattgccgataaattccagtcttgtatcgacaaatatggtcgtgacagcattgcattttatgtttcaggtcagcttttgactgaagactattatgtggtgaacaagtttgtaaaaggctatttgggcactgcaaatatcgataccaactcacggctttgtatgtcatctgcggtggcaggtcataaacgtagctttggtgaagaccttgtgccagcaagttatgaagattttgaacattcagacatggtggttttggttggttccaataccgcatggtgccatcctgtgctgtatcagcggattatgcaggctaaaagccaaaatccggatatgtttgttgtggtgattgatccacgttttaccagtacttgtgaacaagcagatttacatttaccgattttaccgggccaagatgtcgcattgttcaacggtctattccaatatttatatcaaaatggccatgccgatcaggcttttgtagaggcttataccgaaggtttgcaagatgttttggcaagcagtcagccagaagccgatattgaatatgtggcaaagcgtacaggtattgcactcgataaattacagcagttttttgaaaaatttgcacagactgaaaaagtaatcacgctattttcaatgggtgtgaatcaatcaagtcagggtgtgaataaggccaacagtattattaattgtcatttactaacaggcaaaattggtaagcttggtgctgcaccattttcgatgacaggtcagcccaatgctatgggggggcgagaagtgggtggcttagccaatatgctagcggcacacatggacttagataatcccttgcaccaaaaagtagtgcaaaccttttgggacagcccatttattgcaactcaagctggcttaaaagcagttgatttgttccgtgctgttgaagctggaaaaattaaagccatctggattatggcaactaatccggtggtaagtttaccagatgccgatcaggtgaaacgtgctttagagaaatgcgaattggtcgttgtgtcagatatctgtgccgatacggatactacggcttacgctgatgtgttacttccagctttaggttggggtgaaaaggacggtacagtaaccaactccgaacgccgtatttcacgtcaacgtgcttttttacctgcgccgggtgaagcaaaagcggattggtggtcagtgagtcaagttgcgaaaaaattaggctttaaaggttttgattttaatagtgctgttgatatttttaatgaacatgcggctttgtcagcacaagataatgcggacatcaatacacgtgagcaaactgatacgtttcgttatttcaatttaaaaggtttaatgagcctaagtactgctgagtacgatgctctgcaaccagtgcaatggccagtatgggataaaaaccaagacgctaaagccgttcaacaactgtttggcaagggccagtttagtcacaaaaacaccaaggcaaaattgattccgactgttgctattaatccggtacatgcaatttcagaagattatccgcttattttgaatacgggacgtattcgtgatcaatggcataccatgacccgtactggtttgtcgccaaatttaaccagtcatcgtgctgaaccattctgtgagattcatccaagtgatgcattgaagtttggtgtacgtgaacaaggcttggtagaagttcgttcgaaatggggcagttgtgtactacgtgtgacattctcatcgggtgttcgtcgtgggcaaatttttgcaccgattcactggactgaacaggtcgcatccgacgcccgtattggtaaagtcgtgaatccggaagttgatgcaatttcaggtgagcccgagttcaaacatacgcctgtaaccattcagccgttctataccacttggcaaggcgtgctctatattcgtgaaggatacgattcgcacattcaagaatcgctacatcactgtgcatggtggactaaagtcaaaatggtgaaaaccaatcgctatgaacttgcagaccgccaaacttttcatgatactcaaaagaatctgaaaagctttttgccatttgctgatgaaacctttgaatggttaagcatagaagatatttcttcacagctgagccatagcgttattttgaaagatggcattgtaattgcaagtctatatattgcaccgccagatttattgccagaccgtgactgggtagcaagtctgtttaaacgagaacgtttgagcgccttgcaccgtaaagctttactagcaggtatgccaatgtcggctaccaataatgatgggcctttggtgtgtagttgttttaaagtaggtaagaataaaattatcgaagcaataaaaacacaaaacattacccatgaaaaacaggtcactgcttgtttaaaagctggtggcaattgtggatcatgtttacctgaaatccgtggcttaattaaagcttgccagcaagaggtagaagtgtga

SEQ ID NO: 48190 - DNA, 1782 bp, Acinetobacter baumannii
gtgaattttaaattaaaaacatcactcattattggagcaattgttgcgtcttcacttgtatatgccgcaactgtactttcaccaaatcagaataataatagtggatcaattccatccggttattcagatttagaatttaatctagcaaatgggaattgggtcaaaaacctcactttacccacaagcgctaataatttggataaaattacaattcgttctagtgctgcctatagtagctatttagatacttctaatacgaatattccgttagaagtattaaaaataaatagtggtgatgtttaccaattcatctttaatagtagtcaaaataaatggattgctcagttagcgacagtgagtcctaccaatggtgcgacctatgaagtcgttccattaacaactgcatctatgcaaaaagtacttattcaaaatgaaaaatgggcacaaaccatagcattaccgagtgatgtacgtgatggaacaaccgtacaagttgtttctacagcaagtgccagttcggacattgataaaacaaacttactattcccgagcagttttatattaaaaaatggatctgaatattggtttaaatattattctgctttaggaaaatgggttcctgaatatataaagcctcagaagctaaatgttcagcaaattggaacgtcattagcgacagttaatagtccacttacagaagtttcatttggagatggaaactgggtttccaatttcactttgccgaccactgcaagtgatcgagataaaattattattaagtctacagcgacttggtctgcaaaaattaataatactaatattaatagccaagcgaccctaacgcttaaaacaggcgatcaatatgagtttatgtatgtaagcgacaaaggatattggcaactgatctcttcacctacaaaggtgattgattctacagcaacaatccctgcaactttaccgaatatgactcagcctactttaaaggtaaaactttctacctcaaattggcagccaaccttacaattacctgctaaagctcaagtcggcgataaagttgttattgtgtcaaatgcatcggcagacacctatattaatgctgctaatggcttgtctaccgcaattaaaaatggtgaaaatcgccgttttatatacaccgctcaaggctggacagtagatagttatacaattgatatgttgttggtttctagcccagaggtaaactcaattttaggagaaagcgctgctaaacttagaatgattgaaggcgtaaatttaacgaatttaactgctgaaaattcgaatgcacgtttttatttaagagatgtaggttatctaacttataaaatccctgctaccactttaaaagaagcaatctcgactggacgagatgacacctcggtacaaaatgagcgtaaacgtgtattggcagacggtgtctattatcaaggtaatgaaccgggtgatggcggttgtggttgggcttggattaatgcttctgcatataacatgattggcgcaaatgatattgccggttgttctttcgcggccatgcgtcatgaagtcgggcacaatcttgggctataccataatggttcaactaatattggctcaggttttgcccatccgttaggaagtactgcaatgggtggtaataacattaatttttattcgagtccctatctatataaccctaaatatggtgtacgtttaggtgtagatggaaaaattgatgcggtcagtgtcattaatctgaatgcgcagaaaatttctctatataattaa

SEQ ID NO: 48191 - DNA, 522 bp, Acinetobacter baumannii
atgagtcaaactcctgaccctaaatatagctgggtatttcaaaagcttactgaaaatgatcaggggtacaatcttgagagtattgttgcctacacaatttataaaaagcacaaaatagattttattaatcaaataaaatcgcggcatcaacgagacccaaacgatcaagagtgggaaacatttcacacacaatgtgaacttgactcctctttaaaaggttatcgagatcaagcaaatatagtcgttagtaatcttttaaatgttgcattaagttccgaaatagcagcccttgaagaccaagcactacttgattcaaaagttaaagcccaactggaaatagttgaaacaaaagtgaatacaatcaatggatttataacagaaaaacaaggagttggttggtggtttagtgaagtaggtaaaaactttcttgttaatattctaacaatctttttaattggtggttttgcaacctttgttttaaattttaataaagtctcagagtggtttggaaaaatcttttaa

SEQ ID NO: 48192 - DNA, 189 bp, Acinetobacter baumannii
atggaaaaacgtaaacgcgtctttactgtggagagtgtccgtcgtctcaatcagatgctgcgcgataatcctggtatcacagcagaagatattccattgtctgcggaaggtcgaaaagttgttcgtaactttaaaccagatatggaagcagtgaatgcagctttcaataaggctatgcaagggttatga

SEQ ID NO: 48193 - DNA, 171 bp, Acinetobacter baumannii
atgaaaagatctattcaaatcatcgaacacacgcctatccttgatttagaagcgtttttaaaacgtcaaaaacaaatcaaacgttccaaattcctcaaaaatctctatgaaggctctgcatttatttgtatggtcgcgtttacattctcttttctttttctagggaagtaa

SEQ ID NO: 48194 - DNA, 567 bp, Acinetobacter baumannii
atgcaaatcaatgacaatattattccctatgtgccgatcgcgccccgggttcaggcaacaaacgaaaaaagccgtttactctgcgaacaattatttttgctcatagatagtgtgaccagcagtcaaatactttttaaccatcaaactgataagggattcttatcaatttgccccgatcaaattaatgatttgattgaagagttgtcaaaaactgaccattcattcaaaaaaatcgatataaagttattaaattcgtcgctaaaagatcttatttatcctaagtttaatggagaacacaccattatcagtccgatctggaacaacacagaggtacgggtttggcaatttcaattaaatcaaattgctaatggggtaaatatggaacttttagataaagatgcagaaatcaacttagatatggctttaagtactatacgcatctggcgtaattcactagaagttggttctgaaaacagagatgtgatttataaaagaaatgacttaatttacaagttaatggacttagagcatcggttgcaaatagtccagcgtgagttagaggaataa

SEQ ID NO: 48195 - DNA, 345 bp, Acinetobacter baumannii
atgtccgaaaatttggctgtagagattacacaaaggttcacagaagagctggaacgtaagaatttgaaagcaaaaccactttcaagaagtattgatgcccatgaaaatacgttaggtaactatgtccgcaacaaagtgcctgaccaatgggtatatctagcgaaacttcaaaaacaaggcattgatattcgttatgtgctgttaggaattgatcccgactttagcggtcttacgagtgaagaaagtttattattaaaagcgtatagacagctcagcaccgaagctcaggaagctttactgcgtttaagttcggtatatgcaaaagaagtcgaaaataaagaatga

SEQ ID NO: 48196 - DNA, 210 bp, Acinetobacter baumannii
atgagtacagaaacttcaccttctaatcgttcccgatctaaaaagatcagcggtggtcgtgttgcttgcatcgtttacttaccaaaagaagaagtacaggaaatcgataaagaggtcgaagaaacggatacaagccgttccagcgtcatcgcacgaatctattacttaggtaaaaagcaaacatcaaccaacgaggacccaacccaatga

SEQ ID NO: 48197 - DNA, 234 bp, Acinetobacter baumannii
atgagtctaatgaaacaaaaacgggataaccgttacaacgtcaatctaactgatgatgaatctgaactttttaaagttgtctcacggcttacaggtgttaatcctggtgtaatcatgcgtcagcttgtgatgaaacaagctttagctttgctaatcgcagaagacattcaagataactttagcttagagacctacttaaacaaaggcgcatcagatcacctttctaggagctga

SEQ ID NO: 48198 - DNA, 183 bp, Acinetobacter baumannii
atgcctacacaggaaatagctcttacggataaagagaaggaaattgtacaggaagtacaaaagtctttaggtctaaaaaccattgaagaaaccattgagtaccttgccagacaaaggatccaagaactacttggaaaattagcagggcaggaacttagaaagaaaaatcggcatttattttaa

SEQ ID NO: 48199 - DNA, 2718 bp, Acinetobacter baumannii
atgatgtttccagaaaccaaagctttagtagtagaaaaattgaaagatgtctacggctttaaagtaaagggcaacgataaattgcgtggtagatgcccagactgcaaccacaaggaagcatcagcttgggtatatcctgaggaaccgtgggtagttttctgcccacgtaaaaacgaatgtggtaaagaaaaccacattcgtgatttattccctgagttatttgaaaaatgggaaaaacgatttgaaccaactcctgaagatccaaataaaactgtaaacgcttaccttgtcgaaggtcgtggattccctttagaaccattaaagggtctatatacacaagaaagtattacccgttataagcctaagaaaaccacttctattacattaaggttcccaatcacagatgaagaagggaatccaggatggtggcaacgtgttctagatgaacaaggcgttttgccaaaaaccacatttaaagaagaatggtcttcagcaggccatgcatggatgacaccaaatacaaattatatcgagtcaaaagagatctggattactgaaggtatctttgacacgatcgctctttggttatcaggcattactagcttttcagctttatctgctggaaattaccctaaaattttcctcaatcacattgcaatgaaatgtgctgaacaagagctgccattaccaaagcttgtgtgggcatacgacaacgataatgctgggcatgagggtataagaaaaaacatagcattagctgaagaactcggcttcgagtctgaagctgcacttcctcctagtgggcgtaaaaaaacagactggaatgacctttataaacaagatcgcctcaagttttcagatttagaaacttataaatattacggttctttattaatcgctgagaaacctgtggataaaggcatacttatctacaagcgttatggtaccaagtcatttcctttcgatttcaataactgcgtctattggttcaaattaaacatggacaaatacgatgactatatgaaaggtatcgattttgagccgagtgataatgaagattgggcacaagaggaaaaagaccaagctacatctgaacgtcgtgaagcagctattcagcatgctgcagatgtagaaattatgatggaatgccgaccacatgggctttactaccaataccagaaagaaattgatgaagcagattattacttccaaatagattttccgcgtggtgcgaagacgattaaaaatacatttagtccttcccacatctcttcagctccagagtttggtaagcgacttttacatgttgcacctggtgttttttatgaaggtaatagtaagcaactactcgcatttttaaagcgtgagctcaaagatattaagcgtgttcagcttattgattatgtgggatatcacgcagagcaaaaaacctatgttttaggagagttggcataccaaagtggcaagcaatatacgatcaataaagaagattattttgaactaccacgccataccaacctaaagtgtaatgctccatttgcattagaaataaacaaaaaccaagaagagtatcaacaaacttgggttaaagatctcattgatgcctatggcgttaaaggcttaataggtttaacagcattttttggatctctttatgctcagcagatccgtaaaacacataagtcatttccattcgttgaactagtaggtgaacccggtacaggtaaatcaactttgattactttcctatggaagttgtttggaagggtaaactatgagggtttagatcctactaaaacatccaaagcgggtttaatccgtactttacgccaagtatccaaccttccagtcgtatttattgaatcagatcgccaaggtgaaaattcatctaagcaattcaactgggatatgtgcaaaaccatgtatgacggtgggtcactaggtgcaatgggtgtgaaatcagggggtaatacaacatacgaaccattatttatgggtactttgatcattagccaaaatgctgaagtactagcttcagaagcaatcatgggccgtattgttcacgttcatttttataaagaccaacttagtaaatcgagcctatttgcatcacgtaacttatcaaaatatgaacctgagaacgttagccaatttcttttgcaatgtttaagcaaagaaaaagatattttagatgccttcaatatgggctatgaaaaatatgatgcgatgttgcaccaggaacaatacaacattcaaagttctcgtattgttcacaaccatgcccagcttatgtctctatttgatgcgatgtgccgtcatgtaattgaagtgccggcacaagtacaaaaacaggtgactgaagaatttatcaagatggctcagagccgtgacaaggtcctcaaatcagatccagttattgttcagaacttctggaacacgattgaagaaatggaagactccatacgaaaagttgaacatgcagaaagcgtcgtcaaccactcggctaggtcagacattatggccatcaattttgctcatttatacaagattgcagcggattatcgttatgcgctccctgaagtaaatgagcttcagaatgcgcttcgtcatagccttcattaccgcttcattgaagccaacaaagccatacaaagcaaaattaccaattcaacaaaacggtgttggatctttgagaaaccaacatcacaacgggattaa

SEQ ID NO: 48200 - DNA, 342 bp, Acinetobacter baumannii
atgcaacaagcatcaatttttaaagggccaacagaactgcctgaatcagacaatactttagtggtgttttttaaagatggcagcatgtcttcaccagttagatattgctcaagctgtgaagagtggcattcaccagcaggagatttaagagaatcaaatattcatcaatgggcttacaaagatgaattttatgaagctttgaatattccaaaatttgaaggagaacgcaccgaaaaagaatcaaatgcaggaaaagatcgggcagctgaaatgctatttaagttagtacttctttctgctttgtcttcagcaactaagcaaaaatcacattcatttttctaa

SEQ ID NO: 48201 - DNA, 543 bp, Acinetobacter baumannii
atgcaaaacgattctaacgtagaaaccactcaagcggaaatcaaaccatttccacgtcaactaatcagcgacatgtgggattcaaatgtcacttttgacactatccttcatattcctactcttttggcatctagttcagaacaggtgtctgataaattccaagagtttcttgatgatgcctatgaagaatggcaaagctccctactacttgagcaatgtccagctcttaaatcaacattaaaggaaatacgtgaaaataatgacataaaacattatgcaggcgaagtattgcaagactttcaccgtgcttgcggtgattttgaattcttaattgagattgaaatcagaataccttttaacttccgatttgataaagatggtaaatatcaatcaaacagtttaggtggttctttccgtgtgcaatggatcttggcaaaaaacatggttgatgctgctcaaattgcgataaaaattgctgaagaacttcactcagtagaagaagccaaagctcgtaaagaacaaggcttggaggctcaatcatga

SEQ ID NO: 48202 - DNA, 519 bp, Acinetobacter baumannii
atgaaatattcagtcgatccaaagttcaaagaatattacatagaattagtaggcgaagaaaatgcagatttcacagtagataaaaatggtttgcttgaagatcgtgatgcatttttggcgcatgcatgctgggaatacaaagaaaatcaattaaaggcctatcaggagcagatagaaaatttaaagcttcaaaatgactgcatgattgatcaaacatggttcatgaaaggcacacctgtagcaaatcttattaaacatgctgaaggtgtttataaagctgaagtggcagcgcagaactccaaaatcaaatttggcactgatgataatgaacattggtttgcttatgaggttccattctttggaactgttcaaatcgaccgtatcgaagagcacggtttagttgagtgggatatccattttaatgaatgttggcaagggccctttaactctaagcaacaatgcattcagcacttagaagaatgtattgctgaaaaacgtcaagaagttaaggagggataa

SEQ ID NO: 48203 - DNA, 270 bp, Acinetobacter baumannii
atgtctacaaaaaaataccaggtacgtattcgtaaagatttatcaaatagcccaattcaacaaaaagcagcttcattgcttggggcttgtgctgtttcagaaatcagaactttgattggaaactttgaaagtcttaaagatgcatttgaaaaaatggcaactgttaaacgtctagaagaatacgaaattatttcgatcatcctaattgatacagataatagcgaacagcttggcgaagattttgattgggagaatgaaagccatgtctaa

SEQ ID NO: 48204 - DNA, 333 bp, Acinetobacter baumannii
atgtctaaatatcattgcaagtgtggtggcctaaaacttcctgattttgaatcttacaaagtaggtgatgaagtcaacttcatgatccaaaaaagagaaggtgtgtatcaggggaaaattgccgttagtcaaaaagcacataacggcacaatcactgaaattaaaggtgatgaaatcaccgttaaaactcgtgtaagaacctatgttctatacagatatgaaatgactccaaaggaagcaccaggaccaattgattattttcggattggtcaatgccgatgtgagcttgataaacaaggtaaaggagggaaaacacatgcagttcaaccttaa

SEQ ID NO: 48205 - DNA, 741 bp, Acinetobacter baumannii
atgacagcactaatttttgatactgaaacccataaactgcatggcgatatcattgaagcagctgctattgaagtcatttttcccagcttcagaactgatattccaatcatgcaaacgatgtttgatttcactaaacgttataagccaagtgaaccaatttctatagctgcaatggctgtgcaccacattgttgatgaggatcttgagaaatgcccatcttttacgaagttccaacttccaaaagatgatgttcaatacttaatcggccataacattgattatgatattgctgcaataaaccgtgcaggtgttgtgactaaaggtattaaggcgatctgtacattggcaatggccagatccttatggccaacattggaatcacataacctttctgcgcttgcgtaccaaattagcaataatcgtaagtcgactcgtcgtggtttgcggaactctcattcagctttaaacgattgcaaaactacatattcacttttgcttgagattgtgcgaactaaaggcattaaatcctttgaagagctgtatgagttttcagaacaggcaagatacccaacccatattttttacggtaaatataaaggttgggcaatcaaggatatggatgacagagatattcattggttaatgaacaaaactcttgatggatatctccatatggctctcgaaaatgaactactttctagaaatagtatagacgaagaagacgaactgccgttcgtttaa

SEQ ID NO: 48206 - DNA, 1161 bp, Acinetobacter baumannii
atgtctgcaggtttagaagttcgtggaaaatcgatgcgaatttggatgcgtccgatcgcaaacgaacccgtcattaaagaaacgttagactgggaatttactccagagaatcaagaaagagcagaaaaactggccaacttaataaagctagaaatacagctggagcaattcagcttggccaaacattttccaaactcaaaacacttaaaaaagaatcagattagttattatgctcagctttacttgagccaaacaattaaagaagttgcacccagtacttatgattcttataaaggccatgtttacaatcatatcattccaaaatggggccaaattaacccaaaagatataaatacgaacatgcttaaaaagtggattgagcagctaaaagatagtctaaacaataagaccgtacgggaaattattactcgtttttctcagatccatgcgatatggcgcgatgaaagacaaatgccttacaacccatttgaaaacattgtaattcatcaagtagatacgcctgagccagatccgtttagcaaagtcgaaattgcaatgatcttaaacactgaaacggatctcgatattcaaaacttgttgccttgtctattctggactggcctttcgatgtctgagcagatcccgatcgcttgggaagatattgatctggagaaaggtaccattcaaatatcgagatcttatgtccggggaatttatcgcgtaactaaaaatcgacgcagaaaacggaaaattaaattactggagccggcaattacggctctcaaaaaacaatatcaaatcacaggtaatgctcgagcaaaaacaattgaagtacttcagcgtgacaataagaccaggagagccgaaaaagttcgttttgtctggattaaccacgaacggtcaaatcattttgaatatcatgaactgcgctatcgttggaataaacatttaaagaaagcaaaagttcggaaacgtggaattaaccaaggtcgacatacctttgccagccaacttttaacgtctggccaagtgcctccagagtggattgccgagcagcttggccacagtgatacatctatgatttacaagcattacggtaaacttatcgctgaagatcttcccgactacattaccaagctaaataactacatcacgatgtaa

SEQ ID NO: 48207 - DNA, 210 bp, Acinetobacter baumannii
atgctgctgtacattacttccggtaaacccagaacagctcagcaaaaatcatatttaatgcagcatgtgacagcacaactccaccaggaacttaatattccagagcaagatgtcatgtttgtgattgtgcaaaacagtgctgaagattggtgctttggtcatgcacagcgagcagatctttacttaaaaatgttagcttcgaaacagtaa

SEQ ID NO: 48208 - DNA, 810 bp, Acinetobacter baumannii
atgaaaacgataaaaaatgtgacccaaacacaaagcttgcagcaagggtcaatgcttaagcaatacccaagagccaaagatctctcattaattgtgtgtcactgctgtggggttgtaaattctgctcaaaatgacaagagacgactcaaccaaagccatcaggtattacgttgtactcgttgtaatagtgttctgcattcacgtaagccagcgagtttaaatcgaacttttgccttagtggtagctgcgaccattctctatattcctgccaatgtacttccaatgacggtgactgactcattgttaggtagccagcaagataccatcttgagtggggtcatttacttttggcaaagtggagactatctggtttcagcggtcattttcatggccagtatttttattcccatgctaaagctactaattttgtattttttattggtggcggtatatcttcaacaatcgtcagcttggaagtttttacctgagcaatgcgttaaattatatcgagttgtcgagtttattggccgttggtcaatgattgacgtatttgtggtcgcacttttaacagcgctcattcagattcaatcacttgctacgattttagcagggccgggttcgatcgcttttggtgcagttgtagtgctaactatgtttgcatctttaagttttgacccacgacttatttgggataacttctacgcatctcaaaatacaaataagccttcttcttttgcctcaaacaaaaccaagattattcaggcagaacacccgccgttgaataatgattccattaatcccagtcaataa

SEQ ID NO: 48209 - DNA, 708 bp, Acinetobacter baumannii
atgaaaaataaaaacactctatcttttcaacatcctaaagcagccaaatggctgcttgggagcggcctgtttttaacggcagttgccatgacggcatgttcgagttcgccaacgccaaattattatacaatgtcccctaaaattactgcggctacaaaatcaactgtgcaagtgattgaggtattacccgtcgggattccagaccgattggaccgagcgcctttggtgctccaagatagtagtggtaagtctacggttttaaataatgaacgctggacatcaaccatggggacgcaattacgcgatactttgtcggcgggtttacagcaaaaattaggggcaatcgacagttatagcagtggactagctggaaacaaccaacctttatatcgagtttctacagacttttctcattttgatattgtagataaaagctatattaatattgcggtgtcttgggtggtgaagcgtcaaataccgcccactcaattagagtcaaataatgcaaaagtcatcacgaatgcaggatctcagctcaattgtcgaattgctttcaagcagccgattgatcaaaaaactaaaaagatggatgcgattgtgaatgcctcaagtgaagcaatgactcaaattattaatacgatttcttcttcaattgttgcattagattcaaacaagaaatcggttattagcaatggtgtttgttcataa

SEQ ID NO: 48210 - DNA, 1407 bp, Acinetobacter baumannii
atgtctttttctatgactaaacttagcgcagcacttctcctcactagttctcttgtgggatgtgccgctgtagtaaaaacaccttaccaagcaccagctgtacaagttccgggcagttttcagtacgataaggctaaagctaaaacagtatcagttgagcaatattctgaccgttggtggacattgtttggagatgcacagctcaaccaactcgtaactaatgttttagagcgcaatagtgatttggctgttgcgggaatcacactcaagcaagcacgcttgcaagctgatttaaccgcgaataaacaaggcttacggaccagctctagtgtttctacagggcattctttcgacttaaattcgggagatgacagtgcgaaaggtttatcaatgagtgctggggtgagctatgaacttgatttgtttggcaagcttgctcgtcaaactgaagcaagtaaatgggaagctttagcgactgaacaagaccttcaagctactggtcaaagtctgattgccactactgcgaaactctactggcaactgggctatttaaatgaacgttatgcaactgcgcagcaaagcttagccacttcacaaaagctttatcaattggttcaaactcagtataaagcaggtgcagtttcaggattagaccttacgcaagcagagcaatctgttcaaagccaaaaagcaagtttaagccagattgagcaacagcttgttgaaacgcgtacagccattgctgtgttattgcatgagccagtacagcaactcaatattcaagagccacagcgtttaccacgtacagcgctgcctgctattggtgcgggtttaccagcggatattttgtcacgtcgcccagacttgcaagcagctgagcttcgcttgagaaaagcactagcaaccaaagatgctactaaagcaagctactatccgtcaattagcttaaccagtagtttaggttcaagcagtacatctttaacagagttattacgtaaccctgcccttacgcttggagcgagtttaagcttaccgtttttgcaatataacgatatgaaaaaagatatcgcgattagcaacctagattatgaaaaagcgattattcaatatcgccaaacgctttatcaggcttttgctgatgtagaaaacgcgttatcaagccgcacagaactcgacaaacaagtagcgttacaagagcgtaatgtcgaacttgcagaaaaaactgaacgtttaactgaagtccgctaccgttatggcgctgttgcgttaaaaacacttcttgatgcacagcaaactacacgtactgcgcgcttgagtcttgttgaaaccaaacaaagccaatacaacgcttatgtcacccttatgcaggcattaggcggttcacctgtaaaagaactgccgcaataa

SEQ ID NO: 48211 - DNA, 1005 bp, Acinetobacter baumannii
atgctcgatacacgctatcagatttttatttcaacctcaggtcgcgagatgcaacctgagcgtatggttctttcccaaactttagtcaatatgggattttttgcttgggggttagaatatagaaatcctctaacaacgacgcttgcccgtcggcaaattgatgaatcggattatgttgttttgctgctgggtagtcagtatggggagcaatcaatttcaggggcgagttatttttctttagagtatgaatatgcgttaagtcgcgtgaagcccattgtcgtctttatgcatgaacaacctgaaagtcgtgatatgcatttacaagagactcatccgcagcttaaagagaaatttctggcattccgaaaaaagttattacatgaagcgaatcatattttttattttaaaagcccacgtgatttagaacttgctatccgtttaaatatgcctttaatggttgaacaatatatggggcaaggttgggtgcctgcacgccaagcgcatcatttggaagatgaaattaaccgattaaaaagtaaagttttacaattagaacaacagttatcagagtcatcaattcaagcaaatgaagtggcaccgcaagatgtttttgcttttgaatatcaaattcaggcttttcaagatggtaactttaaagagcttaagcgtcagagacaaatgacttggtctcaactgttaagtattttggctaaacattttgagacagccatgccagaagagaactttgggacttgcctcaatgagtatttaaatcaggacgggttagaagacgctcgccaagagttgcctagagcccatgcagtggcaggtgcacaaattaatcataaagccctgtttcgtattaaaaagcaaatgcaatcacaaggatggattgttccaaccaagattgatcaacaacatagtttatggaaagtaacgaccaaagcccaaaagctcttgctcagttataaatggaatcatcggagtactcgattaaaagcttag

SEQ ID NO: 48212 - DNA, 459 bp, Acinetobacter baumannii
atgaaactcgcagaagcacttttacttcgaagcgatcaacaaaaaaagctcgcttcgttaaaacaacgaattaatgccaatgtattggtacaagaaggtgatgaacctagtgaagatccaaatgagctcatcaaacaagtattcgctttaacccaggaaagcaatcaattgatttgtcgtattcatttgaccaatgcacaagcaaaactggaagatggcaaagtattgttgtccctattaagcttgcgcgatagttatgctgaacagcataagattttaatagatgcgattgccaatacacatcgagaacctgatcgttatagctcacgtgaaattaagtggaagaaagtcattcctgtttatagcttacaaaagcaggcggatgatatcagtgcgaaactccgtgacttaaacgttaaaattcaggctactaactggcaaattgatctaatcaattaa

SEQ ID NO: 48213 - DNA, 699 bp, Acinetobacter baumannii
atggccttttcatggacatgcccttactgcaaccgaaatgcgacaattacagattcaaatatttctagattcttaaataagtttaacaataataaatatggtttggttggaattgaaatagagtcaattacttgcccaaatctattgtgtaaagagtcaaaaatcaccgcaaggcttgctcctttgtcaggaaattataatattccaaccctaggaaaaactattatttcatggaacttaaagccaaattcatcagctaaaacatttcctgattatattcccaaagccgttttagatgattataacgaagcatgtttaattcgtgatctcagtccaaaggcatctgcaactttatcaagaagatgcttacaaggcatgattcgagattattggggtgtatctaaaaataccttgaatgaagaaataaaggctattaaagatcgaatcgaccctattatttggcaagcaattgatgctgtcagaaaaattggaaacattggcgctcacatggaaaaagacattaattttattattgatgttgaaccaaatgaagcccaaatgctgattggtttaatcgaaatgctattaaaagagtggtacatagctcgatatgaacgccaaaaacaattagaagatttaattggattagatgtgattaaatctgaacaaaaaaatattcctaaattggtgaatgaataa

SEQ ID NO: 48214 - DNA, 1140 bp, Acinetobacter baumannii
atgctgtacatatggatgcctgaaaccaatggagtttggcattggtctaacggagaaaactggttgcaggctgcaagtctcgatcaattaatacaagacttgcaaatacatcaaggaaaagaagctacggtcttttttccgagtcgtcatgctcaaatgcttcagcaaacgatggcaaagtcccattacaaacagcttggcgctgatggggttaaatatctacttgaagagtttgtgactttgccgattgatcacatgaaagtggttcaccattttcatgcggatcagttaactgttttgggtgttgctcaggggatggtagagacatggcaacattctttagctttgttaccaaccaaacttgtggctttgttgccagattttctagttttacctgaaccacaagctcagcaagttattctgtgtaatattggtcatcagcttttggtgcgtgagaataagtggttaggtaattctattgatgacttggggctttttttagagttccagtcagccgaaacacattatcaatatagcggtttaacagcagagcaactagagagcttagaagctgcctcaagggcagagcaacgttctgagtttgtttatcaatttcagcccttagataaaactaagcagcatccttttaatgttttgccaaaagcaaaagggcaagaacatactttttctaattattggaaagcttgtgccgccgttgttctagcaattattgtcgtgcagtttagctatgatttattgcgttgggtaaaattgaaaaaggtggcagatcagactgctgaacaggcaattgagcaatataaatattggtttggtccatctagtcgtgtgactgaacaaaatattaaaggacaattcgaaagtcatttaagaatgagccagcaaggtgatacccaggcactttctctgttaagccgggttgggcctattttaatgcaaagacagattttagctcagcaactcaattatgatgcttcaatcttaacaatggcattaaaagcaaaatcagcagatgatttgcaagctttaacccaacaacttaatcaacaaggttttaaagctgagttaggtaatgttcaagctgatggtagtggtgcgattggggtggtgaaaatacaataa

SEQ ID NO: 48215 - DNA, 480 bp, Acinetobacter baumannii
atgaaaatgttagctcagttgcaaaaccgctttgatcagtggattgaacaaattgttcaatatttagatcgcttaactgtccgtgaacgtattatggtggtctttactactatttttgttgtagtcgtcattgttggatattcactttggaaaatgcattccttggcagaacaacagcaaaaacgtttaaatgatttaaaagatttgatggtgtggatgcagagtaatgcagtcacgatgaagcctgccaatgagcttgaactagataagtctggaaaaatacaacgagtagctcagcaacaaggtttaactgtgtcttcccagcaaaatggagaacagttacaaattgttgtaacacatcagaattatgcaattttagctaactttttaacacaacttgcacagatgggcttaagtatacaaaagatggaaatggtttctagtgaaggtcagattaaattaacagcgacagttcaataa

SEQ ID NO: 48216 - DNA, 783 bp, Acinetobacter baumannii
atgccaacagttattgtagaaaatgatatttcccaatgggatgatttaaccggtgaggtttatcattttcctaaaagatataaggacttactcttaactggtgaaaaggttatttattacaaaggcaggatgaaagataaaaattttgaatctcgtcgactaagtaagtttcctcattactttgggatcgctgaggtaggagatgttatttccatcaataacggcaaagaactcttagcggaaattatcaattttaggccttttactcaagcagttgattttcagataaataatgaatatctagaaaaaattcctaaaaataaggaaaagaattattggagagatggtgtacgaaagattgatgatgatacttacaatgcaattataaacctggcgaatttaggacctgtttcagaaacaaaaaaactattatctaatgaggataaccagaattttgaatctggagtagaaggcaaaccaactctacaaattactactaagtatgaaagagatcaaaagcttagaaaacaagcaattttaattcatggttatacatgtgttgcatgtggctttaattttgaagaattttatggtgattatgcgaaaggatttattcatatccatcacatagagccgcttttttcagtaggtgaaaaagtagtaaatcctgagacggatctagtcccattatgtgcaaactgccatgcagttattcatcgaaaaagagataaaacattaacagtagatgatctacaaaaaatgattaagagaaatgtggtgtaa

SEQ ID NO: 48217 - DNA, 519 bp, Acinetobacter baumannii
atgaaaaatattgaaattttagaaataaatgaaattggtgatcatgaacaaggcctatcgctattgttagaagattctgtaaataacggagcttcaataggtttcttagctccaatagaaaagaacgaggttttaaattattggcgtgaggtcaaccataaattagcacaagataatagccgtctatggattgccattcaacaaggaaaggttgtcggtagtgtccaattgtctttggtgagtaaaaagaacggagttcatagagctgaagttgaaaaactcatggttctaacaacagcaagaaaacaaggaatagcaacattactaatgaatgaactagaaaattttgcacgagaaaaaggtctgcgcttacttgtcttagatacacgtgaaggcgatatgtctgagctgttatatagcaaaattggatttgttcgtgtgggcgtaattccgagttttgcattaagttcaaatgggaactacgacggcaccgcgatttattataaaagccttgtttga

SEQ ID NO: 48218 - DNA, 915 bp, Acinetobacter baumannii
atggatactgcatttgataaacagggtcgccttattaatggtgaagacttatgggaattaaacggcaaagtagataaggatggctattattgtatagggtgtggagtgaacgttacaccagcatcatatgatagagaattgaatgtccagcggccacattttcgagagcatcgtagttatcctcacaaagctaattgtgatgtacttggtgaagatgaaataaagggtaatggtagaaaacgaaaagtttttaatccgaatgatactttaccaagctttatacctacagttttaaggcttatagatacgaatacggcaatgggtaccgaccaatctttaaattactcgtctagtagtataaaaggtactaatttaggaacagagagagttgttagaagatcacatggggttgtacagtctattcgtagattatgctctgtatatattgattatccttatgatcgggatataccattaaaaatacccgataatgaattatcaacatatggagaattatttagaaagataccaagtgatttcagattagctgacacttcaaaaatacttatgagtcaaatgcattttagtagactagatataattgataatgaaatacgtattcaactttcccaaggtctatggggctatgacgaaaaaatcaagaaagaacgtgtaattaagaattcatttttaattattgatactagtaattggagtaagaatagaaaaacggttattactaatgagttaaactttgtacgtagtgaagcaattgatgcttataataaaaataagaagacgaaactaaaaagttggatatttttcataggttcacaggatttagataatccaagtatttatcgagtcagtgatcatcgacttatctgtgctatgtctgctgataatatattataa

SEQ ID NO: 48219 - DNA, 339 bp, Acinetobacter baumannii
atggaatttttagactttggcgatatgccaaaaatgactccaattatcggtaaacttccgaaacttggaacaaataaagctgaaatcttaatgtttttgttgtctggtgatcaaccaaccaataggcagatgggacataagcttgactgtgttagctcagctgctcgtatttgcgaattaaggcaagatgggtggttaattgaagcacataaaatcccttatcgcacagagacaggaaaggatgtttattattgcaaatactatattatgaatttgcaagatgttttaacacatcctagagtgcagcagtttatcgagtggcaccgtaaacgtaagtaa

SEQ ID NO: 48220 - DNA, 162 bp, Acinetobacter baumannii
atgtcactcttaaaagcattaaacgaagtgttgaaatttagaattacatcctatttgaaatttagtcaagctgaatttcgtttaagatggtcgttcaaaaagccgcgtgattatagcgaaaagcagatcaaattggaatgccttagctatattaaatgctag

SEQ ID NO: 48221 - DNA, 549 bp, Acinetobacter baumannii
atgccaaatttaactctcccaacacgtgcattaaaagttgtaaatacatcaattgagttatttcaccgccgcggttttcatattgtgggcgtcgatagacttgtaaaagaatccgaaattaccaaagcaactttttataactactttcactctaaagaacggctaattgaaatctgcctaatggtgcaaaaagaacgactccaagaaaaagtggttgctatggtcgaacacgaccaccacacaagcccaatcgataaacttaagaaactctatgttttacataccgatgtagacgggctgtattacctgttgtttaaagctatttttgaaatcaaaaatacctacccaaacgcatatacaaccgccgtgagatatagaacatggctcatcaatgaaatctatagtcagcttagagtacttaaacccgatgcttcctttaccgatgccaaattatttttatatatgatcgaaggcgccattattcagcggttaagctcggatgaggttgaggagaggatagttgaggtgtttttgaggtggatggggtga

SEQ ID NO: 48222 - DNA, 1350 bp, Acinetobacter baumannii
atgaaccaaagtaatatcgctgttgaaaggacacaaaagaaaaccaatgcatatgcatggtatgtggtcatactttgtatgttggcctatatattttcatttattgaccgtcaaattctggccttgatgattgaacccatcaaagcagaccttcaactttcagatactcaatttagcttgttacatggccttgccttttcactattctacgctgtgatgggcttaccattagcctatattgccgaccgtttttcccgaccaaaactgatttcaatcgggattattgtctggagcttagcaacagcaacttgcggtttaagtaaaaactttattcaactattcctaagccgtatggctgtgggcgttggtgaagcagctttatctccagcggcctattcaatgtttagtgacatgtttagcaaagacaaactaggccgcgcggtcgggatctattcaattggcgctttcttaggtggaggtatcgcctttttagttggcggttatgtgattaacctgcttaaaggcgtgacactcattgaagttcctttattaggtgcactcaaagcatggcaaattgcctttttagtggtggggttacccggcattattattggtttgctatttattttgacagttaaagatcctgcacgtaaaggacagcagctcaaccaaagcggacaagttgaccaagttaaattcacgcagtgccttcagtttatcaagaaacatgcaaaaacatttgcttgtcactatttaggttttaccttttatgcaatggcactctacagtctgactagttggacaccagcattttatattcgtaagtttcaacttgcgccgactgaaacaggctatatgctcggcactatattgctagttgcaaatactttaggcgtgttttgtgcaggatggctaaacgactggtttattaaaaaaggacgccaagatgcaccgatgttcacgggggtgattggtattgttggcctgattattccaattgcatttttcacccaaacagatcaactctggctttcagtaactttgctcattcctgcaatgttctttgcctccttcccacttgtgatttcggcaacagcattgcaaatgttagcacccaaccaatttagagcacgcctttctgccctattccttttggtaagtaacttaattggactaggtgttggtacaacattagtagcaattattacggataaggtttttggcaatccattaatggtggggtcttctttatctattgtgggtggtttgtcctgtgtactggctttggctctactttttaaaggctgtaaatcctttagtgaaagcatgaagcttgaaaaattacattaa

SEQ ID NO: 48223 - DNA, 1257 bp, Acinetobacter baumannii
atggaattatttcaccgttttaaaccacacactttagctgttgccactttatttattatgtgcagcagttcttgggctgcaaatccaaatcagcaaactgaagatgagtggaaattcactttaaaaaatgcctatatcagtcgtgattttgataatgacgcccttaaagataccggtagttggtctcaggcagcatctttattttataaatcgaaaatgcatgacactccactagtcatagcagataaacctattacgattggagctgatgcttccgttcaatacgccgtacgtttgagttcagacaaacatgtcgcagatactgttttgccttttaataaagaaacgcaatctcaagcatctgattatctaaaatacggcgcgactttaaaactaggttatgacaaaacacttttaagtgtcggtgaactctggctagatttacctgtaacggctgttgatgctagccgccagttactcacctcgtattggggaaccaatcttaaatcacaactttcagatcaactctatgcagaaattggtcgagttgaaaaagtctctccacgtaatgaagaagactttaaaaagttttcctttactgcaaatggagttactaaagaatctgatggcttaaattatattgacctgcgctatcaattcacgccgtctttgaagggcgaatattattttggtaatttagaagatctctacaataaacactatgtagggcttgagcatacgtggaaacaaccaacttttgccctgacctccaaatttaaatactttaatgcgaaagatgacggcaatacctttgatattgatgcagaaaacattgggttacttgaaaccgtcaaagtaaaaaaccatacctttggtttggggtaccagcagattatcggtgagtcggcttatccgctaccagatggtttcttaccagaaacctatttcattaactggaatgccacaggctttttcaaagaagatgaaaagtcttaccatgtcatgtatggctatgactttaaagattacgttccgggcttaaacgcaatggtgaaatatgtttacggtcatgactttaaagcagctaatggtgagaaaaaccacgaaactgagtctaatgtgattttaaactatgcatttcagcagccgctcttaaaaggctttgccctgcaatatattcgtattgactacaacgttaaacacggcaatgactttggcgaagaccgtttattcgtcaattacaccaaaaaattctaa

SEQ ID NO: 48224 - DNA, 1512 bp, Acinetobacter baumannii
ttgatcgcagcccaagctgttcagattctatgggaagctggtattccaaatggtgctgtacagctacttcctggccgcggtgaaacagtaggtgctcagctcagccaagatagccgtatcgatggcatcatgtttactggctcgactgaagttgcaaaaattttacagaagaccgttgcaaaacgtttatctgaaaatggtcaatctattccgctcattgcagagactggcggtcaaaatgcaatgattgttgactcatctgctttaactgaacaagttgtattagatgttgtaagttctgcttttgatagcgcaggtcaacgctgctctgctttacgtattttatgtgtacaagaagacagtgctgcaaccgttattaaaatgcttaaaggtgcaatgcaacagttgatcgtaggtaaccctgcaattttaaaaactgacattggtcctgttattgatgatgaagcaaaacagacgattgaccagcacatccagaaaatgaaatcgaagggttatccggtacatcaattgatgtttggtgcaacaagccaaacagaattagataaaggaacttttgttgtgccaacagcaattgagcttcctaatcttgatgacttacaacgtgaagtttttggtccggttttacacatcattacctataagtatggtgaacttgagcaactcatatcaagaatcaacgctaaaggttatggtttaactatgggtcttcatacccgtattgatgaaaccatccaaaccgtaattcaacatgctgaagtgggtaacctttatatcaaccgtaatattgttggtgctgttgttggcgtacaaccattcggtggtgaaggtttatctggtacaggccctaaagcgggtggccctctttatatgtatcgcttaatgcagcattgttctaacaaagtattagcaactccatttgcggtaaaaaatgagcaaaccatttttgaaggctttaaccgtgaggtttatcaaagcttacaaaactgggcgaaacaacatttaccacaagcaaaccgtgaaattgaaccttttggtgttggtaagttttatgagttacaaggccctactggggaaagtaaccaatatattattttgccgcgtcatcgtgttctttcaattgctgatacagaacaagatcaattgcatcagttacttgcaatctttgcagttggcagccaagctgctgtaatgccaaatagtccattattggcaaaacataaacaaacgttgccaaaagatgtacttgatgcgattactaccattaaaaacatcactacagatgattttgatgcagttttacatcacggcaaccgtgaagagatcttctcattacagcaagaaattgctagccgttctggcgcaattgttggtattactcatgttgaaccaaatgagtcgattccacttgagcgtttggtaattgaacgtgcaattagcgtaaatacagctgcggctggcggtaatgcaagcttaatgacaatgtctgaataa

SEQ ID NO: 48225 - DNA, 2556 bp, Acinetobacter baumannii
atgaaaaagctatccagtttgggcttcgtgcgtccaatttttttgatcattattattatcttagtctcacttccgatgggattctatggcatgtatctctatattgccccaacgcttccggaaatgagttcactaaaaaaagcaccgcttttaaaaccattgcaagtctatacagccgacaatcaactcattgctgaatacggtggtaaactttctattccggttgaatacaaacaaattcctcctaattttattcatgcattcctggcagcagaagattcttctttctttgaacatagcggcattagttttaaaggtttaggccgtgctttgagtgaaagtgttacgggttctgatgtacaaactggtggttcaaccatcacgatgcaagtcgcaaagaactattatttaagtccagaaagaacattaaaacgcaaactaacagaaatctttttggctcgaaaaattgagcaaaacttatccaaagaggacatcttaagcctctatgtaaataagattttcttaggtaaaaatgcttacggtatcgcagcggctgcaaagatttactacaacaaaagcattaatgagctcagcattgcccaaatggccatgattgccggcttgcctaaagcaccatctaaatataatccagttgttaaccctgagcgtgcacttgaacgtcgtaactggattttaggccgaatgcttcaacttggttatatctctcaaacggaatatcaaaaggccgttgcagagccaatcaatttgaatatgcccaaccgtgacctaaataatattcacccctacgcaggtgaaatggtccgctcagagcttgtaaaacattttggtgaacaagcaattgattctggttataaagtctacacaacaattaatgcgaaacgccaagcgattgcggaaaaagctgtgcaggacggtcttgaagcttatgaccgtcgtcatggctggcgtggtgcagaagcacatgataagccattaagcgaatttagagcatatgccaacacttatccggcgcaagtcaccaaggtaaatagcagctcttttgaagcattaatgcaagatggctcaacagtaaccgtgcaatggtccggcatgtcatgggcccgtccctatcgcaatgcaaatagcgtaggtgcagcgccttctcgtgcatctcaaattgttaaagttaaagatattgttcgtttacgcccaaatgaagctaaaactgcgtggtcactagttcaagtaccaaaagttcaaggtcagctcattgcaattaacccaaacgatggctcaattgaagcaattgtaggtggttataatttctatcaatcaaaatttaaccgtgctttacaaggctggcgtcagccaggttctactatcaaaccattcctctatgctttagcattagaacgtggcatgacaccttatagtatggtaaatgatagccctattacgattggcaagtggacaccgaagaactctgatggtcgctacctaggcatgatcccgttacgccgtgctttgtatttgtctcgtaatacggtttcagtaagacttttacaaactgtaggaattgaacgtactcgccaattattcatggattttggtttacaagaggatcaaattccacgtaactacaccattgctttaggtacgcctcaagtattaccaattcaaatggcaactggttatgcaacatttgcaaacggtggttaccgcgttcaaccgcattttattcagcgtattgaagatgcatacggtaaagtcatttacgaagccaagccagaatatgcatgtattccatgtattaatgctcctgagacaactgacgatgcacaggtaactactccagacgatcaagttgttgaagtcacaaataaagagctagagcagaaagaaaagacaaccaaacaacttaaccttaaacagacggacaaaaataacagtcaatatcgtcaagctcagcgcattttaaaatcaagctctgcttatgacatggcaaatatcttacgtgacgtaattgagcatggtacaggtcgtgctgcactcaagattggccgtagtgatttaggaggtaaaacaggtacgactaacgatgcaaaagatgcatggtttgcaggttttaatggcaagttagtaactgtaacatgggttggttttgaccagccgactacacttggtcgccgtgagtatggcggtattgctgcattaccaatctggattaactttatgggtcaagcattgcaaggtacaccagctgcttgggttcgtttagaaaaagatgctcaggcacctatttctcgcgataagcaagaagtcacaactgaagtaggcgataagaaaacctatcgtgctgcccctccattagcacgtccactctatcgtcctgcaccaccacaacctaaaaccaccaataatgacttcgatgacttacctggtgaggaaattgtgattccttccaagacaacacctccagcgatgaaaccttcgcaaggggcagcgccgaagcgtgaaaaagatgaattagaaaacttgattaatcaaattgagtaa

SEQ ID NO: 48226 - DNA, 1320 bp, Acinetobacter baumannii
atggatctggtttcacgtatacaaaatcttccaattggcaaatttcactacacgcttttatgggtagtgggtttaggctggatgtttgatgcgatggataccggcattatcgcttttattatgacaacccttgttaaagattggtcattaacacctgctgaaagtggttggattgtcagtattggctttgtaggcatggctataggtgcagtttgttctggtgccttggcagatcgttttggtcgtaaaactgtatttgcgatgacaatggcaatttatagtattgcgactgcgttatgtgcttttgcccctgatctaaagtggctattaatttttcggtttattgttgggttggggctaggtggtcaattacctgtagcagtcacgctggtcagtgaatatgtgcctgctcatgttcgtggaagatttatcgttctacttgaaagtttttggggattaggctggctggttgctgcgctcatttcttattttattattcctaaatttggctggcatattgcctttcttataggtggacttccacttatttatattttagtgatttggaaaaaagttcctgagtcgataccgtatttgattaaccgtggtcgtattgaagaagcgcatgcactggtacaaaaactagaagccgaagcatgtgtgcaaatagttcaccatattgaagtcgtgcctgtggcgatgcgacaaaaagtttcatttaaacagctctggagtggtcaatttgctcgtagaagtttaatgctctggctaatctggtttggcattgtgtattcctattacggcatctttacgtggttgccgagtttattggtgaaacaaggctatgacattgtcaaatcatttgaatatgtattgcttatgattttggcgcagttaccgggctacttggcggctgcttggttcgttgagcgtttaggtcgaaaaattacacttgccgcatttatcggtttttgtgcgttgtcggcatatttctttggacaagccgacagtgtaaatagcattatgttctggggctgtctcatgtcattctttaatttgggtgcatggggagtcttatatacctatacaccagaacaatacccagccaatattcgggctttcgggtcaggctgggcatcggcaatggggcgtatcggtggaattgtcgcgccaatggtcgtgacacatatgatggttgctaaaaacggctttaatcacgtttttatgatgtttactgtggttttacttgccgtagctttagtgattttgatattaggtgaagagactcaaggtaaaagactagagtcaattgggctatag

SEQ ID NO: 48227 - DNA, 8667 bp, Acinetobacter baumannii
gtgagttctattattaatatgtttgaaatgatcagttattatttatatgggcagcgggaaaaaccagaaaatttacttgatgataaaattatttcttctgatcgtgataacttggcaactgaagtccatataaattcaatagaatttatggccactggagctggacgttatgtaggtttaggcaatgttacagcagtaagaaaatttttagctggtgagtatgctgataaactaatagttggaaaagtttattatacaagtgaactttttgatgcgcttggttataaagattatcctaataatggaaaaactcagcttagtgttttaaattatggtcttgatacaaatagtaatgattatgttgatagatcttacgtgttcggttcaatgtcctttactattaatccagatgcacagtttattgttggaaaagatggatcttttcaaattaaaaatatttcgataattcctatagatgataactttgattataaatctggtaacggtgttgctcaattaacgaacttacttacaaaaggtgcgattgatccctatcatataggaaagactgtaaatataatatttgatgataaagacaaattgcagaaaattgatcttgataaaagtgatttaccatctctaataaaacaagaaaattatttgcaaggtttaattacggaagctaaagattattcatcatctttacctaataatatacctattccagatgctggaaagcttttagaagcattagaaactttaattaaaaatgatattattagttatgtagataattctggacgtgcaatcatttacggctcaagtaaacaagataatttgggcgatggagagttaacgaatttagttttacaaaaatcaattctattgagtatagccaatttaccttcttcattaaatttaaatgaacaattaattgaccttataaatttggcgaagagtttattaactcaaaaaggtatttctattgtttctggtgatggtgatgattcaattactggaacaaaatattctgatgccttatatggtgggagcgatgatgattcgttaaatggtgctgaagacaatgactacctgaatggtggagtggggaatgatattttagatggtggagagggtgatgataatttagtcgatgaaaaaggtaatgatacctatatttttaatggaaattttggaaaagattctatttatgatctagatgggaatggtcaaataaaaatagatgatatagctctttcagtcggagaaaaaattaataataaactatggaaaagtgctgacggacaatactcactagctttagtcgaagactttgatggggtagctacaacacaaaaagtagtcattagtaaagaagatgacaacaatagtattattataaaatattttaaaaatggggcattaggacttaatttcggtgatttagagaataatagtactccaccatccgatacctcgatttatgcctttggatcagagggtaataatattatttttggtgagcgttatgtagcaagtttttcaggaaatgactttattcatgcaaccaatgaggatgctgtaattattgctggtgatggtaatgatctgatttctacaggtgatgggaatgatgttatttacgctggagtagttacttcagatcaagatagtaatattgtattttcgggtggtggtagagatcaggtttatggaggagttggtaatgatatcattatgacttcaagcagactaaatgctgttaaagattcattattgaatcaaatgggagatgcagatacaggtctcacagacttagataaagaatataatattttaaattttaattttgaaattaatttaggcgataataatagattttcacattatacaaataatagtataggacaaattacagaacagattctgccctcttttaatatttattatacagggaaaaatggtaagtattatatttataatcttttagaatctttaaattacggtcatggctatgctggtagtgatatcgcttatggtggtataggaaatgacattattttgggttcatctgatacagactttttatatggtgcagtgggtgatgatgctatctatggaatggatggtaaggattatttatatgggggagaaaataaagatatcttatatggtggcgatggtgctgatcaaattattggtgggcaaggggatgatgagcttactggcgggttagagggcgatgaactctacggtggtgatggcgatgacattattcaagctgatttaaatgattcaatagataccttagctccgccggttgaacctaagacttatagtcgttttggtcatgatcttgtttatgggggggctggaaaagatcaaatttgggggaatttaggaagtgacgaaatttatggtgacgatgatgatgatcaaatcgcaggagatcatcctaatctagctggggatatacacggcgatgattatttatatggtgggaatggtaatgatcaaattgttggtgatggtggaaaagacataattcaaggtggaaatggtaatgatttaatattcggtgataatagtgagttagatggtaaataccatgctgaagataatattgagggtaacgacggaaatgacgaaatttggggacagggaggcaatgatacaataaatggtggtgatggcgaagatagaatttcaggagatggcattaatatagatgttcaatatcatggagatgatactgttagtggtggtaatggaaatgatttgatttggggagaaggaggttcagatactatatatggcggagagggtgaagattatatagagggtgatgaaactagtatacatattcaatatcataaagacgacttgctttacggtggggaaggaaatgacacaatttttggagatggtggcagagatataatatatggcggaaaagataacgattatatttatggtgatagtaatcagatagatatccaatatcataataatgatacgttatatggtgatgctgggaatgataatattcgtggtgatggaggttcagatattatatatggaggggatggagatgatttccttgtagctgatgtgattaataaccgtgcatttgatggtgatgatcagctttatggtggtaatggaaaagatagtttatctggttttgatggtaatgatactttagatggtggtgctggagatgatatcatttttggtggtaaaggtgatgattatttcataagtaatgaaggaaatgatcaattatctgggggggaaggaaatgatatctatcatattcaagtaagagattcggaagttaaagttttagatagttctggagagaatcactattatttaaaaggaagtttcaatctttcaaatataaatatctattggtataacaatgccgttagtattattagcccaacaacaagtcaagaccctaatgctattttacctcaatttaaattaactttctttgatgatcatgaaactcaaccaacagttgatggggggattatcacagatgaatatgggaataatattacgggtggttataatcaatatcttcattttagtaaaagtatatacgatgaaaatttaattttaaataatactattcaaaatgattatgttattcacctcgatacttatttaaaagagcgtgcagggttaagttataaaatttggagtggatcttggcatggtattcagggactctatttaatttttacaaatagttatattgataatgataacttgatttatcgcaactctgatttaggcgaccttgtcgatattcaacaaattagaaataatgttatttccaatgggcaatatcaggcagatgaatatcacctgctcggtggagatgatcagataagtggttcagatattggggatacgatttatgggggtacaggcaacgatataattaaaggtcttgagggttcagatcagctatttggagatgagggagatgactggttagatggtagttatgaaaatgactttatttatggtggagaaggaaacgatcaactctttggtggtgatggagaagaccaattagaaggtggtaatggtgatgacgttattgatagtggagaaggaaatgaccaattaataggaggtacaggtaatgatcggttactagggggagaaggtaatgatcagttacaaggtggtgagggggatgattacttggaagctagcaatggaaatgactttattgaaggaggtacaggtaatgatcaacttattggaggttcgggggaagattcactatatggtaatgatggtgatgatcatttatatggtggggatggtaatgatattttaagtggtggacaaggcaataatattttagaaggaggaaatggagaagatgaatatgtatttgatatattaggatataacaatgtaattaatgatacagatgcaagtgtattaaggtttttatctgtaagttcagaaaatataaagttagagattgttggtaataatttaaatatattttatggggttgattcaagcgtcactattactgattttattttgaattataatataaaagaaatacaatttagcgatactgtatggtatccagaagatttgagccaaaaaataaattttcttcataatggtagtgatggaaatgatattatagtgggtaatccttattttaataatactgtatattcaaaaaatggtgacgatgctatctatggtgggagtggtgttgattatatatatggaggcaatggtaatgatgctattgttgatccaggtaatattggattcctttatggaggagagggagatgataatttaataggaaataataacagtgaattttatggtggagaaggatatgactcctatcaagtaaatggaagaaatactaagatatttgattcagattttaaaggaagcatttatattcataatgcttctgatatccatgaaagcaattttgtacaagaaaaagctaacatgattattagtccttttataaactctttatctgaatttttaagtgattataatggagttaagtattataactacaataaatatagcgagagaatttcaagtatctattatgatttctcattaggtgaaattcgactattaattagagatcaatcacaaaaagaacttaaagatatggattataagttttcaattggtggagtttttaatcctaatgatattgaaaatttgaaaaatatggatgtggaaatttctggttttaaatttaatttagaactcaatccctatgcttttaataaaacaaaactttcttttggtgattttctttcacagggtgaagttatttcagaatatactgcttctaatgatattattttaggtttaactgattatgtcggtggtactggatctggcgatattatttatgcaggtaatggtaatgatcaaataaatagtggtttaggatctagtcaagtttatgcaggagagggggatgatgtaatcattacacctgatgtctttgcaattgacaaaataagtggcggagctggtaatgatgtattttatacttatgaccctctgtctaataatcaaattagtaatagtccctatttaaatataaatttagcacgtaatatctatgatattaaagatgttgtttatggtggagagggtgatgattatatttatttaggtaatcaaaaaactgaagcatatggcgatgatggtaatgatattattgtaagttattctctttcatcaaatatacagtttttatatggaggagatggaaatgacacattgaaggctggagatggtggagcttatttagatggtggagctgggaccgatcatcttgtcggtggctccggtgatgatatctttattgtggatgaacaagatacttacgaagaaaatgatctaaatggcggttacgatacaatttatattgctaaaaattttgatcttgcattaaataattttgaggctgttacattattgggtaaccagaatattaatgcctatggagatgagtttgataataaattaattggcaatagtagcaataactatattgatggtcgtgcaggtagtgactatatgcagggtggcttaggtgatgactattatgtggttgatacaaccgaaactatagaaactgatgagaatggtaatacttacattatagagggtgaccaagttgttgaagatgttgatggtggaatagatactcttgaacgttggcaagatgcccgttttattggtcaggatgaaaatggaatcccagttttaacagacagttataagattttagaaaataatatcgaaaatcttgttttaaaaggtaatgctaaaacaggatttggtaatgatcttgataatattattgtcggaaatgagcaagataattatattgatggtttagctggaaatgatacttatatttttagccgaggtggtggtacagatacctatagctttgaagataatattgatgctgtaaatatattaaaaattcaaggttattcagctaatgatgtatctgctcaaaaatatggcgatagcgtatatcttagttttaaaggtacaaatgatcatatttggctttctaattattatcttgcagatactgaaaataccacttataagatggatcagattaattttgattctggagtaatttggggtattgatgatattaacacattagttaatagagccttaacaaaccatgccccaaccgtgaatgctgttataccattaattacaagtaatcagggaactgaatttagctataaatttgctaataatattattgttgatcaggatagctgggattctttgagttataaaattactttaacgactaaagatagtagtggacaataccaatctattccatcatggttaagttttgatactgcaacacaaacattatctggtactccccctgctaatgtgactggcaacttatcgttcttttattggggaacagatatgtatggttatagtacggccacctcatttcatttaaaagttagtctaccgaaccaagccccaacattgctgaatgcaattgcagatcaaagtgtgacggatgctaaagcatttagctataccgttcctgcaacaacattcaaagatcctgatggcgatacattaacgtattcggctaccttagaagatggctctccattaccatcgtggctcagtttcaacccaactacgagagtattgagcggtacttcccctgataacacagttccgttaaatattaaaatcacagtcaaagatatagctaaccaatcagtttctgatgtgtttaagctaatatttgttgttcaaaatcaaacaataaatggaacaagcaatgctgatacgatatatggagcttcagggaatgacaccctaactggacaagctggtaatgatattctttatggacaagcaggtaatgacactttaaatggtggtactggtaacgacacaatgtacggtggtaaaggtgatgacacttatattgtagatagtactgcagatgtcattagtgaaagtgtgaatgagggaactgatattgtccaaagtagtgttacttacacattagtaaataatgtggaaaatttaaccttaacaggtactacagcaattaatggtacaggtaatgcacttaataatctaattgttggtaatagtgcaattaatactttaactggtggcgcaggtgatgattatctaaatggtggaggtggtgcagataaattattaggaggaacaggtaatgactcttacgttattgacaatacaggtgacattgtcacggaaaatgccggtgaagggatagatactgttcttagttcgattacttatactctcgggaataatcttgaaaatctaacattgactggatcaacagcaattaatggtacaggtaacgcgctcaataatgtacttattggtaatagtgcaattaatactttaacagcaggtgttggtgatgattatctggatggaggagcaggagctgataagttacttggtggtataggtaatgatacttatgtaattgataatacaggtgacattgtcacggaaaatgctggtgaaggtatagatacggttctaagctctattacttatacattgagtagtaatttggaaaatttaactttaactggttcaacagccatcaatgcaacaggtaatacattaaataatacacttacaggtaatagtggagtaaatgcgttaaacggtggagcaggtaatgacattttggatggtcaaggaggaaacgatcaacttactggcggaactgggatcgataccgcactgtatcaattattagttcaatctgatgctcttggcggaaatggtacagatgtttggtcggattttactattggtaatacaacatccaatacaaatgcagataaaattgatatcggtgatctattaattggttattctggtacttataactttactagtttggaaccatttataaaaacggtggtgagtggtttaaatacacagttgtatatcgatagggatggtgcaggaacgacgtatagtagttcattgttgttaacattgaataatacaaacgttaatttaaatgatctaatcaataaccagcaaattattatttaa

SEQ ID NO: 48228 - DNA, 921 bp, Acinetobacter baumannii
ttgcatgtcgaccaatattttgaacgtttaaatcagcgtaaaggcttttgtacaagtgagaataaatatcttacggatgaagaaaagttaataaatttaaaagcagattttttggctatacaaatggaacattggattagagagggtcgtgaaggatttaatgtgtatgataatgcaatgtatatttctaaatttaattttaataataagggggaagttattaaagtgataagtacttcaaaattagataaaacattcgaagataatatgggtattgtggcagtggcaacaatgcaggaatattatgataataaagattgtaaggaagataaaagaagatgcaaagacttaagcgaaaataagaataatttaaaaagtttatggacaaaagataatcgtgtggatattgattatgtaaaaagcttgccaatgaactattctgtaataacttctggtggaataatttttccactttcaagtttaaaaaaaataagtaatggtaattatagtatagaagcatattcatttaacaggctttgttgtgataataaagaaatttcaaaagaaattaaagcaacagatttaaaaatagtaggaaattggaaaagaatgaaaggaggtgaaaaattatatagcacaaaagaacctaagttgaatttaaatcaaattaatggtgaagatattgatgctgtttatattatgaagttatatgaaaatttagcacttaatgagccagaacaaatccaaagatatggggtacgtatgagtgtggcttctctaagaaaagatatatatccatttgtgaggagaatattggtaactgcatgtggcactatttcagaagaagagcaagtatttaactctagtgaaactcaaagtggtgaagatatctcattaagaaaaagaaataaactatattaa

SEQ ID NO: 48229 - DNA, 795 bp, Acinetobacter baumannii
atgtatcttaattttacagttgatgatcaagacaagatcacaggggaaggcgtaatccaagtaggttggtttctggtagatgataagtctgcgttactttatgaaccaccttatcgaatgcgttcaaaatctgaaaccaagcatgccaagtcagccagccgttgtcctgcagtattacaacttgaaagtcgctacttcgtagtgaattgtccttttgattttcatttaagattcgcccgagatgcaaacggtaaaccgactttagttaatgtattaggcgaccagtcacctgttcgagccaataaattacgtgagttgctaacgttggtaaatgaaaatgaatggcggacaccccaagtgccaattcttcaacttagattaccttactgttttatagctgatgaagtcgtgtatttaacccaactcgatgcatttggacattatcgtaaaaatcccttacctggaactatttttagtggacggtttccaattcatatttggcctagaccattaatgtgggcgtttgaatggcacgacacatcaaaggatttaatattaaaacgtggtgatcctttattttactgtcagtttgatggttttgatccatcacgatcagttaagttaattcaagcagaaaaaactccggagcttatgcattatattgaacaaatatctggtgttgtcaattatatgaatcagacatttagtttgtttaatgaagtagagaaaataaggccaaatagactacttgaaaataaaagaggttgcatgtcgaccaatattttgaacgtttaa

SEQ ID NO: 48230 - DNA, 798 bp, Acinetobacter baumannii
atggggtttgaaaaaacaacatcacagatattatttgataatggcgtacacaaatgtattagttttaccagtttggtcaaaggggaaggcatacaagccaatcaatttttaattattgatcatgagcgtgctgccgtgatcgacccgggtggtgatttgacctatgttccgctgacaatggaacttaataaatatacgcgccttaaaaatcttgattatgtgatggcttcgcatcaggatccagatattatcacctcaatgccccggtggttggtttataccgatgctaaagtggtggcctcaaaattatgggcacgttttttacctcacttaaattcatcatttatgagtgagcgtatgaaagggaattgggaagaccgtctgattgagctgcccgatcgtggtcaagtgattcaattaggtgaatcgaaacttgtaatcgttccagcgcattttctacattcggtgggtaattttcagttttatgatcccgttgctaaaattttattttcgggtgatatgggagcatctattgtagatgatgcaaatcagcctctaaaagattttgatagccatgtgatgaaaatgaaggcttttcatcaacgttatatgtgttcaaataaagtcattcgcttatgggttaacatggtccgtcagatggatattgaaatgattgttcctcagcacggtagtccatttattggtaaagagatgattaatcagtttttagactggattgaaacattaccatgcggtgtagatttaatgacagaacaaatttttagctgtccaacataa

SEQ ID NO: 48231 - DNA, 942 bp, Acinetobacter baumannii
atgaaaaatcaaaacagtccagaagttattacggtaaacgaccaaaattttggtagtcatggagagcattggaatctactgacttcccgtccagagacagatgtaccaaaatggcttggactggcgcttgatgctcctgtaatgccaatgggtttatgccaaaatgaagacgaaatggatcaatctttttggctcattcaaggcccacaaggtcagaaggtcactattaatcaaattattgcagttgaaaatcaaaaacctcgcgctttaaaaactgccttcccgagttttgatagtccttatcaatataatgctcaaattgagcgcatcattacttgtaactctgctactcaagcggtattaagtttaaaattaaataaaagtacaacgatttatgcatttgataatttgtttagcgttaatcgttgccaatatgacaaaacccaaacttatcaagtccaatttaatgcatgggcctatgaattagaatcagtgcctgcgggagaaacaattgtcgtagatgatccagcgtcaattaaacatcaccgtgcattaaatgcgattttaactgaacataatggaattgcacccgaaaacctacaagaactgattaatgaatggcaaccaaaaactaaagaagatcaagaacctgtaacggttgatttttctaaaatggttgcatatttatatggagaaaatcttggtcaagaagatgaagcttggttccaaggtaatattgtcggtaaaacttcaatgtcatttatgggtgcagaatataccctttatgatgtcactttagttttagaagacaaccttcctgccatattagtgcgcattgctacaaaaaatgatttgtacaaaaactttaatattggcgaatatattcgtggcaatatctggattcaggcgaatatttatgctaaaaatagtgaaactaattga

SEQ ID NO: 48232 - DNA, 2433 bp, Acinetobacter baumannii
atgtttaagattattctattggggtggattggcggtattgcattgatgggaatagatttccctttaatcatgcaatatgaaaaagtgggcgaggctctactgttacttgcctttattttttatctttataaacgccccatgttcgttgatcgaccatttttaaaggcagtgttttgcttattatgtacaacaagtctttttttagttggttactactatgctgaaaaagcactgattgaacgattagaacaaagagaaatagatacccgaaatctcgacattattgtttatataaaccgtttaagtgaagaaaaagataataaggttcaacaaactgcacaaattttaaatctttctaaagaaccggtaaattggctgctatatttaaaaagtaataatcaaaatttattaaagaataatcagaatcttgaattaggtcactattatcgaatatctggaaaaacaagacctgcgcatagttatgccaccccaggagcttttgatcaggaaaagtggtttattcagcgaaatattatgtctggttttaatgtgagatatattgagcctttaagtctcgatgaaatctatcgattgggctatcagcaacatttaaaagaacaacagtctttttccaatagttttcgtttaaatatagaaaaacttcgcttaacttttaggcaaatattaaacagctcatctctacagcaaaagggtttaattttagctttgctgacaggtgatgaaagccttttatcagatgaaactcaactacagttcaaacaattaggaattagtcatttattggcgatctcaggcccacatgtgctcatttttgccattatgttatcttgggcatgtcatcaatttatcagtcgttattatcctcaaatttacttatggaaaccgaaacaggttttgatggctgtaccatgctgccttggtgttttaatttatactgcatttgtaggtttcgaaattcctgcactacgaacattattatcaacccttatatttattggatttctattatttaaacaacctattaaaccttttacattactcgtatatagcgcaagtctactgttactaattgacccgtttagtgtgctttctgcaggtttttggctgtcttatggggcatgctttattttattaagaatttaccaaactatagcgcagctacctgagcaacattttttaagtctgagctcaaaaatgatttttatgagtaaggtgttaattgagtctcaaggcaaaatatttattgcattgagtcccttaaccttacttttctttcaacaaatttcttgggttgctccattaaccaatattattgccgtgcctattgttggtggtgttattgtccctttaaacatcatggctgcttgcgcatggtttgtaataaaaccatttggaaatatgctttttcatttcaatgatatgttgctcagcatattgctgagttgtttgggcttattagaaaaactctctttaacattacaaggtataagcttgacgccactgtctttattagcgattagttgtgccattattattttatttttacctaaaggaattctgcccaaaacttggggaatattatgttgtttacccttagttattatgaacaaaacgagtcagcaaattcagcttaatattttagatgttgggcaggggcaggccatttttctacaacatccccaacaaaactggttaattgatacaggcggttcttacgatgaaaaaatatttagtattggacaaaatgttgtagtgccttttctacgtcagcaaggcgtaagacaactagatcatgttgcgctatcccatcttgatcaagaccatagtggcgcgtttcctcttattcaacaagagattcctgtaaagcagcttatttcgaatgaacaattaccaaatgatttaaagcaaccattccaatattgccatcaagggcaacaatggcattatcctgagttagatattcaaattttatggcctaaagaaaaagatctggcttttgttgcttctaaccagaatcaatattcttgtgttgtatatcttcaatttaaaaaagttggtggttaccaaaattttcttattatgggcgatgctggatgggaagctgaatacgagttattaaaagattatcctaacttgaagatagatgtgttagtgctagggcatcatggaagtaagcacagttcggcttatgatttcttggcgaccttaaaacctaaactggccattgcatcggcagggtttgataaccgttatggccatcctagccaacaagttatagcacgtttaaaagctctacatattccgctaaaaagcactgtggaacaagggaccttaagttttgtgttggaaaatcacaaaatagttttacatgaccgacgtttggataggctctggttgagtagaggtttttaa

SEQ ID NO: 48233 - DNA, 2571 bp, Acinetobacter baumannii
gtggttgaggcatttgatgctgaaagtgaggtattctctgagcaagaggtgatatctgaaataataatagatgagataccagtagaacttgaacctgctcttgcaaagctagaaactcatcacgatcaggtattcgatacagcggttaccgagttagctactccagttgaagtaattacctcggttacatcgcaagagaatgaagttgcagctgatgaacaggacattgatgctgttgttgaacagaccttcctagaagaagctattgaattgttagaaatggctgagtcgctattaaaacaatggtttgaacagcgtacaaaccgtagtattttgcttcagctacaaagagccgtgcacagtttgaaaggtggtgcacgaatggtgggtttagaagccgtacaagcaattgcctaccaactagaaaatgcttttgaacaatttgcgttgcatcacttcaattcaaatatttatgatcatttattagaaagtgcaattgcatggttaaaagatgcaatttttaaccacaactatcagcatttcgatggattacagcaaagtttagaaaatattcaattctttgaaactacaatccagattccgactaagttaactagagcggacttgtttagctcagaaccagtgatgacctttatacaaggtgatggtacagagcctccaccaatgatgggagcatgggagcaaacagagcgtctggatcagaataatgaaatgatccgtgtttcagccgacttaatcgagaaaatgattgatttgtctggtgaaaactccattaaccgttcacgaattgaaatggacctaagccaatttagccatacactagttgaaatggagttggcgattcaacgacttgccgatcagttacgtcgaatggaaggtgagttagaaacacagattattgctaaacatggaattgaacattctcgttataccgactttgatccgttagagatggaccaatattcatctttaaatcaattgtcgaaatcgcttgctgaatctgcatcggacttggtcgactttaaaaatacgttatctgacaaaatcagagataccgaaagtttgcttttacaacaatcacgaattcaagcggaaattcaagaaggtttaatgcggacacgtttggtcccattttcgcgtttattgccgcgtttacaacgaattgttcgtcagacgtctacagcattgaatagacctgctgagcttttcgtaaataatacggaaggtgagttggaccgcaatattttagaacggttagtgactccgcttgagcatatgctcagaaacgcaattgaccatggtttagaagaccgaatgcagcggcaacaagcaaataaaccggaaacagggcgtattgaacttaatattcagcgtcaaggtacggatgttgtggttgtctttagtgatgatggtcaaggcattgatgttgaaaaagtacgtcagaaagcactccttgccggattgatcaagccagaacaagacttagaacagcaagacatactgcaactcattttccatccgggtttaagtacagcagagcaagtcactcagatttccggacgtggtgtaggtcttgatgtcgtgcagagtgatattaagtctttgggtggacatgtcagcgttgaatccatctatgggcagggaacaacatttacgattcgcgtaccgactacagtagcggtaagtgatgccttaatggttaaagtggcagatcaacaatttgcgattccactcgctcaaatcgatcgaattattcgagtatcaccagcctctttagagcagtattttgaaagtcctcaagaactatttgagtatgaaaataaacgttatccattacgttatctttcagaatttgttggcaaccaacccataccacgtctaaatggcgtgatgtattcattacctgtgttaatgattaaagccaataatggccaaactgtggcactacttgttgaccagttaattggctctcgagcacaaattgtagtgaaaccaattggtcaacagttctctagcattggagcaattgcaggcgccacaattttaggtgatggacaggtctgcttaattttagacggacaaaatattgcgcgacaaattcagtcaactcagcgtcataaacaacttagtgaagcaatatatagacaacgagagtctgatgaacgccgtctcatcatgattgtagatgactcagtaactgtgcgtaaggtcacttcccgattacttgaacgccaaggctatgatgtggttacggctaaagatggtgttgacgccatagagcagctagaaaatattaagccagatttgatgctacttgatattgaaatgccacgtatggatggttttgaggttctcaatcttgtacgacatcatgatatgcatcaatacatgccaattattatgattacatccagaacaggcgaaaaacatcgtgaacgagcattctcgttaggtgtaagtcaatatatgggtaaacctttccaggaagaagagttactagagaatatcgatgctttacttgtagcgtctgacagtgaggtcaaatcatga

SEQ ID NO: 48234 - DNA, 630 bp, Acinetobacter baumannii
atgcgagatcaggggcgtttagtcgaatggttcgacgaaaagggttatggctttattcagccggatgatgctgaaaaagagcgagtctttttgcatatcaaagattttgcacgccctggacctcggccaattattggctgtgcactggaatatctggtaatcctcgatgaaagaggccgttttcgtgctcagcaggtcacttatttaaaggcatctcaaacccataaggctttaaaacctgcaaaaacacaatcttcttttcaggccagcccatggtctgctatgcaaatggggattgtgttttatttcgttttaatgggcattatgagttttattcatattttgccggcttataccttattgtttgtcttaatgatgaatgtgttgagttactggctatattcacaagataaagaagcagcgcaattgggcaatcgccgtgttcctgagcagactttgcacattgtcagtttcttagggggatggccagctgcgtggtgggcacagcaaaaactgagacataaaacacaaaaacaaccatttcgtaagatttatttttgtaccatattctttcatttacttttgattttgtggctaatttctcctttaaacgttttgcggggatcataa

SEQ ID NO: 48235 - DNA, 894 bp, Acinetobacter baumannii
atgaagcagcttcttgcatggactattcgtaccacgctacgtccagctttatcccctaaaaccccactaaagctacaacgtttttgtagtgatgcagccagtgcaattgtgcttgggccacgtggctataaaacaaaaaagcaaacaattgctcaagtaccgacagttcatattcagcccaaaacgactcaatcaggactcggcatcttatatttacatggcggaggctatgtagtgggtagctcaaaaagtcacactaagcttgctgctcaaatcggacatgcagctcaagcacaagtctggttacctgaatatcgcctagccccagagcacacaagccctgctgcgattgaagatgtcattgcagtttataaagctttacttgcccaaggacaagacccaaaaaaactcgtgattgctggcgattctgcgggcggtggactgagtttaagtactgcaattgtaatacgaaatgtagggttaccgttaccagcggcattagttttactttcaccttgggttgacttaagcctctctggaagcacgatgaaaactcatgctgctcaagatgcgatgctatcagaggactggttagcttggtgtgcaaaaaactattgcggacaaaaatcgctaaccgatccaatctgttccccactctatgctgacttaactggtctacctcctattctaattcatgtcggtaccgaagaagttttattagacgatgcaaaacgtctcgctgaacaaaccgaaaagtatggtattccgacgaacttaagggtttatgaccgagtcggacatgtttttcagttccacgcgggtatactaaacgaatctaatgactcgattgagcgcattgggcaattcattgataaacatacacagtcaatataa

SEQ ID NO: 48236 - DNA, 447 bp, Acinetobacter baumannii
atggtcgtattcttccgtctatttggtttaatcgcgaactttgcacttgtatttaacttggcaatgattttaaccattatgtcttggataggtgcttccctcaccttaccgggtattgcgggtatcgtcattaccattggtatggccgtcgatgccaacgtactgatatgtgaacgtattcgagaagaaatgctctggggggcctcacctaaacaggccattgtggcgggttatgatcgagcctataacaccattttcgactcgaacttaacaacgttccttgttgcattcattctgtttgcaatcggtactggcccgattaaaggtttcgccgtgacattaatgatcggtattatttgctcaatgtttactgcaattacagtaacgcgtgcgattgtacaaatcatttatggtaaacgccgtaacttgaaaaagttgagcatttaa

SEQ ID NO: 48237 - DNA, 762 bp, Acinetobacter baumannii
atgtctgatgtagcgaacgtacaggtttatgtttgcccaatttcacgggtaccagacaaccatctcatattgagtcattatctcagctttctcaatgcggcagaaaagctgagatatgatcaatatcattctcatgcagcgcgacttttcttaatttctcgtgtcttaacgaagtctgttctagcagataagctgggtatttcagcccatcaagtcaatattcaattacaaccgaacggcaaaccttttgtacaaggtagtaagacgatttattttaatcttagtcattcagcggacgttattgtccttgctgtgactgaagaaggggaaatcggtgttgatgttgaacgagtgaatcgagagttccaatggaagcgggttgatagcgttttagacctaagtgaaatagagtggattcaggaaaatgaaccgattgacccattcagcgtatatcagcggttttttcaaatatggaccttgaaagaagcctatattaaatgtactggtcaaggaatgagtagccatttaaagaagcttaatttccatgtcttttctgaatatataaagttttttgatgcaaccaaggatactcaaaacacagaacaatatcattttcaaagctatatttatgattgcaattttatcttttccatatgtttacagcagagccaccatatagaacgctttaatatggactgtttccaattattgccgtgtatatctatgcatccaatgaagccgacaccttgtagatataactaa

SEQ ID NO: 48238 - DNA, 396 bp, Acinetobacter baumannii
atggccgagaataataataagggagagttaagaaaagaaataaatatattcttaggccaaccttttaaggaatataagctttctacagaaatcaatattgtttctattttaaaaaacttaaagatagatcaatattatccccatccacgtgaaaaagagattaatttaaatattaaaattgttaaatctaatttaataattgaagattatgtgcttgaattaataaaaagtggatttaaagtcagagtatatgcttttttgagcacagcacttattaatatgcagtcgattaaaggggtggaggtttatttaatacataataatgaactttataaaaaatataaaagtttatatgatgtatttgagaaagctcatattcctgtaatttatctttaa

SEQ ID NO: 48239 - DNA, 1092 bp, Acinetobacter baumannii
atgattgacttaagattggcaaatagtttcttattggttttattttttgtatatttgtatgtggcaggtttttcatatgcttcttttgttgtagataatatagataattcttctttatctgcagtgatgagagtagtattaattttttttatggtttttataagatcattgatagggcgctttagtaaagttgatatagctgtttatttcttttgtgctgttctattagctactttaaatccatttttttctattgttgcttttatggtaattgtgggattgatttttagtgattttattaatattaaatatatagtgaatattgcaaactttatttctatagtatgttttttaacaatactttcaatgtcctttatgggactttcacataattatactttttatgatgtaagtgagtatgctaaatctgtaaggtattctcttggtttcgctaatcctaatgctacatctatgtatatagttcaaacaataataatattttttatttatagaaataattttggtaaattcatatctataattttaggaggggtaactatatattattctgcttcacgtacagctttttttgtgttaatttgttttttaattatgttcttttttattagttctaatacaattataaaaataatgaaatggtgtgctcttatttttttgcttttagtgccagtattcttggagttatttgttgcgaaaggagtctggactataggtggttatgatttaaatcaattattatctggacgtttaagtataattcaagaattttatttctcgaatggtggtatatctatttttccatcttatgatgattcaccacttgattcaggtctagctaatattattttaaaaggtggacttattttttattttatttttatatttatatgttatttctatttaagaaatgagaaaaacaaattttttgtttttctgttttttacttttttaatgttacttatttccgaaaattttattacaggcaacatgttgcttagtatactaattgtatctcggttaatatttttattgaaacaagagaatgtaaaacttattggtgtatttgaatga

SEQ ID NO: 48240 - DNA, 1320 bp, Acinetobacter baumannii
atgccaaatgtaatgaaactgagtgtgctaacaattgctgtattgggcagccaatttgcacttgcaaatgagccgtggtcacaagaccgtcaatggttgctaggcgagtggaatggaaaacgccagcaattagagcagcagggctataaatttacagcttctattatgagccaaagcgccacaaatttagatggtggttacaacgacagcaatacttttgaaaatgctgcacaactttctttaggtgccaacttcgatttagaaaaaattgctggttggaaagatacaacagcgagcctagtcgtgactaaacgtgacggcaatgcattaactcttgagcgtattaaagacccacgttctagccaattgggcaatgctcaagaaatttatggtcgcgggaaaatttggcgtttatcccaagcatgggtgaagaagggctttgttgataatactgtacaggtcaaatttggtcgtatgggaatgtcagaggactttaatagttctcaatgtgagtttcagaacttattgctttgcggtgggcagttaggaaaatcaattggttcaatttggtataactcaccagtcggtgtttgggcgacaaacgttaaatatcagtttgcacctgagtggactttaggtattggtgtgtatgaggtcaatccagacaatattaaaaccgaatcaaacagtgatggttttaatctagatatgaacaacgtgaagggcgctaccataccagttgaacttgcatggaaaccaaaacttgctgcttttaatggtttaccgggtgaatataaagtaggtgcgctgtactcaaccgcagaagcaaatgatattaaaactgcgggtaaagtgcatgacggaaaacaaagcttctggattaatgcacagcaacaacttagccatgccggccaagatccgaaacgcggtttatatgtcagttttaacggcgttataaatgataaagcaacgacttttgttcaaagtacacaacaacttgctctttggtataagggaccgtttgatagccgtccaaatgattcgattggttttggtattgccaattatgtagtcaatgatcgtgctaaagataaacagatctcgacaaacgaaagccgcggatactatagctatgattcgattgcatctgactatattccaattcaagacgacgagttaaatgtcgagttgaactatacctatcaatggtctccggccgtcatgttacgtccaaacattcaatatatccatcaacctgctggtgtgaaagaagtcgatgatgcttgggtggcaggcctgagtgtaaaagttaatttttaa

SEQ ID NO: 48241 - DNA, 834 bp, Acinetobacter baumannii
atgaacatgaaaacattattaagcctaagtttgcttgcactcccatttttcgcagcacaggcaaatgctgagccagttactttaaatgctcaaacacagcctactgccacagccgttaaaacgattgttccgattaccgcaaaaactaaagaacaagcattggcacaagctcaagtcattgcaaatacagcagatgctgatttagcagagttccgtatcgatttattaagctttgccagcgatacaaaacaagtcattgccttaggtcatgagctgaaaaagattttaggcaataagccaatgattgccactattcgtaccaaaaacgaagggggccagcttgaaattagcgatgctgattatggtaagacttatcaagcttacttaaagaatccgttcatggattggttagatgttgaaatgttccatgatcaaaaagtagtttcagaaattgttcaaaaagcacatcaaaagaaagtgctcgttgtcatgtctaatcacgacttccaaaaaacaccaagccaagatgaaattgaaaaacgcttgttaaaacaagatcaaatgggcgcagatgttctcaaaattgctgtaatgcctaaatctaaacaagacgttttcactttaatgaacgcaactttaaaggtaagccagcaaaccactaagccattattgacaatgtcgatggggcaattaggtacgatttcccgtgttgcgactgccaatatgggcggaagttatagctttggcatgattggtcaggcttctgcaccgggtcaaattgatgtgactaagctcaaacagattttacaaacagttcaaccaacaaacccataa

SEQ ID NO: 48242 - DNA, 1629 bp, Acinetobacter baumannii
atgaatcagttaaataatttacagcataaatttccagtagtggacggtattcctgaaagtgtacgtttgccatctcaaattcatcagcgtgtttcactcgtggatggtgagttgaagttatgggctggtgcaaccaagaaaacattatctccaatctggattcagcagcctgacggtagcctagagcaagttgaacttggtagttatccagtcatgggcgaaaaagaaagcgatgaagcattagaagcagcggtacgagcttataacaatggtcgtggcgaatggccaatgatgaaggttagtgagcgtattgcatgtatgcaaaatttcattcagcgcatggtagagcaacgagatctgattattaagctgatcatgtgggaaattggcaagagcttggctgattcagagaaagagtttgatcgtactatcacttacatgcgtcaaaccattgatgccctgaaagatctggataatgccaactcccgctttgtaattgctgaaggcaccattggtcaaattcgtcgtactccattaggtgttgtgttgtgtatgggaccatacaactacccgctaaacgaaacctttgcaaccctgatcccggctatgctgatgggtaatactattatttttaaaccacctcaatttggaaccttactatttgaaccactgctagaggcatttcgtgattcatttccaaaaggggtgatcaataccatttatgcaccaggttctctagtggtgccgcatttgctggcatctgggcaaattaatgtactggcactgattggttctagtaaagtggccgaccacttgaaaaagcaacatcctaaatctcaccgtctgcgtgcgattttggggttggatgcgaagaatgcagctatcattttgccagatgctgatttggacctgacagtgaaagagtgcctgttgggtgcattgtcattcaatggtcagcgttgtacagctttaaaaatgctgatggtgcaccgttcgatagccgatgagtttgttaaccgtttaacgactgagctggctaagttgaaagtaggtatgccgtgggaaaaaggtgtatctattacgccgctaccaggcatgcaccgtacagtctacatgactgaagtgattgaagatgcggtggcaaaaggagcaaaagtggttaatccggaaggtggtgaattctgcaaaaccatgttctatccagccgtagtttatccagtgactgaggggatgagactgtatcgcgaagaacagtttggtccagtggtaccagttgctgtttatgaagatattgaaactgtattggattatgtcactacttctgatcatggtcagcaggtgagtattttcggtagtgacccagcgcaaattggccatttagtcgacacactcgtacatcaagtttgtcgtgtaaacatcaactgtcagtgtcaacgtggtcctgatgtattcccatttggtggtcgtaaagattctgcagaaggtacactttctgtgcatgatgcgcttcgtgcattctcgatccgctctatgattgcggctaaacagacggatgacagtaaaggtatgctggcttctatggtgtctgagcactattcgaaatttgtgaataccgactttattttctaa

SEQ ID NO: 48243 - DNA, 144 bp, Acinetobacter baumannii
atggttcgttggaccgctgaccagctaaaaatccttcgtaaagttgcttttgaaaacgaaaaacaacctgctgtttacatccgtgaatttatgctcaaacactgtccggaattagcccagtcagaaacggatgagcgattgtaa

SEQ ID NO: 48244 - DNA, 342 bp, Acinetobacter baumannii
atgaaaaatgatgatttgtcgacgcgcggtagtcggcttcgtgatgagcggaaacgcttagggtttaataatcaggaagatcttgctgatattttgaacgttaaaaagaactcagttgtacgttatgaaaagcacaatgcagccttagatactgatcaattagatctgctcgaggaccacggctttaatattccttatattctttggggaagagttgaattgaatagcagtgacctagaagagaatgaatcgaagctcatccaattgtatcgtcaaacacgtgaagaaatgcgccctggtttagtttccttagttgaaacttatgccaatcaatttaaataa

SEQ ID NO: 48245 - DNA, 216 bp, Acinetobacter baumannii
atgcactcaacactcgatataaatggccataaaaaaatgacggctgaagatatactggaagaaattgaatatccactagataatcttgaaaactttctactggcaatgacaaaaatgaaagttgatgacaccttaaaagaaaaagaattttcggcaatcatcaatatgattcatcaccaagtggtccatataaaccgcgctgtacacaccaaatga

SEQ ID NO: 48246 - DNA, 246 bp, Acinetobacter baumannii
atgaaaaatatcattgaacaactgtacttaatcatacagatcaagaagggctatattgagctaaacaatttacaagctgaagcccaattaccagcgcatttgaaatatgtttaccgaatggccaatattcttattaaaagtaagaatcgccaccaaatgttcccaagtttggtactaaagacattatttcctgtaaaagttcgattatttaatcgaattaaacaaaggcattcgaccaaggtctag

SEQ ID NO: 48247 - DNA, 195 bp, Acinetobacter baumannii
atgaaaacattcgctttaaaaaactcccctactcaaaattctgttttagaacacactcctatttatgacttggatgcttaccaccaacgccaacgtcaattcaaacgtaaaaagctactgaagaaccttttcgacactgccatatttgccagtgctgctggcttcactttctcattactgttctggggagtgtga

SEQ ID NO: 48248 - DNA, 738 bp, Acinetobacter baumannii
atggctactttttttgcacttttatttttagttggtctagttgcaatggtggttggtctaattaagccagcattattcaataaaattaatcctaccaattcgcgaataaaaattttagttggcggtgttgtaattaacatggtgcttctggctatggttggcgtttttgcacctgaagtcgaaaagaaagaagtaacaacaaaacaagaaactcagagtgaacctaaagtacaaaaagtagctgaagtaaaaaccgacactgttaaatctgaagaagctaacttagggatgacgccagaacagtttagacaagcttttaataagagattgaaagatttagatattactattgttcgtccagtaggtgagtttaatattaaaaatggtgatgtacgtgatgtatttcaggtggaattctcaaatgaagttaatatgactggagctgtaaataaagatggaatgcttagaagcattacttttattactgttccgggaaaagactatgaaaaaaccatggtggaaactttgttactgactggaatttcatcgaatattgtgaatacgccagagaacagggacagaacagggaaagttgtaattgacctgattgatggggctctcaaaggtatagaaaaagagggtaatactcatacaaaaacagtgggtaatgtcgaatatatggctatggcaagtaaatttacagggctttggttttcgatggaaccacctgagaagtaa

SEQ ID NO: 48249 - DNA, 162 bp, Acinetobacter baumannii
atgaaaaacacaactgaattggttaaagctatagcagaagctattaatagtttaaatggggaaataatgaaaagttgggaacgttgttacgtagaatttttagttcgtattgttgagccactgggagagcttccagaaggttattttgttagaattccttaa

SEQ ID NO: 48250 - DNA, 1374 bp, Acinetobacter baumannii
atgttgtttagccctgatgatttgaaaaagttaacgattctaaatacttatgctagcttagttgatgaagcatacactgtcttagaacaatattattgtgatgaagcgaaagaaagaacttataaccaacaagttaaattattatttgaagaatttaaaaatcaaattttttatattgaaaatgcaattttatatataaatgtagataaagagtttttacaaacatttataacagaatatgtcgtaatgttaaatagagttgttacaggggataatacaccccaccaattacttgtgggtgttataaataatatttacttgtttttatcaaattttactgttgaagaatcgccctctcctttaaatttacattcctcaatacttgtgaggaaagaagaatttagtagactcattagtcttttgaaaggaatccttagtgaacttaataaaattggatcagatgaattaaaagttatacaagataaattattctctttagaagatagagtatttttattaaatgctaaattgagatttagtgatgataaaattgaaaaagcaattgaaagctttttgaaaaagaaaaaggatgagtttgttaaagaagcagaaggattaatagataatcttaaaggagatattagtaattataattatgtattacaaaatgatttatccattgaaatagataagttgaaaaatgatataaatactaaagtggatgtgttgaatgaattaggtataagccttcactcctatcaaaatgctttagctgtaagtacagagaaagaattctcaaaattttatataaagaaagctaaagaagaaaaaactatttactatgtaatgtctggagtatctatattgataattgtcctttcaattgtcttggcatggtgtagtttagaaacatattatcaaaattatgttaatcctattggattaaaggaaacattgaagggactaacaaatattcaagtagagtgggcacaaaaaacagcatttttgtatatgtcattaagattagtaatgtctatattattgtttttaactgtgatttatacaagtcgtcttgcttaccgttcttatttacactggcggcatagtgaaaatactcatctaaaggtttctacactccgtccttttataggtgatttgccagatgcggataaattacaaattaagaaagatttagtaccagatttttttggaaaagaggctggaaatattgattgtaacaatgaaagcttcaaagatctgccgactaatgttagcgcgcttgcagctaaagcaatcgagcaggtaggaaataatattaatactaagagtaatacaggaaaaaacggtaataaacctgaagataaaacagaataa

SEQ ID NO: 48251 - DNA, 204 bp, Acinetobacter baumannii
atgacaaatttccaaatctttttcatcgttattcttgttttagccctcattattttttggatgatcctggattatcaatttactcgatacatccgtgaaataaaggctttttataaggaagaaaacctccagaataaaagccaaatcaaacttaatctagagatacataatgggagcaataaatgtggctttacccaatcttaa

SEQ ID NO: 48252 - DNA, 201 bp, Acinetobacter baumannii
atgacagacaaaatcgatattgcccaagaactacaacttaaacaggttcaaattcaacctaaagactttagccgcccttcccttaccgaatgtgaagaatgtggaaatgatattcctgttgagcgtcagcgctatggttctgtaaccctttgtgttgaatgtaaaaatacacaagaaaaactttcaaaaaggcacttttaa

SEQ ID NO: 48253 - DNA, 240 bp, Acinetobacter baumannii
atggctcgaccaagatcccgttataaatgccctcactgtggcgaacccttttcaatccgttcaagtactgaacttaatcctttactccgttcatttcaggggcagtgtcaaaacttagagtgtggctttactgctcaaggattctttgaattaaagatccagctttcccctccagctcatcctaatcctgaaattaatttacctactccagaccgtacttggaaaatggagcacgcatga

SEQ ID NO: 48254 - DNA, 1314 bp, Acinetobacter baumannii
atgtttaatcaagtcaccactatgctaaatgaagcagctgattcatatcagactgaaactgaatatcctttcccaatttatcgcctagaagtagatggtaatgacatctcccctctcgttgtcgatcgtttaatttctctcaatattaaagacaatcgtggtcttgttgtagattctgtcgatatagagcttgatgattctgatgggcaattagaaattccacctgaaggcgcaattatccaagtttggattggctggtcaaatacgggcctggtcgacaaagggaaatataaagttgaatccgtcactcatcgcggtgcaccggacgttttaagcatttcggcattcagtaacgatgtatcggaaggtttaaaacaaaagcgtgaacgtagctttagtaataaaacaattcaggtgatttttgaaaccgttggtgcggaatatgcgcttaaaacaattgtgcatgacacactggccagccgagtaatttcatacattgctcagaacgaaagtgatgcaaatctggttacccggattgcagacgaacatgatgctattgctacggtaaaaaatggccacttaattttattaccacgtggagccagtcaaaccgcttccggattaccccttcctaccgcccaaatttttagatctgatggtgatggccacaattacaccactggtaacggcacggacagaatcaccggtgttaaagcctactattacgatactggtaaatctaaaaagtcatatgttgtaatcggtgacaataaagacaatttaaaagagatcagatacgttcaccgtgataaaaaaacggctgaattagcggcacaagctgaattcaaccgttgcaaacgtgcgtctcagaaattgtcatatacctttgcctttggccaacccaaccttatcccggaacaagagtttgtattcaccggtttaaaaccgcaaattgatgacattgtatggcttggtacaaacgtaacccacaatttaacagatagtggttttacaacgaatgttgaactggaggcgcaactaccaaatgcagatgatgtctcagctctttttgaacctgataaagagggggataaagaattaaaaaaacaaaataaaaaaaggactggtcggaactatgctgactacaccggagtaatcgttttttatcgtgagaatggtaaagatctcaaacttacttctggtgatcaaagcaatcctttaaagctcatcaaaatatataaaactaaaaaaacagcgaccattgctttaaagagggaacaggcccgaataaataaagctaagaagggtaaataa

SEQ ID NO: 48255 - DNA, 441 bp, Acinetobacter baumannii
atgatgatggctttaggcttgtttgtattttcattgcgaacagctgcatatcaggaattgcaacgtgtaactaattggagacatccaagtaatagccgggtaggttctaccccggcttatcagttcacgggaaaaggagaagacaccattacgctgaagggggaaatctaccacgaaattacaaataaccgtgttgttctggatcaagtccgtcgtatggcagatacaggcatggcttataccttaatcgaaggtaccggcaagatttatggcttagttattattgaaaatatggaagagacgaaaacatatttctttaaagatggtgcagcacgtaaaacagaatttaccctgacactaaaaattgtaaaggaatggaaacctactttaattggaacgcttctaggtatggctggtggcgtagcaaataggttgatataa

SEQ ID NO: 48256 - DNA, 2541 bp, Acinetobacter baumannii
atggcagatttaaaattagaagtcctatttaatgcagttgataaattatctggccctataaaaacaatcgttggtggctctaaaaccttatcagatgcctttaaaaagacttcatctgaactgaaggcactagaagcccagcaacgcaaaatttcaggcttcaggcagcttaaagaacaatctgaaaaaactacacaggccattgaacagaataaggaaacacttaaacagctcaaaacagccatgaatattggtgcccctactgagcagatggttaaggatttagcacgtgctgaagctgcacaaaaacgtctgaaagcggctcagaaaaatcaaggtactgaaatgacggctttagtccgtgaacttaatcaggctggtattagtgtcgacaacctggctgatgatgaatcagagctgaagaataaaatccatctcacgacgatggaaattaacaaacaaaaggaatctttagaacgtcaccagaaagcccaaaagcagtacgagcaaatgcaaggacgtatggccaaagcttcggatttggccaagaaaggtctagcaattggggctgtaggtactgctggaatggcatacagcttgaagcaatatgaagatgctgaagatgctgcaatgggcctaagagtgtccatgatgcaggctaatggccaagtatccaaagaatatgcccagataaataaactggccaatggactaggtaccaaactacctggaacaacagctgactttcaaaacatgatggctgtacttatccagcaaggtatatcagctaaggcaatcttgggtggcgttggtgaagctgctggttatctcggtgttcaaatgaaaatgccatttgctgaagcagctgaatttgctgcaaaaatgcaggatgctactaaaactactgaaaaagatatgctgggtttaatggacgttatccagcgtagttattacctaggtgttgatagcggaaatatgctgcaaggctttgccaaaatttcggctggtatgaaaaccattaaggctgaaggtctggaaggcgctaaggctattgccccgcttttaatcatggccgatcaagctgctatggctggtgaagctgcaggtaatgcttacagcaaaatttttaaatctatgatggattctaaaggtatagctaaagcattaaaagatagtggaaccggtattcaaatgaactttactgatggtaaaggagaatttggtggactggataaaatgttcaagcaacttgaaaaacttaaaggtctatcaactgaagcacggttacctatcctttcagatatgtttggtaatgacgccgagactattcaagcattaaaccttctgattgataaaggacaagctggttataacgaagttgtggccaaaatgcagaaacaggccgcactacaaactcgtgtaaatgctcaattgggaactctcaaaaacttgaaggatgcagctggtggaacatttaccagtatgctggcgctgtttggtgagcagctggcacctcaatttaaaatgcttattaccgggttcactaatatcaccgagaatgtcacagcttgggcacaaaagaatcctgtattagccaataccattgctaaagtcgtggctggcggtgttttacttgtaggcggaattagtgcaatagccttgggacttgtcacaattcttggtcctttggccatgcttagaatgtcgctcggtgttttaggcggtggctttggaattattaccggtctttttaaaatgtttcttatgcctattaagattcttggcacgagtttgctatggctggggaaaatcttcttaactgtttcacgtttcatgatggccaatcctattattttggctatcaccctcatcgctacagcagccttcctgatttataaatactggacaccaatttcaggattctttgtgggcatttggaatacggttaaaacttcctttaatggcgggattaaaggcgtatctgccctaattattaactggtctcctattgggcttttctatgctgcctttgcaaaagtcttatcctggttcggtgtagatctaccagcaaaattcactggctttggcgcaatgatcctaaccggcttaaaaaacgggattctttctaaaatcggtgaggtcaaaactgctctctccggggccgtaaccggtgttattgaaaaagcccgaaatcttctaggaatccattccccttctcgtgtgtttatgggcattggtgactacaccatgcaaggcatggcattaggtatttcacagaaccataacttacctgttaaagcaacacagcaagctacgcagaatgtaataggtactggtaccacagcaaaggttacaccagtgacaccgatccgagcacaacgcggtggcagcttcattagtaacgacacaattcaaatcaccattaaagcagagcacggtcaaccagtacgtgaaacagctcgtgcgttacgagctgaaatggtacgtctccaacaagaagaacgcgatgctcgtcgtagattcttaactgatacggagtaa

SEQ ID NO: 48257 - DNA, 342 bp, Acinetobacter baumannii
atgaatcaaattgatcaagcgattaaccaggaacaaattaaaaacccgaatgaagaagtggtgaatttagaagaaccaatccgtatgggtgaacagatgattactcaggtcacaattcgtaaaccgggtgtaaaggcattaagtggtaccagtctccaggctatttaccagcatgacgtagatgcactttgtaaagtccttccacgtgttacttccccagcactgacacctcagcagatctaccaaatggaccctgtagattttgccaatttaggagggcatttggtcacttttttgtacccgaaagccttacagaaggaaatcaaggctcagacagcctag

SEQ ID NO: 48258 - DNA, 519 bp, Acinetobacter baumannii
atggctttacctccaaaattaaaaaatatgaacttctttaatgaagggaatagctacttgggcaaagttaaaactgtgactttacccaagttagcccgtaaaactgaagactaccgtggcggtggtatgaacgggaccgtaaaagtcgatttaggcatgtccgatgatggcttagtacttgagtcaacttatggtggtttagatcttttgacactccgtcaatttggtatggaaaaaattgacggtgtttatctccgttttgctggggcataccagcgagatgatgatggcgaatatgatgccgttgaagtggttgttaaaggtcgccacgaagaaattgacggtggtgaatcaacacctggtgaagacacagaacataaagttgtgacgaactgtgtttactacaagctgacagtaaacggtgttgttgaagtcgaaattgacattcttggcatgaaagaaatgatcggtggcgtagatcgtcttgaaaaacaacgcaacatcttaggcattttataa

SEQ ID NO: 48259 - DNA, 1176 bp, Acinetobacter baumannii
atggctatagatcaataccaccacggaatccgtgtcattgaactcaatgacgggatccgacccatccgaaccattgcaactgcaattccgggctttgttgcgactgcagatgatgcagacccattggttttcccagaaaaccaagcagtactaattacaaatatacaagccgcagtagctaaagccggtaaaaacggaactttagcaaaagtacttcagaatatggccaaccagaccaatgctatttgtgtcgtggtccgtgtactcactgcagtagatgaagcagctcaaactgcaaacgtcgttggtactgttaccgctgaaggtaaatataccggccttaaagctttgcttgttgccaaatcaaaattaggggttcagccgcgtattttaggcgcaccagggcttgatactcagccagttgctactgaattagttgttattgctaaaaagttgcgtgctatggcttatgcgtatgcatggggctgtaaaacaaaagaagaagttgtggcgtatcgtgaagcgttttctgcacgtgagctaatgatcatttggccaaactttgtagcatttaatacaacaactgctcaaacagaaacagtgccagctgtagcggttgctatgggattacgcgcaaagattgataacgaaatgggctggcataaaaccctttcaaacgtagccgtatctggtgttacgggtattgatgctgatgtgacttgggatctccaagatccagcaactgatgctggctatctcaacagcaatgaagtcacaactttaattcagcatgaaggcttccgtttctggggatctcgtacttgttcggatgatccattattcctatttgaaaactatacacgtactgctcaagtcttgtccgacaccatggctgaagcacacatgtgggcaaatgatttacctcttcatggttcattagtcacggacattcttgaaggtcaaaaagccaagctacgcgaactcacacgcaataaatatctcattggtggtgatgcctggttcgatcctgaagcaaacacttccgataccttgaaggttgggaaattggccactgattacgattacacccctgtcccaccgttagaagatctgacattccgtcaacgtattacggatcgttatctcgctaactttgctgcatctgtaaaagcttaa

SEQ ID NO: 48260 - DNA, 1074 bp, Acinetobacter baumannii
atgggacctaaccaagtttttggggaagttactatgggtatgactctttcacgtgcatcgaatatcaataaaacaggatatggatattttgcatatggctcacctattgccagaagaaaagatatttcttgcatggggcatgaattcggctattggcaagatgactgctggatgtcacaggttaaccaaatttacgctaccacatgtaaaaaagggattgccattcgaggtggaacatctacgatcggtaccaatatttatgcagaccgatgtgatgagtatggtatagacttatatggtcttacatacagttcactcacagtacatgtagatggttgtggtataggtacaggatcaataactggctatcctgctatcgatgcacagtttacaaaaggtgttactctcacagcctcatgtgaaagacatcgcgggcctgagtttaatattcacaatagtgatggcctggttgtgaatggtggccgaagttatggtagtggtaatgtgagtagtcctactgcaaaaattgtatgtcgagattcagtatttcaatttaatggtttttcttggagatattctgtttcagctgaacaggcgtcaatgtacagtttcattcaagaaattggttcaaattcttcttatgaatttaaccaatgccaagggaatagtgcttggaataattttccagcacaggtttctgatgtttcatatttagggagttttaaaaagagtagatattcagaagaaaatggttacgcatcaagcactataaaacatgataatacttcgtttaaaaaactatgttatgtagcgaatactccgatttttaaagtcctttcttgtatctgtactagttctgaccgttattacgatttcggtgtcacaccgattcgtaaatcacaaatctcaatagatcaagctaatcctacatctctcacggcccagcaatatacaaatggcgttgctgacaacgcacaacctttgcaagcctatattggatcagatggatggttgtatatcaaaccgtctgcatcaggggcaaactatgattttaaatatgtaattgctaagtaa

SEQ ID NO: 48261 - DNA, 1089 bp, Acinetobacter baumannii
atgcaagaccaagctttgccatcattccctcaagatttaaatgaggatcaaagtattacacgtccaccaatttcacactcaggtattcatcattttaaatttcacggtaatgcctcagaatattttggaatttggatcgttaatattcttttaactattattactttaagcttatatgcgccttgggctaaagttcgtcgtttacgttatttctatggaaatacagagttttttgaacgtcgttttgattttactggtattccaaccaagattttgattgggcgtttaattgcattaggaatttacgtagcattttcaatttcatcacagtattcaatgattgcaactgtagttggaatagttgtgttatatatggctgtgccttggctaattcgcgctactttacgttttactgcaagaaatagtaagtatggtaacgcacgcttttattttggtggcactataaaagaatcttataaaattttccttttaagtatattggtatatatctttacattaggaatttttacgcctgtagctatttggctatataaaaaatattatcttaatcacctatatgctggacaattaaattttaaattaaacgcgaactggactgcatatatggctgcagtttatgtacccatttttattgctcttggcatcattgctatcttttcaattatttattttagtattttaggaacactttccgggttctcatcgaattctgtaatctttgggatatttatgatgtatgccattattggattatttatttatccattaattgctgcgcgtcttttcattactacatggaacaatactacagttggaaacagtcaatttaaaacagactgtaatcaatggcgttttgcatggattgtagcatcaaactgggtagtaaaaatcttaaccctaggtttaatgtctgcttgggccgctgttcgcattcacaaatatcaggttgaatcaatgagcttaatcttgctagatgatccagataaaatgatgaatctagctcagcaagaacaaagtgctttagctgaagaaatcagtgatatttttgatattgatatctccctataa

SEQ ID NO: 48262 - DNA, 1443 bp, Acinetobacter baumannii
atgtttttaagaaaaacactttcgattgcattattagcaactgcttcatcggctgtttttgcacaaggtttagtgcttaataatgatgatttacgtaccgacttaaactggttgaatcaacaaggtgttattaacatcagcacttctacttggccattaagtggtgatgaaattcaaagagcgctctctcaagctaaagtgactcatccagcacagcaaaaagttattaattcagttctcaatgcattaaaggcagataacgatacagttaaagtgggtgcttttgctgaaactgatatcaaaaatattcctcaagcatttggtgataaccaaaaatcgcagtaccaaggttcattagagtttaatgctggtggtgaaaattgggatgcaaaaatccgtgtaaacgcagaaaaagaccctcaaattgatagtgggcatgacgttaacgttgagggttcatatgtcgctggtaaactctggaaccagtggcttgttgcaggtcaaattccaacatggtggggacctggacatgatggtagcttaatccgaggcgatgcaagtcgtcctgtgtatggcgtgacggcacaaagagctgtacaaaatgcttttgagacaaaatggttatcttggattggaccttggcaatatcaagcttttgcaggccaattagatgattataaagcggttcctcatgcgaaattattaggcttacgtttaactgcaagacctttaccctatttagaactaggtgcttctcgtactttacaatggggtggtgaaggacgttctgaaagttgggattctttgtggaatgcaattaaagggaatgacaatgtgtatgattctgatgaagatcgttctaaccaaattgcaggttttgatgctcgtttaaatctacaatctcttataaatgctcctgttggtatttatggtcaatatgttggtgaagatgaagctggactacttccttctaaaaaaatgtatttagcaggagtcgactattcttctagctataataatatgccatatcaactttatgcagaatgggctgatacccgcactaataatgatgtgaagggtatttcctataatcattatgtttataaagatggttattatcaacatggcttcccattaggacatgcgatgggtggcgatggacaaatgtattctgtgggtggtgatatccgctttgacgtgatgaaccgtttaagcggtcgtgctatggtggttaaagttaaccaatctaacttggcaattaataaagcattccctaaagatgatgaaattaaagcgcttgatctaacttggacacattacatcaaacctgatcttccattaaaaattaatggttgggtaagtgattctgacttagaaggtaatgatgcgggtgcatcaattggagtggaaattcctctagagcgtaaaatgtttggtttctaa

SEQ ID NO: 48263 - DNA, 1275 bp, Acinetobacter baumannii
atgcaaattgccaaattaagaatagcaattattgggttaggctatgttggcttgccattggcagttgagtttggaaaaaaggtaccggttgtcggctttgatatttatcaaaaacgtatagatgagcttaagagcggtcaagatcataccctagaagtttcacctgaagaattaaagcaagctgttcacctcaactatactgctcatttagatgatttacaggactctaattttttcatagtcacagtgcctacaccaattgatgactttaagcagcctgatttaactcctttaattaaagcctcgacgagtattggacaggttttaaaaaaaggtgatgtagtggtatatgaatccaccgtatatccaggcgcaacagaagaggtatgtattccggttttggaaaaagtatctggactcaagtttaatcaagatttctttgcaggttatagtccagagcgcattaaccccggtgataagcagcaccgtgtaactaatattttaaaaatcacatcgggttccacacctgaggtcgctgattatgttgataaagtttataatttaattattgaggcgggcactcataaggccccgaatataaaagtagcagaagctgctaaagtaatcgaaaacacacaacgtgatgtcaatattgctttgattaatgagttggctcttatttttaataaattagatattgatacagaagatgtacttaaagcggcaggaacaaaatggaactttttaccattccgacctggattggttggagggcattgtataggtgtagatccctattatcttactcataaagcccagtctatcgggttgcatcctgaaattattttagcagcccgtcgtttaaatgatcgaatgggcgagcatgtagcgactcagcttattaaagaaatggtgaagcaacgaattcaggttgttggtgctcgtattttagtcatgggtcttagttttaaagaaaactgtcctgatattcgtaatacaaaaattgtcgattttatcaaagccttgaaagagtatgacttggatttagatatttatgacccatgggtagatgatacagaagtacaacacgaatatggtttagcgccaattaaagaattacaacaaggcttgtatgatgcgatcgttatcgctgttgcccataatcagtttaaagcaatgagtgcacatgagttctatgccttaggtaaagaaaagcatgtgctttatgatttgaagtatgttttagataaatcagagaccgatattagactttga

SEQ ID NO: 48264 - DNA, 990 bp, Acinetobacter baumannii
atgattttacttagtgtgatcattccatttttcaataccttttcacgtagtgaaaaggtattgaaacgtgttcgtgatagtttacaacagtattctgatgtagaatttatactggtagatgatgggtcaaaagatgatacattggctcagttaagacaatactttcagattgataaatgctctgccttattaaaaattatgactcaggagaataaaggacctggcggggctagaaatacgggcttaaatttagcacaaggaaaatatatttggtttgttgattctgatgatgatttctatcttgatcaaatttatcccgatttaacattagataatgactttgattttattgattataactatactgaaaatggtcatgtaaaaaatagtatgggattagaagcgggcgtttattatattgatcaagttgatttatataaaaatttaggacgtatttggactaaaattttcaaaagagatttttttgttcagaatttgttacgatatcctgaaaaatgtatatatgaagataattattttgtatatacctttccatattttataaaaaaattcaaaaaaattgaaaaaattgcttatttatatgaagtagaagttttatctgtaacaagagaaaccgatatttcgattagattttatgatcggcttttaacttcttataatggtttagattttctaaataagaataatgcttggtttgaaaataaatctgcacagcaacgttttaaagaaatatttttatacaatacagctaaaaaaatattgttaaacatgaatttagaaagattgaaaataatatattatattttttgcacttataatttcttggaaagagaatatataatttctaatataaagtcaagtaatcaaaaaaatagaatagttgattttatacgttacttctttccaaagaaaaattatatgccatattttataaatttaaacaagaaagtgtggcatattaatgagtag

SEQ ID NO: 48265 - DNA, 1194 bp, Acinetobacter baumannii
atgagtagcaagaaattaggacatgcatttctttatttatttggagaattggtatcaaagggcgtaccttttgcattattgccttatttaactagaaaattagggacagaaggttttggtgagctttcttattatctgtcgattgttgctgcgattatgatttttattagtctaagtcaagaagcagcaactttaagttattattataagaaaggtaagaacgcattaccctatttaattgtctcaggttttttaattaacctggtaatgtcgcttttagtttcatatgtcctatatttctttattaacaatacatttattatcatattattggctagtttaagtgttatatatagtttttatttagctgtactacaggcccaacaaaaagttagacaatatatttttgtacaaatcagctgcgctttatttatagcattatttacatttgtttttttggaatacaatatttctgattttgtaaataaaagattagaatctttaattttagcttattttctggtttctattccatttataatatttcttttaaagagtattagaaaaattgatgttagaaaagttaggctctatagtgtttatatacttatatatggtataccccttatccttcatcagttgggtatatatgtgaaagggcaattagatagaatatttatttatcaacaatattcaaagtctgaattaggaatatattctgctggcgttcaagtcgcagctcttttgcctgtggtattaatggcagtaaataaagctataattccttattattatcaatcattaagagaaaagaatttaacaattcatgacattaaaaaatatactctttatagcttaccattatgtttaattccagcaatattggcatggtgtatcccagaaaaattgtttctttggtttttgggtcaggattatgcaaattctaaatattatattgttatgtacttattagggtttggtttaacattaccatatttgcttttggtaaattactttttttatcatggaaaaaatttagttatttcaaaaataacgttaacagcttcattgtgttatttaggtttattatggctcttttctataagggatattactttagtgccctatgctttaatattaagtaatattttgttgattggtattctatggaaaaggataggctatgagaaataa

SEQ ID NO: 48266 - DNA, 723 bp, Acinetobacter baumannii
atgagtctgctcgctttctcctcatatgcattaaacggtgtagatgcacaaaagtttttacaaggccaagtgactgtagatactgaacgtttagctgaaaatgaaacacgctatacagccatttgtgatcttaaaggccgcatccattttggcttgtggctaaaaaagaataatgcagaaagttttgacattattgtcactcaagatcaagctgaagaattcgcgaagcacattaaaaaatatggtgctttttcaaaaatgaccttaagtgaacaaggtgctgtattcccaaaagttgtgaatggccatactgagttcagctctacagaaactgatatttccgaatggcaaaaacaagccatcatgacaggtcaagcatggattgctcaagcgactgaacatgaatttcagccacaagaattacgtttacatcaacgcgaaggcgtcaattacgataaaggctgttacttaggtcaagaaattgtggcgcgcctttggtttaaggcaaaaccaaaacactggttgcatttagttcaaggtacgggtgatgcacctgctccagcaactcaactgcacaatgatgtagaagtggttaatagtacccaaactactgacggttatattgccttagttgttgcgaaacctgccgcccttcaagagttaggtcttcaagttttagatttaccagaagctttaagtggtgatgttgctagaccacaataa

SEQ ID NO: 48267 - DNA, 1041 bp, Acinetobacter baumannii
atgtgccaatattcggcaacagatgatggtgaaataacctattggcatgaacagcaatgggcaaattacgcgttgtctggagctgggctatgtattgtggaagctacagctgtacaggcggaaggtcgaattagttatgcagatcttggcctttggaatgatcagcaacgtgaccagatcaaaactttattaggaaaagttaaaacactttctcctatgccatttggaattcagttagctcatgctggacgtaaggcatctactgaaaagccttggttgggtaaaggccaaattgcaaaagatcagccacatggttggcaaacagttgctccaagtacaagtactttttcggttcatgatgcagcgccacatgctttaaccattgccgagattaaacaaattcaacaagactttgcagctgcggcaaaacgtgcagttgaagcgggctttgagctaattgaggtacatgctgctcatggttacttgctacaccaattcttatcgccaattgccaatcaacgtactgacgaatatggtggctctttagaaaaccgtatgcgtatgacgctagaggttcttcaggcaataaaacttgctgttccagaaggttatccggtaggggtacgtttatctgcaacagactggatggatggtaatgaacagtgggatattgagtctacggttggtttatcaaaagccttagagcagttaggtgcggcctatattcatgtctctagtggtggtttacatgagcatcaaaatattactattggagctggttaccaagttcctttcgcggaacaggttaaaaaacatgtatctattcctgtgattgcggtagggcttattactgacccacagcatgctgaacaaattttagaaaaccagcaagctgatgccattggtcttgcgcgtgcaatgttatatgacccacgttggccatggcatgctgctgctacattgggtgcaaaagtcaaaattgctcctcaatatttgcgttgccaaccacatggcttaaaacagctttttgattctttttag

SEQ ID NO: 48268 - DNA, 474 bp, Acinetobacter baumannii
atgagtaatacacaaacctacggaaataataatggtgttgaactatttctagttattgttggaatagtgatagttgcttgtctttttgcaatttggaaagcaacgaagtcattaggattagatatgtggacgggcgtacatactgttgggtatctaattgcatggcttaccgtgatgatcggtatttataaaataggattaaacgttccaaataagttcttaatccctgtattaacaatgatgttttttgcttgtttcctccctgtattaaatgattatgcgttacaggcttctacaccaagttttcatatggtgccacagctttcttatcttccagaggagtctcaaaagatggaatttggggcaactaaaattacggtctggtggggcatgtggtatgcaaaagttatttaccttgcgatagccggattaattggtgttgggatacaaaaagcattttttaatgatgattaa

SEQ ID NO: 48269 - DNA, 2877 bp, Acinetobacter baumannii
atggcgaactatcatttatcagttaaaaccggtaaaaacgtaggttcttcgggaagtcgaggggcaagccattacgcctatattaatcgtgaaggtaagtataagagagacgatatcgagcaaatcgaatcaggtaacttgccatcatgggcagtagacgcccagcatttttggaaagcagcagataaatatgaacgtgccaacggccggatttatactgaattagaaatctctttgcctagagaattaaaccaagaacaaagacaagagctagttcaacaatttgtagaaaagactttaagcaaaaactttacgtattcctatgcgattcatacacctttagcaagtgatggtgaacaaaatccacacgtacacctgatgttcagcgaacgaaaattggatggtattgatcgtacagaacagcaatttttcagacggtacaatcctaagaatcctgaattaggtggggcagggaaagaccgctacttctcagcaagaatattcgtttcggatgtccggatggaatgggcaaaccatgccaacgactatatggaaaaattgggattagatgcccgaatcgaccaccgcagttatcaagctattggtaccgagatccagagccagaacttcagggctgattacgttagtcatgatcagtacagtattaacgaaaacattaaaaatattaagcgtcaaaatggtgaaaccattattgagaagccgagtgaagtgttaaaagtgctcacggctactcagtctgtttttaccatgcgtgaactcgatagattcttggttaatcatactgatggtgaggaacaatatttaaaagcccgtgaagctgttttgatgtgccctgaaatggccgttttatatggtaaggacagtgttgttttatcttcaaatgaactggtcggaattgaagaatctatatcaacactgatctacaatgcgaaccaagacagccggatacaaaaaccaagaacactcattgataaattaccattaaatgcagttcgggttgctgagaaacgaacgtttaatccagagcaggaaaaggcattttatacactaacttcgacagaccggatcagtttattgaatggttcagcaggtacaggaaaatcctatgtattgagtgctgtatctgaagcttataaggattctgattatcaggtttatggtattgcacttcaggccatcacagcaaaagcgattgcttcagattgtgatattccgagtagtacgattgccagtttcttggctcgatatgaaagtggaaatctagaaattaatgataagactgtattgattctggatgaagccggtatggtcggttcaagagatatgcaaaaactcttgatgattactgaacagcacaacgcacaacttaaattagtgggtgatagctaccagttaaatgcagttatggccggttcagcgtttaatcatatccagaaaaacctagaccataaaaatatagcgaccctagagaatattcagcgtcaaaaaaccactgaaatgcgtaaagcttcagaatatttatctaagcatgaagttgataaggctttagatatttatcaggctttaggcaaggtcaaagcatgtgaatcccatgaggttgccttagccaaaacaattcattcatggtcccttgatcacagtgaaagtaagctgatacttgctcactcaaatcgggacgtggacgaattaaacagaatggcgcgttccatcctgatcaagcaaggtaaactccctgcagaaagccaaaaggtaaatacttacaagggtgaaatcgatcttgcgactggagacaagatcgtattcaaacaaaataaccatgccttaaacatctccaatggtgaaacagccagaattattggctttgagcgtaatgcccaacagcagattaaaggcttgatggttgagtcagatcggggcggccagatcaagaagattgatttggatagctatcagcattttaagcatggttatgcaaatacaattcattcctcacaaggaatgacggtagagaatgcctatattcttgccagtgagaatatgaatgccaatctgacctatgtagctttgacccgtcataaaggcaatgtggaactgaattacagcgcgactagattcaatcaggaagaaaaaatctgggttagaaagcctgatggccaatatcaggaaaaagaactctcagcattcgataacctgaagcgaacattaggccgtacagaagttaaaaatttctctactgattattcggtggttcaggctaaagatgaattaattaaaaactatcttcaggaacaccggcacagcatttcagagaagcgtgaaatctataatctcaatagcatgcttaaggcaatgactatgccagatcagcatttcagcaaacaagagcttattgaggaagtccgaaatagcctaagaagcaaggccattttaggggatgaaattgttaaatttaatgggcaaatgaatatcgccaagggtgagcagctccagttagaccaggaactcattttaaagaccggtttattcaaaaaagagcactttgaaaaagatacttcgcttcaggtagtagatgcctatagggttaaagacgaagcaattatgaaagctcgaattaagggggagatttacgaaattccgtttaataagctgcatatccgttattcagacaaatatttgacagagtttaggcaagatacgtcagcacgttttgataaacgctttaagagcgaactacatagcaagtttaaccaacagctacagcagcaaagacagaatcagcccacacaaaacttaaatgcaccaaatagtgagctgaagaatgccccacgtatgaaaaatggcccaaggatgagttag

SEQ ID NO: 48270 - DNA, 495 bp, Acinetobacter baumannii
ttgaatgatagcttttcctgtcccccaaatcccgatgttgaaagctttttgcttaataaagataaagggatccgttttgaaaacacctctatttctcgaacatatctgatcattgatgatgataccggcgatatattggcttatttctcaatttcttttaaagaaattactctcgatacaagtaatatttctaaatcacttattaagcgccttgatggtatcaataagagagcagagaccttaaaagtttatctaatcggccaaattggtaagaacttctcagttaagaataatccgattaagttagattttattttgaatgaggtttacaacgtaattgcccaagctcaagctcttgttggtggacgggtgattattctggaatgtgagaaccagccaaaactcatagaattgtatgagcgccatggatttaagctaattgagacaattaatggaactgattctcttctaactatgtatacatctattatttaa

SEQ ID NO: 48271 - DNA, 285 bp, Acinetobacter baumannii
atgaatcaagaacagtttcaagaatgtatgaaaatttggataaaaccagatacatggcatacaaaccatccttgtgataccaaaaggtttaatcaggctattcaacagttaatgtctataaccggtactcgacttcttcatccagaagatttttctgaacaactttatatagcattagctaatgagtatccaaaactgggccaaagctttattagagagcaagtcgaaaacgctactcaaaaatacgatattatcagtagctatttatacgatataagaaattga

SEQ ID NO: 48272 - DNA, 303 bp, Acinetobacter baumannii
atgaaaattagagtaataagaggatatgtagctaagtatccattagaagtcttttatatctcaaaagacatagactgtaatgttattccagtggctggaatgatgtttgaagatattggacttgtaaatgctgatggacaggttgaagctgtagaaattactaaggtaacaattaatccagttgaaaatacttactatgttgagttgaagcaaaatacagaacaattagataagacggtgttggaacaaaaatttaagaatatggttgcggatgactgggaatataacgaatatcaattttaa

SEQ ID NO: 48273 - DNA, 1041 bp, Acinetobacter baumannii
atgggtatgaccctttcacgtgcatctaatattaataaaacaggatatggatattttgcatatggttcacctattgccagaagaaaagatatttcttgcatggggcatgaatatggctattggcaagatgactgctggatgtcacagatcaaccaaatttacgctacctcatgtaaaaaaggggtttccattcgaggcggaacatctacgattggtaccaatatttatgcggatcggtgtgaagagtatggggtagatttatatggtctgacctatagttcacttacagtacatgtagatggttgtggtacaggtataggatcattaactggttatccggctatcgatgcacagtttacaaaaggtgttaatctcacagcatcgtgtgaaagacatcgtggacctgagtttaatattcagtttagtgatggcctggttgtgaatggtggtcgaagctatggtagtagtgatgtgaataatcctactgcaaaaattatatgtcgagattcagtatttcaatttaatggtttttcttggagatattctgtttctgctgaacaggcatcaatgtacagtttcattcaagagattggttcaaactcttcttatgaatttaaccaatgccaggggaacagtgcttggaataattttccggcacaagtctcagatgtctcatatttagggagttttaaaaagagtagatattctgaagaaaacggttatacatccagcactataaaacatgataatgcttcgtttaaaaaactatgttatgtagcgaatactccgatcttcaaagtcctttcttgtatctgttctagttctgaccgttattacgattttggtacagttcctatgcgtaaagcacaaatttcagttgatcaagctaatccaacaacgctcacggcacaacaatatactaatggtgttgctgataatgcccaaccacttcaagcttatattggttcagatggttggttgtatattaagccttctgcatccggggccaattatgattttaaatatataattgctaaatag

SEQ ID NO: 48274 - DNA, 1173 bp, Acinetobacter baumannii
atggctacagattcataccatcacggtgttcgagttgtggaacttaacgaagggacacgtcccattcgtacagtttcaacttctgtcatcggcttagttgctaccgctgaagatgcggatgcagtcgcacttccactaaatactccagtactggcaaccgatattaaaactgcattagataaagcaggggataaaggtactttagctcgttcactccaagcgattgcagatcagaccaatgcagtcactgtcattgtacgtgtagatcagaaaacaactgaggcagagcagaactctgaaattcttggtggttttgtgaatggtcgctatacggggatgcaagcattattggctgcggaacaaaaccttaaagttcgtccacgaattttaggtgtaccaggactagatactgctccagtagcagctggactaaactctattgctcagaaacttcgagcatttaactatttatcttgttttggctgtgataccaaagaagaagctgctgcatatcgtgatgcaattggtgcacgtgaagcaatgctcatttatcctgactttttaggatgggatacggttacttcaagtaccacagtttttgatgctacagcccgtgcaatggggcttcgagcaaagatcgataatgaaattgggtggcataagaccctatcaaatgttcctgttaatggcgttacaggtatttctaaagatattttctggcagctccagtcaatggatacagatgctggttatctcaatagtaatgaaatcacaacattgatccaacgtgatggtttccgcttttggggttctcgtacctgttcagcagatccattatttgcttttgaaaactatacccgtacagcgcaaatccttgcggacactatggctgaaggacacatgtgggcagtggataaacctcttcatccatctttggcacgtgacattgtcgagggtattaacgctaaattccgtgatctaaaaactggcggttacatcattgatggcgaatgttggtttgatccttcagcgaactcaaaagaatccctcaaatcaggtcgtttgttacttgattatgactttactccagtgccaccacttgaagacctcacactacgccaacggattaccgttcgttatttggctgatttcgcttcgcgtatgacggcttaa

SEQ ID NO: 48275 - DNA, 516 bp, Acinetobacter baumannii
atgtctttaccgaaaaaactgaagttaatggacctgtttaacgaaggtaactcataccttggccaaacaggtgaggtcactttgccaaaacttgggcgcaagtttgaagattggcgtggtggtggcatgaacggaaacatcaaatgggatgctggtttagcggatgatattactgagttttcttggaagctcggcggtatcgatccattggtgatccgtcaatttggtgcagcaactgtgggtgcaatcggtttacgtttcgcaggctcataccaacgtgacgatacaggtgagacatctgcggtcgaagtagtcgttcgtggtcgtcatgaagagattgatttcggaacttccaagcccggtgatgatactgaaaaatcaattaaaaccatttggtcctattacaagttaactatcgacggcaaagttgaaattgaaatcgatatccctggtctaattgaaaaagtaaacggtgtcgatttacttgaaaaacaccgcgctaacattggccactag

SEQ ID NO: 48276 - DNA, 342 bp, Acinetobacter baumannii
atgcaaactcaagagcaaatcgaaaatttacaagcaattcaaaatccagatgttatcgatgttcctctagattcaccttttaaaattggtgataccgaaatttcatcggtacaggtacgaaaaccaagtgttcctgcattacgaaaggtacgtattgctgacatcctaaatggtgatgttaatgcaatttgtacattactccctttatgtacatccccaactttaaatgtgcatcaattaaataacctggtggatcctgtcgacattattcaacttggtggtgcaatcattgattttttgcaaccgaagtcagttcgtgcggaacttgcactccaacggtag

SEQ ID NO: 48277 - DNA, 2727 bp, Acinetobacter baumannii
atgaagcaattaaaattagaagttatttttgggtctaaaaataaattaagccccgctttaaaaatgatagttggcagcagtaacgctgctactatcgctttaaaaaaaactagagatcagttaagagatcttgagaaacaacaagaccgtgttgcaacatttagaaagctcaaagaagacgtaaaacaagctacacaagctttagaagtaaacaagcggactgttgcagccctaaaacaacaattagcgaccaatccaagttcgaaactatcttctgagctaaaaaaagctgaagctgaatctaaacgtttaaataaagtagtgactgaaggtcgaccgaagttaatggctctgcgccaagagttaaatgctgcaggtttaaaatctactgatctggctcaacatcaggaagaattaagattaaaaattcttaataccaattcagccattagtaaacagcaacaacacctcaaaacattaggtttaactcagcagcaatatcaaaaacattcatctaatgttcgctctgctgctatgtatggtaccggtgctgcattcactggagctggcgtactttatagtatgcgaaaaccaattgaagaatctaaaggagtcgatactgaacaaaaccgtattgcctctttaggtcttggtaaagaagctacagttgaagcaattaattatgctcgagcaatgaaaaccttcggtacgtcgacgcgtgataatcttcagttggtccgtgatggcgtaactgcatttgcagacgttcatcatgcccagatggttgcacctactttggccaagatgaaatttgcaaatgaagccatgtttggaaatgagcatggtgaggaaaatgaacgaaagttcatggatatgcttaaagtcatcgaattaagaaacggactaaaaagccagtcggcatttaatgaacaagccaatattattcaacaagtcattacggccacgggtggacgtgtacaggcaaatgaatggctcaatgctattaaaacaggtggtgttgctgttaaaggtttaaccaatgaagccttctattacaagatggaaccaattgttcaagagctgggtggtcatcgatttggtacatcggcaatgtctgcatatcaaaacatctatcaaggtcgaacaaccaaacgagctgctaataacatgctcaatttgggattaatcgcagatccgtcaaaagttcaacacgataaagcaggccaaatatcatttcttgatgtaggggcaattaaaggcgcaagtttgtttaagaaagaccaatttgcatggatggagcaagttctattacctaccttagccgctaaaggaattacaagccgagatcaaatccatgatgccattgggagtatttttaccaaccgtaatgcatcgaacctgtttacaacaatgtacgaccaaagagagcaaattcataaaaatacgaagctcaataaaggtgcttttaacattgatcagttaaatgaacaggcgaaaggaagtactgcaggtaaagagcttgaagcaaaagcaaagctcaatgacgcttatttgaagtttggccaaacaattttacctgtctataccaaagccattgaaacagcaacaagtgcgcttcagtcatttactggatggatggaacgtaacccaacactagctaaagctctgggttacggcatcttgttcatagccacaagcttaattgctattggtggtgcattagcaatcttttcaccgctaattctaggtatgttaagtcttagattaattatggcttccaccgcaacaggtggatctatgttgatgagtgtattcagtcgaatccctacagtttttagcattttaaagggtggtttgtttggtctaggacgcattttcttatttgtcggccgtatgatgttggcaaatccaatcattgcaatcattactggtattgctgtagctgcttatcttatctataagaattggggacctattaaagaatggtttgctggagtctgggcaactatttcaattggagctagtttagcctggtcttcaataacttctatatttgcaccaattggccaatggttcggtgcgcgcatcaatgaagctaaaacagccttttcaggcggtattcagggcatgagtactttaattctgaattggtcaccatttggattgttctactcagtttttgcaaaagtactttcatggtttggtattgatttaccagctaaattcacaggttttggatcaatgcttattgatggtttggtcaagggtatccggtcacaaatttctagtttgaaaaatacttggaatgagatcactagctatattcctaacttcttttcaaaacgaatggacattcacagcccttcacgcgtaatggctgctttgggtggccatgtcatgagtggcattggagttggccttgatacggggttccctggtctaaaagataaatttactcgtgtacttcaagtttttaatccaaacgcagcagctgcagtacaaaaaattgatgtagcacctgcgttatcaaaggtacgaccggcacaaatgatttcaagctcgcagcgaggcgatattgtggttcagggcgatacgattactttgcatatccaccaagcaccaggacaaaacctgcaagatctacaacgtatggttgagaacttattaaataaaagagatcagcaaaaacttgcccgtgtacgtaatagttttctagatcaagcataa

SEQ ID NO: 48278 - DNA, 426 bp, Acinetobacter baumannii
atgatgatgatttttggcatgtttgtattttccataccaacggccacttaccaacaactacagcggaccacaacgtggaagcatccttctaactcacgggtaggagatatgcctgcgtatcaattcacgggaaaaggagaggatgtaatcacgttggatggaactattgttccagagtttggttcccaattatccctcacagctttaaggcttatgggggatacaggtaaatcttttccgcttattgccggtaatggaaaaatttatggtttgtgggtgcttaaaagtgtgaatgaaacccaaagctacttctttaaagacggtacgccacgaaaaattgaattcacgcttactttagaaaaaactacaacagcaggagtcctaattggcaatgtattaggttcagtattagaaggagttctatag

SEQ ID NO: 48279 - DNA, 1299 bp, Acinetobacter baumannii
atggctgttatggaacttgcaaatcaagctgtaaataaagtgacggaaaaacttgataatagctatcctcatgctatttaccgaattattgtggatggaaaagatataggagagcttgtacaaagtagactaatgcgtttaaccattactgataaccgaggtatcgaagctgataccttcgagcttgagttatctgatcatgatggtttgttagctattccaccaaaaggtgccgaagttcaactatggctcggctggagcaatgaaggactagtttataaaggtaaatacctggtcaaagagcgtgaacatgctggagcaccagatgttctaaccttacgtggagcagctgcagatctgaaagcgacttttaaaaagaaaaaagaaagaagcttcgacaaaaaaactatcgccgatatcgtcggtagcattgctaaagaacatggattaatttctaccatcaacgatgagctaggcaaaattactttagctcatatcgaccagaatgaatcggatgcaaatttgattacacgcatagcagatgaacatgatgcgattgctaccgttaaaaatggctacttactttttatgccaaaaggtgatggtaaaacaatttcaggccaagcttttccagactttcttataactcgggattcaggagattcacatcgttattctgatactgatggtgccgatgaagtcagtggggttacagttttttactatgacaacaacaaagcacagcgacaaaaagtcacggtgggtatgtcagatgaaaacactcgagagcttcgacatattcaacgcgatgaaaagacagcaaaacatgtggcccaagctgaatacaaccgtattaagtcaaagtctgcgactttcagttataccttggccaaaggtcgacctgatctgattccagaaatgcctatacagtttgtgggtttaaaagacgaaattgatgacatcgtgtggttaggcacaaaagtagttcatacattagacccagataacggttttatcacggttgtcgatttagagatctatctacctgatgcagacgatttatcacaattggtagaagatgaaatgggaagttatacaggagttgttgcttactacaaagatgggaagaatacaggcaaattaactaaaggggatcaaactacacctaagcgattaacctatctttataaaaacaaaaagacggccacaactgcacttgaaagggaatataaagaactacaagatgaaaaagagcttagtagtaattccagtactgattcctccaaaacaccgtcttag

SEQ ID NO: 48280 - DNA, 192 bp, Acinetobacter baumannii
atgaaagatgaaattttaaaacctgatttagtacgggttagtctcagtgataataaacgtgccgacttaccttgtttaatcgatagtaaaagtaacatcgtaaaaatatatgattaccagggcaatgagctgaagcataacccccaagctaagacggtgttttggaggaatcagtactggaattactactaa

SEQ ID NO: 48281 - DNA, 807 bp, Acinetobacter baumannii
atgacaaactcttctgcaacacctcaatacaatcctaaaggccacagtttctcaggctggcttggcggtaaatctcaactcgctcgtaccattattgatttaatgcccgaacataaaacttatgctgaagtatttggcggtgctggttgggttttatttaaaaaaaccgaatctccggtcgaagtcattaatgatgtaaatgatgacctcatcaacttatatcgggtacttaaatttcactttgatgcatttatcgcagaatttgaacttcagcttttttcccgaaccatttttaatgaaatgaaaaagaatgatcgtggattaactgatattcaacgtgcagctaaattttattatttgcttcgagctgctttcggttgccagttagatggtacttttacttatagtaaagaccggaagagccgattaaaacttggtgaagatttgcgtgagcatttagcatctatccatgcgcgccttcaaaatgtggtaattgaaaacgccagttatgattatgtgattaaacgtctagatagtcctgacacgcttttctatttggatccgccctattgggattgtgaaaatgtttatggcaagggtatttggtctaaacaagacttttatgatttgaaaaactatttagacaaaatccaaggtaaatttattttaagcctaaatgataaacctgaggtacgggagcttttcaaagactacaagatccagcataagaagatccgttggtcagtgaacaataaagctgctcatgaagaacataatggcaatgaattaattatcacaaacttttaa

SEQ ID NO: 48282 - DNA, 243 bp, Acinetobacter baumannii
atgatcaatgtcacaccagaccatccaattgcacatgaagcctatgaagcattgaataatcttaaatgtgattatgtaaatatcattgcccatacgtatcaaaagaccgcacatgaagaaggtttttttattgcaggcatttatccaaattttaatgaagggggatttaatcgcttagattggttagctgaatatgagcagctgcaggaagagaaaaagataactggagctgacttgaaatga

SEQ ID NO: 48283 - DNA, 432 bp, Acinetobacter baumannii
atgaacagagtccagcatctaaaccccattttaaatattgtatttaagggcaaaattttctttttaagtcgtgttaatggccgtgaacttatatggctaaagcgatgtgaagaaatgctacctgagttgtattgggattattcattaaactttccatttaaggctaaaagcatttcaaaggtaaagaatcgaaagcaccggagagcttgctaccagtcatttgctcaatataaaaaatcttttaaaccacgacctatcccaaaactaaaaattttaaaagatgaatggatagcttcaatgcaggaggcaactaaaacggctgttaaaaagtttagcgataccgcagacgcaatgtcttatgcatttcattcattagaaaactttaggactaattacttgtgtagttgggatccagcagctggagaggattaa

SEQ ID NO: 48284 - DNA, 216 bp, Acinetobacter baumannii
atgcatcctgaagaactttttgaactgttttataaaaatgtgcgtttagatatgaaccctccgggttttcctaaacaccactgtgaagttatgaagcgtttctggtatgagcgttttatgaatgcataccacaatgtacgagaacctatggtcttaatgagttgggcagaggccccgcaaatgtggttggctggatatactgaaaataaagaataa

SEQ ID NO: 48285 - DNA, 924 bp, Acinetobacter baumannii
atgtcttcaaaaaaagatcccaaatcaaagaaaaaaaaacctagtgaatggaagggttttatggctgcaagcgtattgatattagcagtatttgtcatttggtttatttatccatatggtttaccgcatctcggtatggtaaataatacagcgggatatggaactttcggtgattcatatggtgcattaaatacattatttagtggcttagcatttgctactcttattattacgttgtttttgcagagaaaagagttacagttacaaagaaaagctgttcaggatcaacagatagaagttgagaaaagtaatgatatagctgaacaacaaattcttattacacaacaacaagcagatcttttagaaaagcagataaaagaagctcaggttcagaatttctttaatatacttttcccgttacttaatagaaaaaaaacatactatgaagatgctgatgatcttcctgatggtttaaagtctggttatatagttagaggcaagagcgaaagtacttttaaatccatccatcttggtatatccaaaatttatagagattttttatcctctcatggaaatgattttcttcctaaagatcaaattttaaaaatattagatgaaatgattgatcaatcaacatcacttattaccccttatagctatatgaaatataccaaatatatagaacattttagctatgtaattagctttattgaaaactttaaagggatagataataaagatcgagatgtagctatgtctatttttctttcagaatttactaaaagagagcttgtcgtaatttcaagttttacaatcagagatgatttacttatggaaaaagttgttaaacataaagtttttaaatcatttatagatgctgaccctgaaaaaaaatcaattttttacttattgttttctgaataa

SEQ ID NO: 48286 - DNA, 444 bp, Acinetobacter baumannii
atgttaaagattttaaagtggattgcgataattatcgttgttttagttgtgctaggcgttatttttggcaaagatgataaaacacaaccagcttctagttctgctgaaccaactgctccagctgagccaccaattgaagtgactgcaaatgaattgttgaatgcttataagaataatgaagttgctgcaaaccaacaatttaagggtaaaacattgttagtttcagctacagtaagctcaattgatgctggtatctcagatgaaccttacctcactttaaaagcaggtggcgaatatgagtttaaccaaccacaagctcatttagcagatagtgaacaaagtaaagctgcaagcttgagcaaaggacaaaagatcaaactattatgtacaggtaatagtgagattgctggtactccaatgctagacaactgttctattcaataa

SEQ ID NO: 48287 - DNA, 1011 bp, Acinetobacter baumannii
atgtctttagcccagctgatccaaaatgcatggaataagcaatcaagttggttgattgttttacgtcctttgtcttgcttgtatcgtgctgggtttttactaaatcgtggtttttatagttcaggctttaaaaaagtttataccgcacctgtgccagtcatggtaattggcaatattacggtggggggaagtggaaaaacgccattattaatagagctcgtcaattatctaaagcagcataatgtaaaggtaggggtaattagtagaggctatggtggagctggcccttttcctatgttggtgacatcggctagtcaagcagctgaagcaggagatgaacctgctttgattgtacagtcaactggcgtacctatggcagtaggacccaatagacaagtggcaatcgagttattattagcatcgactaaactagatttaattattagtgatgatgggttgcaacattgggcattaggtcgccaaatagaatggatcgtacttgatcaaaatcgtggtcttggaaatagaaagttattaccagagggatatttacgtgaacctgtggaacgtttaaaaactagtacggtaattgagcatactttcacaccaacaactacattgcatatgcatcttgatgcagggcagccttacttattgaatccttcttcggcaactgaattatcattcaatattcaaaataattaccatgcagtagtcggtattggttttcctcagcgcttttaccaaacacttaaaggtttaggggtgaaacaatttcaagagcatgcttttcgtgatcatcatgattacagtattgatgaccttctatttaatgatgaccaacctatcattacaactgaaaaagatgcagttaagttgttaccattacttgaaaagcatccagaatttaaacgacctatttgggttgtaccagttaaagctgttttgtctacagagtgctatcaggttttaaatcaacaattgcaaaagcttgatattcaaatatcttag

SEQ ID NO: 48288 - DNA, 1233 bp, Acinetobacter baumannii
atggtgttcttacctgtaattgggattttggtgcgtaaagcttcaaaaagaatgcgcaaactctcgatgcaagttcaggatactatgggtgatgttaaccatgtagtgcaagaaagtattaatggtaatgcagttgttaaaagtttcgctggtgaagagtcagaacaagagcgtttctataagtcatcggaagaaaacttaaaacgtggtttaaaaatggtgattgtgcaaaacctaaatagtcctgttgttcaagtggtaatggcttgtgcaatggctctaattgtatggttagcattaagaccacaaattttagggaatacaactgctggtgagtttgttgcatatattacggcagcagggttactttcaaagcctgttaaaaacttgacagatgtgaatgaaaagttacagcggggtttagcagctgcacactcagtttttgaattattagatttacctgaagagcaaaatagtggtgaacttaaaccgcagttgcaaggtgcaattcgttttgaccatgttgtacttaactatgctgacggtacgcaagcgattaaagacttttctttagatattcgtccaggcgaaactgttgcattggtagggcgctctggtgctggtaaaacttctttagtgaacatgttggtacgtttccaagaagtctcaagtggtcaaatttatttagatgatttgccaatacgtgatattgagctttcaagtttgcgtacacaaattgcaatggtaaatcagcaagttgttttgtttaaccgaactgtacgtgaaaacattgcttatggtcagttacataatgcaagtgatgaagacgtaatagctgcagcaaaggctgcttatgcccacgactttattatgaacttaccaaatggctacgatactgttttgggtgctcaaggtctaaatttatcgggtggtcaacgtcaacgtattgcaattgctcgtgcaattttgaaaaatgccccaattctcattttggatgaggcgacaagtgcgcttgataatgaatctgaacactttattcaacaagcatttgatgaagctatgcaagatcgtacaacgattgtgattgctcaccgtctatctaccattgaaaatgcggatcgtattgttgtgatggaccgcggacaaattgttgaacaaggtactcatcaagaattacttgctaagcacggtgcttattatcaattacatcagcgtaattttgaggaccattaa

SEQ ID NO: 48289 - DNA, 792 bp, Acinetobacter baumannii
atgatgtcaaaaaccctgcagctgtcaaataaccgtattgctcactattttgagcaaggcgaaggagagcctctggttctgatccatggagtgggaatgcaagctgcggcatggtatccacaaattgaatatttttctaaacattatcatgtgatttcagtagatatgccgggacatggtcaaagtaccaaattaccggcagacgcaaaattacaagattttgttgaatggaccatcgaatttattacagccttaaatctaggacctgtaaatttagctgggcattcaatgggctcactcattaccacaggtgtcagcgttacccgacctgatttagttaaacggatggctgtactcaatggtgtgtataaacggacaccacaggcacgtcatgcagtcatccaaagagctgaagagttaaaaacaggccgtattgatgttgaaactccgctacaacgctggtttggtgaaagtgaagtcgagcgtatagcagctgccaaagtgaaaacttggctcgaaaatgtcgacttatctggttataccactgcatattctgcttttgcgcaaggcgatgaaacctatgcagatgactggtcaaagatcacttgtcctgctttggtgttgaccggaacggatgatccgaattcaactgcagaaatggcaatacaaatggcaaaacaggcaaagcatggcactgcaattgtcattgaaaatgaacgtcacatggtgaacttaactgcacctgacaaagtgaataatgcaatgcaagcgtggttggaaaccagcgtttaa

SEQ ID NO: 48290 - DNA, 435 bp, Acinetobacter baumannii
atgctaaagacaattgttgaatttaaatttgatgattatcagctatatgatcaaaatttatcagcagaagacgggaatactttagtacagaaaactgaagatattgcacaatatatttatagtatattaaaaaatagatatcacttaaatattgagttaaatgctgagcgttggggctgggaaatagaagtgccattacctgagattacgatgtatatcggtattagcgtttatgaagaatacagtaatggttttgcaatattcatttcaccaaatacaccaattttaagaagatttctttttagaaagttagatattactcaccatattatgttgctacaaaattatattaatgtcattttgaagtcccatgccggtatatatgatgtgcaatggtgggaggaaaatgagtttagatatgttgcagcgcattaa

SEQ ID NO: 48291 - DNA, 1524 bp, Acinetobacter baumannii
atgaattttcgtcaaattcaggcaatactacatagttggtttggaattattgttctttgggttatctttttcattttttttacgggctctattgcttattttcggacggaaattaatgtttgggcacagccagaagcaatcagccatattcaaacaatcccttctgcacaacattctgcgcaaactgcgtttaactatctcaaccaacatgcaccaaatgctaaaaggtggcgagtcatagtagccaatgagcggatgcctgtgaacctacttcaatggcaggataaagaggggaaacatcaagagttacaaaactctaatactggagagctattggggcctgtacggaagactttgggtggagatttctttttcaaactacattacacgctttatcctttgccaagtacgttcggtagtttagttgtagcagttgttgccttaattctattaattagtttaatcactggtgtgattacgcataagaaaattgttaaagagttttttacatttagggcttttaaaggacagcgttctttattagatcttcatcacataacaggagttattacttttcctttttatttggtgatggcctttactggactgttgattttattttatctagttttaccgtgggggttatcggaacaatatggtaaagctggtatacctaaattctataatgaaatgcagtttactgaggtggcaaaacctcgagaaccttccttaacagaagcgatgcaaccttttaatcaattcatggcacaaatgcctaagcgaacagaatctggagctattttagataaatttgaagttcaaaagcctaatacagccgatggcatgattacatttgactataactataaaaatattattaccttaaatactcctcaatatatttttgcaacaaatacggctgaacgactcaatcagccacgaaatttaagtgcaatagcacaattaggttcatcaagttatgggattcatttaggttactttgcttctatctggatgcgttttattttggcttgtttaggaataataggatgtgtcatgttggttgcaggcgcattactatggcaaaaaaagcgcatcaaagaacaaaagaaatttgaatatagattagtacagcatttgaatttttttactttcttagggctgccttttgcctcagccttttatttaatggttggtcggattatacctgcttcatttgagccgagggaactatacgaggtttcagcattttatatagcatggctattaagcttattgattagctttagctgctcaataaggaagggaataatcatcatgctatatagtacggctgctgttttattgcttattccagttattagtgtcgttctggtaccagaagcttctttattaaatagtttaaagtctgtgcattggtctcttgctggtgttgatctggcgctcatactgctcgggctattctatttagtagtattacgcttctaccaaaccaaatttattacgttaggagaggctaaatga

SEQ ID NO: 48292 - DNA, 519 bp, Acinetobacter baumannii
atgttgcaattgattttaggtggtgcccgttctggcaaaagccgattggctgaacaaacggccatctctatgcaattagctgtcacttatgtggctacggcgcaagcgcttgatccagaaatgcaaagccgaatcgtccatcatcaaaatcagcgtcctgctcactggtctttggttgaagaaccattatttttagcaaaaactctgcaagaaattgatcgaccgaaccaaattattctggtggattgtttaacactttggctaaccaatttgttacttttagaagatcaaaatattcaacaatttgagtgcgagcagctgttaagagttttacccacacttcagtcagaaattattttagtaagtaatgaaacgggtttaggcgttgtgccactaggtgaaattagccgccgttttgtcgatgaagcaggaaggctacatcaggctttaggacaaattgcagataaagttgtgttttgtgtggctggttttccaatgattttaaaaggtgataagtaa

SEQ ID NO: 48293 - DNA, 972 bp, Acinetobacter baumannii
atgaaaaaaataggcttaattgctgttagtgcagtgacattatgttgggcaatgtatgaggtatcatctgacaatacgagtaccacaccgcgtaatgaatctaaccaaaaagtagtatctaaaagcagttcatcaactgcaaagaatgaaaaattagcacctcaaatgcttttgacccaaacgaactctcttaattctaccccagtctgcaaatataattttgacgcgactcaggaagattttgatctctggaatagtgaatatcctgattttccaataaaaatattcccatcgataattggtcaaaaatttggttttaaagtggaacctaggccagaaagtgagtatggctacgtagattatgttgctacaagtaaaataaatagtccgaattcgattaatgaaattggtgatttaacaatacctcacacaggtattattgcatttgaaatggaacttaaaattccaacatcaactcttgggagttcatcacttggaaattctacttattactcctctagcattggatttagtggcgtaacaaataatggttatacgattagatccaactattggtttgatatgggggggtatgatccagattttggcgagaatcctgctagattaaactattatgtagcttatcgacttagtgataatagtgggcctaacaatccatattataaaggtcaaaacatgacaaataattcaaatgaataccaaagattagggatgtatattaatcagaatactaagcaggttggctttattgtaaatggtgttgatcaggggtatcaatctactttacctgctccactagagaatatacgtttttctgtctcaagtagtataggaatatattctaatcaattatttggacaagagttgtctaatgaactgattacagaccgtaatgcgctaaagtttaactaccctcagggtaccactgacatgtgtggtaatgccatctaa

SEQ ID NO: 48294 - DNA, 150 bp, Acinetobacter baumannii
atgccaaaatacttactattagcagaaaaaatttctaaaaatattaaacaagattcttcaagcaattatctaaaaagcttaaataatttaattatagaaataaaaaaagccattacaggaacagaattaaaatttttatataatttttag

SEQ ID NO: 48295 - DNA, 636 bp, Acinetobacter baumannii
atgtgggaacttgtgaaagcgggcggctggttaatgctgcctttaattttgtgttcaattttaaccgtcgcaattagtattgagcgttttgtacgtttaagacgttcacaagttttacctaaagtactaatgaatgatggcagtgcagatatttctgttgtcataacaaatttggagcaggatactaatgcgcaaagcacggcattgggcaatattctaaaagctggttttgagcatcaggaacatggcgaacaatttgcgcgagcacaaatggaagctatggcttctcaagaaatttcttatttagaaaaaaatattaacttcttagggaccttaagtgctatagcacctctactagggctgcttggaacagttgtgggaattattgagtcttttttggttattgattttggttcggcaggtagtcctagtttaatgattcccggtatttccaaggctttgatcacaacagcagttggtatgctcattgcaattcctgcacttatttcctatcgatattttcaaagagtagtgcaagattatattgctgagttagagcaacaatctacgctatttcatgcctcattgttttacaaacgttcttcagtcatgcaagaacatcgccgcgttggttga

SEQ ID NO: 48296 - DNA, 783 bp, Acinetobacter baumannii
atggctcaaattattgcgattgcaaaccaaaagggtggtgttggtaaaacaacgactgcagtaaatcttgcagcgtcactagctgtattgaaaaaacgtgtgctacttgtcgatatagattcgcaaggtaatgctacgatggggtctggtattcaaaagaatgatctactttactcaattacggatgtgttattgggtgaagtgccaatcgaaacggcaattcaaaaagctgaggttggatataaagttttgggttcaaaccgtgaactttctggtgtcgagcttgccattgccgagcaagaaggtcgtgagttcattttaaagaatgctttgaatgaaattcgggactcattcgattacattattgttgattgtgcacctagcttaagtttaattacagtgaatgctttagctgcagtagatggcgtaattattccgatgcaatgcgagtactatgcattagaaggtttggcagatttaactcaaacgatcgatcgtatccaaaaagcgttaaatccagatttggaaattattggtgttttacgcaccatgtatgatgcgcgtaatgccttaactcgtgatgtatcggctgagttagagcaatattttggtaagaaactctacgacactgtgattccacgtaatgttcgtttggctgaagctccagcacatggtttgccagtgatttattttgaaaaaagttcgaaaggtgcagttgcatacttaaatcttgcggctgagatgttaaagaaaagtaaagtgaagaaaggaagtaaagtatga

SEQ ID NO: 48297 - DNA, 1038 bp, Acinetobacter baumannii
atggcactcatttcaatgcgccagctcttggatcacgctgcggaacataactacggcgtaccagcatttaacgtaaataacttagaacaaatgcgtgcaattatgcttgccgcagatgctaccaattcacctgtaattgttcaggcatctgctggagctcgcaaatatgcaggcgctccattcttacgccatcttattttggctgcaattgaagaatggccacacattccagtggtaatgcaccaagaccatggtacaagccctgatgtatgccaacgttctattcaacttggttttagctcagtgatgatggacggttcattaggcgctgatggtaaaactcctacaacttacgattacaacgtagatgtaactcgtcaagtggtagcaatggctcatgcttgtggtgtatctgttgaaggtgagatcggttgcttaggtagccttgaaacaggtatggctggagaagaagacggtgtgggtgcagaaggtgtacttgaccattctcagcttttaacctctgttgaagaagcaaaacaattcgttgctgatacaaatgttgatgctttagcaattgctgtaggtacttcacacggtgcttataaatttacacgtccacctacaggggatattttagcaattgaccgtattaaagaaattcatgcggcattgccaaatactcaccttgtaatgcacggttcaagctctgtaccacaagaatggttaaaagtaattaacgagtttggtggtaatattggtgagacttatggtgtaccagttgagcagcttgtagaagcgattaaacatggtgtacgtaaaatcaatatcgatactgacttgcgtttagcttcaacaggtgcaattcgtcgtttcatggcggaaaacccagctgaatttgacccacgtaagtatttcgctaaaactgtcgattcaatgaaacaaatttgtatcgatcgttatgaagctttcggtacagctggtaatgctgacaagattcgtccaatttctttagagaaaatggttgatcgttataaataa

SEQ ID NO: 48298 - DNA, 2190 bp, Acinetobacter baumannii
atgttaagaatttctatatcatctccccaaattaagggttcattcccgctcagcttactcactttaatgattttaaatattcaaggtgctaacgccgaggaattgattgaatcctcatcaaaagccgcagccaccatgccaaccataaaaatcgaggccatgagtgagctcgacccgattaaaagctatatcgattatgacaaagccaatgtcactcgtaatggtttagataaaaaagatatccctcaaaccgttgataccattgatgttcagaaatataaaatttatggatcgaatgatttaagcgtcatgctgcaaggtacaccaggggtatcaaccagttacgatatgcgtggtgatgggatcacgattcgtggttttggtgccgacacaggcgatatttaccgtgatggcatacgtgaaagcggacaagtacgccgcagtacagccaatatcgaacgtatagaaattttaaaaggccctgcttcggttttatatggccgtagtgctggcggcggggttgtaaatatggtgagtaaattcgccaattttgactctaaaagttcagttggcgcatatgcgggttcatacgataactacggaacaaccgctgacatcaaccaagtacttaatgacaatttagcagtgcgtttaactggagaatatggcgaggcaggcagcttccgctctggtattgaaaataagattgagatgttttccccaagctttacctataagaatgacgatggaaagctgacctggaccacacaatatacctatgacaaattgaatcgagttcctgaccgtgggccaacacgtgacaacttgcctgcgggaacttctattaaaatgggatttgcccaagacggtgattatgttgatgatattttgaaagtcgttcgtaccgatgtgaattatgaatatgcgcctgattggagcttccactgggcggcaagttaccgacaagcagaacagaactttgaccacttttattttggaaattattgtggtttagatggaaaaaactcaaagaatgaggcgtgtacaaaaaaaggttacatcgatcaaatttactactggcaacaaaccagcaataagaccaccaccaatacatttgatattaagggcaagttcaagacaggccaacttgaacaccaaattatggtcggtacagactggacttatgaacaacgagagccacgtctagccaataaaactcaaaatgggtcagctatttatggttacgttaatccattcactggtgaacgagagtacagtcgtggcaatggcccattaaagattagtcagcataactataatgaaggcacaacttacggcgtatttattcaagatttaattggtctaaatgaccaacttaaacttatgatgggactccgctacgattacttcgacttttcaactactaacaaaattaagaatgaacatcgtaatgtaaaagacagtacttttagcccaaatgttggcttggtatggcaaccagttcctgaacatagcttttatacgtcttactctaaaagcttcgcaccatttggtggacaaatgggtgtcaaccaagttactggaagtaccgatgtcgcgaaaatggataaagagcctcaatataacgagcaatatgaagttggggtaaaaagtgaatggttcgataatcgtttaaatactcaattttctgtctttgatattcgtaaaaataatattcgctataaaccgaaccctgacagtgaaccagaggtatgggcaactgctggtcaacatcaatctcgtggtctcgaatttagttttattggccgtgtacttgataatgtctttgttcgcggtgggtatggttataccgatgcaaaagtaaaagaagacaagcaaaatcctgaacgtgaaggcaactatttagcaaacacatctaagaacacaggtaatttatttgttcgttatttaccaaccgagcagtggtataccgaagtgggcgtgacctatgtgggttcttattatccaaatattaataatcaagtaaaaatggaaggcttcaatcgtgtcgatgcagcaattggctacagtgccgacccttggaatgtcacacttgcggtaaataacctaaccaataaagagtactggcgttcagacagcatgccaggcacaccacgtaatgtgttattgcgtttgaattatcagttttaa

SEQ ID NO: 48299 - DNA, 1194 bp, Acinetobacter baumannii
atgaaaattcgtttaatcactcgtcctataaataaaataaaacaggtgattctcgatttcatccatcacaatcacattattaactggaccccattacaaaaaagcgcactaatgcttaccctcgcctgcgcaatgaatttcagttggattttatggaaaggctatattttaattactcctagtgtttggcaatgggcaaacctatctttagttgaatcacaaatctggctgaatttgctgaccttatttttattagctgtactcattattccttgttatcgctacaaagaccaagcttgggcgcaaaaaattgtgcctttaattagtgtacaagcctttatgctgatgttgtgccacgatggatatttaattggtagtatcagccctgccacaatggtgggttacgtaggcactattggcgtaggtttggttttatttgaacgaaaaattgtttatagcgcttttatacctgcaactattattctagcggtatgtacatatttaagtatgacgggggttatttcatatgcgcccctatttaattttacagcgatgcgtcatgcccaaaccaatccattttggctaggaagtatgctgttttttattatgcctattttagtggcgtgttttattttatttgaaatattgctgactcaatggcgtcaacgagaaacctatattcaacgtttaagccaaatcgacccgttaactaatgtcttaaatagacgaagcttaaacactcatcttgaagcacttcatgagcaacaatttgattatgccgtgatacttcttgatatcgatcattttaaaaaaattaatgatatatacggacatcaccaaggtgatcaggttttgattgaaattgctcggtgtctttctgaaaacttacgtaatgaagatattattggacgttttggtggagaagaatttattttattacttcctcataccgatattattcaagcagaaaaaattgccgaacgttgccggcaagctttacaagaattgactatcttcaataatcaaaatatccaaattcatgtaagtgccagctttggcatcagcagttccgcatttgcaaatgacccctatcttgtgattagacaagccgatcaagcgctctatgctgtaaaggcctctgggcgtaatcaagtacgaacttttcaccaactacctcagatcaaatcaatttga

SEQ ID NO: 48300 - DNA, 390 bp, Acinetobacter baumannii
atgggtattttcatgaaaaagattatttttttaagtttaatattaggtttagcagggtgtatgtctactgctaatttttttgaagtgcaagccacctctgttcagaatagcggttattggaccggacaatatgatcgattagtaggaacattaaagttaaatgccgatggaactggtgttatttgtcaggatggaatgggaacagcgagagtaatgtctgttaaaaaatcaaaagataaactctattcacaggatggcagcttctggaaagtgcaagacgaaacactcagctctatgaaattaaattatgcaattggtggtggttatgatatgaaaaaagatgatgatttatctttggcaacaccggcatgtaaagaaaaattgaaatga

SEQ ID NO: 48301 - DNA, 918 bp, Acinetobacter baumannii
atgagttcaggcgcaaaaattcgattatatgcttgtgaagaagcagttttaggaacaactccagcaaacccgatctggtacacagttcgccgtgtaagtgatggtttatctgaaaatgtttctactgaagaaggcagtgaagtggttgattcacgttttcgacaaggtggggtagttactgaagcagaagtagcaggtcagttagagtttgaattatcacttggaacatttgatctattcttaagtgctttagccttcaataattgggcgggtaacgctttaagttttggtggtacggtacgtaagtcattaacgctggttaaagttttcgaagatgttggccaagtctttatttatcgtggagtacaggttaattctggtgaaattactatccagaccactggaaaaattactggtaactttggtcttgtaggtagctcgtttactcgtcagcaaactaaccctgtagtgaatccggtggcagcttcaacacgaccactggtcagcatgccaaacgttgaaaacttgctagttaatggtcagtctattcaaggtaaagcgtgtctacagtctcttaccatttctatcaataacaaccttgaagcaatccgttgtatcggttcgggtaagtacacaccagagttctacattgaaaaaatgatggatatcgaagcaaatgcttcattcatgttctcggccacagctgctggttggattgatgcaatcaaaacccgtgatgtgtttacactgaccttcgacatcagagacagcaaaggcagtaaatactcgtttaacttccctcaattagaagtcatggaagccaatcacccggatggcggtggtgatgacatcataactgtagatatcaactttgcccaagttcgtacagcgccaacaattgtacgtgctcttgtgtaa

SEQ ID NO: 48302 - DNA, 1476 bp, Acinetobacter baumannii
atgcgcttcattgacatattaggatatcaagaccttttaaatcgtagcgaaggtcttgatgacttccaccctttggaaagtcggagaacggacatgccacgtattcctgtaatcaataccagccatcttgaccgtattgatgaattacttgtagacaatatcgatacaggtgaatttaaacttcaccgctcagtttttactgatgaagccttatttgacctcgaaatgaaatacatcttcgaaggtaactgggtttacttggcacacgaaagccaaattccaaataataatgactactacacgacttatattggtcgtcagccgattatcattgcccgtaaccgtaacggtgaacttaatgccatgatcaatgcgtgttcacaccgcggagcacaactttgccgttacaagcgtggtaacaaagcaacgtatacttgccctttccacggctggacttttaataactcaggtaaattgctcaaagtaaaagacccaactgacgcaggttactctgactgctttaaccaagacggctcacacgaccttaaaaaggtagctcgttttgagagctacaaaggcttcttatttggtagcttaaatcccgatgttccttcgcttgaagaatttttgggtgaaaccaccaaaatcatcgacatgattgttgaccagtctgaacatggtttggaagttttacgtggttcatctacttatacctacgaaggcaactggaaactcactgctgaaaatggtgccgatggttaccacgtttctgctgttcactggaattacgcagcaacaactcaacaccgtaaagaaactcaagctgccgataacatccgcgcgatgagtgcaggttcttggggtaaacaaggcggtggctcgtatggctttgaaaatggtcacatgttgctgtggacacaatgggcaaacccagaagaccgtcctaacttcccaaaagcagacgaatacaccgaaaaatacggtgaagcgatgtcgaaatggatgattgagcgttcacgtaatctttgtctgtacccaaatgtttatttgatggatcaattcggttcgcaaattcgtgtacttcgtccactttcggtcaataaaaccgaagtcaccatttactgtatcgcgcctaagggtgaagcacctgaagctcgcgcacgtcgtatccgtcaatatgaagatttctttaatgcatcaggtatggcaacgccagacgatttagaagagttccgtgcttgtcaggcaggttacgccggtattgcacttgaatggaatgacatgtgccgcggttcaaaacactggatttatggaccagatgatgcagcaaacgaaatcggtttaaaaccaatgttaagtggtatcaaaactgaagatgaaggactgtatctggcccagcatcaatattggttaaaaaccatgaaacacgcgattgcatcagagaaagaaattgctgatcagggagaaacagcatga

SEQ ID NO: 48303 - DNA, 1017 bp, Acinetobacter baumannii
atgtcaaaccacaatgttgcacttcaatttgaagatggtgttacacgttttattaacgtagctcaaggcgaaaccctatctgacgcagcctatcgccaaaaaattaatattcctttggattgccgtgatggtgcatgtggaacttgccgcgcattttgcgagtcaggtcattatgacatgccagaagaaagctatattgaagatgcattaacaccagaagaagctgaacaaggctatattcttgcttgccaatgtcgcccaacttccgatgccgtattccagattcaagcgtcatcagatgtttgcaaaacagaaattcatagcttccaaggtactttagcccgcgttgaaaacttatcagactcaaccatcacatttgatattcaacttgatgatggccaaccggatattcatttccttgcaggtcagtatgtgaatgttgcaattccagaaaccggcgaaacccgttcatattcatttagctcaaaaccgggtaatcgtttaacgggctttgtggtacgtaatgtaccaaatggcaagatgagtgaattcttaagcaagaatgccaaagctggtgacaaaatgacttttactggtccattcggtagcttctatttacgtaatgtagtacgtccagtgcttatgctggcaggcggtactggcattgccccatttatgtcgatgttacaagtgcttgaagaaaaaggttcagaacagcctgttcgcttggtttttggcgtaaccaatgactttgatttggttgctttagaaaaactcaatgagttgcaggcgaaattcccatggtttgaataccgcactgtagttgcaagccctgagagtaaccatgaacgcaaaggctatgtaacgggtcatattgaaagtgaatggttaaacggtggcgacgtcgatgtttatctatgtggcccagtaccgatggtagaggcggtacgtggttggttagaaactgaaaatatcaaaccagcaaacttcttgtttgaaaaattctctgcaaactaa

SEQ ID NO: 48304 - DNA, 996 bp, Acinetobacter baumannii
atgtttaaaaagtcctcagatgcaggcatctttttatggatgacttaccagacaatgcaaaacatgggtttagatgccgaatcaatttttgctagcgttaacttaccaaatcagccaccagataagactattcgacgcgataattcgacccaatatcggttttggaatgcagctgaaataatcagtaaagatcaaaatattggcttgcatgtcgggagccaaatgcccgcatttagaggactagttattgaatatctatttttaagtagttctacattcggtgagggtttaaaaagagctttaaaatatcaagctttactcacagacgtttttgatctcaccttaactgttgaacaagataaagcaattttatcgggctttgaacactcagtaagacattatttagaagctgcaatcggtatatttcttaatttttttaaatatattacaaataatagtttcgcccctacagaaattcatctgacttactcgaaaggggcttcaaatgacaattataaaaaggtttggaaatgtcctgtggttttaggtcaatcaactggagctattatttttccatccacattattacaacaagtgtcaccagcagctgaacctgaattattgaaagtccatgaaaatattgcagagcaacaattagctaacttagaaaaacatcgtctcatttacgctattgaacgtttactcggcaatggtcttcttgagtcaggtaattttgatcaaaagtttattgctgaacagttaaatcgaaatccccgaactcttagagcagatcttcaagcaattaatacatcctatgagcaaattttaaaccattatagagaacgactagcaaggcgcttacttgcccatactcaggaaagcattgatcagattgtttatttaacaggtttttcagaaccttcagcatttacaagagcatttaagcgttggactggagaaacccctagcgcttatcgtcaacgtaaacaaaaatga

SEQ ID NO: 48305 - DNA, 627 bp, Acinetobacter baumannii
atgcttggtttcccattaggtatttttgtcgcgaatggtttggaatggtattttcataaggtttggcttcatgaatttccaaccaaatatcgtaacagccctttttttactcatattgctcatcataaacgtgctcgcttaaataattttcatgatgaaggttatgcagaatcaatgttcaaaaatgcagaaatttataatgaaaaaacagcattaattggtttagcaggcgcggcaacagtattcttaccagtagcacctttttttacagctggattatattacggaatatggaattactggcgaatacatgccaaatcacatttagatccagagtatgctaaaaaccgtataccctggcattatgatcatcatatgacgagcaatcaaaatgctaattggtgcgtaactcgaccatggttcgattatattatgggtacgagagttacaacagaagtttctaaaactgaaactaatcctttaggaatacaattacctcattggcttgaaaaaagagtaaatacatttgcgcataaaatactcaaaaaatcttttgctaaaattgacttaaattcacaaaaagataaatccgatttaaataaaggaatagaagtcgctttaacataa

SEQ ID NO: 48306 - DNA, 249 bp, Acinetobacter baumannii
atggctcaataccagacaaagcagttagaacctagattgcatgcaggtgcaaagatgtttccgcgctgtcttttgagtcttaatatatttgatgagtttgggtttcggcctgggaccgacaaagacagttattatcaaggtaacccagaatatgcacattatcctttatttgaagatgtccttgatgattttggagtgacggaggaagagcgccggagttatcaccaacagaaattgcacatcaggtga

SEQ ID NO: 48307 - DNA, 675 bp, Acinetobacter baumannii
atgggatatctagacttctctggtctaaaagatgcgcccgtgattcaaattccgacaccgatgcattttggcttaagcttctcatggggcttatttattccaatggcatttatttatttggttacgtctttagaagcaattggtgacgtaacggcaaccagtaaactatcaaaccaacctgtagatggtccacagtggatgcaacgtattaagggtggtgtgttagtaaatggtgcaaattcactacttgctggcctattcaatactttcccaagctccgtgtttgcccaaaataatggtgttatccaattaactggcgtagcaagccgttatgtaggaatctggattgctgctttactcattttattaggtctattccctgctgtagctggtgtaatacaagctgttccacaagccgtattaggtggagcagttatggtaatgtttggcgctgttgctgcctcaggtattaatattctttcatcaattcatttagaccgccgtgctcttttaattattgcgatttcacttgcattaggcttgggtgttgctcaagtgccacaaattttggagcatctgccagaattatttaaaaatatttttagttccggcgtagcaacaggcggtattgcagcattaattttaaatgttgtactcccagaaacacataaataa

SEQ ID NO: 48308 - DNA, 1206 bp, Acinetobacter baumannii
atgggcatacaaaagatattaaacgaagaggcacaatatggtgtccccgttaaaattttcactcaagacatagatagtgaaagtattgagcaactcaagaaaatggcacaactgcaatttatatattctcatattgctgttatgcctgatgtgcatgttggaaaaggtgcaactgtaggcagcgtcattcctaccaaacatgccattattccagctgcagtaggtgtagatattggctgcggaatgaatgctattcgtttgagcctgaaagcttcacaacttccagataacttaagtcgcttgcgggacgccattgaacggaaagtgccggttggatttgctttgcataaacaagtcaaagcgaaagcttctagcattattccacttgaaaaacgcttagaacctattattaaaaagcatccgggtcttgtccgaatgcttcgtcagtttgaggcaacatggcaaaaacagttgggcactttaggcggcggtaatcactttatagagttatgtattgatgaaaatcaagatgtatgggtgatgctccattcgggcagccgaggtcttggtaacgtcataggtacttattttattgagttagccaagaaagaggcacaacatcgctttgggcacgtgcctgataaagatttaagttattttgctgaaggctcgcaaagctttaatgattatgtagaagcagtagagtgggctcaagaatatgcttttgaaaatcgtaaagaaatgatgcgattaatattagaagcaattcgccctcttctaccttcttttcaaatgacgaaagaagcaatcaattgtcaccataactatgtgagtcaagaaacacactttggtgaaaacctttttgttacaagaaaaggggcaattcgagcaggtttagatgagttaggaattattccaggttctatgggagcacgctcgtatattgttaaaggtaaagcaaaccctgaatctttttgttcctgttctcatggagctggccgcaaaatgagccgaagcaaagcaaaagttctttttaatcagcaggacttgattgaacaaacacaagggattgaatgccgtaaagacagtggtgtagtcgatgaaattccaagtgcctataaagatattgatgaggttatagccaatcaggcagatctcattgaagtcgttcatactcttaaacaagttttatgtattaaaggttaa

SEQ ID NO: 48309 - DNA, 444 bp, Acinetobacter baumannii
atgcaactcaatcactatctcaattttcaaggccaggcagagcaagcttttaatttttataaatcagtattcggcggtgaatttgccatgctgagccgctatagcgatatgccgcctcatgacggtgtgacgttatccgaagctcaaaaaaatttagtgcttcatgtttccctgccgattaacgaatacactgtactcatggcatcagatgtcattgatcaattctgtacaccaaatagtgtatttactcagggcaataatcattacattgcaattaaccttgaaaaagatgagcaagaaaaggcaaagcaactttttgatgccttatctgtaaatggcaaaattgaaatgccactagaaaaaacgttttggggcgctttatacggtgcttttactgatcaatttggcgtcaaatggatggttaactgccagttagatacttaa

SEQ ID NO: 48310 - DNA, 1221 bp, Acinetobacter baumannii
atgacgtcttcaatacaattgaaagatggtattgccaataccgttgcaaatgatcagtctcaaggaatgattattaaaattgtaggcgccgtggcggttgcgcatttactgaacgatttaattcaggcagtgctaccagctatctatccaatgctaaaagcaaacttttcgctgagttttgcggaggttggcctgatttcgtttgtatatcaaattacaggctcgctgctacagccttggattggactttataccgataaacatccaaaaccgtatcttctcccactcggaatggtcgtcacattctgcggcattatcttgttggcattttcaccaagttttgctgtgttgttatgtgcatctgctctgattggggtagggtctgccacctttcatccagaagcttcgcgtgtggcgcgtatggcatcgggtgggcgcttcggtacagctcagtcgacttttcaggtgggcggaaacacaggtactgccattggtccattattagcagcattattaattgttccatttgggcagcatgcagttgcgggcttggtgatatttgcacttttagcgatttgggttttatttggtgtaagccgctggacagtaaaccatgctaaaaatcaggtagctgcacgtgcaactcaagcacatactaaattgcatgggcgtaagctcattattgccttgggcacaattagtgtgttgatgtttgccaaatttacctacattgccagcattagtaactattttactttttatttaattcacaagttccatattagtattcaaacagctcaattacacttatttgcttttttggcagctgtggctgtaggtacatttgcgggtggcccaattggcgataagatcggccgtaaagctgtgatctgggtttcatttgttggcatggcgccgtttgcattaatgatgccgtatgcaaacttattttggacaacggttttctcaattattgcaggtttggtgttgtcatctgcttttgcagcgatggtggtttatgcacaagaagctgttccgggccgtgtaggcatgattgcaggtttaatgtttggtcttatgtttggggtaagtggtattgccgcagcggggctagggcatttagcggatattaacggcattgaatgggtatttggtttatgttcattgttgccattacttggttttgcaacagcacttttaccaaacacaaaagttaaataa

SEQ ID NO: 48311 - DNA, 807 bp, Acinetobacter baumannii
atgtcacaatctacaggtgctccttctttatttgacgatgggcaaattgggacaggggggaataataatagccagtcccaagtaaaattacaggcaattaatctgattgatttattgcatgatggtttttacttaatctttttaattcgaaatcagtatgtgccagctgatccacagcgctttcgtgaaaaaattctagatttgcttaatcgatttgagcaacaagcgaaaaagttacaattttcagctgatgatattcatgatgctaaatatgcgttttgtgcgctaattgatgaaacgatcgtaacccagcaagacccaagctattttaatttacaaaattcttggttaattagcccattacagttaagtctgtttggttctcagttagcgggttatcaattcttcgaaattttagagcaactacgtagtcgtggaaaagagcgattagctgctcttgaagtcttccattactgcttattattaggttttcagggtaaataccgaattgagtcaattgaaagccttaaccatttggtggcacgagtaggcgatgaaattgattatctgaaagggaaaaaagtggctttctcgccattctcggcaattcctgatcagatacgaaatattatccatcgtgagttaccttttttctggattttgattttcttattgatttttgcattacttacctttgcaggtttaagatttatgcttaacaatcaaaatgataaagcattatctaattatcaaaatgtgatttctgccccacaagagcaagcacatattacaatttacttaccttga

SEQ ID NO: 48312 - DNA, 987 bp, Acinetobacter baumannii; identical to SEQ ID NO: 42763

SEQ ID NO: 48313 - DNA, 348 bp, Acinetobacter baumannii
atgattaatcaattaaaaccagttgaagtggtgcgtaaccagtatggcgaatggacacatccggaagtagacgcttacttgaaaaatattcttggtgatgacgctgagtttatgactcaagagcaatgggatgagcttaagcgtcacttcaatattgtgacagttaaaacttacttagagtcaactgtatctcctgatgagtttgatgaaattatggatgatgcagatttatcaaaatggcagccattggcacctcatggattcttcttaatgtctatttacttcacggaagatggtgctgacgcaatttgggctaaagaaaaacaagtagagggagctgagggatga

SEQ ID NO: 48314 - DNA, 603 bp, Acinetobacter baumannii
gtggttaaacggtttttagtacgtgatgccgactctatcgtgtcttatcgtgagaaagctgctgttgatgcttggcttaagagtgatcaatggttccatttaatgagagatagctattctcatactgaattaattttggcaggtatgtggggcggttgcacaggtatttttcataatattgaagcacatatcagggattatgttgccaccggaaggtacccggacaatcgagtcatagatcaacattacttgcgttattgtatttggccgactttaaaacaaagtgtgcttgtacatgatagccagcaatttgatgaaaatagtaccgattttccggtttatgatttaacttcaatgcaaaatgaccaagacaattttcatgtagggatggataatggttcaccagtagttacaactgcggttaatcatccaacggcagaaaaagtttactggattttattcgatgaaaatcacgatgaagtttgcagatatgatgcaattgtgtcgaagagtcgaaatattgaagtgaatttaccccacgcttttgctaaaaaaattcagttacagcagtggaaattacaagtctatccgtatgaaaactga

SEQ ID NO: 48315 - DNA, 750 bp, Acinetobacter baumannii
atggcaaaaccggaatattattatggcgttcactcagtggagtcattgttagaacttgagccggagcgcgtgctgaccctgtttacattgaaagggcgcgacgatcagcgtttgcagaagattctgcaattggccgagccttttgggattagtgtacaaaaagcaagccgtgatagcctcgaaaagcttgcgggtttgccatttcaccaaggcgtagttgcagcagtacgtccgcacccgactttaaatgaaaaagatctagaccagctcttggctgaaactccagatgccttattgctggcattagatcaggtgacagatccacataacttaggggcatgtatccgtactgccgctgcaatgggtgttcaggcagtgattgtgcctcgcgatcgctcagcaagcttaactccaactgctcgtaaagtcgcagcgggtggggccgaaaaagttaaatttattcaagtgactaatttggctcgtactttagcgcatcttaaagagacaactcacgtacgtgtgatcggtacgatgcttgatgaaaatgcattacctattcagaagtgtgatttctcgggtgctgttgtgattgtaatgggtgcagaagacacaggtttacgtccaattactcaagcacagtgtgaccaaaaagcctatattccaatgtcaggtaacttacaaagtttaaatgtaagtgtggcaacgggtatggcactttatgaagcttgtcgtcagcgttctgaggtataa

SEQ ID NO: 48316 - DNA, 882 bp, Acinetobacter baumannii
atgtttgatcacattgcccaacctatctcctatcagcacattgaactatcctttcctgttcatctcgacattaaacgtttagatttagttcatcctcaaatttcgggtaataagtttttcaaattaaaatacaatttgcttgctgcaaaagaacaaggtttatcaagcattttgacttttggtggggcttactcaaatcatattgctgcaacagcttatgcagctcatctttttggtttaaaaagtataggaattattcgtggtgaagagttagctagtaaaccacttaatcccaccttggcaaaagctcaaagtttaggaatgcagctacattttatctctcgccatgaatatcgcttacgagatgatgcaaattaccttcaacaattacagcaacaatttccgcagacctatatcattcccgaaggtggttccaatgaactggcagttcaaggttgtcaggaaatcctcagccaatatgatttagagcaatatgatgtgatttgctgtgcagtcggaactggcggaacgatttcaggtctgattgaaagaagtgcagcacatcagaaagtcttaggattttcggctttaaaaggtgatttcttacaacaagagattaggcaatggactaaaaaacaaaattggtctttgacagatgtatactgctggggcggttatgcgaaaacctcacctgaactattcgcatttattgaaaattttgaagagcaatatacggtcccccttgaaccgatctataccggaaaaatgatgtttggtctgtttgaacttataaaaaacaattattttccagagaatactcgtattttggcaattcattccggtggtttacaagctgatattagaaataaacctcacacatga

SEQ ID NO: 48317 - DNA, 324 bp, Acinetobacter baumannii
atgtctaatttcaaaaagcaccctgacggctacatgtcatttttaggccgtgatgataagggcctctactctgttcgcattggctggcaagtttacgcatctaatgctaatggctcagttctttacaaagttaaagacggagttaagacgcctttaaatgcggccaagttccaaactgactatccaaaagtttggaatgaactcacacaagaaatcgattttcaacgcagaaagcagctcgcaataaaactgcgtgaaacaaatatccctacttatgaccgcaaagcttacaagcaaaaacgcggcttcaccggctctagatga

SEQ ID NO: 48318 - DNA, 291 bp, Acinetobacter baumannii
atgaaagattacaactgccctacttgcaagaagatgattcctgttgaccgttcaaaaatcaaagctggtgatgaggtttcattttgcagagtaacccaatcttctcaatctgcacgtttttcttcaagagaaggaattgtcgattgccgtgaaggtgatgtggttttggttaaatatcgcaaagaaattattcctttaaatattaaggacgtctcacctgttgatactcctagcccacttacgtatgcctttgttggtacatgcgaatgtaaggaggctgaacatgtctaa

SEQ ID NO: 48319 - DNA, 441 bp, Acinetobacter baumannii
atgaacgtaaaaaccttttcaaacaagcacaaggtaactggagttacagcaattgctgtacttgtagccttgagttcttgtgaatatcgaactgctaattctagcgtcccttctaattactcatatgaaagcaaacaagtagttgcttctgaatatgaactcttaggaattaagcaaactggtgaaaaaactggtgtagctgttatccgcattgacggcttcaaactaaacgtgagcttcgattttgacggcgtagctgatagctatggtgtagctggatctgattttacagcggctgaaattactaaccttgctattgagtcagtaactgacttaagcggcaaaccttggaatgatttcaccaatcatgatgaccataaaaatataaatattttattggctggctatatcgaccgtaataactggttggaggcagcctaa

SEQ ID NO: 48320 - DNA, 363 bp, Acinetobacter baumannii
atgttatcaagcaataaaatccagcatagtgttacagatctatcttcaaagccaaaaaaaattaatagatcagataaaacacctatttatgctgatgaaatagcagaaattaaaatgaattcacacactacacgcttaacttttggtgctttatcggctgatgaatcggattctactcacactctagttaatgagtctgtgaccgtagtaatgcctactacaacttttttatcagcaatatctcagatgtttgtgccaattttggaaaatgagcaattattagaagttcttattgaggattattcaaatatagcagagcatgcaaaacaccaattagaacaattgaaatcaccaaaaaaataa

SEQ ID NO: 48321 - DNA, 480 bp, Acinetobacter baumannii
atgaataataaaaaagtaatgtgtaaagcaatctctaatttttctgcaattgaagtaaaaaaaattcaatgggcttcagcactcaatgcgcttatgctgcactcagggaagtcacgctcagaaatggcggaagcttgcaatattagcaaaggcagagtaactagaatattgtcaggagactccaacctcactattgagagtatttgctcatttgcaaatgctcttggttatgatgttgatattgctttttataatagttctatgaccaaaccataccaaccatggaattctggtcaaatagagtttgcaacatttaaaaaggttaaaaaaatattgtttgaagaaagagttctaacagcatcaacaccaaatttaaatacaaaagttcgtgaaattgccgttggctctaacagtcataccacttggtttagtgctacaaaagcacaaagtatcgaaatcaaagaatttacttttgagtaa

SEQ ID NO: 48322 - DNA, 504 bp, Acinetobacter baumannii
atgaatatacactttacgagattggcaactggttttccagagccattggttttgcctgaagatactgatgagagttacagggtttttcatgcttcggcttatgcagactttagaaattgttatttaaatcaggatatttctagtatagaacagtccgatcctgcaagtgctaaacatgcacgaaaaggtttaattcagttaaatgaaaacgcatatcacgggctaccactagaagggttttactcgagtacagcatgtcatgaatctggcttcagaattcaaaatgcccacaaaacagttgatgttaatgtcttacgaattaggaaaagtgcagtgcgtatttattggtgttatatgaatcatagtaaagcgataatggttctacgaatactaacgaaacgtgaagatagtaatctacatcaaaaccccaaaattaaagagattggagatgccttgctaccatttttcaataatcctaaaggttttcaggagagaataatatga

SEQ ID NO: 48323 - DNA, 204 bp, Acinetobacter baumannii
atggacaactctaaactaccaatcaaccagattattgctcgcatcaatgatgctgcgaaacatggtgaagctttggtgctaacagccgaagaagtaaagattctttctaaagatattggcgacaaggtctttattcctgtgcttactaatgagcaggtcgtgcagttggtaaaagaaggaaagcttgggcagaaaataaaataa

SEQ ID NO: 48324 - DNA, 321 bp, Acinetobacter baumannii; identical to SEQ ID NO: 46215

SEQ ID NO: 48325 - DNA, 1044 bp, Acinetobacter baumannii
ttgaataagattttatttggtgattgccgtgctctgatgaatcaaatgattgcagaaggcttgaaagctcaaacttgtgttacatcaccaccttattttgggttacgtgattacggtgtagatggtcaattaggtttggaaaatactgtagatgaatatgttcaaaacatggttgaagtttttcgtttagtacgagagctgctgcatgacgatggaacactttggttaaaccttggtgatagttatgcaggttctggccgcggcatgactcgtactgggttgaatgacgggaaaaatccaaaaacaaagggtttagttttacctaaacaaaatgcagctcaatctaatttgaaaccaaaagatcttattggcattccatggaaagttgcttttgcactgcaagccgatggttggtatttgcgccaagatattatctggcataaaccgaacccaatgccagaaagtattactgaccgttgtaccaaagcacatgagtatattttcttattcagtaaatcacgtagatattattttgaccacgtagcaattaaagaaccggttgcagaaagttcaatcaaaagactttcccaaaatcttgatcaacaacatggcagtactcgtgccgtgatgaaatataacggtccaatgaaagccgtttactcgagatcttcacgcgatagttttaaacgtgaaaacagcaagagagctgctgttattcccaatcaagcatacggaacacacagatcagaaagatcagaaagcgagtatgacttacttacacgtaataagcgcagtgtttggcaagtttctacaaagccttacaagggcgctcatttcgcaacattcccaatggatctaatcgagccgtgtgtattagcgggatctcgagtcaatgatgttgtatttgatcctttcatgggatctggaacaacagcagctgtagcgcttatgcatgagcgtcaatatttaggatgtgaattgaaccctgattattacgaattacagcaagaaagattattaaaaatcatggagaaaactgcatga

SEQ ID NO: 48326 - DNA, 2196 bp, Acinetobacter baumannii
atgcaagaatatcaagaaaaaagatctggattaggtctgctgggttatatctggaatgaatggatctcaacattcattatcctcattttactattgatgacgctcataattggtaccggggaaatgatccacggtcaattattacgtatcggggaacgtctttatggtgaccctgctacaggcatgcaatattcattcttgcgtgctgagcctgaaaagccaacttgtgatcgacatccgaatattgatgctcaagtaaaagagcaaatgaaagcaaatgcatctgatgattttgcgagcttctttggtgctgcatcggaaagtgatgtccgtgcatccttactggcagcacagcagcaatgtgaagaaaaatatcaggcttacgacaaaactattaaatatatcgaagcaaacccgggagtacgtacttatcgtgcgatcgaaacaggtttctttggtatttttaaattcggtacagagaaccgtgccattttactggtctttatggtactgatttcagcgattactgcatcattgaaatatcaccatattggcttgcgtaatccagcaacaaaaatagattacaaagtgtactctctatttatgttgattggtaatgcgctactgagcttctcggtcattagccagtatcgttcagtcattaattccggggtaacacctacttatgaaacagtaacgatttactggatatggatgattctgtttgttgttctgaccttaattagtctgtatcaactatttgtttcacctccaccaaaacgtgaaggcggtaatataggtttagccttactttctgtacctttatatgcctatatggcactaattacaggtattgtattcacgttctttatggattatccaatggggcaagggatttaccttggtttattggttgagttctcgggtatcttcttaaatcttgccctatttatttgggcgggtatgttactcacgcaaacccgtgttatggacttgttcttaaatgtacttcgtccatggaacttggcgccagaaaccttaacttggttaattctgattgctgctgctgtaccgactgcttataccggtgcttcggggattttcgttatcgcggctggtgcgattatttataaggaagtttggaacgcaggcgctcgccgtcaatatgcattagctgtatctgcaatgtccggctccctaggggtggttgtacgtccatgtctcttggtcgttctaattgcgatgttggatagtcgtcatgttacatctgatgaattattcggacatggtatttatgtcttctggctaacagcatttattttcttgggtgtatctcttttattggcagaagaaaagttccgtgtgaactcgccaaaagtggcactaccaggtatggcacgagctttcgtaccagttattccatatatcttaattactgtagttgtccttgcattttataaatatgcattagatacaggaatgaatgaatttactgcaccagtgattctgccactcgtgcttattgcgatgattctgtacgataaaatggttatgcctaaagaggcaccagctttaaatattcatgaggcgattgttcgtgagcatgaaaagaaatcaccgttcttacagactcatgatccgcatagttcacagttccgtcttggttttggtggtgcattacgttttgcgacctcagaaacagtgggacatattggtgccttaattattttgatggcattgtctgcaagtgtaggcggcttaattgaacgctctgaagtggttgaattattaccaactcatttaggcagtatctatatatcattagcatgtattgcactgttacttgcaattattggtatgtgtacagatccatttggtgctgtaattttagtggcagcaactattgctcctgtagcttacgaaaatggtattcatccaattcacttctggatgattgtattggtcgcattcgaatttggttatgtaacgccgccagttgccttgaaccatctattaacgcggttatccgttggtgatgatgaggtgaatgctgccgatgcagaagcgaaagagaagtacaccagtttctactaccgatatgaacgttggttattaccaattattgtcttgttctcatcattggtattggtaacttatgcaccactaatactgaaactatttggttggtacaaataa

SEQ ID NO: 48327 - DNA, 570 bp, Acinetobacter baumannii
atgacaggcttattcattttcttggggattttcgttgtactgattgcttggggcatccacattcgcaataacattgtgcgttatttcaatgcgaccaaacgcgcttgggctgaggttgccaatttcgaacgccagaaagtaaaaacacttgaagcactagaaaccacactcaatcaatatactcagttcgagaagtcaactttagaacaagtaactgctttacgtcagcaaattctaagtttgaatgtcgatcatactgatattgctcaattacaacagattgaaaaaatgagtaaagagctaatccgcagcctaaatgtcgtggttgaaaactatcctgaactaaaagcagatacgctctatagcaaaatgatggatgatattcaggaacaaaacgaaaatgtcggcgcggcaatcagcatttttaaccgcaacgtcgaagtatttaataatcagattgaagtgttcccaaataatattatcaatacgatgactttatctaaaaaaacaattcgtccttttcgagataatttggctactgacaattttgactataaaccgaacttttag

SEQ ID NO: 48328 - DNA, 1068 bp, Acinetobacter baumannii
atgagtacgtcgatttatcaacgtcctaataagaaatggaaagcagatgttgttttaaatggtgtgcgtgttactaaaactttagaaaaaaaagaattagcaatccgttgggccaaggagacagaacgaaatctcattttaaatgactcaactcaaaaagctcttaatagtaaaattgttattactatgcgtgaggctcttggccgttactcagatgaagtttccagatttaaagctactgcaaaaaaagaaatgcaacggatccgctattaccaggacaatttgccaaatactgattggccacttagttgttataaaggggaatttttaaagcagtgggaagatacagttagtaaaagaacaattaagccactcaagccttcaactattttgcgtgattattctactttgtcttcattctttaactggtgccgaaaggataaaggatggattgaatttaatcctgttgaaaacctccgaaaacctaaaaaacctccgcatcgtgaaagacgtacagaagttgaagagcttcagcgcatgctggcggctctaaaatataaacctggaacagtaccaactactaaaatgcaagaggttggattgatttggcttattgctatggccacggggatgagatccggagaaatcgtaaatcgcttgcctgagcacgtctttttgtctaaacgctatgttcaattagataaaacaaagaatggtactgctagaaaggtaccgttagatgattttgcgcttcagctgtggacattagctttaaaaattgaccgaaaggggagtccaaaagtttttactgtttctgattcgtcacgtgatgcattatttagaaaggcacgtaaacaagctggattagaaaattcagatctaacctttcatgattcacgacatgaggcagcttcacttatggccagacgtattaaaaatgcacttactttatgcaaaatctttggttggaaagatcctaaacaggctttgacatactataaccccacaaatgatgagatcctggacgaattaaaccagtcatccggtttaagtcgattgttagcataa

SEQ ID NO: 48329 - DNA, 297 bp, Acinetobacter baumannii
atgaccgtaagtgtagactcgcttatcgaaaaaatgcttctgaaattaatgaagcaaatcgaagcaaagccaattattccaattgaatgtcaactttgggatgaacaggacatagcaaattacttcaaatattcactggattacactaaacgtcatattatcagcaatgataattttccaccgagtcgggagctgccaacctctgccactggtgatcgtacagtctcacgctggaaggctactgatgtcataagttttggtatggcatttgataaaaccaatataaaatatagctga

SEQ ID NO: 48330 - DNA, 222 bp, Acinetobacter baumannii
atggaacttgtacaacctgatcacccaattgcacaagaagcttatgaaacagtaaaagctatgtcttgcgaatatattaatatcgtggcacaggcttatcaaaaatctcaaactgaagttggctatttcattagtggaatttacccgggaacaccagaaaaaagctttaaccgtcaggaatggataacaacgtttgaaaaattacaaggagccaatgtatga

SEQ ID NO: 48331 - DNA, 1674 bp, Acinetobacter baumannii
atgaccgaatcttttgcagccctctttgaagaaagtgaattaaacctcaacgttgaaaagggtgcagtcatccaaggtgttgttgtaaacatcgatagtgactgggttactgttgacactggccttaaatctgaaggcattgttgaccgtgctgaatttttaaatgaacaacgtgaacttgaagttcaggttggcgatactgttgacgtagttgttgaagctcttgacaacggtatgggtcaaacagttttatcacgtgaaaaagctaaacgtgctgaaacttggactaaacttgaaaaaatctttgaagatggcgaaatcgttactggtgttatctctggtaaagttaaaggcggtttcactgttgacatcggtcctgttcgtgcgttcttaccaggctcattagttgacactcgtcctatccgtgacacaactcaccttgaaggtaaagagttagagtttaaagtaatcaagcttgatgctaaacgtaacaacgttgttgtatctcgtcgtgctgttatggaagctgaatcttctgctgaccgtgaagcattacttgctcaacttgaagaaggtcaaacagttacaggtactatcaaaaaccttactgattacggtgcattcgttgatcttggcggtattgatggtcttcttcatatcacagatatggcttggaagcgtatcaagcatccttcagaagttgttgaagttggtcaagaagttactgttaaagtacttaagtttgaccgtgaacgtaaccgcgtatctttaggccttaaacaattaggcgaagatccatggttagcgatcatgagccgttaccctaaaggttctatcgttaaagcacgtgttactaacttaactgactacggttgtttcgctgaaatcgctgaaggcgttgaaggtttagtacacgtttctgaaatggaccacactaacaaaaacatccacccatctaaagttgttcagatcggtgacgaagttgatgttatggttcttgaagttgacgaagaacgtcgtcgtatcagccttggtatcaaacaaactcgtgctaacccatgggaagagtttgctaagtctcatgagaaaggcgaaaaagtttcaggtacaatcaagtctatcactgactttggtatcttcattggtttaaatggcggtatcgacggtctagttcacttgtctgatatttcttggaacgaacaaggcgaagaagctatccgtcgttacaagaaaggtgacactgttgaagcagttatcttgtctgtagacgctgaaggtaaccgtatcagccttggtatcaagcaattgaacagcgatccgttcaatgatttcttagctgctaacgaacgtggtgctttagttaaaggtactgtaactgcagttgatgctcgtggcgcaactgttaagttagctgacgaagtagaagctactcttaaagcttctgaaatcaaccgtgaccgcgttgaagatgcaactaaattcttagaagttggtcaagaagttgaagcgaaaatcatcaacgttgaccgtaaatctcgctctatcaacttgtctatcaaagcgaaagacgaagctgaagagaaagaagcagttgctaacttgcgtacagcatcagcttctcaagacaatggtcctaagactattggtgacttgatcaaagcacaaatgaagtaa

SEQ ID NO: 48332 - DNA, 1509 bp, Acinetobacter baumannii
atgctaaacgcaaaacaacatgctattcaaaaaactaaaatcgcaattattggtgctggattcggtggccttgccatggctattcgtctgttacaaagccaacaatcagatttttttattttagaaaaatctaatgatgtcggtggaacttggcgtgaaaaccgctatccaggagctgcgtgtgatgttcaatcacatatgtactctttgtcttttgcacctaaaactgactggtcaaaacgttatgcagaagctcctgaaattttcgattatatccaagatataaccaatcaatatcaaattaaaaactactgtaagtttaaccatgaggttactcatgtacagtatgatgaactgcgccatatatggacactaaattttgcaaaccaaccttctctcgaagcacaatttgtagcttttgcatcaggtccgctacatattccacaaatccctcatattcaaggtattgaaaagttcaagggtaaagtttttcactcttcccaatgggaacatgactacagtctaaaaggtaaatcagttgcttccattggtactggtggtagtgcaattcaatatattccagaaatcgcaaaagacgttaagcaattatatgtattccaacgtacagcagcttgggttatcccacgagatgagcgtaaatactctaatttgagcaaagctctatttaaaaaatcaaacttatatcgacaaattcatcgcagccgcctttattggagtaatgaatctcgcgttgttcctatagttcagccgcaaatcatgaaatatgggcaaaaattagctgaggcatttatacgtttccaagttaaagataaagatttagccaagaaacttacaccagactttgtgatgggctgtaaacgcattcttatttcaaataaatacttccctacttttaaccgtaaaaatgttgaattagtgactgagggtattcaagaaattaaagagaacagtattattacaaaggatggaaaagaaagaccaattgactgtttaatctatggaactggttttgttaccgatccacgtatttatttaaaacattttacatgtattggtcgcaatcaaattgaattgaaacaggcttggaaaaacggtgcagaaagttattatggaattatgaccaagaattttcctaacctatttcaactggtcgggccaaataccgttttaggtcataattcgattatatttatgattgagtcacaagttaattatattttacagcttattgatctagttgaaaaatctggacagcacgctatagaaattaaaccggaagttcaggattccttcaatgaaagaatacaaacacaacttcaaggtactgtatggcaagctggcggatgtagcagctggtatcaagctgccgatggaaagaacttttctttatggccaacttatacatggaaatattggctagacactcgtaaagttaatcctaaagattatttgttattaaataaatgctcacagagctatgcagcataa

SEQ ID NO: 48333 - DNA, 1020 bp, Acinetobacter baumannii
atgaaacgatcggcacttggtttaatctatttaattcaaggaatgcgcaatgcgggcattgatgtcgactcacgtttggcagatataggtattaaagtagattccctggacccaagctcaacaattcatgacagtttggaatgggatatacagcaaattattagtgagaatgttgacccagagaaaggattatttattggacaacattacgcattggcaggttatggtcctttactcatgttacttgtgaccagccatgatatacaaacagccttagaaaaaggcatacagtatcaaaaacttactcatttatttggtactttgagcttacaagaaactgaaaatcacatcattttgaactatttaccggtcgatttaaaaacagaaatcggtttactccgtgcccaatgcgaaatttcgggcacttataagtttattcaggatatttataccatgatgggcttaaaaatgcctgatatgcgtatagatttaccatttccgaaaccctctgatccagataccgttgctcaatattacgcatattatggagatgatctacattttaattctacacatgcagcatttagcctaagtaagaatgtgctggaaataaaaattccttcagcagatattattactcatcgtatctatgaggctaaatgtattaaagaaatagaaagattaaatgaacaagatcatcaaataccgcctattattcaatatgtgcaagattatttagagctacaacaaggaattatcccgagcatggcggaaaccgcttttgctttgaaaatgcctgaaaggacattaaggcatcaattgcagcagcttaatacgagttataaacaaattcgtgaacagattattaagaataaggcgcttaaacttatggaatataaagagtattcaatagaagttattgcagaagcacttggttattctgaacctgccgcttttaatcatgcatttaaaagatggtttggacagagtcctcggcaatatggaaaagagttttactga

SEQ ID NO: 48334 - DNA, 447 bp, Acinetobacter baumannii; identical to SEQ ID NO: 43890

SEQ ID NO: 48335 - DNA, 1437 bp, Acinetobacter baumannii
ttgaaatttttgccagttattttaagtttggctttgataacaaatgcctcttacgctaatccttttgaccccaagccagtttctggacaggttgaaattccaaatattggaagtggaatagggctgctcgaccaacagaaagaaaaatttattggtgaaaaagttttccgtgaagttcataaacaaatgccggtcatacaggatgtatggctagaagatcagttttttcaagttttctctaatattttaagtgaaactcagctggggcagccgatcgctctggttgtaattaaagaccctcaaattaacgcatttgctgttccaggtgggttatttgcattaaatactggccttatctcatcggcacgaaatattgatgaaattgcgggggtaatggcccatgaaattgctcacgtttcgcaaaggcactttagtcgttcggaagaagcttttaaaggacaaacccttttaagcttggctggtttgttggcaggggtggctttagctgctcaggctggtggagacgctggtgccgctgttatgttgggtacgcaagcagcacttcttgataaacagctcacttatagtcgtaatcaagagcgtgaagcggatcgaattggtatgcaatatatgtatgccgctggttataacccgcaaagcatggcggattattttgaaacgatgcatagagcgacgagccgtgtaagttttttaccagatttttggctgactcacccacttacatctgaacgtatgagtgaggctcgcttgagagcaaaccagatgcctaaagttaaaagtcgaatatatgatgtcgattttgaaattttaaaatggtataccatggtggttgctggagaagctactgaaaatcagttgcaaagtctggcatcgcaaaaaaatctggcaggcttattggctttgtcggctttctaccttaaacaaggggattatactcaagcccaagcaacgttggagcaggcgaaatcaagcggtaagccattagttgccttaattcaaacagatatttatttaggccagaataaacttgatcaggcttataattcgattgctcccttgcaaatgacaatgcctgaaaataaagcttttagctacaaattggctgaggttttattacgtcaaggtaagtatgctcaagtgcaaactttggtgcagcgttttattaataaaaatgcccgagatattcaaggttggcaattattacaacaagccgccaatttagataaaaattcgccattaagagctgtgaatgtattgcgatatcgtgctgaagcacagtactggtctggtagtgaagaggatgcaattaaatcgatgttgcatgcacaacgtcttgcaaaaggtaatcaggccatgtcagccagaatagatagtcgattaaagcaaatgcaagatgagcgacgaatgaaaatttaa

SEQ ID NO: 48336 - DNA, 1890 bp, Acinetobacter baumannii
ttgaaagaagtaagccactatttaatcgaaaataaaaatatggcatggtccatcactatgtgtttggtcgctgtgcttttaactatttttattttaaatctaattttaggtttacttgttcatttctttgattatagcgagccgatttggtggcatgctttaagtccatattttattgctcttttgctttttattatggtttggtctgtggtgaccgaactttatattttgcgtaaaggtggccattcacttgccaagcagttgaaagctcgtcgtttggtaaaaggtgaaagtacaccagaagaacatgccgcattaaaaattacagaacatctggcacaaacattttccctgaacgttccaacactttatgttttacctgatgaagtaggtgttaatgcattaacggcaggttttcactcgaatgatattgtaattattttaacttggggtgccttacagaaccttgatgagctagagctatatggcttattgggtcatgaatttaaccagattttatcgggtgaagcagtagaaaatactaaactaaaaattttatatagtggtttgactacttttagtcagtgggggagtaagctcgccaaacaagggtttaagcgctacagtccgggttataagcataagttcgagactgtatttgtagccgtagggggtgtgatttggttggcgggaagtttaggtgttttaatcacgcgttttattaaatatttaacattaagtggtcgtacatttcgcaatgaccaaaaaacgatgcggttattaaaaaatagcactaatacccaaactttattgcgtatttacgttcaccattctggttcgcagattcatagtgcttattctgaatcgattgcacatatgtgttttgcgaattcacttagcccgcaaagttggatgaatattcacccaagtattcgtgaacgtatttatgagcttaacccaactttattacaagatttgcaattagaaaatttaaagaaacttcgaaatcgtcctttatttagtttgttccatgtactagaagaatctgagactgaaatttatacgccgtggtcatctccacaacctttgcctttgttgcgtctttctccaatcagttttgctttgaatgatgcaattaaaccgttaagtagtgatatacgtcgtaataaaaagcggcctgaacttattcaacgtgcattacaaactgcgactggttcacgtgaggtgatggttgctattttaatgattcgtcaatatcgagaatttattccacaagatgcgccagtaagccatgcaattgtggatgccttacttaatcttgatgggcgtattcatattcagatatttcatgatgcatgtaaaaatattggtcatatgcctgccagtattgctcgtcaatttttgactaaactggcactaattattcaagaagatggggaaattggattacttgatgcacttctactcgagcgtgttaagtacgagttaaacttgatgccacttcatttgccgacagcatttgaagaggtaaaacctcaaattgttcgtttaattgatgcattacttcatgtgcaacaaatcaatagtccgaatcagttagaggttcgcgaacgtatcttacgttctttgcttaatcctgatgaaatgcatatttatgatgaaatttcggatgaacctttagacttggcagaaattttaaatgatattgctgggttattgctgcgtgaccgcttaagtatattggcaattgctgaaatgtgcttgtggagtgatcgcattatcacccaagatgaacttgatgtgcttgaattgctctattggcgatttggttttgagtctgatgaaattgtagagcaaatgcagaagaaaaatagcgttatgattatttaa

SEQ ID NO: 48337 - DNA, 348 bp, Acinetobacter baumannii
gtgattgaaaaacttaacacagtagcttcaaatactgttcgtaagtttagccaaactggtatggcatcgtggtatggtcgtcaattccatggccgtaaaactgcaagtggtgaaacattcgatatgaatgcacttactgctgctcaccgtagcttaccgcttaactgttatatccgtgtcaccaacaaagacaatggcaaaagcgtagtggtaaaagtaaacgatcgtggtcctttccatggtaatcgtgtgcttgatttatcatacggtgcagctaaacgccttggtattaccaatgctggtactgctaaagtaagtattgagcgtgtagacggtcctacttcataa

SEQ ID NO: 48338 - DNA, 2538 bp, Acinetobacter baumannii
atgctcgcccgcgctaaagaactatttcaacagggcacagatgttgttgttggtattgttgaaacccacggaagaattgaaactctaaaaattttggaagggttgcctcaaattgctagaaaggaaatgcaatatcaggggcatactttagaagaaatggacttggatgctattttacttaggcatccgcaaatcgttttagttgatgaactggctcatcgcaacgtcccaaatagtcgccatgaacgacgttggcaagacgtcaatgaattgctagacgcaggtattgatgtattcaccactataaatattcaacatttagaaagcttaaatgatgtggtgtaccagattacgggaatccgagtaaatgaaacggtaccagatcgggtatttgaccgtattcgggacattcgcttaattgatttacccgtcagtgaactcattgaaaggctccatcaaggaaaagtctatgtaccagagcaagcaaatctggcattacaaggcttttttagcatttcaaatttaacagcattacgtgaactcgcaatgcaatgcgttgctgagcatgtcgattcagacttaaaagagagttatgcctcaaagggattgaaatctatctcgttgcaaaatgaattgatgattgcgatagatgggcaaggctcttctgaatatttagtgcgagcaggctgtcgtttagcagaacgtaatggtgctacatggactgtagtgaatgttgctaaaagttcggactttggacagagttcagcgaattcttataaaaaagaatacatcgagattgaccgtgcatttgagctggctcggcaactcggtggtcgaacggaggttttatatgggccgcgagttgcttcagtgttaatggatgccgcgattgaccgaggtatttccaatctagtcattggtaaaagtatttcaccgtggtggttaaagttatttaagaaaaatttagctcagcaattattaaatcaagaaaactcgattgctttaaccattttgcacccagaacagggcactaaaaagattaatcagctcgaaaaaccttcatttttatcattaaaagaaagtgtttttgttttagctgttacatgcgcaagtatttttatagctcacttcgcagaagttctatttggtattgaagacttctctgtcatttttattatttctgttttaattgttgcaactaagacccgaatgctcgctgcagtagtggctgctcttatttgtttcttagcctataattttttctttattgccccgcgttatacctttcagatttcagcacaccaaggggtagtcaccgttgttgctttttttgcagcagctttaattgctggccgtttagcttctcagttacgccagcaagttttgtctttaaaagctgcgaatgcctacactacggtaatgcaagacttggcgcgtaagctttctagcgcagtaaaccttgaagaagtcatgcaaacaggacgtatgactttagaaacccagctgcaaactaaagtgtggatttctattcgagataaaataatttcatctgatattgagctaaatgataaagaaaaagtagctgcagaatggtgtttgaaacatcagcagccatgcgggcgctttaccgatactctgagtcagtcaaactggtggtttttaccacttttagaacaaaaaaatagcctaggtattgtgggaatttactttaaggatgaagtggtttccttaaattttgagcaaaagaaattgactgaaagtgtaattgagtacattgcacaggcagcacttcgaacccaattggtaaatgagcttgaacaagcaaaagtcaccagtgaaacagagcgcttacgttctgctttattatcttcggtatcgcatgatttacgctcgccactcgcttctattattggggcagcagacacacttgccaattttaaagctgaaatgacagaacaagaccaacaagatctgcttgaaacaattcatttagaaggtgagcgcttagaccgttatattcaaaacttgcttgatatgacccgtttggggcacgaaggtctaactttaaaaagagactgggttggcgtagatgaattaattggttcggcaacccgtcgtttaaagcgttataaaccagatacacaagtggtcgttcagttacctgagcaaccgattagtttgtatgtccacccagcactggtagagcaagctatttttaatgttttagaaaatgctgcaaacttttcacctccagatgaaccagtcatgattcgtactcatctggtgtcagaagatgaagtaaaaattgaaattgaagataaaggtgcaggaatccctgaagacgaaagacaccgcattttcgatatgttttatacgatggaacgaggagaccgtggaaagtttggtactggtttagggcttacaatcgtaaaagcgattattggtgctcatatgggtacaatagaagcattttcagggcgccaaaataaaggtactttaattcaaatcaaattaccccttcatccagtaaaagaataa

SEQ ID NO: 48339 - DNA, 123 bp, Acinetobacter baumannii
atgcatcgccagttaaacctttatcaacaagttgttcttcaagttccgggtttgcatttaagcgaatcgcatggtcacgcaaccactcacggtacggacgcatgtttttcaagtgattgctaa

SEQ ID NO: 48340 - DNA, 1785 bp, Acinetobacter baumannii
atgaacttgaaattaaaattttttaagctcgccattttaagtctggctattacatcagttccttgtgcttacgcaattacgccagcgcaaccaaacaaaattttgcatgttgcctatgaagccccagatgatggtttcgatatggtcaaaaccaccaatttctatagtgctagtattgctgaggcaatttttgagcctttactcaaatatgactatttagcacgtccattacagttagttcccaatactgtagaaagcctgcccaaagtggaacaagacggtaaagtttatatatttaaaattaagccgggtatctattttaccaatgatccagcttttaaaggtaaacgccgtgagttggtggctgaagactacgtctatacaattaaacgtattttagaccctaaaaatagagcgccttctgtttcttttattgatggtaagttacaaggtgccgatacggttgtagctcaagcaaagaaaactggaaaatttgattatgctgctccgattgctggagttaaagctcttgatcgatatactctacaatttactttgactcgccaagactttaattttccttatattcttgcctatattacttttggtgctgttgctaaagaggttgttgactattacggtgaccgtattggtatgcatcccgtaggtactggtccttatatgttaagtaaatatgtaccgagaagtaaggtcgagttagttgctaatcctgattatcgtggttttgtctggaattttaagtcaacaggaacaccttgggataaccaacttgttaaggaaatgtctggaaagaaaatgccacaagttggcaaggtggtggtcagtattattgaagaagagcagtcacgatggttagcttttcagtctggacaactagactttgataaactcacagcgaatgctgttcctcaagctttagatggaaatcagcttaaagcttcttttaagaagagaggaattaagcactatccaaataaggatcctgagattacctatactatgatgaatatgcgggatccagtgatcggtggttttagcccagaaaaaatagcgcttcgtagagcaattactctgtcatacaatcaaaaagaaagcatacaacaagcttataaaagtcaggctgttagatcacaaatgtttatacctgaaggtgtaaacggatataaccctaaatataaaagtagcgtaggatataatccgctgttagcaaataaactacttgattattatggttataaaaaagcggctgatggctatcggaccttaccaaatggcaaacctttaattttaaaaatcaatacagaaaatagctcagcatcggttattcattcagaactctggaaaaaaaatctagatgcgattggcattcgagctgactttaaggtaagtaactttgcagataacttaaaagccgctactcaatgtaaatatatgatctggagcggtgcatggattgctgactatcctgaaggagataattttgcacaattactatatggaccaaatgctgggcagggaaaccatgcttgttatcagtctaaaacctatgatgctctttatactcaggccattcatttaccacctcaacaacggctcccatattacgaaaaacttaaccgtcagatagaagctgataacccttggattattcatgtaacacgaattcgtaattggttgatacagcctcaagttcaggggtttaaagctcacccaatgatgaatacaaactggcaatatcttgatattactcctattaaaaaataa

SEQ ID NO: 48341 - DNA, 768 bp, Acinetobacter baumannii
atgaaaaaactagcaattgcatcagctcttttatctgctcttgcagtaagtggcgcagcaaacgcttaccaagctgaagttggtggttcttacaattatcttgatccagataacggcagcagcgtaagcaaattcggtgttgatgggacttattatttcaaccctgttcaaacacgtaatgcaccgcttgcagaagcagcattcttaaaccgtgcaagtaacgttaacgcgcatgttaactatggcgataacagcggcacaaaagacactcaatatggcgtaggcgttgagtacttcgttccgaactctgacttttaccttagcggtgatgtaggcagaaacgaacgtgaaatcgacaacactaatatcgacagcaaagtgactacttatgctgcagaagtaggttatttaccagctcctggtttattacttgctctaggtgttaaaggttacgacgagaaagacggtaaagacggtgcagatcctaccgttcgtgctaagtatgtaacccaagttggtcaacatgacgtaaaccttgaagcttatggtgcgtttggtgaccttgacgaatataaagttcgtggtgactactacatcgataaaactttaagtttaggtgtggactactacaacaacgacttaactgataaagatgagtttggtatcaatgctaaaaaattcttaaatcagcaagtaagtgttgaaggtcgtgttggattcggtgataacgacaacatttatggtgttcgtgcagcataccgcttctaa

SEQ ID NO: 48342 - DNA, 1251 bp, Acinetobacter baumannii
atggctacaaattacaaagaaggtctttctcgtatacagcctcatacgtggaaaatagcatttatttttgcatttctagcactattggtagatggtgcagatttgatgctgctgtcttatagcttaaatagtattaaggcagattttggattaagttcagtacaagcaggtatgcttggcagttttacattagcaggtatggctgttggtggaatttttgggggatgggcgtgcgataaatttggtcgcgtgcgcattgtggttatttctattttaactttctcgctcctcacctgtggcttaggtttcacccaaagctttcttcagtttggtattttaagattttttgcatcactgggtttgggttcactttatatcgcctgtaataccctcatggccgaatatgtcccaacccgttatcgcaccacagtactaggcacgctacaagctggctggaccgtcggctacattgttgcgaccttgcttgcaggctggattattcctgatcatggctggcgcatgctgttttatgttgcgattattccggtcattattgctgttctcatgcatgtgcttgtaccagaaccagaagcatggcaaaagtctcgactacaacaaccagtcatggctcaaaacgcatcgaaaacctcggcatttaagcttattttccaagataaacgaaaccgcaatatgtttatcttgtgggctttaacagctggcttcttacagtttggctactatggtgtaaataactggatgccgtcatatctagaaagcgaactcggtatgaagtttaaagaaatgaccgcctatatggtaggtacctataccgccatgattttaggtaaagtccttgcgggcatgatggccgataaattagggcgtcgctttacctatgcttttggtgcaattggtactgctattttcctacctctgatcgttttttataactcaccaagcaacattttatatttactggtcacctttggtttcctctacggcatcccgtatggcgtaaatgcaacctacatgaccgaaagctttgcgacagccattcgcggtacagctattggtggtgcttataacgtcggacgtttaggcgctgcattagcccctgcaacgattggtttcttagcctctggcggctcaattgggttaggctttgtcgtcatgggtgctgcctacctgatttgtggtgtgataccagccctatttattaaagaaaaaatatacgaccctcaaaagtcataa

SEQ ID NO: 48343 - DNA, 573 bp, Acinetobacter baumannii
atgaaaaaactactcagtttaagtgcattagtattagtaactacattaacagggtgcgcagttaatttaccttataacaatcgtctaaactacacgtctatttcagaactatctgctcttccgaaagtgcaagatactgtgtatatcaaatggaatcctgatactttccctcaacgtattgatattcaaggttcggatggttttgttggaggcggtactagaacacgtattcctactggtgtagctctatcgagtcgtatagaagaagcgattgctcagatagcgaaattatcatcaaatggaagtccattaacgattacggtcgaaaaagccagatctggctttgaatacactgctggtattttaaatagggcaccagccatagacgtagcggatgtaactctagttgctacctttgaatataaggggcagaaatggacaaatacatttaactctaagctaaaagatccaaaaatgggcggctcatctcaaacaggtttgttagataaggcatgggatgatattgctgtacaagtcgctaaggatgtttctaagcatctaggtaataactaa

SEQ ID NO: 48344 - DNA, 780 bp, Acinetobacter baumannii
atgaccgtttttcgcattaaagaaaaagaaaattcccttataactgaagatgctcatgaattaatatgctacgcaacaatcagtgaaataaactcatggaacgatgttgttaacttatattcagaaattaagcagaaacatttccctaaaaaagtattattacttttagaagatataggacagtgcgaatacacgtctatgcatgcttcaatgggagaggggctttattttgataccacagaattcgttgaagatgacagtgcagcaagttgggaaaatactcgacctttagagcttcaataccatattgaacaattattaaagccagaaaattatttaaactttaataacttgccaaaaaaacttaactatagcgatgaagatcaggcaactctgctacagatcaatgctgaaccagaaaaaattttagatgaagttattcaagtaaagttagtcaatattcaaactgaaactaaaaaatttgcagcatgtctcaatggttactttacttgtgatttgaacccttttgagtcttttagcttgattgagcatttagatcaaaactatggcttagagtatgtgggtttaggggcaagcttattattctttattaaaacatcaaaatttgatgcaaataaaactcctcaattgcttaatgagttgagcaacttttatcaattcaaccaaacaacgcataaccagctagaacaacatttatctaatcatgaatatcttattttgccttatgtagagtcattagaagtttttgatctggattaa

SEQ ID NO: 48345 - DNA, 873 bp, Acinetobacter baumannii
atgtcaatacaatctatatcttcaataattaccagacttaataaagaattagctgatattacgcatagaatgagtctagaacaaaaaaaagcagctgatattaatactaaaattattcaaattcagacttctattaccaagacaacaagtataagtacactaaaaacaaaactttctgaaattagtagaaaagaacaagaacattctcgagttcaaacaaaaatttctgacctccaaaaaaagaaaactgatattcaaaataagttgcttaaagagaaccaaaatctagcaaaggctgaagcagacgagcgtaaaaaattagatgctttaaccaaaaagcagcaaaaagaagatattgaacatcaaagaaaattaaaacgtgaaattgagagtatcaaagcctctaccgaatatgttaatggtacaacgacttcatcttatatagatattgcacccgaacctgaatatgatttatttatttcccatgcttcagaagacaaagaagattttgtacgtcctcttgctgaaacactacaagagttaggcataaaagtttggtacgatgagttttctttaaaagttggagatagcctgcgcagaaaaatcgatagtggtttgaagaactctagatatggcacggttgtattatcagaagcctttattaaaaaagaatggactcaatacgaacttgatggattagtcgctagagaaatgaatggccataagatgatattaccaatttggcataaaatatctaagactgaagtcatcaactatagcccgaatctggcggataaagttgcgttaaatacctctattaatacaattgaagagattgcgcatcaattagctgatgtcattttagaaaaatag

SEQ ID NO: 48346 - DNA, 477 bp, Acinetobacter baumannii
atgaatgatatagaaatacagcgcctaattattatggaaaagaaatatgctggtgggacgctaaaatggaaaactcaaaagaaatcaaagcgctgtgattgtgttttacatgcaaatgaaatagaggatggttatttcattttatatgctcgccagaatgaaattgatccagacaacttttcatgtggccttaaattagttcgttcgggaaaagatgatttaactcttttaagatataatggttcagctcatcaacatacgaatgttcttgaaagagaatttattgattatgaatgtcacatccatatagcgactgagcgatatgcaaattcgggttacaaaattgatcattatgcaacccgaagtaatgagtatagtgatcttagtagcgcaattaaatgcttgattgatagatctaatattcaccaattaactttaagtgattttataacacaggagggttttagttttgattaa

SEQ ID NO: 48347 - DNA, 219 bp, Acinetobacter baumannii
atgacaaacgaatcttttgattcatctgacccgactttaagtcgggtttttattggctggttaaaagaaaaatttaaattactgaatctaaataacaaagctaaacttgaaattggcatgcagattgctactttacgcttctttttcaaagaaacaggtggaaaatgcaatttaagtatagtttgggcgttatcagtttatgtagcgctttatttttag

SEQ ID NO: 48348 - DNA, 1983 bp, Acinetobacter baumannii
atgcaaaaaaagacatacaaaaaaataaaggatattcttttatctatgcaggctactattaaagatgaaacgcacaacacaagcatatttttggaagaattttactttaaaacaaaaatatttaatactgacgatgtaatttctagcataaaaaaaatggggtttctaagaccttcaacttatgattatgaaaccaaaaatttaagaaaaataattaaaacccttttagatgatgagaaatttacaacacataattcatatctttccagtatgctgcacttatgtgaaatctcaaaagatattaaatatataaataaattagtaaacgactatatttatttacaacctagtttagtaaaaacactaactgcttatgcagacaattttttctatgagtacaaatttaattcagcatacgagataaaattagaagctttctcccacctcattattttatgtagaaatataaaaagtactagtgaaaaagatattattaaaatacatgaattaccaccaaatgagttagaatcaattatagatttagcatctaaaatagtttattttaagaaaatggaaataaaagttgacttttttcattacaaaatcaataaagaaaataaaaaaacctactccatagataatattgattttgaaaaatctataacattttcctatctaaaatatgatttaaaaagaacgacagtatttaatgattttttaaatatcaaaaataatcgtcccactttaaatgaagttttagatcaagtatgtgatacattaattaatctaaaatcttatgaaatcagaaatgaacctttcatacgattatgtcccaaattttcgcttaaccctatttttttagatttattaaacacagattcaattttcctagaagaaatctctcaactttatcttatttttaatgaaaatttccttaatcaaaatgacctagaacaaaaaatagtagatgattttactgttttagatttcttaaagttacaaagattctttttgcttctaagtaagttctatagagaaataataaaaaataaagattttatattaagatcttcttcaattcctctatttcatgaaaaagactttgaaagattaattaatcaaattttttcaaaaagtaataaaaatttctataatttatttatcaatcatatcagcgaagacttttataaaattaaagatttctatgatctacaatattcaccagcattaaagtttggaaaaagtattattgtatcacctacaattttaagtagatcaaatattattagaaacgtattatggagaaacaacataaacttatcaatacaaaataaaaatgacaaaatgattgaaactattgaaaacgaattaaaatccgtaggtttcacagtatttactgaggtaaaatttggaaaatatgatattgatattctggcaaaattagataatgaagtatttatttttgagtgtaaaaactcgtaccaccctgcaaatgaatatgagttaagaaactcatttgaacatttggttaaagcagaaaaacagttagaaaatttagaaaaaatgcttaaagaccctacgacaagaaaaaatttagctaaaaaattacaaatctctctttacaaatgtaattttaatttttcaatagtatcatcaaacagactatttaatggcctgaaagtaaaaagctacacttgtttaaacgcccaagaactaataaattgcatttctggcggctctttaaggatagataaaaatgtatataggttctgggaaactgacaacttctctgttcaagaattaaaaaagtatactagcggaaaactaataattgattatttttcccttgcacatgaagtagtaataaaagttgacttaaaaaatcttttaattttagagaaatcttttggatattctctagaagaaattaaatcttttattgaagatagatatcctctaattgaagagtcactatcctcttaa

SEQ ID NO: 48349 - DNA, 1173 bp, Acinetobacter baumannii
atgcaatctggtgctattcgtcccattccaaatatgttacctcgccatttatttaacgaagaacatcaagcttttcgggaaacggtacgtaaattctacgagaaagaagttgtacctaatattgaaaaatatgaaaaacaacaacatgttgaccgagatctttggaataaagctggtgccataggtttactctgtactactatgccagaacaatatggtggttcaggtgtcgaccgcctatacagcatgatccttattgaagaacaagcctatgcaatggactcaagtacaggtttctcactgcattccgacattgtagccaactatattaataacttcggtaatgaagagcaaaaacagaaatggctccctaaaatggctactggtgagacggttaccgcaattgccatgaccgagccgggaacaggttcagacttgcaagcggttcgaacaacagccgttcttgatggcgatgaatatgtcattaatggttcaaaaatatttattaccaatggctatttatgcgatatggcgattgtcgtttgtaaaacggggaatagcgataaaggatctgccaatttatcgctcattattgtcgaagctgaccgtgctggttttactaaaggcaaaccacttaacaaaattggtatgaaaggccaagatacctgtgaactcttctttgataacgttcgtgttcctaaagaaaatcttttaggtatggaaggtatgggctttatcatgctcatgaaagaattagcgtgggagcgtatgctagttgctattatctgccaagccggggcagaagcagcatttgcacatactgttcaatatacaaaagatcgtaaagcattcggcaaaccaattcgagcattccaaaatactcgttttaaacttgctgaacttaggacagaaatagatttctgccgtacctatttagatcgttgtatggaattacaactcgatgaaaaattgagtgttgaagctgcagcggctgcaaaatataaaatttcagatatgttttcaaaagttgtagatgaatgtcttcaattacatggtggttatggctatatgatggaatatccaattgcacgcgcttatatcgaccaccgagcaaaccgtatttatgcaggcaccaatgaaattatgaaagaattaatctctagaactctttaa

SEQ ID NO: 48350 - DNA, 636 bp, Acinetobacter baumannii
gtggccattcaagaaattcgtcacccacttattcgtcataaattaggtttattacgtcgtgctgacattagtaccaagaatttccgtgagcttgctcaggaagtgactatgttattgacatatgaagcgacgaaagacttaccagttgtggattgtgagattgaaggctgggctggcaatgttactactcagcgtatcgcgggtaaaaaaataacgattgtaccgattttgcgtgcaggtatcggtatgcttgatggtgtgcttaacctaattccaagtgcaaaagtaagtgtgttagggcttgagcgtgatgaagcaactctagaagtacgtacttactataaaaagttagttcctgatgtcgctaaccgtattgccatgatcattgatccaatgttggcaacaggtaattctttagttgctgctattgatgtattaaaggcaagtggatgtaaagatatccgagttatggtgttagttgcagcacctgaaggaatcgcgaaagtagaggcagcacatcctgatattcagctttatactgcatctattgataatggcttaaatgaacatggttatattgttccaggcttaggcgatgctggtgacaagatttttggtagtgttcaaaaagactaa

SEQ ID NO: 48351 - DNA, 1002 bp, Acinetobacter baumannii
gtgctttctgcaacagcttctgcaatgttgttgatgggtatggcgtatatctacgcttatactggttcactttcattctatgattctgtacaagctttatttggcgcaatcaaacagccaatggtgttattaggtttagcactcattatttttgctgttgcattcaaattgtcgcttgcaccgttccataaatggacaccagatgtatatgcgggtgcaccagctccaatggcaacgttcttggcgactgctgctaaagttgcaacaattggtttgttcgtacgttatttgcttgcttctggcgcaatcatggtgaactcgctagtgactgttttgacaatcattgccgtattgtcaattttagtcggtaacttgctcgctgttcgtcaggtcaacttaaagcgtattttgggttattcatctattgctcactttggttatttgttaattgctttaatcagcatgacatatgcaagcttgggcagcgtaactgtgtatgtggtgacttatgtattaacgactattggtgcttttggtgcagtagcgttaatgtctagcccatataacaacgtagatgaagcgcaaagccttgcagactaccgtggtttgttctggcgccgtccagtacttacagcaacattaacagtcatgatgttatctttggctggtattccattaacagcaggcttcattggtaagttcttggttgttatggctgctgtaacaactcaacactggttcttagctgcaatgattattgtgggtagtggtattggtttgtattactacttacgtgtgatggttgttatgtatatgactccacctgaaactcctcgtattgatgctgatgcacattggggacaaaaagtgggtggtttaatggtattggctgctgctgcattagttattattttgggtgtttatccagatccaatgattaatttggcattaaaagcagaaattttatctccattacatttcatgctttctcagcaacaataa

SEQ ID NO: 48352 - DNA, 537 bp, Acinetobacter baumannii
atgaaacgtagtctaatattgctactgagcacatttatctcaatacaagcttttgctgaagacaacgcatgtgaaaaaatttgggatagtttcaagcataagaatgaaagtatcaaaattgataaagttactgtcctatgtaaacaaatttgggaagatactaataaagcaagattagtaaagactgttggcttaaatccaaaagatgctcaatggatgtcaacaggggagtgtcaaattattgaagttaataaaaataaatatcaagtttattatgcttatctaaaaaatgaccatagtgatataagtattattaatgataataagggcaattatttttcatatttcagaaatttaggccgctatgatatatttgaagataagttttttccaacaaaaaaagcaaataaaaatggtgtggagttaagttgtcctggtttggggagttttgaggaattaaaacctattttaagctcatatatcagtaataaaaaaattgatattaagcgatttagttttgaggacttaaataaataa

SEQ ID NO: 48353 - DNA, 180 bp, Acinetobacter baumannii
atggcgaatatttgtaaagccaatcctcaatctatttccagtggtaaaagtgagttaatcagagcagttcatattcgcttagcaagttttggtggagtattactaaaagatgaatttacaaagctaactgtaaaatgtattaaacaattccaatgggattatagggaagcagatatttaa

SEQ ID NO: 48354 - DNA, 270 bp, Acinetobacter baumannii
ttgataccttcaaagagaccaactttaggtgcatttgtattagatgggaaaggtaccgtacaattggcccaatatgaagcttcaaaagaatgggcatcaatagctacacctcatggattgaaaattggtaaaaagaatgttgactatgtttcagatggaacaaaatctttttatgaaagtaaggccaatcatgcaaatatgggctctacaaaaatggttaaagaaattttggaaaaaattttgaaatatcatcaacaacatcaaaagtga

SEQ ID NO: 48355 - DNA, 735 bp, Acinetobacter baumannii
gtgagaaatagtttcactaagttttctaatattttattagtctctagtttgagtatctattcaaatgctgcagattataaaccacaacggttagatgagaaaacaatatatagtaatagtgagcatgatctgaatagtatatattcagatataaaaagctatatcagtgataataaaaatgaagttaagtatctggtagatactcaacgttcttggttgaaagatagaaatttaaaatgtaaatttaatgggaaagaagcaagtagtgaaaactataaatgtttaagtgattttaatagttctaaaataaaagatttgaaaaagttatatttggaccttgatagtttagagggaaacctaataaaaccatttaaatacacagatggtattgtgaaagagttagaaacaggtggatgttattgtagtgaaagtacaattaaaattttaaaaaacaaaatttatatatatcaagcttgtgatcaagggttaaaggaggcacgtatatataatattgttggtaagaaaaaagatgaattttctatagaatatcaaattgatacgaataataataaagttccagaatttagtttggtatttgttactatcggtaaaaatgtttggaatatagttcctaaaatctttagaaaagtagatttaataaatttgaattttgcaattaattatacaacagataataatcttaaagagacgaagctagcatgttcaattgactga

SEQ ID NO: 48356 - DNA, 351 bp, Acinetobacter baumannii
atggcagaaccaactacaacaacagcaacaattgcaactttgagcacaatgtctttactcccttttatcaatggaaatgctttgctcggggccgtattgggtgcagcttttattgcaacttttgaaaaagacttaaatccttttcaacggatccgcaatatgttgcttgcaacaggtattggctatatcagtgcaccacttattactgaacatacttttttaaaagctgatgcagttgcagctttaattacctcaacactttgcctgttcattttaattaaagtggtcgactgggttaaaacggcaaaactatccgatattttgaacatctttcgaggtggcaagtcatga

SEQ ID NO: 48357 - DNA, 270 bp, Acinetobacter baumannii
atgatcgaattaatttttcaaacaattgcagtgttagcctatctcatttgtggcttccgtattgttagtttcagccacggtggaaatttccatcgtggctactcaatccttgcttcagttcttatcgcagcattttttggccagtctattcatatattgttttttaaagatccagtaactctatttgatgcagtatttgctgttgtgttggcctttctaattttaagaactaaaggaaatgtggcaaaactgatttggagtacatcatga

SEQ ID NO: 48358 - DNA, 855 bp, Acinetobacter baumannii
atgattataaaatttggtgctcgaggcgaagctgtaattgaaatccaaaaaaaacttaaagaactcggatttaagggtaaaaacggcaaagttattagtccagatggaatctttggtgaaagtactgaatatgctgtgattcagtttcaaaaaactaaggggttgcttgtcgatggaaaagttggtgataaaactcgggatgcccttaatggatctgatattagtaaattcttaaaagattcagattatgttactgcggcaaaacgcctcaaggtttcagaacttgctattagagtatttggagcaactgaaggacgtggattgggtttcctaaaaaacggcaaagcaaagattctttttgagcggcatcgtatgtatttctatcttgctcagttcaaaggcaaagcatttgccaatgctcagatgaaagccagcccgagtattgttaatacagtaagtggtggctataaaggcaatgaagctgaatatacacgcttaagattagctcaaaatattcatcctgaatctgcattgatgtcctgcagttggggacagttccagataatgggcgaaaattggaaagagttaggctatcaatctgtatttgattttgttgaacagatgcaaacgagtgaatctttgcaattagaagcttttatccgttttattgaatggaaaactggaacagttaatgaaaagaaagtttcattattggatgctttgcgagctgaagattggcctacagtattttctttatacaacggacccaattataaaaaactaggatatcaagcaaaatttcagagggagtgggatcatcttgagccgatttatggaggcaaaaaagtagcatga

SEQ ID NO: 48359 - DNA, 510 bp, Acinetobacter baumannii
atgaaaaagcctgaaagtctccgtacgcacatgctcaacgctgtaatggaattacagcgtgatcctgagcgaatgctcatctttactgacaaagggaatattcgttgtgcgttggcaaatggtctttcttttgaatacgtatatgaccttacttttatcctaaccgagtacgcaggtgaacttgatgcaattatgattccattactggattgggtgcggagtaatcagaatgaactgctggctaatttagataaaagtaaagaggcttttaagtttgaaacggttttacttgataaccatactgtcgatttttctttgactctgccgttaaccgagcgagtgattgttaagcgccaacccgatggatctatggatgtaagttttccagatgaacctcaatatgaaacagcaactaaagctcaaccttttaaactttttgataataaaactggtgaactattggcagagtggatgtcagctgaacctgaaaatcaatattttggtccttaa

SEQ ID NO: 48360 - DNA, 447 bp, Acinetobacter baumannii
atggctgatttacaagcattatcagagcaccttggccatttgctaatacaattaagcgatgcggaaatgcgtaagcttgaaatgagcatagctcgtaaacttcgtacttctcagaaaaaaagaatcactcagcaacttaatgcggatggaactcgctatgtacctcgtaaagatcgtcttcgaaataaaaagaataaaatcaaaaataagatgttcaacgctatcaaaaatgccaaatatatgagaattgaacgaactccagtcggtattacaattggatttactggaagagttgcgttcattgcccgggtgcaccaatacggtttaaaagataaagttgataaagatgggccaactgtaaaatatgacagtcgtgagctgcttggcttcaccccagaagaactaaaaatgattgaagatgacatcgtaagtcatctatccaaataa

SEQ ID NO: 48361 - DNA, 678 bp, Acinetobacter baumannii
atgagtgcagaaatctttcgtcgtcttgaaaacctaatacgtttaggaaaaattaagaccataaatccgtctaaacctttctcaacagttaccgtcgaaataggcgagattacaactgcagagatccgttttttaaatttacgtgctggtaacgataagtcttgggatccaccaagtattggagaggaagtgattgtcttgagtccatgcggtgtccttgaaatgggaatcgcaattgcaggcttaaacaacgaattaaacccagctttttctgatgatttaaacaagaaaattcgtgtatttgctgatggatgtgtcatcgcttatgacattgctactcatcatttgtctgcaattcttccaccttctggaacagttgagttaacagctaatgggggagtgactgtaaatgctaatggtggagtaactgtaaatgccaatgacggtcttactatcaatgctatatcaggcggtacaacccacaacggcaatctatttataaacggcagttctgttacgacaggaaacaatactgttggtggaagtcaacttgtacaaggaagcagtcattcaaaaggcgatttcagtactgatggggatgtaaaagctggatctatttcacaacgacatcataaacatcctggtgatagcggtggtaccacaggagagccacaatga

SEQ ID NO: 48362 - DNA, 348 bp, Acinetobacter baumannii
atgattaataaaaataacggccaaaccttagaaactgaggaacagtcaattcagcagtccatagacgatattgttagcacaccgataggttcaagaattatgcgtcgtgaatatggatctttaattccagatttaatagatcaaccaattaatgacattttgattttaaagtgctacagcgccatttatacagcgattttacgttgggaagatcgtattaatgtcagccaaattctgaatactcaagtaaaagaaaatggacttatttttgatcttgaaggtacttccacagtaactggtcaaaacatgaatttacgtattcccttgaaaatgggagcgagttcatga

SEQ ID NO: 48363 - DNA, 903 bp, Acinetobacter baumannii
atgagtgttgattttaacttgttacctaaaccaaattttgtcgatgaagttgattatgagcaaatattagctgagcgaaaagaataccttatttcacttttcccagaagaggaacaagctgcagtacgtattcaactaagtcgggaatcagacccattgcataaatatctgcaagaaaatgcttaccgagaaatgattctgcgtaatagaactaatcaaaaagcacttgctacgcttttagcatttgcgaaaggttcagatttggacgtatggggggcaaattttgatgtatctcggttaatcatttcacctgctaacaatgctgttgttccaccgacacccgcagtttatgaaggtgatgaagactttcgttatcgtattcaaaagaaactagatgcattaagtactgctggcccagaatcatcttatgaataccacacgttaagtgccgatgggcgagtggccgatgtgaagtgtagttcaccagctccagcacatgcacttttgacaattcttcaacgtgatacagaaaataatgcatcaacagaagaacttaataacattgtcaaaaactatgtttctgcagaaaagaaacgcccaacgggtgatcgtgtcattgttcagtcagccgaaattattgaatatcaaattgaagctgtattagttactaaaaatgttcctgaaacagattcagttttagcagcagcacagaccaatgcttacgcctattccaaagaaccaaaacgtattggaaaaggggtctttttttctgacctttactcaattctaaaggtatctggtgttgaacgagttgagcttattaacccaactgttgagattcatttaactaactttcaagctgcttcatgtacggctattaaacttagcgtgaggaatgaataa

SEQ ID NO: 48364 - DNA, 606 bp, Acinetobacter baumannii
atgaatttacttcctccaaatgctactaattttgaaaataaattagttaaaacaacatcaaaaatatctgaaattgatactgatctctctcggttaatacgtgtagatgatgcccctagtgactttttatcaattcttgcttggcaattttcagtagaccgttggcaagatgattggccagatgaagtcaagcgtgcacaaattaaaaactcaatcaaagtacatacctataaaggtactaatttcgcacttcggtcaattgtggaaagttttggttattcgttaactattcatgagtggtggcaagaaagcccaatgaatgaaccaggaacttttcaaatcacaattgaaacgaatggtagagcgcttacagaaaaaacttctaaaacactagttgaattacttcacgatgcaaaacctttaacccgtgagcttaaagggatcgaaattaatgtcatcaacattcaaggtgaaacaaatgttgcttgtggctgttatagcggtgaggacgtaacaatctaccctaaagttgatgatccgaactctctaatctacccaatttttgctttttatgagcacgaaacaaccagcatatatcccaaatag

SEQ ID NO: 48365 - DNA, 969 bp, Acinetobacter baumannii
ttggggctgcccgcattaagagatctactggctagacgggcacaaagtaaaggtatagaggcaaaccttaatcaagttcttctaaccgattcaggcactcaagctattgatctggtttgtcgttttttacttaaaccagatgatgtggttctaattgatgacccttgctactttaactttcatgctctacttaaagttcatcaagttaaagttgttggtattccctacactccaaatggcccggacttagaggcatttaaagaagctatcgagagctataaccctcggctttatattacaaattccggaatacacaacccaactggtgcaacactctcactctcgacagctcatcaattattaaagttgattgatcagtctaatttaattgtgattgaagacgatatcttctcagattttgaatatactcccgcaccacgacttgcagccctagacaacctttcacgcgtgatttttattggaagtttttctaaaacgctctctgcttctattcgctgcggctatattgttgcgaaaccagaatggattgatcagattgccgatttaaaaatagccaccagtttttctcacaatggactctcagccaagattttacacacagctttaaccgatggttcatatcgtaagcatctagatttattaaaagttcgtttagctcaagccatgcaagaaacaatcgcgaagcttaaatcgattgggatagaaccgtggattgagcccaaggccggaatttttgtgtggtgtcgtctaccggaaggtgtagatgcagcgaagattgctcagttttgcctgaatcggcaagtgattctcgccccgggtaatgcctttagccaagcacaatcggcaggtcaatttatccgttttaatattacacaatcaaatcatgattatatttataagactcttgcagaagcgcttctacaagagtcattagagaaacaagtttaa

SEQ ID NO: 48366 - DNA, 513 bp, Acinetobacter baumannii
atgtccttacaatcacttcaaaaatcttatgatgaatatgtattaagatttaattcatttcctgatcttatttttgtaggtaacaacgtttatagagatctctatgatgaatttaaaaaaaatacaaattggaaagtagtatttgaatcaagatataaaattgactcgataatcggatgtaagttagttattgtcccaagtcatcactatgattaccgctttgatttttttgaatttggtgatcttgaagaatgcaaaaatatgattttcgctgaagactttagaagatcttcagattatctttccatcatgaaaaatttgctctcaatatatgattgcaagccttgggaggcatcacctccgacgaagtctgattttgattattgcttaaatattccattcgcagctattgaacaatttaagttagaaaatttaactaagagtgaaatcgaagaaagaaagagtacttacaagatcagaaaagggatttatgagcccgaatctaggttttag

SEQ ID NO: 48367 - DNA, 1065 bp, Acinetobacter baumannii
atgaaccctttttcagcagcaaaaagtattgttactaatgctttaagctatttgccacaacctattcagcaaacaaaccagatatctaaagctgagagtttttcttttggggatgctgtaccggttcttgatggtcatgacttatcaaactatatggaatgctggttcaatggccgttggtatgaacctcaagttagccttacaggtttatctaaaagctataaggctactccatatttaagtagtggcattatcttcaaacgtaatttcttggccaacttatttatcccacatccattgatgagcagaaaatcctttgaacaattggctttagattttatttggtgtggaaatacttatgttgaagatgtgaaatcacggctaaaaagtactatggaatataaaccagctttagccaaatacactcgagctggagagcatgctggtcagttcttttatcttaacaatagtcataaaggctatgaagaatatgagtttcctttagaccgaatttgccatattcgtgaaacggatattgaccaagagatctatggaacacctgagtatatttcagctttacaaagtgcttggctaaatgagtcggcaacgcttttccgccggaaatattataacaatggctctcatgctggcttcattttatatgttaatgacccagcttcagatccgaatgacattacggctttacgtacagctttaaaggaaagtaaaggaccagggaacttccgtaatcttttctattacagtcccaatgggaaaaaggatggtatccaagtcatccccacctctgaaattgcagctaaagatgatttcactaatattaaatcaatcactcgcgatgatactcttgctgcacttcgaatccctccccaattgatggggattgttccaaacaatgctggtggatttggcgatattaaatcagcaacagaagttttctattacaatgaaattattcctttgcaatctcggctactccagtttaatgagtgggcgggatatgaagtaatcaagttcaaagagtatggattaatacaaaaaccttag

SEQ ID NO: 48368 - DNA, 1770 bp, Acinetobacter baumannii
atgaacgacctctcccctatcgctaatcttcatctgatcatggacaacaaacttaaagccaagtttttgtattggcttgggtggaaaattgtcgatattgcagaagtattagaagaaaaagaacgcactattcaagcttggaaaacaagagatgagtgggaaaaagagaaacccgaaaatcgagtagaaagcgcattaacagtgcggttaatgaccttaattttaaaaaataaaaaaacatcgggtgacatcaaagaaatcgatatgttgatgcgggcatataaagaatttgcccggatagaaaaatatcgtcttgatggaagtgaagcagatctaaatcccgaaataagaaaacgaaatacagcaccccgcaaaaaagtaccaaaccatttcaccgaagaacaaattgaagagatggttctcgcatttgaagaacgcttatttgaataccaatggacttggtatcgagcaatggatcagcgttctcgaatgattttaaaaagtcgtcagattggtgcaacttattactttgcatttgaagctttgattgatgcgttaaaaacaggacgtaatcaaattttcttatctgcctccaaagctcaagcacatattttcaagcactacattaaaacttacgccgaagaaatttgcggtgtagagcttacaggcgatcctattgttctttccaacggtgccgaactccgttttcttggtacgaattatcgtactgctcaaggccaccacggaaacttatattttgatgaaatcttttggacccatggtttccaagaacttgaaaaagttgcttcagcaatggcaacgcatgatatttggcgaaaaacctatttttcgactccttcatctataactcatgaagcatatcctttttggtcaggtacccgatttaataaagggaagccgaaggaccaaagattaaatatagatatttcacatgaggcattaaaagatggccgtgtttgtgaagatctcatgtggcggcagattgtcacagttgaggatgcaaaagcaggtggatgtaatttattcaatattgaacggttgaaatttgaatattcacctgaagactttgcaaacctattcatgtgtgaatttatcgatgatggtcagtcgatgttcccactcaatatgcttcaaacttgtatggtcgactcttgggaaatatggcaagactataagcccttccataatcgcccttttgccaataagcctgtatggattggttacgaccctgctcgaactggtgacaatgctggattagttgttctagcaccaccagctgtagctggagggaaattccgtgttttagaacgtcatcaattcaaaggtgatgactttgctcaacaagcagagcatatacgtcaaattacacttagatataacgtcacttatattggaattgatacaacaggaatgggttatggcgtggccgaacttgttgctaatttcttccctgccgtaaaaactttcaattactctccagaagtcaaatcaaatctggtctataaaaccttagacgtcatacgaaatggacgacttgagtttgattctggacatacagatttagcccaatctttgatgagcattaaaaaaacaataactgctagtcaaaaacaaatcactttcacagctggacgttcagacgatgttggccatgcagatctagcatgggcactcatgcatgcaatttataacgaacctttagctggaatcacagagacaaacacatcgatgttggagatttactcatga

SEQ ID NO: 48369 - DNA, 996 bp, Acinetobacter baumannii
atgccattggtttatactgatggcattgttttttgtgtcagttatggtgcaaagatggctttagaaaaacaagagaatcaaataaatgtaaataaaagctgttctagctgtgggtgctcaaatgtagcagctcaggacttttctgtggcaagtgaacctagggtaaataaaacccaatgggtgagttattatcatattccccgtatggattgtgcagccgaagaacaaatggtacgaatggctttagcttcttatgctgaacatattcaagaactttattttgatttgcccgcccgccatttagcggtgtatcacagtactcaagacgaaaagattacgcagtgcctgcaacgtctaggtttaggagccgaattacaacaaactcaaccacattatgagcctgttgaaaaacccaaaaaggttcgaccaagttcctcaactaatgcagcacaaaaacaggtcctacaatggttgttacttattaatggggtcatgtttgtcattgagttaatggcaggcatcattgcctcctccacagggttaattgctgactcgctcgatatgtttgccgatgctgcaatttatggcattgcattatttgtggtaggtaaaaaccttgacgctcaattaaaggctgcacatctttccggatggtttcagtttggtttagccataatcgttttaattgatgtgctgcgccgttttatatatggcagtgaaccagtttcaattttaatgattttaattgggggattagcgcttgcggccaacattagttgtctttatttaatgagcgaccataaagagagcggggcacatatgaaggcgagttatatattttctgcaaatgatgtcatcgtaaacttaggtgtcattgtcgctggaatattggttgccatgacaggctcgcgttatcctgatttaattattggattgattattgttttgttcgttttaaatggtgcacgaaaaattttacagttaaaaaatgaataa

SEQ ID NO: 48370 - DNA, 777 bp, Acinetobacter baumannii
atgaatagaattgaggtttttgaaaatttttcatggtctgatatttttgcagatattagtgtcagaatgaaagaaattagtcgtcaattaacttttcccgagactaatgtttactttgaagatggtgaagctttggcttattttaatgcccttataacaaagcaaaaaactagaaaacccttaagaatcatgaacggaatttctatggggtgtggaaactatctagaattaattcgccaaaaagtccctgaatttgcaaagctaagtttattaatattagatggagatgtaccacaaaaggacgttgcaggccacaaaaatattattaagcttcctggctctatccctcctgatcaacttttatttgaatttttatataaactgcccgaggatgatgcatattggaataatgaatttagatttacaaaactagtttttataggattatcttgcgtaacaaaaatctttcaagaactttctttaccaagtcaacctgatgaaaacttttgtttaaaaactataataaataattttaattacaatagttcagcagatgatcgcataagatcactttttaaaaacttctttaaatcagaagaaattcaaagacttataaagaattctataaaaacaaatccttatagatatatggttaaacagtcacctgaaatccaaagggattttaatgaaaaggttattaatgcaactaaacatgttttaaccaaaaataaaggtgtggcttcaagtctagtggaaacttggtatgaaaatgcttaa

SEQ ID NO: 48371 - DNA, 924 bp, Acinetobacter baumannii
ttgagtatctattacacaccactccgctaccctggtggtaaaggaaagtttgcaccgtttgtaaaagatttaatggaaacaaacaaccttaatggtgattacctagaaccttatgctgggggggctgctgttgctttggatttattgtattcgggttattgtaagaatattcatatcaatgatcttgatcttgcaatcttcaatttttggcattcaattacaacccgcactgatgatttcctcaaattaatctttgatacagacgttaatatagaggaatggtataaacaaaaggatattttatctaagcctgaagaatatgatcaactagatcatggttttgcagcttttttcctcaatagaactaaccgatctggaattcttaaaggcggtgtaattggtggtaaaaaccaaaatggtaattacaaattagatgtacgtttcaataaagagaatctttccaagagaattgaaaagattggtcgccatgctaatcagatcaatgtgtataacctagacgctctcgatctattatcacaagttgatagttttcttcctcaagactcattgatatacctagatcccccttactatgttaaggggcaagggctttaccgaaacttttacaaacacgaagatcatgaaagaatccgaaatactttagaccatgttcagactaagtggattgtttcatatgataattgtcctgagataaaagatatctattctggttatcatcaagaagattatgcattgaattatagtgcttattacaaaatgaaaggttcggaagtgatgattttttgtgattcaattaaacttgtaactattcccaatcaacagcttgaaataacccagcatctgcttcatcaattaataataagccaccatgatagtctggatactcttcttttaactttttaa

SEQ ID NO: 48372 - DNA, 801 bp, Acinetobacter baumannii
atgagtaagaatataacctctattaaaaaattaaatgtccttaaatttcgggctctcaataatctcgaaataaattttgggcaaagagtcactgtaatctgtggcaaaaatggaacagcaaaatctactattttaggtttattagctcaaatctttagttttgaaaaagattatattaaacaaagtgatctagattttagtccacttcatatgaaatcttttaaatcccgatttagtgatcattttcgcctatcagaacaatttgactttgcaggtgacttagaagcttcttatgaaatctatgatgcttactttaaaactgatatttctccaaagttaaagttctataagttgcaagatagaccactaccacgagctattgttagaaacaacataacaacaaccacggttacgaatgaaagccgtaatgtaactcatccagttatttatttaagtttaaatagactccttccaattaccagtcgaacagactatgaaattaaagatttggaatatttaaataatcattatcaagaatttatacgtgcaaataatcagcttttatgtaaaacaacagggacacaaataacgtctacaactggatcattagactctgtagtggtgcatggtgataactataaccatgaagcaatttctgctggagaagataatgctgggcaaattattcaagctcttttctcatttaaaaagttaaaagaagagtatccagactatcatggtggcttattattaattgatgaagcagatgctgggttatttcaagctgttgattgggaatag

SEQ ID NO: 48373 - DNA, 264 bp, Acinetobacter baumannii
atgagccttgaaaaagaagatcttagattgaagatgcttccagacatgatggaacgtttgagattgatcgcggatgtccgtggtaatgagtatgcacatcaagctgtagtcctcttagaaaaagcccttatgggtgaatatcatgaagttagcttaatgcttgaaagggcagataaaaataggcacaagagggagcgtttgggaatacgtaggaacgttgaggtaaatcctgaatcacaaattttagaaatgaaaaaagcctga

SEQ ID NO: 48374 - DNA, 276 bp, Acinetobacter baumannii
atgaacacaaacaatttatcagaacaaccaatcgaattcaactcaccagattttttaataggtgacgttgtagtgcttactaaagagtgccgtactttcaaatcaaatgatttgtttgaagttaaaaacaaaactttgactagtttatggaccatcaaatcagagaaacatttgattctagtttcttcaaaagaaatccgcacagcaacagtagcagagctcaacgctaaacgccgcctaacaaaagctgagcaagcattagcggaggtgtcatga

SEQ ID NO: 48375 - DNA, 690 bp, Acinetobacter baumannii
atgaataaatattttgctgaattcctaggtacgttttggctagtctttggtggttgtggtagcgcagttttagccgcagctttccctgaacttggtattggctttgcaggtgtagcccttgcctttggtttaaccgtactcacaggtgcttatgctctagggcatatctcaggtggacatttcaatcccgcggtaagtgttggcctttgggtcggtggccgcttcgatgttaaagatttaattccgtatattgttgcgcaagtggttggtgcgaccgctgctgcatttgttctttatattattgctcaaggccaagcaggctttagtggtgttggcgggtttgcgaccaatggttttggtgacttatcaccaaataaatttggtttaggttctgctttcattattgaagtggttcttaccgctttcttcttaatcattattttaggggcaactgaccgccgtgcacctgctggcttcgctcctatcgcgattggtttgggcttaacactcattcacttaatcagtattccggttacgaacacttcggtaaaccctgcacgtagtacaggtgttgcgttctttgctgaaacggctgcgttaagtcagttgtggttgttctgggtagcaccgattttaggggctgtgattggggcaattatttataaggtagttgctggggacaaagattaa

SEQ ID NO: 48376 - DNA, 2157 bp, Acinetobacter baumannii
atgcaaaggactacgaaacactttcaaattaatgcattagcacttgctatagcaatgagtacaatttcagcgcatgcagagactgatcagcagacttcagaatatggaattcttcctaccattaaagtaaaagctggaagtggcgaagaaaatgaaaaaagttatatagcagggaaaacagatacagcggttccactgggtttatccgttcgtgaggttccacaatctgtttctgtcattactcaacagcgtttacaagaccagcaattgtcaactttggttgaggtcgccgaaaatgttacaggggtaagtgtcaaccgttatgaaaccaaccgaggcggaatctattcacgtggttttgtagtagataactatattattgatggtattcccaccacatatagcttaccttggtcttcaggtgaaattttctcaagtatggccttatatgatcatattgatgtagttcgaggggcaacaggtcttacatttggtgctggaaatccatctgctgcaattaatatggttcgtaagcgtgctacgagtacacagccaacagctaacgtagaagtgagtgcaggtagttgggataattaccgtgttatgggcgatattgccaactcccttaatcaatcaggaacattacgtggacgagcagtggcccaatatgaacaaggcgacagttataccgacttgttatctaaagaaaagctatctttactgttaagtgctgaagcagatttatctgaaaatacccttttatcgggcggggtaacttatcaggaagatgatccgcgtggaccaatgtggggaggtttacctgtctggtttagtgatggcacaaaaacgaactggtctaaaaataccactacaagtgctggctggacacgctggaatgttaaatataccaacctatttgcagatttaactcataaatttaatgatagctggtcagctaaactgtcttattctcatggtaagcgtgatgctaattctaaacttttatatgtttcaggtagtgtagataaaaatactggtctagggctatctccttatgcatctgcgtatgaccttgaggtagagcaagataacgcttctttgcagctcaatggtagttttgatttgtggggcttagagcaaaaggttgttttgggttatcaatattccaatcaggactttacagcatatgctcgttcaactgatacaaaaatggaaattggcaatttctttgaatggaaccgcagcatgcctgagccagtgtggaatgcacctacactcaatgagaaatataatattgaacaaaatgcactattcgctgcgacttatttaaatccgattgagcctctaaaatttattttaggtggacgttttacaaattatgaaaagaatatatatggtcgtaattcatccataaaatatgaccacgaatttgttccttatgcaggtattatctatgatttcaatgatgtctatactgcatatgcaagttataccagtatttttcagcctcaagacaataaagactttgatggaaactatttagacccggttgaaggaaacagtactgaagtaggcttaaaatctgcatggtttgatggacgtttgaatggtactttagcgctttatcatattaagcaagacaatttagctcaggaagcaggacaagttactcgtaacggggtaaaagaaacctattatcgggcagcaaaaggtgcgacgagtgaaggtttcgaagttgaagtaagtggacaaatcacaccagactggaatattacagcaggttatagccagttctctgccaaagatgcaaatgatgccgatgttaatacccaacttccacgcaagatgattcagtcatttaccacctataaattaccgggcaaattagaaaacataaccgtgggtggcggggtaaattggcaaagcagtacttatgttaatgctaagaatccgaagaaagttattgagaaagttgagcaaggagattatgcacttgtaaaccttatggctcgttatcaaattacaaaagatttttcggctcagcttaatattaacaacgtatttgataaaaaatattacggtgttttcccggcatatggccaaattactttaggtgctcctcgaaatgcggcactaacactacaatataagttttaa

SEQ ID NO: 48377 - DNA, 507 bp, Acinetobacter baumannii
atgaatatttttattcgcgatgagcgagaagaagatattaaagaaattgaagaattgactaaagcggcatttctaaatgctgaacatacgagccatactgaacactttattgttaatagtttaagaaagcacaaacaacttacagtctctttagttgcggttgaagataatactattgttgggcatgtggcaatttcaccagtgcaaatttcatcaggtgaaaagaattggtatggcttaggacctatttctgtcgcgccgaataagcaaggacaaggcattggatcattgcttatgaatagctctttagaaaaattaaaaaaatcaggcgcaaaaggttgtgttttattaggtgatccaaagtattacagtcgctttggttttaaggcataccctgacctaaaactacctggtgtgccccctgaatacttccaagccttaagttttcaaaattatgttcctaaaggtgatgtaagctaccatgaagcatttaatgcccaagactaa

SEQ ID NO: 48378 - DNA, 2349 bp, Acinetobacter baumannii
atgactgacttagttcagcagttggcaagtgagcttgccgtacgtccaaaccaagtagaagctgccatccgcttaattgatgaaggtgccagtgttccattcattgcccgttaccgtaaagaagtaacacaaggtttagatgatacgcagttacgccaattagatactcgtttagcgtatttacgtgatttatatgagcgccgtgaaaaggtcattcagtcattgcaagaacagaataaattgaatgatgacttgttggcgcgggtgaatgcagccgaaacaaaaaatgctttagaagaaatttatgcgccgtaccgtcctaaacgtacgagcaaatctttcaaggcgaaagaagcgggccttggaccaattgccgaaaaaattatttcagaacaaattgatccgacagaagcattggctggttttagtcatgaagactatccggacgttgaaagtcagttagacgcaatccagcatattctgattgatgactgggcacaaaacatccctcttactacagaattaaaagcgacttttgcaaaaacagcagtattaaaaagtactgttgcatctgaagagaagaaagaagtgggcaaaaagttccgcgattactttgaattctctgaaggcctaaacaaattaccatcacatcgtttattggcgatgttacgtggccgccaagaaaacgtacttggtttaaaagttgatggcgaagatgatgcaccattggctcgtattgaaactgaatacaaccttgatcaggttcagccacaaacacgtcaagatttcttaaaacaaactgcaaaattattctggttaggtaaagttcgtcctcaaatcgagcattcattacttacagaaaaacgtcttgctgctgaagcagaagcaatgcaggtgtttgctgaaaatcttcgtcacttattgttatcagcgccagctggtagccgtacgactttgggtgttgaccctggtattcgtactggtgtgaaactagccgtagtaagcgaagctggtgatgtacttgcacatagcacgatttatccatttgcgcctaaagaagataaagaaggttcaattgctgagcttgcacgtctatgtcgtgaatacaatgtcgagcttattgctattggcaatggtactgcgagccgtgaaacagaagctgttgtagctgaaatgatggctgcaaatacagatcttaaattaactcgtgtaactgtaagcgaagcaggtgcctctgtttactctgcaagtgaacttgcagcggcagaacttccagagcttgatgtttcaatccgtggtgcagtatctattgcgcgccgtttacaagacccgttggctgagcttgttaaaattgatccgaagtcgattggcgtaggtcaatatcaacacgatgtgaaccaaactggtttagcaaaaacgcttgatgcagttgtagaagactgtgtgaatgctgtcggggtagatgtaaatactgcgtcaccagcaatcttggcttatattgcaggtttaaacaaagcaattgcacagcaaattgttgaataccgtaaagagcatggtcgttttgacacacgtcaggcacttaaaaatgtaccgcgtcttggcgaacgtacttttgaacaggcagctggcttcttacgtatccaaaatggttcagagccattagatgcatctgctgttcaccctgaaagttatggtcttgttgagaaaattgttgcagcaaaagcgacaacggtaaaagacattattggtaataccgaaattattcgtcaggttaaagcagaagagtttgttgatgaaaaattcggtttgccaaccattcaagacgttttagcagaacttgaaaaaccgggccgtgacccccgtccagaattccgcacagctaaattccgtgaagatattactgaagttgctcagttgactgaaggtatgcagcttgaaggtgttgtgacgaatgtgacgaattttggtgcttttgttgatattggtgtgcatcaagatggtttggttcatatctctgaattagccaatgagttcgtttctgacccgcataaagtggtaaaaccaggtcagatcgtacaagtgcgtgttatgcaggttgatgttgaacgtaaccgtgtgaacttaagtatgcgtgcagaaggtgcggcacctgtgaaagcacagcgtccaccacgtcgtgagcaaaataacgaacagcgttctgagcgtaaaccacaaggtaaacgtccacaaccgcgtaaagatcaagttgaacgtccgcagcgtagtaagcaagaaaaaccacaagagcaaaaaattggtggttttggtgcattattattgcaagcaggaattaagggttctaaataa

SEQ ID NO: 48379 - DNA, 1725 bp, Acinetobacter baumannii
atgaatcagattgaagaagatccaagttttgatgcactactcgatcaacagaagcgtgagcaagctttacgtgactgtgcagctgtcactgagatctgtaacgctcaaattgatcccctttattttgaacgtaatgaagttacgggcgaagcctggtattacttcaacgtgcagagtcaatgggcagaaaagaaaactcaatttaccccaagccaaatcggtagtcgtagcaaattcaaagatgcaactatggaagtcatggctggtgcaatgtggactggtactgatcaacagcttgaattttttatgaagcgtaaaacggaacgtttaaaagaagttaaaactaccgattacataggctattcaagtgagtatgaaacttacatcttcccaaaacatgctgtgcataaagggcaagttatccccattaatgaacatgattacttcaaaattaaacgtcttgaactcaagagtttagcgaagtcccctgtcattacattaaacccgaaaaaagaatttaaaccgttttggtggaaagacttttaccgggtacgtggtagtaaagggctaattgccctcgcatggtggaccggtacatattttgccgagcaaattcgctctatacatagttcataccctttcattgaaattattggccaagctggtgccggtaaatcgcgtttgattgagtttttatggaaattaagcggtcgtaaagagtacgaaggctttgatgctaataaatctacaaacgtggcgatttaccgtaactttgcccaaatttccaaccttccagttgttttgattgaaggtgaccgtaacgatgcacaaggcaatagcgtcaaacaagcaaagtttagttgggacgaactcaaagatgcttttaacggtcgagcaattcgctcgaagggcctaaaaaccgctggtaatgaaacatatgaaccacctttccgtggtgccatcatgatttcgcaaaacagtgcaattgcagcctctgaagcaattttgactcgcactctccacttgtctttcgaccgcaaaggacaatcgctagaaactaaacgcatcgtggatgctttggaccgtatagagctggaagaagcatgtacttacatgacccattgcctacgtaaagaaaaagagatccttactacttaccaggaacgtctaaaaagccttgaagaccagtatcacagcgtaggtattacacatacacgtattgccctatgtcatgcccaaattgctgcactgattgaggctatagctgaacacgtactgaatggttatctcgactatgaagaagtagctctagcccaagaaatgctaatggaaatggctcaacagcgcgtggaccaactcaacggtgactgccaggaagttgaacagttctgggaagcatttgaatacctgcaaagtggtcgatctgcaccattcagtcttaatcatcatgacaacgatgctcagactatcgccatcaatttaaatgaagtctacaaagttgccgcccagcagtaccagaaacttcctgaaattacgttgatgaaaaacttactgaagacatcacaaaagttcaaatttatcgaatctaaccgagctgttagctcaagccgctatccaactgatgctgctaaaaatctgaatgctgacaatgaaatgtcggacagacgtagaacagtgaaatgttggattttttcaaatccaaactatggagcaccacaagcatga

SEQ ID NO: 48380 - DNA, 336 bp, Acinetobacter baumannii
atgaaatcaaatgtgtgggatgacttagatcttaatgcactgccatttattgacaaggaaatcggaccagagagtttcaaggagcaatacctttgtacctgggatccaggtcaggacgttactcatcaactcaaagatgaccaacgaaatattgatgaggcaattaaccaagttcaagcctgtatttgttctttggaatacagcgcaacaagaactgcaagaaaggaggcaaaagaagtacttcgaataattcgggcaaatttaaattgggaaaaatacgatgaactaaaaaataaggtcatcaaattacaaagcctactttttaaagctggctaa

SEQ ID NO: 48381 - DNA, 432 bp, Acinetobacter baumannii
atgcaaaacgattctaacgtagaaaccaaacaagcggaaattcctgcacatttaaagtgtgatccgcgcatttttaacgtgagtttgaaagatgatcatggagagacctgtgagcttgtgttcaagatcatcattaaatgtactgatgaagcacttcatgaacacaataagttttggtctaaccatcaagaaaggcttgaagacaataatggcgatattgtcgcagtaattttaaagctgattggtccaatggtgcacacagcttgccatgctggtaaagattgggttggggttgacaatagatacggaattaactcaatttttaatgaggaaggctgggatcctgaatgtttcgaaatcacaaaattatatttcgaagattacatcaatgatgatgcatttgaagtctcaccagcagtaatggaggactaa

SEQ ID NO: 48382 - DNA, 519 bp, Acinetobacter baumannii
atgaaatattcagtagatccaaagttcaaagaatattacatagagttagtaggcgaagaaaatgcagatttcacagtagataaaaatggtttacttgaagatcgtgatgcatttttggcacatgcatgctgggaatacaaagaaaatcaattaaaggcctatcaagagcagatagaaaatttaaagcttcaaaatgactgcatgattgaccaaacatggttcatgaaaggcacacctgtagcaaatcttattaaacatgctgaagatgtttataaagctgaagtgtcagcacagaactccaaaatcaaatttggtacggacaataatcagcagtggttcgcccatgatgttccattctttggaactgttcaaattgaccgtattgaagagcatggtttagttgagtgggatatccatttcaatgaatgttggcaagggccctttaattctaagcaacgatgtattcagcacttagaagaatgcattgctgaaaaacgtaaagaagctcaggagggataa

SEQ ID NO: 48383 - DNA, 318 bp, Acinetobacter baumannii
atgtctaaatatcaatgcaaatgtggtggtcttattcttcccgactttgactcatttcaagttggtgatgaagttaattgtatggttgaaacccataaacctattggtaatggcatggtaagtgtaaaccaacgggcttttgtagggaaaattcttaatattaatggtgacgagttcaaaataaagtctaaaggcaaacaatacacgttcttacgtggtgaattttctccaattgatgcaccaggaccaattgaatatttccgtttaggtaagtgccgttgtgaattaaatcaggagcaaaaaccatgcgcggaataa

SEQ ID NO: 48384 - DNA, 345 bp, Acinetobacter baumannii
atgagtaatgttattttggtcggtgtgcttggtgccaatccaattcctaaacagtttcaaaacggtggctcctatgctcagttttcaattgccacttcagaaaaataccaggacaaacgaactggtgactggattgaaaatacagagtggcatcgtattgttgcccacaacagactaggagaaattgcctgccaatttcttaaaaaaggttcaaaagtttatatcgaagggtcattacatacacggaaatggactgaccaaaacaatcaagaccgttacgtaactgaagttagagccattacttttcaatcgctcgatagcttgccacaagcaaacccggtttaa

SEQ ID NO: 48385 - DNA, 2079 bp, Acinetobacter baumannii
atgggctttaaacttaaaaagaaaagtggcaatcgcggtgctaccggaaaatcgagtgtcgattttattgcaaaaatccagtcaaaaattgagcagtttgccagtttatttggggaaagtgaaaagtccaagcctatcctttatgcagcgctgttatgtttagtatgtgcgttaatttcattagcttatctattttataatgtacctcgtcataaccagttaattcgaagtcttggtgagttacgtctgttatctcaaaccatttctaaacaagcaactgaagcaacagagtcgggttctcaagaggcgatcacaaagctacagcaatctaaaaaagactttgatgagaacttacttgaaattgaaaatattcacggtaagtcgaccgatgaatatcaaaaagttgagaaaatatggggtgaggtttcaaaaaatattgatttgatttcatcacatcaacgagttcttaaccagttatatgataccaacatctcgattagtgaaacggttccagagattcaggcagaatataacttgatggtcgaccaaatggctcgtcaaggtttgcctagtagtcaggtaattattgctaaaaaccaggtatttattgcagagcgtattttacgttcgattaactcggtgttaagtggtacggacggaaatgtatcaactagtgactttagtgtcgatattgagacttttggtacctatttaaatgctgaactgaatggtaatgccgagttaggtgttgatcgtattgctgatccggctttacgtgaatctttagaaagtattaagtctgaatatgacaaagtcttaaaatctgctgctgcaacggtattaaaaaatggtagccagattgtcaatgttcgtcaggcttcttctcagattttctctaaatcggatgtaatgttggaaagtctaggacatttatctgatgttgcaagaaagaactggctcaccttatttttaggtgctgttcttattctttcattaggcggactaattttctctgtattcaagttaattacactacgtagtgtaatggataagcaacgtgttgctcgattacaggaagaatatgaccgtaaccagaatgcgattttacgtttacttgatgaaattgccgatttggcggatggtgacttacgttcatatgcaactgtatctgaagactttacgggtgccattgccgactcgattaacttcgcaattgaccaactgcgagatttggtttcacgaattcatgaaacctctcaggaagttgcacgctacacacaagatacgcaaagtattactaaccagttagcagaggcatcagaacatcaggcgcaagaaattgcaggtgcttctactgccatgaatgaaatggcacagtcaattgaccaagtatctgccaacgcttctgaatctgcggaagtagcacagcgttcagtacaaattgcatcaaatggtgcacaagtggtaaatcgttcaattgaaggtatggatactattcgtgagcagattcaggaaacttctaaacgtattaagcgcttaggtgaatcttctcaagaaattggtaacatcgtatcgctcattaacgatattgcagaccaaacgaacatccttgcattaaatgcagcaattcaagcatctatggcaggtgaggctggtcgtggtttcgccgtggttgccgatgaagtacaacgtcttgctgagcgctcagcatctgcaaccaaacagatcgaaacactggttaaaacaattcagaccgataccaacgaagccgttatttcaatggaacaaacaacaacagaagttgtacgtggtgcgaatttggcaaaagatgcgggtattgcactggatgaaatccaaaaagtatcgggtgacttggcaaaactgattgcgagcatttccgacgcagcaaaacttcagtcagcatctgcgagtcacattgcaaccaccatgacggttgtacaagaaattacttcgcaaacaacaacggcaacgtttgatactgctcgctccgtatcagagttggcgaatatggcagagtcattacgtgagtcagtaaccgactttaaattaccagactaa

SEQ ID NO: 48386 - DNA, 1356 bp, Acinetobacter baumannii
atggcgtctcaggattacgctacaccaagcaaaagcatcgatgctcaagcactgattaatgatgctccacttagtaaatatcaatggatgatcgcaatcatctgtttcttaattatttttactgatggtatcgatacagctgcaatgggttttatcgctccagcattggctcaggattggggcgtagatcgctctcagttaggaccagtgatgagtgctgcacttggtggaatgattattggagctttagtttctggcccgacagctgaccgctttggtcgcaaaatcgttttagctttttcgatgcttgtatttggtgggttcaccttagcatctgcttatgcaaccaacttagatagtcttgtcgttttacgctttttgacaggtattggcttgggtgcagcgatgccaaatgccaccacattattctctgaatactgtccaacacgcattcgttcactgctggtgacatgtatgttctgtggttacaacttgggtatggcaacaggtggttttattagtagctggctgatcccgacttatggttggcacagtctgtttttacttggcggctggtcacctttaattttaatgattttagtgattttggtgttacctgagtcttaccgctttttaattgtgaaaggtaagaatccagaaaaagtacgcaaaatcttaaaccatattgcaccagcgcagattcaaaatgcgacagcatttcatgtgcctgaagaaaaaacagaagttgttcaaaagaaaaatgtctttggaattatgttttctaagccatatgccaaaggtacggttttgctttgggtgacttacttcatgggactcgtggttgtttacttgctaacaagttggttaccaacacttatgcgtgaaacaggtgcttcgatggagcgcgctgcatttattggcggtttgttccagttcggtggtgtggtgagcgcactgtttattggttgggcaatggacaaattcaacccgaaccgagttatcgccattttctactttgccgcaggtctatttgcaattgctgtcggtcaaagcttaggcaactcaaccttacttgcagtattggtactttgtgcgggtatcgccattaatggtgcgcaatcttcgatgccggcgttaagtgcacgcttctatccaactcagtgccgcgcaactggtgtgtcttggatgacgggtattgggcgttttggtgcggtatttggtgcgtggattggagctgtgttactcggtaatgattggtcgtttaccgccattcttagtttattactcattccagcgaccgctgctgctgttgcggtatttattaaatcaattgttgcgcataccgatgcaacttaa

SEQ ID NO: 48387 - DNA, 249 bp, Acinetobacter baumannii
atgcctagtcataaaaataaagatgaatatattttatggttagctggatttatagaacgaatgacgacaggtggggaaacccatcttccacctatctcaaaatttattccgcccgattttaagtttaattgcgaatttgataacgctaagacaccagcaaaatctacacatctagatgatgaaggtgaactgatcattaactattttaaatctgaagcttttatgaaaattataaacgaagaaaaataa

SEQ ID NO: 48388 - DNA, 150 bp, Acinetobacter baumannii
atgccacaatatttaatgattgctgaaaaagtgtataaaaaaattaaagaagatgatcttttctctgatactccgaccgagcatttaaataacttaataggtgtgattcgtaaggaaattaaaggtacaaagtttaagcttaaatattaa

SEQ ID NO: 48389 - DNA, 528 bp, Acinetobacter baumannii; identical to SEQ ID NO: 46876

SEQ ID NO: 48390 - DNA, 1203 bp, Acinetobacter baumannii
atggcgcaagggttattgctcggtttaggcattccgctttgggcaggttacctcatctcaaccgttatggtcattccactcgtcatttacggcatgaaagctttaagtaaattacaagtctggactaccccactttggctcgttctaatgattggtcctgtagcctatctgatttaccaagaacctaccttagttagccagtttgcaacgtttacaggtcatgaaggttttgcacctgtagatatggcagcgatcatgcttggtgcgggtatatgcttatccctcatcatgcaaatcggtgagcaaattgactacctacgcttcatgcctgcaaaaacaaaagaaaatagcaaagcatggtgggctgcagttatttcagcgggtccgggctgggtgattttaggggcgattaaacaaattattggggcatttttaggtttctatttactcactaaaataccgggcgtcaacagcactgaacctgttcaacagtttaatgcggcgtttcatgacatgcttccgggctgggcggctttaacacttgcggttattttggtggttatttctcaaattaaaattaatgtgaccaatgcttactctggttcccttgcatggacaagtgcctacactcgtattagcaaacattatccgggtcgtattgtctttgtgatcgtaaacttggcaattgcgcttgctttgatggaaggcaacatgtttgcggtactgggtaaaatcttaggattctattcaaactttgcaattgcatgggttgtggttgtcgcaacagacatctcaatcaacaaatatattttaaaactttcaccaaaagaaccggaataccgccgtgacatgctctacaacgtaaaccctgtcggtatggttgctttccttgtatcagcaggtttatcgattgcagcattcttcggattacttggtagtttcttggcgccttactctccaattattgcacttgtacttgcttttgtattaacaccaatcatgggtctattaaccaaaggaaaatactacatcaagtcacacgatgacggtgttaaagaaccacgttacgatgctgaaggtacaccagtagcaactgtttatcactgccgcgtatgtgagcaaggctatgagcgtccagatattatgttctctcacaaacataacggtacaatttgttctttgtgtaaaacactcgatgcttaa

SEQ ID NO: 48391 - DNA, 639 bp, Acinetobacter baumannii
atgtgtgcgaattacgaaccaattgaaaaagatcgagtacaccttcttaatcttttcgaacctacttttgactataaggccgatgtttatcctggttacgattgccctcttattttttctaaagacggtcatatcgaatggcggcaggttaagtttggaatgatacctccatggaaccatgatcttaaattctcaaagtatacgtataatgccagaactgaaactgtagataaaaagcctagcttccgacacgcttgggctaaaagtcagtttgctttaatcccagttgaaaaaatttatgaaccacgttacgtaaacggtaaagccgaacgttggggaatctatcgagaggatggcttgccattcacagtcgctgcaatttatgactcaaccgtgattgatgggcagcaagttcgctcaatgtctatgctcacaattaacgctgacgcccatcccttcatgaaccagtttcataaacctgaagatgagaaaagatcgattattattatcccagaggaatataggaatgattggttgaattgtaaaaaagaagaggcgaatcaatttttctttgaaatgccttcaaacggatttaaatcgaattattttccaagatccaacaaaaaagtctcacactaa

SEQ ID NO: 48392 - DNA, 882 bp, Acinetobacter baumannii
atggataaaataattgctattgctatagatgagtacaccaatgctccagaagaaaatttaaaaaattgcctcaatgatattaatagcattttaaatatattaaatactgattatgaatataatcttgatgacttaggcttagtactgtatagcaaacctgagcaaacaaccctttcttatttatatagaagattgaatgaggagtttatgaactccttcgaaagtgattctattttattaatatttgcaggtcatggtgaatataatcattatttacgtaaaggttattggctctgctccgatagcaaatttgacgatcctactacatggtttgatataaataacttgttatcattcctcgcatactctaaagctaaacacattgctgtaatttcagatagctgtttttctggttctatattcactagaactagaggtggtggactagaagccttagtagataagaagtctagacaagctctaacttctggaggattagaaaaggttagtgatggacaagaaaatgataatagcccgtttaataaagctattcagttaactttgaaagaaaatgagaatgaaactttaactttcaattcattttgtgaaaacactatcaaaaatttctctagtacaaaaaaacagacccccgagtatggttcgctaaacatagagggggatgcaggtggaacttatatatttaagaaaaaaattaaagaaagttataatggaatttcttacacaaatatgatattaccactagaaattgataaaagaattaatattgattccaaaatcaatattcctatattttcaggtagcactactattgatttaaatattattaaaagttggaataaaagtgggattatatacaattag

SEQ ID NO: 48393 - DNA, 1386 bp, Acinetobacter baumannii
atgaattttgttgtgaataaaaaaatatttatcttaggaatagcatcgatttgcacaagcacattacatgctgctgcatttgataaaacagggcagtctgtagcggcatttttacaaccgggcaactattttgaagcaagtttaggaataacagatgccgatttaagtggtgtagagtcgggtaccaatccttcacatcattcaatttcagatatcgccaataccgattatcggcctacggcagcgttaaaactacagttggcaccgcagtattcatttggtctgttatatgatcagccttttggtgctgacacggaatattcaggtgtaaatggcttcgttgcaacgccaaaagataccgttatgttacctggaattacaaccacagggcttgccagcgctacattgggccatgctcctacaggaaatgcaaaatcagaatttgatatacaaaatttaagcttcattttgggttaccaacccacaaaaaactggaatctttatgcggggccagtctatcaaacttttaaaagtcaggttgaattaaggggtaatgtatttagtctctataatggatatgactttcatactaaaactgtcagtgatttagggtggttagcaggacttgcttaccaaattccagaaaaagctgtgaaagtctcattaacctaccgttcagccattacccataaagtaaacgcgactgaaaatgccccactcattgatatgttaagcactcaacaaggtcgtgatttagttaatcagcatctagattacatgatttctattggtcagatgactccacaaaagaaagcttacttaaatcagattattgctaatttgccagaacaagaagatacaggtacaacaaaatttaaatctcctgattcagtgaatttggagttccagactggactgcgtcagagaacgttactatttggtagtttacgctgggtaaattggagtgatctcgctctacagccttatcgctttggtgagatctcaaaagttgttggcgtactatcaacaccaagccgcccggaaggttttaatttggttcgttattatgacgaccaatggtctttaaatttgggtttaggacaacgtttttcgccaaaatggttaggttctgtgtcagttggatgggactcaggagcaggcgataaagtgtcaacgggtggcccaactaagggatattacaacttgggcgtgggtgctcaatatagcccgacatctcaatactttatttctggcggtgtgaagtattactggttaggcgatgcaaaagctcagcttggcgcacaggcgggtagtgactattatgtaggtgagtttaaggataaccactcagtaagctatggcttaaaaattggatataaattttaa

SEQ ID NO: 48394 - DNA, 243 bp, Acinetobacter baumannii
atggttaataaagttggaaaatggctatgtgtaggcggttgcttacatggtcagtggtacgaacaatctccaagattgattgctgatccttataataatccactacgcgaacaggtgtatgaacctagattgttaaaaaatcctatcagcaataaggatgaaacattcttcatatttaaagaattaattaaagaaagaattgaatttgcaatcaaagaagcattagaaagtcagccggaatag

SEQ ID NO: 48395 - DNA, 219 bp, Acinetobacter baumannii
atgaatatttgtgttggtggtgagttagatgggcaaactatagaaaaagaaggaagattgtttaaagcatctgatatcgacccatcttttaaaactgagtactacaagcaagtttttaaccgcgacaatacggtgttccatttctggttgccaattggatctgacttacatgatatgtctgagaaagttctaaatatcattagatcacctaaaaactag

SEQ ID NO: 48396 - DNA, 345 bp, Acinetobacter baumannii
atgaatgagaatgtagagctaataaattacattgatgtagctgagacagtttacgaacgggtatatgaaaataataaaatttcaaataatttgattgttaatctaaatcgcattatggctgagataaagaatcaagctgcagaaaaaagactcaaattgaagtacagctcaatagactttgaacattgtttaagtttgcctttagctgatcgcaagataaaagtagatttaagtcttatacctcattttgaagatcgtgaagaaagtattttgtggttaactaactttattggaaaaatttgtgagcccagaaagatgcaaagacagaaaaaaaatcttcattaa

SEQ ID NO: 48397 - DNA, 456 bp, Acinetobacter baumannii
atgccacagtatctcatgtttgcggaaaatatttataacaaaattaaagatgaggaattgttttcacatgactgtattgaaaatatgaacttacttatgacatgtatacgcagagaaattgagggaacagaatttaaattaaaatataattttattgattttgttgaattgtttagtaaacaattagatgaatgtaaagtaaaaatagatgtgagtttgattcctcctcataattcagaaggtgagtatattttatggttagctggatttatcgaaaaaattacagaaggtggacctaaaccacctccgcctataaagaaatttattccagagtatatgagcttgaaatatgaattagattttttacctttaaatgaggaaaaaattcaaaccgaaggtaaagaaattacggattactttaattcaaagctttataaggcaacttttaagaaataa

SEQ ID NO: 48398 - DNA, 897 bp, Acinetobacter baumannii
atgaatataaaaaaacaatttactgaggttgaatttggacaacaaaaaatcaaagtacccaaagggggttattatgaccgttttagaatgaatcccgatttagatgaagtcgctcaagaccctgctgctggcaatatcgactttttccgtcatattcctaaaaaattagttgaatcaagagttggacctgtttgggcaccgaacttttattatcgtagtgcaaatgttcagctattaatgcttgctcccattaaacagattaaggcaaaacttcctgatgctttaacgcccttacaaccatttcctggttatgggttagtcgccgtcacttttttctcttattcggtttgtgacaatgacccgtataacgaggtgtcgattgcgattgttgtacgtaaacccaaggctcgtgggcctcacatcgcagagttaatgaaatcgatgcgtcaacgccactttcatgcacatgttttagctttgcctgtagatacagaaattgctagagtccgtggtgtatatggttaccagttaccaaaatggttaacaaaaattgatatcggtattagttcaaaagaggttcaagccaaaattttcgatgttaatggaaaattggatttaagtttaaaaactgctgttcctactttaaaacgtgtcgattctgaaacacatattaataaagcaaccatgctacatatagtcgatgggaaatggcatcaaacagatgttcaatcaaacgttctttcttttgcgcaaaagctttttccaaagaaagtacaacttgtgaaaaatgaaggccctttgacaaagttgctaaatgaacttggcgcttcaaaaattctccgcttagatgttattcaagatgcccaagcagtccttaatttgcctactccgttataa

SEQ ID NO: 48399 - DNA, 1158 bp, Acinetobacter baumannii
atgacatcttttttgaaaaaaatagctttattaaaacagggcttaggaaaaaatagtccattcgcagcaggtaggcaaggaacattagaggcgattgagcatttaggttatgtacagattgataccatatctgtcgttgaacgtgcccatcaccatatattgtggagtcgagtgccagattatgatttaagccatttaaacagtttggttcgtgaacggcagattttcgaatattggtatcatgcggcatcttatcttcctatgaaagattatcgatatgcattaccggcaatgatgtctgtcagaaaaggggaaagtcgctattttaatagaggcgatcaacaccttatgaatgaaattctggcacgtgtacgtgcagaaggtaaaattcggttaagggatattgataagaaaaataaagagagtttagggaattggtggaataccggtccaggccgccgtgcttttgagcagttatatatgcaaggtgacctgatgatctgtgaacgtaatggtatggaaaaagtttacgatttgactgaacgctgtctaactgaaaatattgatttaagtttgcctacgctttacgaatatgctcagtatttatttaataatacgcttcgagctcatggtgcatttacgtggaaacaattggttcatttaaagaaaaatgatttaaaagaaaccatgcgtgtcgtgctaaaagagcagattgatgcaggtgttgtatcagcgattaaacttgccgatggacaaactttatatgttgatataattgcaatagagcaacaattggatactgattttggtctaaaaatactttcgccttttgataactctcttattcatcgtgaccgtttaacttccttatttgaatttgattatcggatcgaatgctatgtgccagcggccaaacgggtatttggatatttttgtttgcctattctttatcaaagtgagttagtaggacgaatcgactgtaaagcacaccggacagtaaaagaactagaagtgattagtctacatttagaaaaaacggtaaaagataaagagcatttcttttttgaattagatcaggaactcaagcgttttgcagcatttaatcaatgctcaactgtgaatgataaggtagtcaaactcattcgcagcaagctttaa

SEQ ID NO: 48400 - DNA, 627 bp, Acinetobacter baumannii
atgaatgctgacatcaatcgacgtcttgaaaatctgattcggttcggaacaatcaagaccgtaaatccgtctaaaccaattccccttgtcactgttgatcttgacgatatcgttacgcctgaaattcgcttttttaatgcacgttcaggaaatgactcaacttgggatccaccctctttagaagaggaagtcatggtgatttcaccttgtggcgaaattggccctacaagcgtggttttctatgggctttacaacaatgatcacccaactccttctgatgatttaaataagaaaatccgcgttttcgcggatggatgcgttattgcttatgacgttgctgcacatcatttgtcggcaattttaccttcaggtggtaaagcaattgttactgctaatggtgggataacagttaatggtaataccactataaatgggaatcttcaggttaatggcagtactgctatgactggaaataataccgttggaggtagccagttagtgcaaggtagtagtcattcaactggtacatttagtactgaaggtgatgttaaagctggctcaattagtttgaaagaacataaacatcctggagatagcggtgggacaactggagggccaattccatga

SEQ ID NO: 48401 - DNA, 348 bp, Acinetobacter baumannii
atgatgtcacgtgaaaatggccgagagcttgaaactgaattagatcatatccgtcaatctgtccaggacattctaactacccccattggtacaagaatcatgcgtcgagaatatggttctttgatctatcaattgatcgactccccttttgatgaaatcgccactctgcagctatatgcagcgactgcaactgcacttttacgttgggaagacaggatcattctcaattcagtttcgttagtgactaatgaagaaggttcatattttctagatatggattgcagtcttgtcgatagcaataaacaggcctctttaagtatccccctttcaattggatctaccttatga

SEQ ID NO: 48402 - DNA, 903 bp, Acinetobacter baumannii
atgagtgttgactttaattctttaccaaaaccaaattttgttgatgtgcttaactatgaagacatcttcaatgaacgtaaggaatatttcatttcgcttcatccagaggatgagcaagagctagttcgtaaaacactgagccgtgaaagtgaaccagtcactaagcttttacaagaaaatgcttaccgggaaatgattcttcgcaatcaaattaatgaaaaagcattggctacacaacttgcatttgcaaagggaaatgatcttgatgtttggggtgcaaattttgatgttaaacgtttagtaattacacccgctgatgattcaatcacaccaccagccccagctgtttatgaagaagatgaagattttcgttaccgcattcaaaagaaattagacgcattaagtactgctggaccagaatcagcttatgagtttcacacgctttcagctgatagtcgtgtttcagatgttaaatgtagttcaccagctccggcacacgcactgttgactattcttcagcgtgacacatcaaataatgcttcaacagaagaattaaacacgattgttctaaattatgtatccggagagaagaaacgtcctaccggtgatcgagtacaagtccaatcagctgaaataattaactatgaaattgaagctgtattagtcactaagaatgtacctgagacagatccagttttagcagccgcacaggccaatgctttagcctataccaaagaaccaaaacgtattggtaaaggtgtatttttctctgatctctattcaattttaaaagtttcaggtgttgaacgagttgaattagtgagacctacggctgaaatccaccttactaattttcaggcagcttcatgttcagccattcgtcttagcgtgaggaatgaataa

SEQ ID NO: 48403 - DNA, 606 bp, Acinetobacter baumannii
atgaatttacttcctccaaacacgacggcttttgaaaagaagattgttgaaactacagcaaaatctacagagctaaatactaatttatcaagcttaattcgtgttgatgatgctccagccgatttcctgtcaattttagcatggcaattttcggtagatcgttggcaagatgattggccagatgaagtcaagcgtgcacaaattaaaaactcgatcaaagtacatacatataagggtaccaacttcgcacttcgttcaattgtagaaagtttcggctattcattaactgttcatgaatggtggcaagaaagcccaatgaatgaaccaggaacttttcaaatcacaattgaaactaatggtagagcacttacagaaaaaacttctaaaacattagttgaattacttcacgatgctaaacctttaacacgcgaacttaaaggtatcgaaattaatgtcatcaatattcaaggtgaaacaaatgtcgcgtgtggctgttatagcggtgatgacgtaacgatctaccccaaaattgatgatccgaactctttaatctatcccatttttgctttttatgagcacgaaacaaccagcatttatccgaaatag

SEQ ID NO: 48404 - DNA, 2769 bp, Acinetobacter baumannii; identical to SEQ ID NO: 48085

SEQ ID NO: 48405 - DNA, 159 bp, Acinetobacter baumannii
atggctgtggtcaaattccagttacgtaatttaagcgcaggtaaaaaaacaaaaccaaatgtttcaccagcttgggctttaattttgcaacaatcagctatgtcatgccgtactcgccaatacaaaaaaggcatgcgtgactattcatttgcttcttaa

SEQ ID NO: 48406 - DNA, 210 bp, Acinetobacter baumannii
atgaagaccataattgctatacaaaacgatacggtcgattccatttgttggcgtgaatacggacgaagttcaggtgtagttgaaatggttttggaagctaatccacagcttgcagaatttggtgtgtttatacctatgggcacacaaatcattctgccagatattgaaacaccgcaacttactaaacaaaccatccagctatgggactaa

SEQ ID NO: 48407 - DNA, 450 bp, Acinetobacter baumannii
atgggatttgttgcaaatggcaataacacaccaagtcagatcgagatcaaaagtgacccgttttatccgtctgttgctttggatcgtattcgtgaaatcgtccgcattgacggagccgtcaccaatgagcgacttaaacaaacaatcattgaagaagtcatcgacatcaatagattgttaatccgcttaaaagaccaggcctctaaactttcagatttatcaaaattacaagttaatgatctccctgaaactgactttttgtatttgtctgcaatcgcaaatggtgtggcagcgaaggtaaatgaaaactaccgaaattatgacagttctgactcaggtgtaaaaaaagcaaaagaagccgaatgtaccgttgatgattacagacgaaataaacaatgggctattcagcagcttttgggtgaaaaccatacggttgtggaactgatatga

SEQ ID NO: 48408 - DNA, 759 bp, Acinetobacter baumannii
atgtcattagcacgccaacattttcaaaaacatagtgctaaagcagcagccgaatcggctgctgaatttggcacgatgaaagatgctacggcatacgagttacagttaatgcaactcaacaatgaccgtgcacgcttaaaacagatccagtccacggaaaataaggtcaaactgaaagctaccttattaccaatctatgcaccttatctcgaaggtattctggaagcgcaaacaggtgttcaagatgaaattgttaccgaaatgatgatctggaatattgatgtcggtaactttaatcaggccttattacttgctgaatatgttttacgacatggtttagctttacctgatcgttttgaacgtacacctgcttgtgtcatcactgaagagatcgcttcagaatttctcaagaaattaaaaacgaatgcatatattgatattgaagttctgaaacgacttgaatcactaatgatcaattcagaattaccaccagaaacagttgatatgccagatcaggtcaaagctaagttgtatttggctcttggtaaagctgaacttcgtttaataaccgataaagacaaaccagatctggtccacactcaagcagctgcagaatatctacaaaaagctgttgatctagatgaaaaatgtggtgggaaaggagatttaaatctcgtacagaagcttattgataaatttgccccagtaaccactgacaattctaaagaaacaaatacgggtgatgctgcatcatcttaa

SEQ ID NO: 48409 - DNA, 1005 bp, Acinetobacter baumannii
atgcgtttaaatacacgaaaaaaatatacagctgcaatgactcaacttgctgcaatcaatggcgttacaacagttactgaaaagtttgcggtggatccctctgttcagcaaaaacttgaagaaaagattcaactttcttctgagttcctaactcgaattaatattttcttagttgatgaacaagctggctccgctgttggtcttggtatttcgcgtccgattgcatctcgtacaaatactgataccactgatcgtcaggctaaagaccctacatcaatggatgaacgtggttacttttgccgtaaaacagattttgatactgcaatcaaatatcaaaaacttgatcaatgggcaaagtttaaagacttttatgctcgctttagtggtcagatccaaaaacgtcaggctcttgaccgtatcatgattggttttaatggcgttacggcagcggcaacaaccgatattgtggctaaccctaaattacaagatgtaaataaaggttggttacagaagatgcgtgaagaaaacgaagcgcgtgtaatgtcttcaggtgcaacagctggaaaaattacaattggtgccacaggcgattataaaaatgttgatgccttggtcattgatcttgtaaatgaaatgattgatgaagtgcatcaggataatccagacctagttgtattatgtaaccgtaagaccgttgctgataaatatttcccgctggttaataaagaccaagaaaacactgaaaagttggcggcagatattatcatcagccaaaaaagaatgggtaatttaccagtttatgctgttccgttctttcctgaagatgccattttagtcactaccttcgataacctatcaatttatgttcaagaaggtgcccgtcgtcgtactatcatcgacaatccaaaacgtgatcagattgaaaactatgaatcttctaatgaagattattacatcgaagatctcggtttggctgcgatggctgaaaaaatcgaaatggtataa

SEQ ID NO: 48410 - DNA, 993 bp, Acinetobacter baumannii
atgaaagatgatgactttattcaacatctgattgtggcatcgaaccacgcgaccgtactttgctttaccaatgtgggtaaagtgtaccgtctgaaagtatttgaagttcctcaagcatcacgtggggcaaaaggccgtccaatcgtgaacttgttacctttagatgcaacagaaacagtaactgcaatcttgccgttaacagagttcccggaaaaccactatgtgtttatggcgacagcttctggtacggttaagcgtgttgagttagaacaatttgcaaacattcgttcaaatggtctgcgtgctattgaacttaatgaagaagataccttaattggtgttgcgattactgatggtaatcagcaaattatgttgttctctaacgaaggtaaggcaattcgttttgctgaaactgacgtacgtgcaatgggtcgtacagcgaaaggtgtacgtggtatgcgtgtaagctttgcaagcagcaccttaagtgaagaagatgcagatgttgaaaatgatgattcagatgataatgatgattcagcagattcaagtctagtaagtcgcatcgtatcgcttgttgttgtgcctgagacaggtgaagtactgtgtgcgagtgccaacggttatggtaaacgtactccagtaaatgacttcccgaccaagaaacgtggtggtaagggtgttattgcgatcaagacaagtgaacgtaacggtgagctagttggtgcagtttctattgatgaaaccaaagagttattattaatttctgatggtggtacgcttgttcgtacgcgtgctgcagaagttgcaatgacaggccgtaatgctcaaggtgttcgtctgatccgtttaagcgaagaagaaacgctcgttggcgtagtttcaattgaagctgtagaagacgaagaagaacttcttgaaggtgaagtagatacgactgaaactgatagcgaagaagctgtatctaataatgaagatacttctgaagagtaa

SEQ ID NO: 48411 - DNA, 1095 bp, Acinetobacter baumannii
atgattcttttaccgtggttaatttacactaagcaatggaagaaaataccttttcttcttaatccattggctatcttgttatttttactcatcgttagtccatggctctacttagtacaaaataaatatcctcaatttttacactatttttttattgatcaacaatttaatcgttttagttcaaaagagtttaataataaacagccatggtgcttctatctgatgattttatttgtcagttttttaccatggctttttgcgagtagatttacttctataaaaaccatttttaaagattacaaatcatgctctttacttaccctgcttgtatggtggtttgtctctgttacggttttcttctctattccgccttctaagctagcaggctatattttacctgctgttccacctcttgccattttcttcgcacttgtgatgaataaggttcttgaaagcagtaataaaaccagattgcagacttggggtattcctgtatttactgtacttgttggaattggcgttagtgcaacaccatattttattcgtgcacatcagccctttttccaaaaccaagccatatttatttatctcattggtgccttattaattgtgcttccacttgtgttagtggggctatataaaaaacagaaattgaaatatttgacctatatttttataagtttaattgttctatgtagtgcagtcccatttgctgttcgtattttagataccaaaaacaatgtaggccaaacagattttgctgagtacattgccccatctacaaaaatcgttttctacaattattatttctatgatgttccattccttttacaacttaagcagcctgtttatatcgtaaaccaatgggatactgtgcattcagatagtgcctctttagaaattaaagatggtttattatttgaaccgcaactcaaaaagtacttgtggagcgaacagcagtttcaagatactctaatgcaaaaacaagatctgatcgtggtaagtcaacctcataattttgcaactaaagacccgtcagtaaaaactttgcattacagaaactatgatgtgtttattttccatccctcgaaataa

SEQ ID NO: 48412 - DNA, 552 bp, Acinetobacter baumannii
atgaaaaatttagacgcttcacgtagggcattacacgtgattgatacagcaacagatttatttaaacaatatggctttaataaggtcggggtagaccaaattattgccgaatctcaaataaataaaggaaccttttacaactactttcactctaaagaaagatttattgaaaggtgtctgctcgcgcaaaaagagcagttacaagaaaaagtgagtgtggtgagtgagttttaccaaaatgcagatttgtctgatcaactcaggcaaatttatcttttacatgctgacttaaaaagtacgtattacctgttgtttaaggcgatttttgaaattaaaaagctttatccaaatgcgtaccaaaccgcactcagatataggcgctggcttaaaaatgaaattttctgcttgctcatggaaaccaaaaaaacagtttcctattcagaagcggagatttttgtatttatgattgatggcacaattcttgggctgttaagttcagatgaagaaagggaaagagatgctttgcttgagtattttttaaagcgggtttga

SEQ ID NO: 48413 - DNA, 447 bp, Acinetobacter baumannii
ttggaaaaaattttagcaattttaaaatctaaacaacagcattggatattaaccgttgctgcaattacaggaattgctctatctattgctctgcctacagggcatattaagactgttgaaatggtctttaaattttttgtaaatataactccacttgaatttttgttttttattccattaagtgcattgcttgcaaatgttgtatttaaattaaaattaaatttcatattaattgaattgtgttcttatttatcaaagaaaatagttatttcattgaattgtttagttggattttgcttagctttacttttagtaaatttagcttttaatcatatttcggatgctttgttttttgcaattgttggatttactacttacttaatagcaattgcttcgcattggattatattagatttagaaacacagtcgaatgaattaatttcttaa

SEQ ID NO: 48414 - DNA, 672 bp, Acinetobacter baumannii
atgaaagatagagatggtgatggtttttcaatttatataaaagatataccagcaggtttccgtttatctgatggagctagcactcttatgcgcttaagttatgaacatgacatcgattctatgcttaagggaaatcgtgggagattatttgatttaattctttctgaagctggtctagaagaagatgatggtgaactatataaagaagtaagtgctgataatcttgtttatgaattatttgattttacaaaaggattatcacgtctgagtgatttagggctgtggactcaacatagaacagcttcgacattctatgaagacctaaaagctgcaatttatagctctgtaccacaaggaataagtatatatgaggattatgtagttcctaatattcctcaaggtgaaaactatcctgtagatttttacatagaagcttctaaacctttatatattatgggggccggaaacccaagccagctaaaacttgctactattgtgcttcaacacttaacaattcatacggataatttcgattcaatggtcgttctgtctgaaagaaaaggcatgcccgaaaaagatatagacagattgatgagtgcagcaaatgatattgttccatcaattgaagatatagctacaattaagaaaaaaattcttcacagaatagcttaa

SEQ ID NO: 48415 - DNA, 387 bp, Acinetobacter baumannii
atggcgccaaccttagtgtttaagggcaccacgccagatgagttttatatggcaacaggttcaccaggtggcggtaccatcattcaatatgtggttaaaactttggtgggtgcattggactggaacttaaatgcacagcaggcgacttcgcttgttaactttggtgcaaccaatagcaaaaacaccaatgtggatagctcgaatgtgcagctttccttagttgacctgattgaaggcttaaaggcaaaagggcatggcatctctaacactgcgcaaaccagtggtatttcaacgattatgaaagtaaatataaataatcaaactaaatacgcaggtggggtagacccacgccgtgaagggattgtgttaggtaatggtgctttatag

SEQ ID NO: 48416 - DNA, 2064 bp, Acinetobacter baumannii
gtgcgtaaaattttagtcaccaatgccctcccttatgccaatggtccaattcatatgggtcatttactcggttatatccaggcagacatctgggttcgtgccatgcgggcaatgggtcatgatgtgacttatgtatgtgcggatgatgctcacggtacagcaattatgctacgtgccgaagcaaatggtattagcccagaagagcaaattgcgaatgttcaaaaagaacacatccgtgattttgacggttttggtgtacatttcgatcattacgattcaacgcatagcgatgcaaacaaagcacgttcaacagatatctatattaaaaaccgtgaagccggaaatattgcagttcgtcctgtaactcaattatttgacccagaaaaagggatgttcttgtctgaccgtttcattaagggtacatgcccaaaatgtaaatcagaagatcaatacggcgactcatgtgaggtgtgcggtacaacttacaatgcaactgagttacttaatccacgttcaacattaagtggcgcaacaccagttgaaaaatcatcagatcactatttcttcaagcttccaaacttctctgaatatttacaaaaatggacgcgtgatgaaggacgtttacctctttcaattgcgaacaagttagatgaatggtttgaagctggtttagcagactgggatatttctcgtgatgcaccatattttggctttgaaattccagacgcaccaaataaatatttctatgtatgggtagatgccccaattggttatatgtctagttttgaaaactacatcaaaactaaacgcccagatttaaactttgatgatttttggaaaaaagacagccaaaatgaagtttaccactttattggtaaagacattgtttacttccatgctttattctggcctgcgatgcttgaaggggcgaactatcgcactccaacaggcttattcgtaaatggtttcttgactgtaaatggacaaaaaatgtctaagtctcgtggtactttcattaaagccgagacatacttacaacatctaaacccagagtatttacgctattactttgcttctaaactttcagataaagttgaagactctgacttgaaccttgatgactttgttcagaaagtaaattcagatttagtgggtaaagtggttaatattgctagtcgctgtgctaagtttattaacagcagttttaacaatacgctatcaagtacatgtgctgaatctgacttagtacaaagctttattgatgctggtgattcaattgctgctgcatatgaagcgcgtgaattctctacggcgatccgtgaaattatggcgcttgctgaccgcgcaaaccaatatattgatgagaaaaaaccttgggctcttgctaaacaagaaggtcaagaacaacaagttcttgatgtatgctctgtcggtatcaacttattccgtcaattagcagtgtacttagctccagtactgccaactttagctcagcaagttcaagatttcttaaaacttgaaagcttcgatttcgagtcacgtaaacaaattcttgtaagccatgagattgcacagttccaacctcttatgcagcgtgttgatccaaaagctgttgcagccatggttgatgcttctaaagagtctttaggtgctcctgctccacaagcgactaaagcagcgaaaaaagagaaatctgccgagaaaaaagcagcccctactccagcagttggtgaagctgaaattatcggtattgaagatttcttaaaagttgacttacgtgttgctcaggtcgttgaggcaggtacagttgagggttcagataaattgcttcaacttactttagacgtaggtgaagctgaaccacgtaatgtatttagtggtattcgtagtcaatatgcgccagaagacctaaaaggaaaattggtcgttatggtggctaaccttgcaccacgtaaaatgcgttttggtatttcaaacggtatggtccttgctgccggaaatggtgaaggcattttcattatttcaccagatagcggtgcaaaacctggagataaagtttcttaa

SEQ ID NO: 48417 - DNA, 549 bp, Acinetobacter baumannii
gtgaatgtcattattgaaggcgactgtgaactcggtgactttgtcgaaatcggtgctggctgtatcttaaaaaatacaaccattgcagcaggaaccaaagtccaagcatacagcgtttttgatggagcagttgttggggaaaatacccaaattggtcctttcgcacgcttacgtccaggtgctaaattggcaaacgaagtacatatcggcaactttgttgaagtcaaaaatacaacgatcggtctaggcagtaaagctaaccatttcacctatttaggtgatgccgagatcggtgctgaatcaaatattggggcaggtacaatcacctgcaattatgatggtgcaaataaacacaaaaccactattggcgatgcagtttttatcggttctaatagctcgctggttgcgcctgtgactattggtaatggagcaacagtcggtgcgggttctgtgattacgaaagatgtggctgaacaaagtctctcctttgagcgtgctcaacaaatttctaaagcaaattatcaacgtccccaaaagcttaaaaaataa

SEQ ID NO: 48418 - DNA, 321 bp, Acinetobacter baumannii
atggatttgttatttgaagatatggatcaagctgatcaatttttggatatgggagcggatgcacaggtcagcactttttctggtggtgcatatgcaatcgtccaaattggtgatacggcggataaagaccaaattcaagtttatggattgcttttacatgaagctgttcatatctggcaaatagtaaaacggagaatgggtgagcgagagcctagtgtggaatttgaagcttattcaattcaggcaatcgctcaagacctatttgaaatgttcgaagctagtgaggtaaatcatgggatggaaggggaaaaagccgactag

SEQ ID NO: 48419 - DNA, 369 bp, Acinetobacter baumannii
atgggatggaaggggaaaaagccgactagttttagtcttgatgtgtctaaagcagcagaagaccatgtaaagaatattgtcatggatagcgtgcaatccttagttaatttaagtcctgttgatactggagcataccgtgcttcacatattgtttcggttggatccgctgattacggtgtacgtgaacctgaaacaaaccctattaacgatgcagcgattcaggcaatgaagattaagctaggcaatctggtttatatccagaacaataaagcttatgcactccgcttagaaaatggttggtctgatcaagcgccacaaggtatttatggcctcacttttaattttatttctcaaaagtatggtggctaa

SEQ ID NO: 48420 - DNA, 444 bp, Acinetobacter baumannii
atggcctcacttttaattttatttctcaaaagtatggtggctaaaatggcaatgactttagagcagactaggcaagctattattgatcgcatgcaaagctttacgggtattgctcaggaacggattcagtatccaaatgcaccaggctttacagtgcctaaagaaggtttatggtgccgtttaacgattgcaggtgggccgagctttatttcaggcattgcagataagccatgtacacgccgtaccggtaatatcatgattcaatgctttgatcgacttcatgtgggagaaaaagctttaacggttcttggtgatgctttgctggcacattttgaatatttcacaatcgaacacttagaatgtttgaatggacaatctatttatgcgggtaaagatgctgatttcattcagtataatgtgagtattgggtttaaggtgaattga

SEQ ID NO: 48421 - DNA, 219 bp, Acinetobacter baumannii
atgtcatgtatgctgactttagaagaaatcgaaattaaacggcaagaactggaaagacatcttgaagatgttatgtctgttgagttgagcaaatggcaatctgaaaacaagctatgtgtttctgatgtgaatatacgcttggctaatgttgacagcctcggaggacctaaacataacattgttactggagtaagtgtcgatttagataatgagctttga

SEQ ID NO: 48422 - DNA, 228 bp, Acinetobacter baumannii
atgttttcaaacttgtcttttaatgaaatttcttttgcaacagttacaccgtctttagtaatgtgcggcgcaccgaaagagcggtcgatcacaacattacggcctttaggacctaaagtcactttaaccgcatctgcaagtatgtttacccctgcaatcatttttgagcgagctgaatcaccaaattttacgtctttagctgacatattaaactccgaatctttttaa

SEQ ID NO: 48423 - DNA, 291 bp, Acinetobacter baumannii
atgagcaacattcgtccattacatgatcgcgttgtgattcgtcgcgtagaagaagaaaccaaaactgctggcggtattttattgccaggttctgctgctgaaaaaccatctcaaggtgaagtaattgcagtaggcaatggtcaaatcactgataacggcgtacgtgctttggatgttaaagttggtgacaaggtgttatttggtacttatgcaggtacaacagttaaagtaaatggtgaagaactcttaatcatgaaagagtcagacatcttagctgtattagaaggctaa

SEQ ID NO: 48424 - DNA, 1671 bp, Acinetobacter baumannii
atggtggtgttcgacccgcgtgttaccgaaacggcaaaacaagcagacattcacgtgcagctaaaaccgggaactgatgcttttttaatgtcagccatgattgcgatcattattaaagaaaagctttatgatgcagcgtttattgagcagcatacatatgggtttgaagaagtaaaagctgcatttaatcatgtcccgattgaagactatattgctaaagctgatgtacctgtcgatttgatttatcaggttgttcgagatttttcaaatgcaaaaagaggctgtgtacgtatcgatttaggtattcaacatactttgaatacaacattaaatggttatttagaaaagcttttatacttgctgacagggaactttggaaaacagggtaccaataatttgcataccatgtttattccaattttgaccgatacggatgaaagaaaaccaaaatatcgacgtagcgtttaccataaaatgttcccgatttctgggtttttcccgcctaatattttacccgatgaaatcctaaaagcaggggaaaagcgaattcgtgctgtgtttgtagatagttgtaatccactattaacttaccctgatacaccagcttttgaggaagcctttaaagcattagatttattggttgtggttgatgttgccatgacggaaaccgcgagactcgccgactacattttgccagcgcatacccagtttgaaaaatgggaatttactggttttaatcttgagttccctaagaatggctttcatctcagacatcctgtattgaccgctcaaacgaatactttgccagaagcagaaatttatactcgattactggaagctatgaatgctattccaaagaattttccaattctagaaaaaatagctgcggtcgactcgaaaaaaacagcttatttaccctacttgtcggcgctaggacttaccttagcacgacataaaaaatatattccttttgctgcctctattatttatcgaactcttggcaaacgacttggcaattctgcagattcagttgcttttttattgccgctatctattcaatatgctgttttacataccaaagcggtacgccgtgcaggttataaaggtaatccgttaacacaaggtgtcaaactatttgagcaaatattaaagcaacgttcaggtatggtgttatcgcaacatgaatatgacgaagtctggaaactggtagcttataaagataagaaaatacgtcttgcaattcccgagatgttaagtgaactcgcaagcttgaaaagccataacgttaatgttgaagagtttcctttcatccttttgtcaggtgaacgccgtagttacaacgctaaccagatttaccgtgacccagcttggagaaaagtagatgcagaaggtgcattgcgtattcatcccgaagacgcaagacacttaaaggtagatgcaggagggcagcttaaatgtatctcagcgcatggagaaattcaggtagctattgagttggatgatgggatgagaagaggtgttgtatcacttccacatggctatggtatgcgatttcaaaatggagaaccgattgggccgcaattaaacttacttatttctgctgaacattgtgatccattgtcgaaaacgccataccataaatatgtacccatccgtttagaaaagtgttag

SEQ ID NO: 48425 - DNA, 963 bp, Acinetobacter baumannii
atgaactcatcttgccatgatttgcacgcgcaaatcaattatctttctgagcttgcaccccacgaaattagctgggatgaacacagatcgaatgcccaaactgtccaaacgctttacgaatattctgaagaatttaacaagtatgctgaacgtatcagttcgtgttcaggcatcctgaaatttgggtttggtgaatcaaagctgatactgaaacaggcatttttttgccgtgttcggtattgcccagtatgccaatggcgcagatcgctactttggagagcggttatgtttcaaaaactggatgaaattaaaaaaacatatccaacacatcgttgggtcttcctcactttgactgttcgaaactgtgatgtggtggatctgaaagaaacgcttgatcacatgaacgcttcatggcagcgattaattcagacaaaagccttcaaatcaggaattgcaggattcttgcgaacaacagaagttactcgcggcaatgatggcgcaatgcgggcgcatccccattttcatgcgttgttgctagtcaaaccgacctatttttcaggtaaaaattacatcaagcaaaatgattgggtcgaaatgtggcaaaaggccttgcgggtagattacctaccatcagtaaacgtaaaagccgtaaaagcgttttctaacaatcagcttgataaagcgatctgtgaaaccctgaaatatagcgttaaaccgtccgatttagccctagaaagcgattttggggcatggctgcaggaaatgactaggcagacccataagaagcgttttatcgcatctggtggcgttctgaagggtgttgtaaagccagaagataaaataacccaatctgaaatgctgacttcatccgaaacccccgaagaaacagatgaacgaagaatcgctttccaatatgcgcccattcataagcgttatgtttaccagccaagatttaatgaataa

SEQ ID NO: 48426 - DNA, 123 bp, Acinetobacter baumannii
atgctttctacaccacctgcaatcaccaagttcgcttcgccggctttaatggcacgggcagcaatggcaatggcatcgagtgaagaaccacagagacggttaatggtggttgccggtacctga

SEQ ID NO: 48427 - DNA, 651 bp, Acinetobacter baumannii
atgagctaccagaaactcagccgtgaccagattgcacaacgtgtggcacaagatattcccgatggcgcctatgtgaacttgggtattggtttaccgaccaagattgccagctacttacctgctgataaagatgtctttctacattctgaaaatggtctgttggcttttggcccaccaccagcggcaggtgaagaagaccctgaactgattaatgcgggtaaagagttcgtgaccatgcttgaaggtggcagctttttccaccatggcgattcatttgccatgatgcgtggtggtcaccttgatattgcggtgcttggggcatttcaggtagcagccaatggtgacttggcgaactggcacacgggtgcaccggatgcgattcctgccgtaggtggtgcgatggatttagcggttggtgccaagaaagtatttatcactacagaccatgtgaccaaacaaggcgagccaaagattgtcgctgagctcacttatccggtaacgggtaaacattgtgttgaccgtatttacactgacctgtgtgtgattgatgtgaccagagatggtttaaaggtgattgagaaggtggatgggctgagttttgaggagttgcaagggttgaccggagcagtgttgattgatgcaacgaattaa

SEQ ID NO: 48428 - DNA, 192 bp, Acinetobacter baumannii
ttggcaggggtggcaaaaaaagtgccatataatgccgaagagttagcgaaagaatatggtgctcgttatgaaaaggcttttattccttttgcaccgtatgtcgttcaagacggtaagttaattacggggcaaaacccgttttcagctaaaaagacagctttagcgataatagaagagctagaaaagtcataa

SEQ ID NO: 48429 - DNA, 996 bp, Acinetobacter baumannii
gtgctgttagatcccgccaaagtatcgatttatcatgagcaagctatcgcaaaagatattcaggttgtctacgacatcaacccaagtacactttttaaatcgcgtaagcatgaaagtgaaatagctcatatccgtcatgccatggtgaaagatggtgttgccctttgccatttcttccactggttagaaaaagcacttcatcaaagtcaacgcatttcagaactcaccattgatgaaaagattacagccttccgtgctcaacaagagggttttataggcccaagcttttcaacgattgccggctttaatgccaatggtgctctacctcactaccgtgcaactgaagaacattactcattcattgaaggcgatggcctattactcattgactctggcggccagtatgttgatggaacaacagatattacccgtgttgttcctgtaggaacaccaacagagcaacaaaaacgtgactatactctggttttaaaatgtcatattgctttggcaaaaacgatttatccagaaggtttagctgccccactactcgattcaatttgtcgccatactttatggcaacatggtttagattatcgccacggcacaggtcacggcgtaggctttgcgcttaacgtacatgaagggccgcaagtgctttcttattacgcacctattcatgcctatagtaagttgcgtgaaggtatgattctttccaacgagccgggcttataccatgagggacaatacggtattcgtattgaaaatctggttgcaaacagacttcactcagggtttgagaaaacctacggcgatttcttagagtttgaaacgctgaccctttgcccgattcatttagattgtattgtcgttgacatgctaacggatgaagagaaagactggttaaatagttatcatcaaactgttcaagaaagactggctgaacatttatctggcgatgttttagattggttgatttataacacacgtaagatttaa

SEQ ID NO: 48430 - DNA, 765 bp, Acinetobacter baumannii
atggtatttgacccaaatcatcatgagttgattggacttgagtcagcagttgttcaagagactgttagtgttcttgaggaagatttcattccggtaccagaacaaaagttagtacaagttcaggctgaaacccaagtcaaacaaatcgaacctgaaccagcttctactgctgagcctataggtttatttgaagcatcgagtgctgaattttcacttgctcaagatacgtcagcttatgacttggtttctgaacctgttattgaacaacagccattggcgcaagctgaaattgttgaaacagttgcggtggtaaaagagcctaatgcaacagataaccaccagctgatgccacaagatattttaaagttgcgatcacaaactttggaaggtgagtggacacttgaaaagtgggagttttggtttagaaatagccagctttctccagccgttcaagaacttgctcaacatggtgtgatgactggggaaattggtggcaacacggttttccatattcctcaagaatatgaaaatatgttgactcagctacaacaagccctaattgaagctttaaagcagcagtggccaaatacacaatttacggtcgagtatggtgcagtcaatactgctacaccgtatgttatgcaaagcgttcgtaaagaaaaagctttccatcgggctacagaactattacagcaacaacccgttattaaaagcctcatagagacttttgatggtgagctgcaaaatattcaattaaagccttaa

SEQ ID NO: 48431 - DNA, 885 bp, Acinetobacter baumannii; identical to SEQ ID NO: 45944

SEQ ID NO: 48432 - DNA, 555 bp, Acinetobacter baumannii
ttgattttgcaacaagcaagccctgtcgaaattgcagaaatgcttttacaaggtgaagctgatattggtatcgcgacagagtctttaacaactgaagaaaatttagcaagcattccgtactatcaatggcagcacagcattattactcctcaagatcacccacttacacagctcgataaaattgatcttgatgctttatctgaatacccactaattacttatcacggcggttttacaggtcgttcaaagatcgataaagcatttgaagatgcacaaattgatgccgatattgtaatgtctgctcttgatgcggatgttatcaaaacttacgttgaactcggcatgggcgtcggaattgtcaatgatgtcgcttacgatgcagagcgtgactatcgtttaaaacaaattaaaactgatatctttggtgtcaacaccacatggattgctgttcgcaaaggccatttattacgtggttatggttatgagtttatttctttatgctcacctgatgctgacattaaagcattgaaaaaaattgcctatccagatgaataa

SEQ ID NO: 48433 - DNA, 588 bp, Acinetobacter baumannii
ttgttatggcaagcaaacccatatgtaggtttagcattgggttataacggcggtgacatttcttggacagatgatgtttcagtaaatggcactaagtatgatttagacatggataataacaatgtctatctaaatgctgaaattcgtccttggggtgccagcacaaatccatgggctcaaggcctatatatagctgcaggtgcggcttacttagataatgattatgaccttgctaaacgtattggtaatggtgataccttatcaattgatggtaaaaactatcaacaagcagttcctggtcaagagggcggtgtaagaggtaaaatgtcttacaaaaatgacatcgctccatatttaggttttggttttgctccaaagattagcaaaaactggggtgtatttggtgaagtaggtgcttactatactggtaatccaaaagttgagttaactcagtataatcttgctcctgtaactggtaacccaacatctgctcaggatgcggttgataaagaagcaaatgaaattcgtaacgataataaatacgaatggatgccagttggtaaagttggtgtaaacttctactggtaa

SEQ ID NO: 48434 - DNA, 957 bp, Acinetobacter baumannii
atgactacaacagtaaattcagacatgatcatctacaaccaattggcacaaactgcttatttagagcgtttgcaagacaatttgaatgtatttaaccaagcctctaatggtgcaattgtttatcgtaatgagattattgaaggtgatttcaataaagaagcattctacaaagtgggcggtagcatcaaacatcgtgatgtgaattcaaccgccaaagtagtgcctgagaaaattggttctggtgaatctgtaggcgtaaaagtcccatataaatatggtccttatgcatcaactgaagaggccttcaagcgccgtgcacgtacacctgaagagttcgcaatgattcttggttatgatttagcagatgcattggttgcagggcgtttacagtacagtttagcttcattaaaagcagctatttctagcaacccggatatgattgctaaaggcagtattgctgtagatggtcgtaaagcattaacacgtggtatgcgtaagtttggcgataagtttggacgtattagtttatgggtaatgaactcagagacttatttcgatattgtcgatgatgcaatcactaagcaaatttatggcgaatctgaaatcgttatctatggtggtttaccgggtaccttaggtaagccagtcttggttacagatgccgtaggtgatgatgatgcatttggtttacaaatgggggctgttactgttacagaatcacaagtaccaggcttccgggcgtatgacatcaatgatgaagaaaacttaggcattggtatgcgtgctgaaggcgcgttcaacttagatattcttggttatagttgggatacatcgaaaggtgaaaatcctgaccttacattacttggttcaagtgctaactggatcaaatatgcgaccagcaacaaaatgacagcaggtaccttacttgatttatcgggtacagcgacaactggttaa

SEQ ID NO: 48435 - DNA, 411 bp, Acinetobacter baumannii
atgtctatttcagattttatggaaaattttcataagaataatcaaacaatggatcaaataaatagagacattgctaaaaggcagtatgaaaaagaatcacgtcaacagttacatgaaaatccaattcttgctatccgccctattatcgaaaatcagatcagaagctttgaagcatcactagaggagaaatcttttgttggtgcatggcttgcttcttttggttctcagaaattgattttcgttgaaaatattcaattagaagaaccatgtttaattatctttcatggcaaagacgaaaatggagcacccttaagtttgattcaacatgtatcgcagttaaattttttattacaagcatgtcagctagaaagagacactcctcggacgccaattggatttattcatacttaa

SEQ ID NO: 48436 - DNA, 147 bp, Acinetobacter baumannii
atgaaagacttttttacaatggttgttgaacttactaaatacttacatgaccgccctgatattttgatccctctcattattattgttggtgtaatcatcttgatatggaaaggtaagcttaaaggacggattacttttggagagtaa

SEQ ID NO: 48437 - DNA, 384 bp, Acinetobacter baumannii
gtgtgggcgattaatgatcctgcaaagcgtgtaccgccgttacatcctaattgccgcagtattctcgtaccagttgagaaggacggggagctagttggagaacgcccgtatgtgatggatgagcgaagagtgaaggacattccaaaagatgagcgaagccaattaatagggcagctagatgccaacactacatttaaagagttcttcaaaaagacagatgacttctttcaaaaagagtggctagggccgaagcgttacaagctctacaaggaagggaagtatgatttcgaaaagttctttgatccagaagggcgtttatatactttaagtgaactcgaagtattagaccgtaaaacttttgaaaaacttggaatcttgcattaa

SEQ ID NO: 48438 - DNA, 498 bp, Acinetobacter baumannii
atgaaatttctaaaagattttttttcctcaataaggcaacttattgaattccttcatgttgaattttggattgcattgattattaatttaatcattatggggcttacctacgctttaaagggggttaaaggagtagaaaatctaataagctctttaaatgatcagtatgacggagtaagtataagtgcaacgattattgttacgtcgatcggagtagtactatggatcttttattatttctttaactcaaaatataaacagtctttaaaggaagtatctgaagggtgcattgattcttttatatcattatttagattagctggaggaattctactagcgtttactaccttatatctattagaggaaggatttgcatcaatattaatcgcttttatttattacggacttttatcaatctttaattcttcggtattagtttttattaaaaagaaaatgtttacaaagcccaatagagagttaaagcagtttgcccaataa

SEQ ID NO: 48439 - DNA, 687 bp, Acinetobacter baumannii
atgaaaagtggtgaagcactgattgacctcatggcaattttgcctgcgtatctaaatttctttgtacgaatagatcttcgtatgttaagaattttacgattacttcgattattaaaattaactcgttatttcatctcattgcaaatattgctatgtgtgattaagcgagaaaaaggttcttttcaggcagtgatttttattttaatcattatgattattatgactgcctctggtatttatgtcgttgagaataaagcacaaccggaagcttttagctctattcctaaagcaatgtggtgggcggttgtgactttaactacagtcggatatggcgatgtcacaccagtaactagtctaggaaaattattgggagccttaataacaattctaggggtagggattgctgctttaccggctggtattttagcttctggtttggccaatgaacttaaccagcgtaatcagcgccttgaacaagagttccgtgagttacttcaagtgcgtggtattgatatcatgcatgatgaagttgaaatagaacgtattcgacaaaaagtagggctaccaaaagaacaagcgcataatctgattattcaaattatgcgcgaaaaagtattagaagagaaagaagctgttagagagaagaaatgttattgcccgcactgtggtgaaaagttaacagattag

SEQ ID NO: 48440 - DNA, 318 bp, Acinetobacter baumannii
gtgacctacatacccacgcaagtcgttgcgaaattacacagtgcacttcgcaaaaataaacaggctcaggcagcttacgtttcaattaacggagatgctttatacccattttgtttgttaaaacgtgaaagtctagaggttttagagcagcaaattgataagcaacaattgagtttaaaaaattgctttaaacttttacatgcacaagtagccatttttcaaaagcagaacttatttttccatagcattaattctttagatgaacttcaacaatacaaacaaattaaagcatttaaagagattttttcgacaaattag

SEQ ID NO: 48441 - DNA, 465 bp, Acinetobacter baumannii
atggattctacagaatacttttggcttactcggaaaaaagaacctaaaactaagtccaaatctagaccactacctaaagctactcaaaagtacttagaggctgaagaagaatttactcaagctttggataatctggaaattaagtacgaaaagaaattccagtttaaatctacaaagcattggcgttttgattttcatttaattgaacatcgtattctggtcgaaattgcgggtggtccatggtcaggtggtcgaaaaggtaagctcaaagataaagcttggagtatggatcgatacgatgatgctgaagcaatgggatatacggttgttcggttagaggcagcaccaagttttaaaattaatgaatctggcccgttacagatacaagctcattttgctagtcagtggcttaaaaacttaaagaggcaatttaatggatcagatcagaccgtttccaccaactga

SEQ ID NO: 48442 - DNA, 474 bp, Acinetobacter baumannii
atggtcaccactgcagtatcgttacctacgttacctgctgcatctgtaaacgttactttggcatcaatcgtcttatctgcatccgcagtcaagtcactgcctgatacgcttactgcccatgtgcctgctgtgctatctacagttgcagtatacgtctggccattgatcacaacagtgaccactgtatttgctgcatctgccggaacgtttttcaatacgcctgtaacagtaacgttgcctgacgcttctgatgcattaatcacattgtcagctgttactgaatcaaccgtgaagttaacgccatcggtatttgggccaactgcatcgacaatagctgtacccggtaatgatgggttacctgctggatcggtagcaattgcctcaacttcgtcaccatcattaaggccagggtttggtactgaccaactgccgtccggtcctgctacaactgttgctgtgtcaccattaggatag

SEQ ID NO: 48443 - DNA, 435 bp, Acinetobacter baumannii
atggattctacagaatacttttggcttactcggaaaaaagaacctaaaactaaacctaaaagccggccactgccaaagcctacacaaaaatatctcgaggctgaggcaacacttaaggaagagcttgaggatttgtcgattggatttgaacagaagtttcagccgatccataccaaacactggcgctttgactttcatattgtgaaattgcgtttgctcattgaaattgagggcggttcctggtctggtgggcgtagtggaaaactgtcaaataaagcatggagtcttgatcgatatgatcatgctgaagagatgggttacaaaatagagcgctttcatccagactctgttttgtcgggatatgtcattaactggattaaagacgaattagcgagaattgaagatggagcagatcagaccatttccaccgactga

SEQ ID NO: 48444 - DNA, 573 bp, Acinetobacter baumannii
atgattagtggtcttcaagctgtgaccaacgatattaactctggcggttctgtcaatgttccgaaagatattgctgctattgtagagcgcggtatggtctgccttgataaccaaaaattctggggcgcaccaaatgcaacgcgcgcagtgatctggactttattaccaggcgctaatgaagggaagcctgatccatatgagactttaaaacagtccgtgcaaattggtgaacaaaaaggtgtgcgtttatctcatgcattatatgccgtggctgctcaagcgagtggtgacgatgccaaaatccgtgatgcattaaaaacttatgccgcatctcaagcagatgacaaacctgtcaatccgaactttaaattaatcgatagtatggctggtttaattgtgcgcggtatttctgatcgttactggactgagcatactggtgttcgtactggtgatgacggtatgtctcatttctgggatgagaaaaacgaaggctcagctgaattggatgagttgtttgatggtggagctgcatcggaagccccagctgacacgaaaactgcaccagcacagtaa

SEQ ID NO: 48445 - DNA, 162 bp, Acinetobacter baumannii
atgtctgctgaaactgtgcctgtacctggcaatgaagtgttgcctgcagggtcagtcgctgttgcagtcactgtatcgccatccaccaggttacccgggtttggtactgaccagctaccatctgtgcctgctaccactgttgcagttgtgccatcaggataa

SEQ ID NO: 48446 - DNA, 474 bp, Acinetobacter baumannii; identical to SEQ ID NO: 48442

SEQ ID NO: 48447 - DNA, 471 bp, Acinetobacter baumannii
atggcgacactaaaagagcctgtgaaaatctttatagttcagtctcttgcttgtcgtgatacacctcaagaagtagctgaactcgttaaacaagaatttggcgttgatatagatcgtgttcaagttgcaacttatgaccctacaaaggttgctggtaagaacttaagcaaaaagtatgtcgaactatttgaaaaaaccagagatgagtttgataaaggcttaattgatattccaattgccaataagttctaccgattgaagcaataccaaagacagcttgagaagactagaaacgtcaaaacagccttaaaaattcttgaacaagccgctaaagacattggtggtcaatttactaatcgccaagaaattacaggcaaagacggcggaccagtccagacagttaattcagaaattccagttccaatggaagattacttaaaagcgcggagggaagtcttagatgagtactga

SEQ ID NO: 48448 - DNA, 177 bp, Acinetobacter baumannii
atgaactacgcactcaccacaagtgatgatgtagccaaactgacacttaaccgtcttgatcaggatgagctttataccattcctcaaatcgatgcgaagttgttctggctgatgaaacgtgcatcaccaagtttgtataccaagttccttggtacctcttacaaattatttaaataa

SEQ ID NO: 48449 - DNA, 348 bp, Acinetobacter baumannii
atgggttcatttaataaatatcctgtattcacgattattgcttctatcagccttgtatttgcaggtttgtatggtttgatcttgattcaccgtgctttgtttggtgaaccaaactctgaacaaaagcaacactacactagtccattaaaagacttatctgctcgtgaagttagtattttgatgatttgtgcgattggtctcgtttggcttggtatctatccacaaacattcttggatgtatctcattcaagcatgcagtggttggtcaatagttatgtaccagtacaagaagtcgttgaaactgttcagcaaacagctactcaacttgaccatgtggagatccaataa

SEQ ID NO: 48450 - DNA, 636 bp, Acinetobacter baumannii
gtgcgggctgtacttgtacaacgtgtggcacaagatattccagatggtgcctatgtgaacttgggtattggtttaccgaccaagattgccagctacttacctgctgacaaagatgtttttctacattctgaaaatggtctgttggcttttggcccaccaccagcggcaggtgaagaagaccctgaactgattaatgcgggtaaagagtatgtgaccatgcttgaaggcggcagctttttccaccatggcgattcatttgccatgatgcgtggtggacaccttgatattgctgtacttggggcctttcaggtggcagccaatggtgacttggccaactggcacacgggtgcaccagatgcaattcctgctgttggtggtgcgatggatttggcggttggtgccaagaaagtatttatcactacagaccacgtcaccaaacaaggcgagccaaagattgtggctgagctgacttatccggtaacgggtaaacactgtgttgaccgtatttacactgacctgtgtgtgattgatgtgaccaaagacggtttaaaggtgattgagaaagtggaaggtcttagctttgatgagttacgggctttaaccggtgcaactttgattgatgcgactcaagggtaa

SEQ ID NO: 48451 - DNA, 450 bp, Acinetobacter baumannii
gtgaatccggtggcagcttcaactcgtcctttggttagtatgccgaacgtggagaacttgcttattaatggtcagtctatccaaggtaaggcatgtctacagtctttgactatttctatcaataacaaccttgaagcgatccgttgtattggttcaggtaaatacacacctgagttttacattgaaaagatgatggatattgaagcgaatgcttcattaatgttctcgtcaacttcagcagggtggattgatgcaattaaaacccgtgatgtatttacactgacctttgatattaaagacagcaaaggcagtaaatactcgttcaatttcccgcaattggaagtaatggaagccaaccacccggatggtggtggtgatgacatcattactttagacatcaactttgcccaagtccgtacagcgccaacgattgtacgtgctcttgtttaa

SEQ ID NO: 48452 - DNA, 504 bp, Acinetobacter baumannii
gtgcctaagcaagatcaacctaaaatgatccatatgattcagcaattctccaatacggtttttattgatgttgatcgaattttagatgaagtaaaacgcttaatgaacgttctagtcaaaatcgtgactgtgcttgcagctttagttggcttttctggaatacttgttttaattgcttgtttaaatctattaatggatgaacgccgtcgggaagtggctttgttgcgttcatttggtctctctaaaaataaaatgaagcagatgctcagtctggaaattggttttttaggtttgttagcaggcattgttgcctgctgttttgccgaggtaattagcgctattgcaagttataaaatgaatatggctttacagtggcatattgaaatatggttgattttaccatttgccatgatgttgctttgcgctctgattggccgatatcgactcggttatctgtgtaatttaccgccactacaaagtttacgtgagctgaaccagatttaa

SEQ ID NO: 48453 - DNA, 210 bp, Acinetobacter baumannii
atgtctaataataaacctttgaaaaatagtactaaattacttgttaatctggacaagtttatatttttagtcaatgctgccgatagcctagaagaaattgaaattattagagatttatgctgtgaatatttttcacattgtaagaggccaagctattacattgatatttttgacaatgcttattggataaaatattacgaaatagcttaa

SEQ ID NO: 48454 - DNA, 237 bp, Acinetobacter baumannii
atggctgatgaattactgttggaaactcagcttcaccttattcgtgaagagttagagatttctcaaaaagaactggctgcaacccttggaatcaaacagccgtcattgtcagcaatcgaaaatcgtggtcatgatcttaaaatttcaacgatgaaaaagtatgttgaagcaatgggcggaaaacttcgtattgatgtagagcttccaacaggaaaacacataggatttaatgtctaa

SEQ ID NO: 48455 - DNA, 162 bp, Acinetobacter baumannii; identical to SEQ ID NO: 48445

SEQ ID NO: 48456 - DNA, 354 bp, Acinetobacter baumannii
atgagcaattttgtttttaagcgtggtgacacattcaacttgaacttgcagctggttgatatggatgaaaccttgcagtatccacctgatgatgttcgccgtgcaattgatctaacaggttacacctttacttcacaggttaaaactttggctgatggtgctgctgtggctaccttgacttgcgcagcactaaaccagagcacacagaagggatggcttaacgtaaaatcaggtgcaagcacagcagcttggcctttaggtctgtgccagatggatattaaagctgttgtaagtggagtcacccagcacacggatactctgattttccaagtgattgatggggtgacagcataa

SEQ ID NO: 48457 - DNA, 156 bp, Acinetobacter baumannii
atgatacaaaatgagacgtctcatgatacacctttgacacgtctcaatgatgcaccacgagacacttttgagacgtctcatgacacactaaaaaaacaacctaaaaagcgtggcctacttggtcgcgttattaatgcgtttttcaatgataattaa

SEQ ID NO: 48458 - DNA, 336 bp, Acinetobacter baumannii
ttgagtaatggccattacacacagaaagccctagagctttttaaacaagatccacatgtacaagcagctctcaactcgagagtaagtccagaaatcgccaaagctttaggtgaatctatagaagaacttgaatatagaactctaattgagttattcagacaacgtgccgatttggataacacagatacattaaggctagctcttgatatggttgcaactccacagcaaaaaaaacaggctttagcgcaatatcatgaggatacggcaaacgcattgggaataagtttagatgaatatttaaaaattcatccccaatttaaagctgagatcgaatag

SEQ ID NO: 48459 - DNA, 183 bp, Acinetobacter baumannii
atgaaagattcggtccgtaatattattggtgtgtctattgaccataaacagctatcgttggtggctgaatacatcatgagtaaaaatgacccattcattggtgggactcaagattcattggcaaaaggggatgataaccagtggaataagttgcttaacttaacgctgttttattatttctaa

SEQ ID NO: 48460 - DNA, 264 bp, Acinetobacter baumannii
atgccatccacattgacaactacagtggctgtcggatcgttcactgtaccagtaagtgctggtgtgctgtcgttagtgagtacatcatcaagtgctactgtcggcgcaactgcatcaaccactgccgttgctgggcctgatgtattgccagcagggtctgttgctacagctgtaacttcatcgccatcattcaaacctgggtttggcacagtccaagtaccatccggtcctgctacaacagttttcgtactaccgtccggataa

SEQ ID NO: 48461 - DNA, 519 bp, Acinetobacter baumannii
atggcctttcaacaggttgaaaatctatgcgaagaacaaatcgaaaccttacaagagtttcgtgatgaaattgtagaaaactatcatcatgttattggagagaagacgcatagttctcaagaccttttattagtgcgtttaaacgatttaatgagtcatgtcgaacgtattcaaaaacatactttacgtttacgtagtgcgattcaatcggcaatagatttgcatttctcggcaattgctaaccagaccaatgagaacatgcgtattcttgccattattactgctgtgtttgcgccacttacgcttttaacgggtatttatggaatgaactttgagtttattccggggcttaaatcaccagtaggtttttggattatgctcggggttatgctgctcagtaccattttattgctctattatttttatcgacagcatttggtagggcgtggggaaaaaagtgtgattgatttactggcgcagcagcaccgacaagatcgtatgaatttgttcttcgcatag

SEQ ID NO: 48462 - DNA, 183 bp, Acinetobacter baumannii
gtgacaccgatccgagcacaacgcggtggcagcttcattagtaacgacacaattcaaatcaccattaaagcagagcacggtcaaccagtacgtgaaacagctcgtgcgttacgagctgaaatggtacgtctccaacaagaagaacgcgatgctcgtcgtagattcttaactgatacggagtaa

SEQ ID NO: 48463 - DNA, 354 bp, Acinetobacter baumannii
ttgggcagcgattttgcaccagacagtgataaagctcgtctggtaaagctggctaatgtttggatgaaaaaacggattggttttgtaccagatcctattgatccacttcttaaagacgcggcttgtgaaattatcaaaggaattctggccaaagtaatttataacggcaaagaccagcagttgaagcgtaagaaggtcaaagctgattctgttgagtcagaaaaagaataccaagatggatctgaagcaatttctagctttgaacagatagcaattgattttattgactcacttgatttgaaagatccaaatgcaagttttaatggctttggcataccactttacagggcatga

SEQ ID NO: 48464 - DNA, 414 bp, Acinetobacter baumannii
atgtcaaaaaaagaagatattataaatactgctttagaactttttaaccaaattggttacaatgctacaggggtagacaaaattattgctgaatcaaatgtagccaagatgactttctacaaatattttccctctaaagaaagtttaatcatggaatgcctacatcatcggaatattaatatacaaaattcaatttatgaaaaattaagcttacatccagatgtgagtccaattgagaaaatacatttaatttttaattggtatattgactgggttaatagtaagaattttaatggttgcctatttaaaaaggcttttattgaagtgtctaaacaatacacctcaattcgtgaaccatttcaagaatatacaaactggcttataaatttctttgttatagctagtattggttaa

SEQ ID NO: 48465 - DNA, 408 bp, Acinetobacter baumannii
gtgggtattagcttaaaaggtggtgacactgaacgtcatgaaattttagaacaacttaaacagcaaaattatgttgtagatgatttatctgatgatgaagttgccaaattgcatattcgttacttgattggtggtcatgccaatctggatgacgaaagattgttccgtgttgagtttccggaacgtccaggtgccttactcaccttcttaactcgtttaggtccaacccacaatattacgctgttccattatcgtaaccacggcgctgctgaaggtcgtgtactagttggcttacaagcaacagatgctaaacaaaacccagatggtttaattgaaactctggagcaaattagctatccatatgcagaaattactgacaatgtgggctataaacgtttcttgaagtaa

SEQ ID NO: 48466 - DNA, 177 bp, Acinetobacter baumannii
ttgattactgcacagttccagaccatttctggcgcatctaataacccgaaatttacagcattaacattcggtttgttattcaccctagcccaaacaccaggtcctgaattaattgctgtgaaatatgtgttaaaagcagatagtgaaggaattggaatacttggatcgataatataa

SEQ ID NO: 48467 - DNA, 180 bp, Acinetobacter baumannii
atgcgtgctgaaggtgcatttaacctagatattcttggttatagttgggatacatcgaaaggtgaaaatcctgaccttacattacttggttcaagcgctaactggattaaatatgcaaccagcaacaaaatgacagcaggtaccttacttgatttatcaggtacagcgacaactggttaa

SEQ ID NO: 48468 - DNA, 264 bp, Acinetobacter baumannii
atgctggtagtgtatggtgcgttgttcatcatgcaaaagttccgtctagataaacagcaatggattgtgctgttcatgacagtcatttttggtggtattacccttatgttgagcgatgatttttacatccgcttaaaagccgctattttgaatctagtttttgcaggtgctttcttagtttcaccttggtttggtaaagaccgtaagcgtcttattcaacgtttatttgatccgattttagccttaagcgaaaaaggttggtaa

SEQ ID NO: 48469 - DNA, 342 bp, Acinetobacter baumannii
atggtcaaagatgaaaatgccaagctttaccacgagcttttaatggatgcatgtgctgcccacttaattgaagactggaaaggtgtggtatttgccgaaatcgtagacggtaaaacggttgaatctgaaaagccctatacacctgagaatgcctcaaagcttcttaatcttggtgatattggtatttcaatctggctattcattaaagaacaggcccagaagattcaggaagaagccgacaaggacaaggctttaattctgggaaagtcatcgagctctacaaataccaaaaaacgtatgcgtcgaaaacgccgcacgaaatcgagcaaatcaagttcttag

SEQ ID NO: 48470 - DNA, 219 bp, Acinetobacter baumannii
ttggtacaacacaatgtagacgatttcttaaaatcagatattggacaagatgcacttgctttgtctgatgctgaaattgaagatttcattcaacaacgtgttgatgcgaaaaaagcaaaagactttgctaaagcagatagcattcgtcagtctttacttgagcaaggcgtagttcttgaagacactcgccaaggtacagtttggcgtcgtgctgattaa

SEQ ID NO: 48471 - DNA, 267 bp, Acinetobacter baumannii
atgcagcgacttcatgaagatgatttagctggatggttgctaggtgatagaaaagacggcgttcctgtagctggtggtaacggtgaagtgtgggagcatctatgtctttcagctattcaggaagacggatccgcactgtggccagcaaaacacaatatccaaaagttgaagcaaatggagcaagctgctccgtatgtttttgccgggcaatatcgtcaaatgccatatcagcaaagaaggcttcaaaaccttcatgtaattcattaa

SEQ ID NO: 48472 - DNA, 297 bp, Acinetobacter baumannii
gtggttaaaactttggtgggtgcattggactggaacttaaatgcacagcaggcgacttcgcttgttaactttggtgcaaccaatagcaaaaacaccaatgtggatagctcgaatgtgcagctttccttagttgacctgattgaaggcttaaaggcaaaagggcatggcatctctaacactgcgcaaaccagtggtatttcaacgattatgaaagtaaatataaataatcaaactaaatacgcaggtggggtagacccacgccgtgaagggattgtgttaggtaatggtgctttatag

SEQ ID NO: 48473 - DNA, 306 bp, Acinetobacter baumannii
atgcctgagcatccagaatggttaaataaacaagatttgcttagttttgaagcgctctttcaattttgtcattttatggtgcagcaaggtatcgaaagtattcgcattacgggtggtgaaccattaatgcgtcaaggtattgttcatttcattcgagatctacagtctttaaaaagtttaggtttaaaacgtatatcgatgactaccaatggtcattaccttgctaaacatgccaagcagctaaaagaagctggattagatgatttaaacattctggatgctcaggcatgcaatatacacacttaa

SEQ ID NO: 48474 - DNA, 165 bp, Acinetobacter baumannii
atgtacgaagtaaggaagattttcctgcaccacttttaccaatctcaaggtcaaaaactgcacgctttaaaagagattaaccttgatattcctcaaggtaagattttaggcattattggtaaaagtggtgcaggaaaatcttccttacttcgtacattaaattga

SEQ ID NO: 48475 - DNA, 150 bp, Acinetobacter baumannii
atggcacagttcgcagtcatcggcttgggaagttttggggcaactgttgctcaggagcttacgagattaaaccatgatgttattggtattgatacagtcaaaaagaagtgtgtaagtaacaacaccttttgccacaaaagtaacctttga

SEQ ID NO: 48476 - DNA, 240 bp, Acinetobacter baumannii
ttgaccagaaaattctggaaagatgcacgtcgtggcgtcaacttaatttttagtccaaaagatggcgtatttggtagcaccattggtcagatttttgattacttacgtccagacttccatccaaatgatcatgacacgaccgaatatctggagtactacaaaaagaaattacttaacgagggcggtgcaattgcgccttactttgtgaaggaatttacaccacctgtacgcttgtcataa

SEQ ID NO: 48477 - DNA, 132 bp, Acinetobacter baumannii
atgcaatttaaaacacaacttgaagccgatgagagcacaggaaattccgccgttttatcctcaagtgcgattagccgtcttttaatgccttatgaggtatatctgagtgattcattctcgtgtgtattttga

SEQ ID NO: 48478 - DNA, 132 bp, Acinetobacter baumannii; identical to SEQ ID NO: 48477

SEQ ID NO: 48479 - DNA, 666 bp, Acinetobacter baumannii
gtgtttgaagactcaaaagtatggttacgtcagttcattgaaaatgagttgaactcaagtaatgacaatccattgattgatcctgtagggatgcgtgtattgcatggcggtcatttttacggtgggcacattgcacaagcaatggatagcttgaaaattatgatcgctaatattgctgacttgatggacagacaaattgcacagttggttgaccacaaaatgaatcatggtttgccacgtaatttaacaggtgcgacagctgaacgtttaccactgaatcatggttttaaagcggtacaaattggggtgtcggcgtggacggctgaagccttgaaaaatactttggcagcttcaattttttcacgttcaaccgaatgccataaccaagacaaagtcagcatgggtaccattgctgcgcgtgatgcgagccgtgtgattaccctgacacagcaagtcattgcagcactttgctgcgcgagtgtgcaggcgattcatttaaaaggtttaaccacacagttaagtccaacattgcaaacgtttatgcaatggaccttacaaagctttgcatttgtcgaagaagaccgaccattacaaaccgaattacaacagattgttaatcgtttagaccaacttgaattgtttaatcaaccagaatttatgggataa

SEQ ID NO: 48480 - DNA, 1650 bp, Acinetobacter baumannii
atgcgaatggacatgcctaatcaacagacaattcaccactttgatgtgattattgtgggcagtggcggtgctggtttaagtctggctttatcgttaccaagtcattttaatattgcagttttagctaaagctgctttaactgaagcaagtaccttctatgcacaaggtggtgttgctgcagtacttgatgaaactgactctattcaacaacacattaatgacactatgattgcaggtgctcatttatgtgaaatggatgcagtccagcatactgtagaaggcggccgtccttctgttgatttccttttaaagcaaggtgtgcagtttaccttagatgaagatgaacagcttcatttgactcgtgaaggtggccattcgcagcgccgtattattcattctgctgatgcaactggcaaagctatttcaaccactttggttgaacgcgccaaagaacgtaaaaacatcactatttttgaaaactatattgcgattgatttaatcacgtcgcataagttaggtcatacagagcaggcaaatcgtgctattggtttgtatgcactagatgaaagtactgaaaaagttcataccttccttgccccatttaccgcacttgcttgcggcggcgcaatgaaagcttacctttatacatctaatccggatattgctactggtgacggtattgcgatggcataccgtgcaggttgccgtgttgccaatatggaatttaaccagttccatccaacctgcctttaccacccacaagcacgttctttcttaattactgaagccatgcgtggtgaaggtgcttacttacgtttaccagatggcgaacgttttatgctacgttttgacgatcgtgcagagttggctcctcgcgatatcgtggcacgtaccattgaccatgaaatcaagcgtctcggtattcgccatgtgtggttagacattacacacaaatcacctgagtttattaaagagcacttccctacactttatgcacgattgcttgagttaggtatcgacatcactaaagacatgattccggtggtgccagctgcacactatacttgtggtggtgttgtggttgactcaaatagccagactgatattgaaggtctatatgcaattggtgaaacctcttatacgggtttgcatggtgcaaaccgtatggcgagcaactcattacttgaatgcttcgtttatggcatgagtgcagcaaaagatatcgaaagtaagtttgatataaacttcaaattaccggaagtacccacttgggacgattctcaagtaaccaatccagatgaagatgtcgtgattttacaaaactgggatgagttacgttcgaccatgtggaactacgttggtattgtaagaaccacaaaacgtttagaacgtgcgttacaccgtattgaaatgctaaagcgcgaaattactgaatattatcaagattatcgtgtcagcaagaacctgattgaactgcgtaatcttgtacttgtttccgaaatgattgttcgttgtgctatgcaccgtaaagaatcacgtggcttacattacacacttgattatccggaaacttcgagtgagattcgtaaaacggttctgacgcctccaaactttgcagtagagcaacctttggtgaatacgagtgtataa

SEQ ID NO: 48481 - DNA, 1377 bp, Acinetobacter baumannii
atgaaatctcgctatttacaacaaggaatgtatgcagcggtatttacagttgctgctgttcaagcaaatgctgctgttgatttttcaaacctcgttgaacaagttagtccggctgtggtgagtgtaaacgttgtaaaaaaaatgactcaggatgaactgttacaacagcaagttcctgaaattttaaaacgtttctttggtaatcaggtcatcattccacagcaacaaggtcctcaagagaaaaccgcatatggtagtgcgttctttattagtaaagatggttatttacttacgaaccaccatgtaattgaaaatgcttcccgcatcagtattactttaaatgaccgtcgtgaaattgatgcaacggtggtcggtagtgatgagcggacagacgttgcattattaaaggtaaacggaactaactatcctgctttacgagtaggaaatgttgaccgtttacgtgtaggagagccggttttagcaattggttcaccatttggttttgattattcagcttcggcaggtattgttagcgctaaatcacgtaacatgagcggtgaaacctctgtaccatttattcaaaccgatgtggcgttgaaccctggtaactcaggcggtccattgtttaaccagaatggtgaagttgtcggggtgaactcacgtatctttagtggtacgggtggctatatgggcttatctttctctattccaattgatgttgcgatggatgtagctgaacagcttaaaacgaaagggaaagtgactcgttcatacttgggtgtcatgatgcaagatattgaccgtaaccttgcagatgcctataaattacctaaaccggaaggtgctctgattactcaggtttctccaaattcacctgctcaaaaagcagggcttagagctggcgatgttattctaaaattaaatggtgcttctgtactgcgtactagtgatttgctttatgcattaaataaagtacaaccaaaccaaactgttcagtttgaagttttacgtgatgataaaacccgaaatatctcggcaacactagcaactgcacctgatgaaacaccagctaccggtaatcaagcctctgcttctaaaggtccagtattgggaatgagtattcgtgatctcgctgtgccagagaaaaatgctttaggtataaaaggtggtatttatgtacaagatgtccgccgtggtggattagcatcattgtcaaatatcattcctggcgatgtgattattcaggttaataatactcagattttgaacagtcaggattttgcaaaagttgtttcgaatttgccgaaaaatacagttgcgcgagttgggattattcgtcaaggacaacgagcaatgcttggtttacgtattcagtaa

SEQ ID NO: 48482 - DNA, 927 bp, Acinetobacter baumannii; identical to SEQ ID NO: 46217

SEQ ID NO: 48483 - DNA, 1665 bp, Acinetobacter baumannii
atgcgtgccacagatgttgttggggctaacacagtcgtctctattatttcaaaagtattggttcttatttttattttattttgcgcaatctattcagatcaagcaggaaaaatttttgcatatatttctgggatcattctggaaaatatgaaatggtttattctagcaagtactacaggttttgtgtttttcttactttatctcatgggtagccgatatggtttacttaaatttggtaaagatgacgataaaccagaatatagcttctttgcttggatttccatgttattttcatgtgctatgggtgtagggcttgttttttggggtgttgctgaacccattaatcattatacgactaatccatttacaaaagggttaactgatgaagcagcaagtatggctatccaacttacctttttccattggggattacatgcttgggcactgtactgtattgctgccttagcgatcggatatttttcatatcgcaaagatctacccttttccttacgttcagctttatatcctttaattggtaataagatttatggaccaatcgggcattttgttgacattcttgttatcgtgattacaacatttggaatttctcaagcgcttgccattggagttttacagattaatgcaggtcttcataaggtttttggcataaatattggaactactacacaatttataattttattttgtttatcaagtatcgctacattttctgtagttcgtggcattggtactggtatgcgaagattgtctgaattgaatattattctatcaattattttagtaattattttaatgtgtattggtccagcacgttacatcactaatacttatttagaaggtattgggaattatacacaaaactttattggaatgagtttgtggagtgatacccagaaagatacagaatggcagaactggtggacagcattctattgggtatggtgggcaacatgggtaccttttgtaggaatgttcattgcaaaaatatcacgtggtcgtactttccgacaacttattggtggcgtactcatcgtaccatctctcatcacttttctatggatggctgtttttggtggttctgcccttaaaattgagcaagattctcgtcatagttttgaaaaacaacaagctgctctaataaaaactgcagaacctacttcagaatcatcaaaaaaaatagaagtttcttctagcaaagaaataactccctctactacagttttcgaaggaggccctattgtccaaactgtgaaaaaagataatacattagctgtatttgctctttttgatgcaattgatggcggactattagggacactattaagcattacaacttgtatattacttattacttatcttgttacctcgcaagactctgggacacatgtactttgctttttagatacaagatcagataaggatacccctattcgtatacgtttaatttggagtgtatttattactttaattagtgcagggttattatatgtaggaggtttaaaaacaattcaaacagcaattgttctatttggattccctatggttatcctgttaacaattatctgtgtaacattatttaaagctcttcatcaagaagatatctcaaccattaatatcgtaccgaagcatccagatgtaaaatag

SEQ ID NO: 48484 - DNA, 570 bp, Acinetobacter baumannii; identical to SEQ ID NO: 13730

SEQ ID NO: 48485 - DNA, 567 bp, Acinetobacter baumannii
atggcaaaagttgttactggattacgccctggtggacgcagcgaaagaatacaaactgcggtgcatcaagctgtaaaagaactacaaaaagattttgagcaaagccaaattactattcctatgattgcagtgcaggcaggggttacaccttcaaccatttaccgtcgatggggtgacatcaatcaattattttcagatgtagctttaaatgaactcaaacctgacatggaacccaaagatttaggttcgttccaacaagatattacagcatgggttgagcaatattttgaagaatatgcttcagaggttgggcaagacttattgcgagatgtactctatacatcaaactcggattctaatgcccgtaaatgtgagactttaattatccagcagctcgatattattcaaaacagggcaaaattacgtaatgagcttactatacctaatcaggtaatcatcgaggcagtgattgcacctatgttatttcgaattttattcaccaatcatgaacttagtcttgagtatgtatatgatcttttaaaccgtctttttataaaaaataagtag

SEQ ID NO: 48486 - DNA, 1851 bp, Acinetobacter baumannii
atgctcaaacggagcattgcttttgcattattggctgctgctgggcacgcttattctgctgatattgaagtcacaagtttagtggatgaagataaagatgatactgtttgtactttacgagaagcagtacagtttttgaattatcgtggttcatctaatgcagctgacgttgaaaaatatgtgaatggttatcatggctgcggaaataaggatgcttcatcaaatattattttacagcgcgataaagaatatacgttaaatagcagaataacgattacggcaccccttacaattagtacagcaaaaaacgattctactttattagatgatcaaccaggttctcataacgcgacaataaaaatggtcggtaaagatcagctatttaaaattgatgatgggaacgttgaaaaagcgtctttttcagtttctttaagcgatcttaatttacaaggagctgggtctaacaataccgtattagaaggaggattaatttataaccatgaacaattaaccattcgaaattcacgtttgataaatggttatgcaacccgaggaggtgcaatttataatgcaggtaatttatccaacacaacaaatacagcaggtacagttagtcttgtcaataatttaatccaaaataataaagcggctcaaggtggaattttatatagtgaaatgccactttattttattactcaatcagttttacgtgataatgaagtcacaacagcagataatgctttattttatacacagactaagttttccgatgaaagtactggagggtatttaacttcacgggctatcggtataagtaatagtacaatttttcataataaaggcggttttattgcaaatgttcgggatgggatgtttgttaataacattactatgattaaaaatgataaaggactatttcttgatgcgcctcaaggtaatgcttcggtttcaaatagtatattagtaggaaatactattaactgtcaggtaagtacgactgataaagcaattatacaaagtaatttggttacagcagagtgtaatcgtaatgctacatcgaagctccctaatattctttatcctgctaatgaaaaattaattgccggtgatagcgatgaaggtgcatgtgatattacctctcaaaccgggttgttgtgtccttacaatacgccaaaagatagttttctaggtttctttaggccacgcttacttgaaagttatcaatctttatctgactctttgattattaataaaggccgtctttatagtgatggttcttcaattggtttagcaagttgtgaaagatatgatcaacgcggtaaaaatcgtagtggatatgatgaactttgtgatttaggtgcgattgaatatattttggatagccaaattgctcctgttggccaagatattaaatatggtcaagttgcaaaatttagtattctgagttctctaagtgaagcagatctggtcactcctacaacctgtaagcgtttattcggtgaacgtcctgatggtaaagaatggcaacctggatgccttaaagttacacaaagtactgatacaccaacttctaaaggtgttattactttagatcagaatggaaatgtagtttatacgccaaatggaaattggcatggtgcggacatttttaggattcaagttgttacgagtgtatctcgttttaatgatggcatagagtttcaatatgtcactatccctgcaactgtagtccaagaacctgtatctggtattgaagataaatctgtgagtacgggtggaggaggaagcgtcggtagtggattaattttaggattatttggattaattgcattacgccgtttcaagtcataa

SEQ ID NO: 48487 - DNA, 1017 bp, Acinetobacter baumannii
atgattgatagaatatttttattagcattcttttctttaaccctattttcaataatatactttacaagtattgagccaatttattatataaatttaaaagattttttaaaactaactccagaatattttcttcctacactattaatttccttactagctttatatgtaactgctagaaattatttaagaaagtctggaaatagtattgcagcaacttttacacttcgtagtgatttctcatccactgaaagatacatttcttcaatcattttagttaataaaaaagataagcctgtcataattaataaaatatttattagagttggtcataatatttatattcaattaatcgatggttatgatgaaacttttgtacttaagccctatgaaaccttaaaccaaaaacttgaaccacatttcgtgtatatggcgggcgtaaaaagaattgttaatcttccagatattattaataataaaaaaataaagaaaaaaatagtcttagatactacagaaggaatcgttgtatgtagcaatttaagatacaaaaaaattataaataaagttttgagtcattattccacaggattaattattagacataaagggcaatttataaatgggattccagttggaaataatgttttatactttattgaaataataacaaagaatggtgaaaattcctttattactattagtaaaaatccagaaagttcactattagaaggtaaattaaagtttgatactgaacaattaaaaatggaaaatggtactttacatattaaaaatgttattgaaaaggctttggaagatggagtgattgattggcaaaatttcaaaatacattctcaattagaaacttttgagcattatgaagaatatgaagaaattgacctaaccgatcaaaaaatgattagttggtttgattatcatatcaaggcaagaatatatacatatttaaaaaaccgtgaaactaggaaaattaacaatgactatattaaaaaatcaaaaaaatag

SEQ ID NO: 48488 - DNA, 756 bp, Acinetobacter baumannii; identical to SEQ ID NO: 45967

SEQ ID NO: 48489 - DNA, 2610 bp, Acinetobacter baumannii
atgctggaagctcaaaattatcatgttgatgaagaagtacgtaaaacaggaagtgaattagatttactatgtaagcataatgtctctaagaaaaaaatttatgttgaatgtaaagcctatcgggataaaaagattgatgcgacgataataagacagttacttggtactgttgtatttgaggactatgacgaaggatggctaattgggacttctgattttagtaaggatgcaaaagggctttgtgaagagttaccaaatcgacctcatggaaatcgagtaattatctacactcctaaagatattgttcagtcattacaatcttctagaatcattagcaatattccaaaagaacatttagaaagttatattgatctgaataaggttggagaatggtatttattaataacaagttttggaattttttgggctgttactatcttaaatgcaggtataccaacaaatgttatctgttatcatgctaagactggaactttagtcgaagatcaggcacttttagataatattgcctcaactgactgtagtctatctaaactagacttttccaaacttataaatacaaagaaagatattaaaagttctcttgattcccaaatagaagtagtagaagtgcaaagaggtgaggattggaatgactatcgacctgcacgacctcaagactttgttgggagaacgaaagatataaaagaaatatttgatttttttaaaaaaataagagaaaaagaaatcggtacacgaattttcgcaattactggtaattcaggtttaggtaaaagctcgttaattattaccctttctgaaaaagcaaaaaatcttcatcagaaaaaaaagttgttcttatatgctattgatgtaagggcagcaaagtctcctgactatatatattccgcattattaaaaacactaaaagaagcacaaaagaagggattcggtaattcaaagattgatttacaaattacaaatgttaatcatccactagaatcagaatctatagcagaatatttaaatagtcttaatacctcgaaacaactcatagtattagtttttgatcaattcgaagaattatttagtaaacctgatttattggaattatttaataatgcaagtaatattttattagatgcagctagcttaaaagctaatttatgtattgggtttgcgtggaaaactgatagtacaatgccttcagaacataatgcatatttcttttggcatagattatcagattatcggattgttagaaaattaaatcctttttcagatagggagtcgcatgcagtaattaataagtttgaggaagtaattggtgaaaaaatccatagtgatttaaggcataatttaattgttagtagtcagggatatccatggttattaaaaaaattatgtatccatttacatgagaagattttatctggccaaaaacaagaagatctattagataataaactggatatatctagtttatttgcaagtgatttagaagagctaaattctaatgaaataaaagctctaaaatttattgcccagaaagcaccagttgatttagttgacactattgatacgtgtggtgaagatatagttacaagtttactgcataaacgtttaattataaaaagtggtattagattaaatatttattgggatatatttagagagtatattttaacagagactgttcctattatctcattaagatatttgccttctaatgatttttcaacaatatggaatgttgtaaagtatttgtctaagaaaccaatttctattcaacagttgcaggaaaaaactgatttttcagagggtacaattcaaaatataggaactgatgttttattatttggtttagcaactagagaaaactcacaatatgtattatcggaagatttgttggaagaagaaaatacacaagagaatattctgaatataattagagaaaaatttaagaaacatattattactttacatctaaaagacctttcaagtggaacattattaacaattacaaatttcatagatttaatgaaagaaacttatcctgataataaatatgcagataagacttggagatcttatactattagacttattcgctggttagaattaacaggtttcttacagccagctacagagccaaatacatggatttataaagatttaggaagtcccaaaacttctgtgatgagtagaagacgtacttctaacttttttgtgccaagaattacacctcagttatttatatcgatatatcctcagattgcaggtaagaatcttcaagaattaataaatgatggtagaactaataaggctttagaaattttaaaaaaatttgaattaatagataatgaatttattttagatattaaagattttgagtctgtggtttatgctaaagctaattcagaatttagtatccaagctatgcttgaaattaaagagctatattctgctgataaactatcaggacaggctttaggtaagttgcttaaagaaaaatatgatttaaaatggactgatgtaactactcaatattcaggcaataaattgaatagttgggctaaatgggttaaatcttatgaagtgaaaaatgaataa

SEQ ID NO: 48490 - DNA, 270 bp, Acinetobacter baumannii
atgctttcagaaaaattttataagattttttcttacatagttatatcttcaataacttcttctttctttgttttaattgagagtttttttgatagtattgtagaggtgtataaattagaaaatagttcatttagaacttttataactttttttgttgcttttttaacaaacttttggtttcaagatttatttaaagaaagaattagagaagcatgtttgataaattttttgacatacagattaaatttcgaaatttttaaatctaaataa

SEQ ID NO: 48491 - DNA, 180 bp, Acinetobacter baumannii
atgtttgaagttaagactgcagtgcaatttgatgacgatgatgtttggattggaagtgttcttatctcgaaatgtggcggtaatgacgaatggacggcatatctcgacaatgatgtggaaaaggaatttgaaactttagagcaagctgtcacttattgtttggagcaagcgaatgattaa

SEQ ID NO: 48492 - DNA, 288 bp, Acinetobacter baumannii
atgagaaacatccctgattctatgtcgtttcctttcactgtttggatgtgtgaaaacgggtattacccatctcataaaaatggattcattattttaaagcgtggcaaagaagttgcaaagatatcaatgaatgaaacaaaagatggttatccaatgaatgatatttgccaaaagaaatttgcctcgttctgcagagcatggatgaacagagataaacactttattgagcaattacgtttgcgtggattagcaagattaaatcaaaaaagttatcagatggtggcctaa

SEQ ID NO: 48493 - DNA, 681 bp, Acinetobacter baumannii; identical to SEQ ID NO: 46652

SEQ ID NO: 48494 - DNA, 201 bp, Acinetobacter baumannii
atggctgttcaaacccttggaagaatgaacgtgagtaatttagcaaatcatccctgctcaggcaaatgcactgattttaaagaagaacagtgctcaacttgtcttataaatcaagatgccccgcatcaaatcgtaaacactcaaaccgatgaagagaaatttctagatcgtgcattcaatgcacaaaaggagatttcatga

SEQ ID NO: 48495 - DNA, 513 bp, Acinetobacter baumannii
atgcaaattgaaatattaaaaaatctaccaaatattctatttacaacttactcacctatatggcttgtagtttggttcacaagcatttatcagattataaatatcacaataaaaattgatgatttaatatcaaaaaaattaaataatcgccaatatataaaaacctccttaaattcaatcctaattttttttaaaaaattatcttctgctctacaaaaatctcttcaactaccagatgatattgagccttggtcaaaaaagatacctactccagtaaagaaatttggaatttacattgaaagttccatatggtttattgcatcattaaccacaacaacatactttattctaattgctttattaactattttaactaaaaaattgctaactattcctgattttcttacaatttttggtatttcagccatacttgtcgtatgttcaagattcttatatgtggaaggtcgaagatgtttattaaaagcaaaaaattataataaaattaatatctaa

SEQ ID NO: 48496 - DNA, 285 bp, Acinetobacter baumannii
atgagtgagtttaaagaatacaaagttggtgaaaagatcgtatatcacagcttgccgcatcaaagattgttttatgtcaaagctgttttggacgactcaattgttgttcgtgaatgctgggatgaagcaggagctaagtgttttagtgaattccctccttatgcagatattcgccacgccaccccagaagaaatagcagcaggccaccgcattgacaatgatatgggcgacgacttccccatagaaaaccacatcagcccactgtgtaaatcaaaggatgtttga

SEQ ID NO: 48497 - DNA, 381 bp, Acinetobacter baumannii
atggataaaccaatgacatttattgagtggtgttctagtaacggaaaaattccatattcagttggcatagaggaggcatatgaagctggtcagcagtcaatgcaagcgaaagtggaggagctgcaacgcagaaatcagatgcttaacgacaacataaaagagcaaggtcaaaagctcgtttatcaaaacgaagtgattgaaacacaagctgaaaaactgcttggtttaagagatgagaaagcagagctgcaaaagcgggtggatcaacaaggactaatcattgcaaaagctatgtctattgcatcagaccttcaaaagagctggtcaatgtttgagattggcaagaagttagagcaagcgctcaagggtggtgaggcatga

SEQ ID NO: 48498 - DNA, 171 bp, Acinetobacter baumannii
atgaatgaaaaatggacctacaaagagatgatggccctgcgttgtgcatataaccatggtgtaagaacaccagaaacacgagcggcagcttgcctgtatgtgaagttgggtagaaataaattattagatcaattcaagaaagaaagtgaagcaaaaggtaaggtggaatga

SEQ ID NO: 48499 - DNA, 498 bp, Acinetobacter baumannii
atgaataataaaccgcatgtattacaagcttgtaattggaagaagtacacaattgagaattggttagagcaatttggggcatggattaatgaagataatgctgaaacttatttgggtacacgtaacaccttaacttacttgattgattctgtagaaggcgtaaagcgtgatgcaagaaagcgctcattgccacagtgcaaaatctctactgatgaggcgagagctgtaagtggattattgcgtgatttacgaatgaacccaaacccaacattacaagaatggctagattttgtagtgttgtattacgtgcatgggttgagtgaggaaactattgctgacattagcaaatgctcacgtaacgccgtgagacaagatttaaagtgtggtattgcctatattgttgggcaacgtaatacattgcggagtaaattaaccgaaaaacaagccaaagtaagaaaaccaaagaaaacccttgacttggcgccaatagttctttaa

SEQ ID NO: 48500 - DNA, 276 bp, Acinetobacter baumannii
atgaaactagttcgtttagaaacaattagacttaatgatggttcatttgaattgcaatttaatgaggatggatttacgccattttatccaaatactatcaatgacgatggtgttgatgttgcatcaggtaaggttaatgtagattctatttactatcatcatttagatagagatgacacgagatatttaatttatttaaaaggctaccatggcagagtagatggcacagaaatcccaagtcttgaaaaagcattagatgctcatctgcaaagttga

SEQ ID NO: 48501 - DNA, 135 bp, Acinetobacter baumannii
atggatctgcccttaccgtctttactagaattagaatgcgcggcttggcttggtgctggtgcaccacatctcatgcatggcagcttgcgtacttcggctaatcgtttggagtcacgcattcaacatggaccgtaa

SEQ ID NO: 48502 - DNA, 219 bp, Acinetobacter baumannii
atggttaagcatgttgattatgaggctgtatatgacggtgagaatttttctttcatcaaagtattaatggatgatggttcatatgacccaatagctggaacaaatgggccttatggcatcataactattgttggatatgaggttaggatttcgtaccctgaaaatctcacacaagaattaatagagaaaatggtaaaccaatttactagaaagaattaa

SEQ ID NO: 48503 - DNA, 399 bp, Acinetobacter baumannii
atgaaaaccaaccagaaaggccaagctgatgtggtattagccgcactttgctttcttgccattttaattgtcattgttttgattatgtttgcatggcctcactataaagtgtggaagcaaggcatgaatggtcaagcactattggcagaagcagaacagtcaaaaatgattcaggttcaaacggcgcgagctgaacttgaaagtgccaagttgcgtgcagaagcgatcaaaactattggtcaagctgcaaaagattatccagagtaccgcaaacaagagtttattggtgcgtttggtgatgctttacgtgatggcaagattcaacaaattgtatatgtcccaactgaggcaaacattccagttttagaagctggtaaacgtcccgttgtggatgaataa

SEQ ID NO: 48504 - DNA, 531 bp, Acinetobacter baumannii
atggaaccagcaacattcccaatcaatagttattctgggattgttcaggtaattaactatctgaacaataaccactccaaagcagccgcagaaggcaaacctttagtcgttagaatcaatcagaaggaagacgacaggagcgccgcacaaaatcggctttactgggcttggcttgaacagatcaggcaaaagaccggtaattcaaaggatgatcttcatttactttttaagaaaaagtttcttgcccggatctatgttgagggtcggcaagagactgcagaaaagtacatggctttgcagaactttaaagatgttattcaagcattcgatggacctaagcgccgtcaacttgaaaaggattaccaagttttggtcaataccttcattaaagaccacctgcaaagcaagaaggccaccattaaagaattcaccaaatatctggataagatcaacatttatgcacatagagacttgggcgtgatgttgattatcccggatgaccttaagtggtgttatcaaaatgagcaatga

SEQ ID NO: 48505 - DNA, 303 bp, Acinetobacter baumannii
gtgaagacaatgaatagaggccagcctttctttgtaattgatgatgatcttcaaaagtcgtttgataaaaccattttgtatttgcaggaacagcatagaactcctgaattgaagcgcaaagaactggagcttgaattagttaaactggttcaaagttatcaacgtgacggtttggatatcgattggatatccattgacttacttaatggtgtagatgcgcgagtaaacttaaatgaaactccaaacattcaagaacaagttacagacgctacaggcacccgcacaaacccagaagaaccctaa

SEQ ID NO: 48506 - DNA, 225 bp, Acinetobacter baumannii
atgacttcaaaactagttcatgtgaaagatgcagacaaaggctctgacatctactttgatccacagggccttgaaggcgccgtttttaattggaatggacagaaagattacagccaatacatttataacgctatgttgtatatgcgaagcggtagtttgatttgttgtgttgtgaatgacgatggcaagaagaagattcttgaacatgttcaggaagcaccataa

SEQ ID NO: 48507 - DNA, 126 bp, Acinetobacter baumannii
atgatgcaaaaaatccagcaggcaggggggatgtcaaaacttccaagcccttcgccgttggacaccgccccccatcgcacgcacaaaaaaaattccctctcagaaaaagttaaagcaaaaagttaa

SEQ ID NO: 48508 - DNA, 483 bp, Acinetobacter baumannii
atggcattaacagagaaaatggaaaaatttgctcttgccattgttgacggcaagacaaataaagaagcagcaatttcagcaggttatgcggaaaaaactgcatccgccgcaggtgctaggttagcaaaagatcctgaaattattgtctatattgaaatgttaaaggcccaaaaagaagggcgctctttaacatctaattcaccaaaagttaaacctaaagatacacccgaaaatagtggtgaagatgaaaaccctattgaggaatttcaatttgaaggtgatgatcctttagattttttaattaaggtcatgaacttcaatggcaacaagctgccacttagaatgcaagcagcaattgcagcattgccttataaacacgggaaggttgcggaaaaaggcaaaaaagaaactaaacaagacaaggcaaaggaagcgaccagaacaggaaaatacgccacattggacaatcagttgccaagctaa

SEQ ID NO: 48509 - DNA, 192 bp, Acinetobacter baumannii
atgcaaagtctagaatacgaaaccgtaagtggtgaaactatcactattcaaaatatcaaagatggcccttgctgtcatgactctattgaaaagttgccagcaacagaaaggttggtgaagattacttatcaatgtcgcaagtgcttttccagattttccgaagaagattatcaattgattgttaatcaataa

SEQ ID NO: 48510 - DNA, 1227 bp, Acinetobacter baumannii
atgagtaccacacaagagccggggttttggtcccgcttctggtcacgattgactggaaatacacaattaaaaaaaggcgattcgtcttatccatttgatagttatttgtcacccggtggatcggttgtcacaccagaaacagctttgaaactttccgcagtctgggcgtgtgtaaaattaagagctgaaactatctcaactcttcctttacagttgtacgacaacaataaacgtcttgctactgatcattacctttaccgtattttgcacgattcacccaatgccgatatgtgtgcaagtgagttttggcaagttcaagttgcttgtgttgacttatgggggaatgcatacaaccttattacaaaagactcaagcggaaaagtaattgctcttgagccacttttcccgagtggtatggttgtaaaacgtaatgatttgggagcgattgattttcattacactgaaaatgggaaaacaacaacctattcggaagaccaaatcttgcatttcaagggttttactcttgatgggcttgttggtttatctgctattcagttttttgctcaaacgattggaatgcagtttgatgcaaacaaccaagctcaggactggtttaagaatggcttaaaagttgggggcttccttgaaactggggagcaaactttaactaaagagcagcgtgaaagactaagaaaccatttaagtgagttcagtaaacctgagaatgctggtaagtacatggtgcttgaggctggaatgaagctttctggctcaaatagtattcgaatcaatcccgttgatgcccagttacttgaatctcgttattttggcattgaagaaatatgccgcgcctttggtgttcctcctcagttaattggtcatacaaacaaagcaagctcatgggcttcaagtcttgagcagactaatagggggtttttgacctattcgcttaaccctcaattagttagatatgagcaaacaatcacaaagagattgtttttgccaagtgaaaaatacaagtaccggccaaaatttgcggttgaaggcttattacgggccgacagtgctactcgctcaggtttctacacaaacatgattcaaaacggtgttatgacgcgtaatgaagtgcgggatttagaagacttggcgcctttaccgggtggcgatgagctaatggttcaaatgcaaatggtcggattgaaagatcaagggaaaaccagtggatag

SEQ ID NO: 48511 - DNA, 663 bp, Acinetobacter baumannii
gtggatagacttaaactaactttagaaatcaaagccacccaagagggtggctttttttctggctacttagctgcttttgacaaccttgattctcatggggacatcatccgcaaaggtgcatttgccaaaactcttcaagagtggaaggcaaaaggcaagtacccagcaatcttttgggatcacaacccatctgaaccaatcggaatttttaccgaaatgcgtgaagacgaaaaagggttgtacgtagaaggtcgtctcttaattgacgatgtgccgcgagctaaagctatttatgcgctgatgaaggttggcgcgattgatggcatgtccattggctatatcaccaagtcttataggcgcgatccagactcactaatccgcgaactgctggaactggagttagtggaaggttcaattgttgcctttccttccaatccagaaaccctaatcagttccgtcaaatccaaattacaagatggcgagctgccatccctaccagaatttgaaaagttcctgagagagtcaggattttcaaaaacgcaagccactgtcatcgctagtaagggtttgcgtcatcttttgagcgagtcagagggtgaaaacgaaaaagcgaaatcaatttcaaatgccttaaatattttacgaggaatcagcaatgactga

SEQ ID NO: 48512 - DNA, 1173 bp, Acinetobacter baumannii
atgactgaaaaaactttagaacaactcgctcaagagttccaaaaacacgttgatacagttaaagaaatcgccgaagagttcaaaggcaaacaagcaaaaagtgaagaaatctcacaaagcgccaaagataaagcggacgaagctttaactacgttaaatgaagttaaaaacaaactgacagaactggagcagaaagctgcacgccgtggtaatggtgatgttgaaaccaaaaagcaaaccatgggtggtgagtttgttgaaactacagaatacaaaaatgctgcagaaagtcagtatcgtggaattcagcgtgttgagctgaagaacacaattggtacgactgaggttggaaaaattattcctgccaccaatcttggtttgcagttaccaaaccaaatgcgccttaccatccgcgacattttggcaggtggcagcatgagcgggaatctcattgaatatgttcaaatgaaagaattcaccaataatgcagcagtagttgcagaaggtgcaaacaagccagaatctggaattacatttgaagataaagatgccaaagcagttgtaattgctcactggttaaaaacgaccactcaaatgttaagtgatgcaccagcattgcagtcattcattgacaacattttgcgccatggtcttgacatcaagcttgaaaagcaaattcttgctggtgatggaaccaatggcaatatgcttggcttaatccctcaagcgactgcttatgctccgcctgcaggtgctccagcaacgccaaacatgtttgatgtattgcgttttgcaatgcttcaagttgtattggccgatgactttgcaaacggccatgtactcaacccaattgactgggcgttgatggaaacgcaaaaagatgcaaacggcaactacatcatcgggaatccgcaatcacaagcggttccaacattatggggcttgcctgtagttcaaaccgctgcaatggatgcaggtaaattcttaacaggtgcattcaatactgcagctcaatactttgagcgctggggtgctgctgtgcaaatcggtatgcagggcgatgatttcacatcaaataaacgtaccttacttgctgaaacccgtggagcattagctgtttataagcctaaatcgcttgtatatggctcctatactcctgctacgggtggttaa

SEQ ID NO: 48513 - DNA, 177 bp, Acinetobacter baumannii
atgaaagaatatgaagttttacgcccacactttggagataaagactacaaagagggcgatattcgcacagcagatccaaacgtggtaaggcatttggtagaaaataaagttttacgtgaataccaaacaaaagttgatccaccaaaaccagctacaagacggaataattcaaaatga

SEQ ID NO: 48514 - DNA, 288 bp, Acinetobacter baumannii
atgatcacactcgaacgagctaagttgcaatgtcgagttgatcacgatgatgaggatgtgctttttcttgaatggatagctcaagccgatgaagaaatagcgatcgacatcgaccgaaaaattatttcaaatgagtcagaaagaacttctgacacggacattgtggactgcaagaagttagataatgcccggttgatatttattgagtataagtacagccgaagtctagaaggaaaacctcaagcatattgggatattttgcagcctattagagaaatgggggtctaa

SEQ ID NO: 48515 - DNA, 357 bp, Acinetobacter baumannii
atgcccagcattactccaaaactaaagcaccgcatcactattcaaaagcccatccaaacccaagaccaaaacactggaaaattaatcacctcatggtctaattttgcaacaatttgggcagaagttactgacctttcaacaagggatgttattgcagccaaagcagccaatagctcgatacaagcccgtgcaaaagtgcgatatagcagcgctacaaaacaagttgatagcacaatgcgggttctttttgatggttactattacaagattgatggtaaccctatgcgagatcccgactcacgccgtgagtatttaactatcaaccttgcaacaggtgataaagcatggaatgggtga

SEQ ID NO: 48516 - DNA, 516 bp, Acinetobacter baumannii
atggctaagatcagtattacagacttaaagcagagtataactactctgaacgttccagttaaaaaaacggttatatggaatgttgaagtaacagaaagtaatgttgcttcacttaaaaaattgaccaaaaactcattgttagaacttggtgaaacggttgaacttgaagctgatgtttttgttaaaaaaatgagctttaaggagagccgagaggtttctaaagcagtcgagtgggagtttaactataagaatccagaggattcaaaagttaaaagggttgactcaaccctaatgcaatcggctcagttgcttggttcaatttgctctgatcaaaagggaacgcctttcttctcaagtgtgaacgacgtctataaagccgagccaagtttgatcaatgcgctatatgcagctgccgatgaagttaataactttatgggaaagtcacggaagaagaccttgcagatagagaactctttgccgagcttgtcctcaacggaatcggtggaggctccttag

SEQ ID NO: 48517 - DNA, 216 bp, Acinetobacter baumannii
atgttttggagagcctatcgtcaaaaatacggctctcttaacttaggtcgccggctagagcaaagttttggtagttggatggctcactacacaggatttaaggttaaagaaggtacaaaagtagatccttatatatttatgccacatgaaacacctccggatgatgacgaagaattgtcattagaggagtattttgagaagtatcatagtaactaa

SEQ ID NO: 48518 - DNA, 294 bp, Acinetobacter baumannii
atgctcggatgtgggaaaacagaaaaagaaaaacttgatgaagaaaggaaaaatcttgatttgcaagtacagaaattggttaaagataaattaaaagatggtgaaacagctaagtttcgtaatcaatgggagttgtgcggtgaagttaatgctaaaaatagttttggcgcttacaccggctttcaacgttatatagttaccaaagaaaaaatatattttgaaaatgagtataactctgacccaacctctatagctgcattcaatcaagtttggagtgttgactgcaagcagtaa

SEQ ID NO: 48519 - DNA, 3594 bp, Acinetobacter baumannii
atggccacaacatcacttggcagattaacacttgatttaatggtgcaaacagccagctttactgagcctttatcacaggctgaacgcaaagcgaagtcagcaagtaaagggattgcagattcatttgatgttgcagctattgcgataagtgcattgggtggtgctattgctgggttatcaattgcagagcttgtgaactatagcgacagagtcattcaggcaggtaatgacatacaaaagttttcgaaacttgcaaacagttctgtgcgggattttcaatattatgcaaagggtgccgaaactgctggtatctcaatggaatccttcgccgataaaatgaaggatatgcaggatcgtataggcgactttcagcaaacgggcggtggtcctcttgcggatttctttgaaaatattgcaccaaaggttggagtaacaattcaacagtttcagaaactttctggtcctgatgcgcttcaattattttacaactcattggaaaaagctggtgcttcaacgaacgacatgaagttctatatggaagcaatcatttcagattcttcattgcttattccattgttagaaaatggtggagaaggttttaaaaaatggggcgatgctgctgagcgtgctggcgcaattatgtctgacgacttagttaaaagcctagctcaagcaagagaaaaccttcaattgatggatttgcaatggcagggcgttgaggcaagacttgtaaatagtgttgttcctgctatcgaaacagtgatagagaattgggacgacattaaggcggttacgattgcagttgctgctggtattgctagtcgatttgtcccagctttggttatggcgacctatcaattaggacaaacagcattgtttgcagtgcgtgccggtgtgggtttagcaaacttcgctagaacagccggcgcaacaacaagtgtaatggcattattgggcggtcctgctgggattggcatgcttcttacgcaattggctgtagctggtggcgcctattatttgatgtctaaacagacgcaagatgcaactgatgcacttgaagatcaaggtcttgttgttgatgagctaagggaaaaatataaaaaattaacagcatcgcaactagctcttaaaagtatcgaagctggagaggaagttgataaacaaactaaacaattaaaaagtttgtttatcgctttggaacaatttgagaacgacttaagagttcaaggagacactaaacaattaactggtattcaaaactatcttaagagtttgaaagaaggtggagataaagcgaaaacagctttctctgatctccaaaaacagggattggttagcgaaactactcttaaatttattgctgaattagatacaaaaatcaatgaggcaaataattctatagatcgtcaaaaagagatccaaaatttagttaaaaacgcaactaatgacacaactaaggcgcaacaagatcaagcaaaggcagttaatgactctgcaaaagcatggatgtctttaacacagaaacaacgtgactacattacccaagccaaacaagatgtgcttagagaaggatatatcaagacccttgtaagagaaggtataggagttgataaggcgaatgcatatgctgatgcacagatcgcagcaaatggagaaaatgcttttaaagcaccattgccaaaggatgtgctacttgctgcccgcgaaaacttcaatctaaaaaattatacttttagtaaagacgagttggcggcaattgctcgtgcgcaaggcattgcaaagacaaataattttgctcaaatcgaaagtttatatggtttgcctgctggaacacttgccgcattgattcttcaagaatctggagctgatgccggagcaagaagtcctaccggggcaattggtcttttccaaacaacgagtgtgtttagaaagcaatatggacttaatgccaaaagttctactgaagaaattgcaacagcagcagctaaagacttatctaaacatttggctgattttggagccatggataaagcactcatggcctacaatgcgggtgcaggtggcttaagaacttatttgagaggtggtctatcagatagcaagcgtaaagaggttgctggttacgcaccgggtttccagaagtggttcgccggagtatctggaaaatctactgtagacaattcaattttaatgcctacacaggcagatcaacttgaattaattaataaggcagctgaatctcaaaaagccattgatgatgctaaaaaagatgtcgatgctcggtattacaccgaagctcaacgactagctaaggagcatcaagataatgtagataagatcacatttgcttatggtggaactccgcagctaaaagaaaaacttgctcaagaggatgctttatatgccgctcaaattgcgaaattaaaagctgaaaaagaacaggagtataaccaatacttctcttttgaaactgatcgtataaagcaaattgaacgtgattacgatattcaaaagcaacttgttaatgcaaatgttgagtatgacacaacaaaaaaagcagaaattactgcagctttggagcgtcaaaaacaacaggaaatagcttgggaaaagcttgctcaagaacaacgcttaagtgatgcgagtgcatttttaagaactgaactggaaaatatgcaaatacgcttttcattcgagcgttcgcagattttacttaattcacaaatctctaaggacgaacagcaaaagcgaattgcgttactacaagctcaagagcaattaggaaagttagataaagcaacccaagcgagcatggcgtgggatagcactaacgcaagcctaaatggctcaagtgatctttatcaactggatcaagaaagacttgggcaaacttcacaatctatggcccttgcagaagcacaagcagctctttcggagtcagccgcagaacaagaggcaatttggcaagcacataaagatcgtatgtttatgatcgatcaaaattatgagcttaaaaagtcggcacttggagcaagggttgcttctgaaactttgggggggatggctgatttaatgggtggtttaatgggtgaacaatcggcagcctataaaaccatgtttgccatgtctaaagcatttgcagttgctcaagcaattatgaatgcaccacagacttactcaaacgtttatacatctgcttcattaataccaatgatcgggccatacattgcacctgttttggctggtgctgctgtagcagtacaagttgcacaagcagctcagatcaaatctgtaaaccttacaggtatggcgcacaatggtattgatagtgtgcccaaagaggggacttggttgcttgatggtggtgagcgtgtattgaatcccaaccaaaacaaggaccttactaactatttgaacaatcaaaaagatagcggacctcaagttgtggtttacaacaacagtaaagcaaatgttgaaacgaatgttggtgatgacgggaaggtgtatgtgactattgatgatgtatacaacccaaacagtaagtacagccaagcaatgcaggaaagtttcaatatctcaagaaacagggggtaa

SEQ ID NO: 48520 - DNA, 462 bp, Acinetobacter baumannii
atgctctgcccgttgttaaaggggtatgactttacaccgggcagcaatttgcgagagcaagaaacagaagggggacctccaagacaggtccctttttttgtaggagcttggcacacggtaaacgtttctatctctctaaataatgaggaagaaaaggagtacttctgggctttttggcgtgacaagcagtacaaacctagtaactggctttggaggctagcattagacaatgcaaggctagaggaatgcgagtgcagatttgttgcagattcgcgtccaaaagaagtagagcgagatggaaaaatccttcaactcagttttcagctaagaatcaagcctattcaccgtgatcatggaaatgacagggacattattgaggcttggcaaaatggaggcccggcagttataggcacaattgaaaaagtaccaaatgaatggttcccgaacgctacaggagtttag

SEQ ID NO: 48521 - DNA, 510 bp, Acinetobacter baumannii
atgattattactgatgaaatgctagcagttttagaccagtcatccgggccagtcggcttgcttgaatgtatcgaagtatcacaccctaattggcctcgtgtacttagatatattgtgaatagtagtgatccgatggatctaacacatgaggatgggcagacttttacctattcttttgctcctctcaatattacacggagtaatgaagaggagaacttggatcaaaaaattacggcagctatcggtgatgtaggatctgaaatcccagacttggttgatcttgttttaaaagactcggttcgaataccccctatattgaattatagagcatatgttatcggcaaatatgacctgccgtgtacatatgctaaagggcttgaagttattgtaattacaagggattggaaaggtactagctttgaggcgcaagctccgggcttgaatgattcaggtaacggtgaaatttattctgcaagtacagatccaagtcttgaaggattttactcatga

SEQ ID NO: 48522 - DNA, 396 bp, Acinetobacter baumannii
atgaatattcgtcagcttttttattgtgtctatgatccagaaaatttccattgcgtgcatttcgtcatcttggccgcaaaggtcatttttgagaaagattacacgccgtgtttcttgggcttaaccggaccattacaggaatcaataaaaacatcacgtaatacggttcacagaaacaagcacatcaaaaagccggaagacggctgcattgtcttaatgacttacctagatcaaagctcccacgtggggcttttttttcagggtcgaatttttcatttgatcgaacgcgggccgcagagaatcactgtagagcaggcgaatagtatttttagtcggattcgatattatgagccaaatttatctttaccagaactctctcaacaagaacgaagttga

SEQ ID NO: 48523 - DNA, 2835 bp, Acinetobacter baumannii
atgagccaaatttatctttaccagaactctctcaacaagaacgaagttgatgtaatcgatacagataatattctgtttgaatttcttaaagtaaaaaaacaatttcctcaagcaaaaatttatctcggtaatccttgcccggaaaatgacataacaccatcaataaaagataaggcatcaattgcgcgcttaaccgaaattgcagatgactgcagtattgtttgtcatccgggtgaattaagctcatttgtgacatgggttgcaacaaagattctgggttctgctgtttctgctttggttaaagttcccaagccaaacatgagcaataacggctcaatgtctggatcaagtaacaataacttatcagatccagagaaccgccagcgtttaaaacaacgtatacctttcattttggggcgtgttaaagctattccagatctttttgctccagtcatcaaatactttaaagatggggtcgaagttgaagaatctttgatgtgtatttgtgaaaaccccgttcaagtttctaacttcaagtcgggcgacacaccgatacaagagatacccggtacaagcctttcagcttatggacacaatcaatctttaattgggaatgaaactatatttaagtggggtgatacatttgaccagccgccagttattgcccgtcaaaatgcttctattaacggacaaactcttttgccgccaaatagcacacgtattgaagcgagtgacatttatttccagtatccaaatttaattaaggcaaataatcaaggtacagcagataaatttaatgcgtttgatattaatgactctttaattattagtggggcgaattttggtattaatgacttggctattactgggcaagttgatgtagacaataccaataatacattttcgattgcttcaaaccaaaccgttgtagactttcaagattaccgcaaaatcaatgtaacttccttgcttgtaactgatcctgtgaatgggcaactagatcttgcaggtttgtatgatattgacacaattacctatgtgtctggtgtttatacgattcatttaaagaatccagtttcaacaaactcaaactttgcaaatcttaccgaagttttaacggccaatttatctgcaaaccttacggctaattcagcaaacattttcttggatggtaattatgttgtaaccggtgtagatataacgaacaaacaaatttccttagccactccgagtgctgtgaatgatgactggaataaacttgcggatttaacagatcaaaaaacaggtgttggaactattaagttaagaggtagccaagaaaattatattggatggtttacgattgagtcagcaaaagctactgggttgctactcaactttcaggcgcttaatggtatttatcagggatccgatgctaagtttgtagatatttatgttgaatatcagcaagtattaaacggaaacccaacaggcaatgtttataaccaaacaatacgcctgaatggtaaagcgaataaccgcgatagtgtcggcggctcaatgtggattacattgccatttactggtgcagtgcgctttcgagcgcgccgtacaaatgacaatggtgacgctgtagatctatcagacgaaactaagttttataccgcatacgcatatcattacttatccaagcttgtatatgacaaccgagttttaattcgtcaacgtacacaagcaacacgtgcagcaacggccattgatagccgaatgacaaactgtatagcagaaagtctggtttactcataccgtgatggtgttaagtcggatacccgcataccttcaagatttattcctgatctagtaattgaattagctttgcataagttgattggacgaagaacattgaatgaagtaaatgtcgaaaaactgtattcagtttttgatgaggttgtcgattatttcggctcagaaaagatggctgagtttaattacacaattgatgatgctaatcaatcatttgaagagattctaagaatgttggcgggcgtctcttgctgtaatgatcgccgtctaaatcgtcagatttactttgagcttgagcgggcgggtcgagagccttatttattattcaatcatcgaaataaaaaggcccgtacagaagttaggacaatccgaacaaaaccagaaaacaattatgacggtgttgagatgacatacgttgatagtgaagctggatggattgaaaaaaccttgaaaattcctaatgaccaaatcactaacccgaaaaaaattgaaggctatggaattgtttataagcagcaagcacatattgttgcgtggcgtgcttggaacaaaattcaatttcaagcaattaattgtcgtttttcttgttttgcagaaggtgagttggttggtagtggtgatccagttgcagtggttgacgatactcgtctcgcaccaacattctttggtgatccttcacaagcgattttatcgggcgaggttttagcttggaatggcttaaacatcacaggttcgcagccttgcaagctatctaccgagcattcattcgtaatccatttgcagcttaaaagcggatatatagacatcatccctgtgacacagggtcaaaatgattatgagtttgtgcttgcacggccaccagttgaggcacttgtaacagaaggtgaagttaagacagtttattcactttcaactgatgatcggaaaaaggacgatctatttctcattactactaaacaaaggtcaggtgtctttgaaaatgaattaacactcgtaaaccttgatgaccgttactatcaaaacgatagcgacataaaaaacaatcttgtttaa

SEQ ID NO: 48524 - DNA, 2037 bp, Acinetobacter baumannii
atgcctttaacaccagaaactttccaaaatttggaaagggatattgaagatacaggcaaggctgtaaatacagacgcactaattgagccaagatatggtatcccgtttaaatcattaccgatgctttccagactttttgaagagatgttgggagtgggatatgtttcagtagatgatttgaaacaggcaattgaagttgcggcagcagctggagcgggcgaaaacgggtggatagatacactggtgctgactttaactggtgaaaatctcagggaatttaataaaaaaactatcagtacattagattgtattgatgatttagctactacattgccatggccgggccgcaccgtaaatgtacgatctgtgataaaagataaacatttagggggggggacttttgtatttagtgctgatagttcaaaagttccagacggttatattgttgttgctgcaaatggcgggaattgggtgaaaatcacagttgcttttccaacaattgatgattttggcggtctgggtgacgacccaaattatgacgatgcggacgcatttattcgatgtgcgttgagtccatacacaggttcgaatatttatcttgctaacagacaagttgaatatcgcatcaataaacaagttgattgcaagggtaaagggattgttggaggtggatttagtagacaaaatgccactgcgtatgcaatgaactctctaaaggtaagaccaggtgattattcaaattcaaatacccttcttaataatgtggcatttattaacgtgggcgccgaagtaagagatttgcaattagtaagtgagggtgtttcagaaaatatttcgggtttaaaagttgatggttataacttcacactttcaaatgtaaatatttcaggcttttacaatcaagtatatttatcgaatgcaacggtttcgttccgtgtccaaaatttgatgtcaattagtgcatcaaatgcagggttttatattgctgatgttgattctaaacaaagtactactgcatattttgacaactgctcatggcaatggggtaaataccctgtgctgtttgctaaagaagcttatcagtgcgtctttaataatattattcttgaatatatgcagtacggtttaacagcgggtatctggtcgaattgctcattcaatgcaatttgggcagagcaaacaagagatggtgtagctcgtgactggcttgtaaacacgacctatcaacaaacatttaattgcacagttaataatctctacattagaacgccttggctaaatcgagctgacacaaccgctttggctgtatcagataatattgggggggttgtaattgataaaagtcgaattactttaagcggtgcgacgggtgcgaaaatacaactttctccatctggtttagcaacactttttgctaattggtatggtggtactaatcgaagattattaattactactcaaccgactgcggcagattctgggtataaaacaccaatccacatcaatgcaccgaatagcgaattgtattttggaaatcaggatgaaacatcagttgcaagtgtagtatttaagcgagtaattggcgctactgctacaaatacaccttatattgcgtcagactcgtggactaaaaaaattcgaaagtggaatacttacaatcacgaagtatcaaaagtcgggcgttttattgcaccgatgatgctgacttatgatgtcaactttactacccaacaaaataacgcaggctggtctatctcaaaagagtctacgggagtctatagattgcaacgagatgcgggcgtaacaactgaattagcaaatccgcacatttttgtttctggcattttttctggaacgggattaggtggtggaaaggctatattgccaccgacgctacaagcaattgaagcatacagtgggagttggtcgtctttcaaagttgcagctggagtcaagttgttttttacagatttgacaggtgcgttagttgatccaatgcgcttctcagtatcattcacactagaatcaggaatttaa

SEQ ID NO: 48525 - DNA, 225 bp, Acinetobacter baumannii
atgaactacgcagatatgtatgtacagggtgcactgccaaagattgaggcagacattgcacaaaacggagtatgtactctttattcaaagatgactttaaatgaagaaacaacaacggccatttcagatctacttcgtgaaaaaggcttcaatacggaagtatcaattgaagatgatcccgattttattggtagtcgatataagcttgtaattaaaaaagcgtaa

SEQ ID NO: 48526 - DNA, 267 bp, Acinetobacter baumannii
atggcagacaatcagcaaattatagatacatcgaccgctttggcggccagtaagggtgcaacatacgggggaagtgtggcaggagcagtttcggcgtggatcgggtcaatcgatttagcattttgggtcagtatcatcattggtttagctggttttttaatgaactggtactacgccagaaagaaaaataagcgcgatgaaattgcacttaaagcctatttagaaagcttggaaaataaaggtgactgtaatgtcaagcaagactaa

SEQ ID NO: 48527 - DNA, 510 bp, Acinetobacter baumannii
atgtcaagcaagactaaatatattgcagcagtcttagcagcttcggctgctttttttgtgggcgtaaaaaacgatgaagggtttacatcaaagccagtaattcccgttaaaggggatcggccaacacagggccatggttctacatttaaacccgatggctcaccagtaaaaatgacagatccaccaattacacgtgcgaccgcagataagtggttgcgaaatgatgtggccaagcgtgaagtcgcgtttaaagattcattgaagggcgtgaaattatcacaaactgaatatgacctataccttgatttcacgtatcaatacggtgtgccaacattcgcaaaatcatcaatgcttaagcatttaaaggctggtcaatataaagcagcttgcgactctttacttaaatataagtacgttgcaaagcgcgattgctctgttcgtaaaaacgggtgttatggcgtctggaccagacaagtagaacgacacgcaaaatgtataggagcgcagtga

SEQ ID NO: 48528 - DNA, 369 bp, Acinetobacter baumannii
atgtggattgtatttgctgctaaatattggcgagaaatcattattgtgtttctcgcttttttattggccatatctttggccgtactcaattacaaaactggtcagctaaaagaagctgaacaaaagtgtcaatctcagatccaagagattgagcgcaagaatttgaaagctcttgcagaaaagcaaaatcagatcaataaagtgagcgcagactatgaaaaagctaaagcagagcaaagcactaaagtcgaaacagttacacgtgaagtgcaaaagatcgtggagcgtcctgtttataagtctagctgtgttgacgatgctgggatgcagcaactcaatgaactcattaaagccggtaataccagctaa

SEQ ID NO: 48529 - DNA, 195 bp, Acinetobacter baumannii
atgcagcaattaatgattatggtcacagaagttggaaagcttgagcacacatgtaatttgcttgctgaggtaaacaaaggcggtaaagtcataaaggttttcgactacaacggtaatcaattaccaatcaacattgatggaaccgtgacatttaatagacgccgttgggaattaccatctaaagttgagctttag

SEQ ID NO: 48530 - DNA, 1365 bp, Acinetobacter baumannii
atgtccgttaataaacaaaccttaacaaaatcttttgttgattcactccccttcacggcggcaggtgaacaggttttttataaggatgacaaattaactgggtttgctttacgcgtaacgaaaagttctaaaagctatattgcggaaaaaaaattaccaactggtgagacatgtcgtgtgactatcggcaagcatggtatttggacagtccagcaagcacgcgaaaaagcccaagaatacttgttaatgatctcaaaaggtatcaatcccaacaaagataaacgagatagtaaaaatcagcttcttgcagaaaagcaggacctaaaactaataccaaccgttaaagaagcatatgaaagttataaggctaaaaaagacttaagcgccacaacacttgatgcatatgatcgatgtgtaaatgattactttgaagattggcaaaatttaaaaattaaccaaataacaagtaaagctgttatggatcgccatacagttttatcagaaagaagtagagctcaggcaaatttggcaatgaaatttttctctgctctatataatttcacgcttaaaaccacagttgatagtagtaataataagctgattacagaacccaaccctgtactaacaatttacgaaactaagacttggaataaaattaaacgtagaaaaaactatattagatctgaacagcttcatgactgggcggagggagttgccagacaatattggccgggaaatcaaaatgacaaccatctcgcttataccaatcaagattttttatttcttttagtattaactggctttagacgaaatgagggtgagggtctggagtggtcaaaaattgatttgaagtatggcactgttcttataacagataccaaaaatggtgaggaactgttattaccagttggggaaatgctgtggcatattttaagagagagaagaaagatgaatccggatgggaaatatgtgtttccggactttcggaacaagtcgcatattatagataaacgtcatgctcgtgaagctgtgactgaaagcactggtattgagttcacttttcatgatttacgccgtactttcagtacaatcgccaatagcttggctataggtagttatacaattaagcgcctaatcaaccacacaaccgaagatgatagtcaagatgtgacagacggctacgtacaagtaagttttgaggatttgcgaaaagcaatgaatatgattgaaaaagtcatcatttcagatgtggcaaaagagttgattctaaatagaatttatttccctaaaaacactcgagatttagagaaaaagtttaaaaatcataatgagttgattgttcaggcggctaaagctcaactttag

SEQ ID NO: 48531 - DNA, 384 bp, Acinetobacter baumannii
atgtctaagcaagattacgaaaatggattaaaagtacgcacagaagtgatgggagaagcttttgtaaaacgtgcccaagaaaataccgtgccctttacccagcctttacaagactggattaatgaacatgcatggggatcgacttggcaacgtgaaggtgtgctgccacgtaaatatcgctcattaatcactttggcaatgttaactgcactcaaatcaccaacagaactcaagggtcatgttcgtggtgcactcaacaatggttgtacagttgaagaaattcaggaaactttattgcatagcctgccatattgcggtgcccctgctactcaggaagctttccgggctgcgttagaagtcattcaagaatatcaacaacaataa

SEQ ID NO: 48532 - DNA, 1296 bp, Acinetobacter baumannii
atgcaacttgccgatttaagaatagcgattataggtttaggatatgtaggcttgccattggcagttgagtttggcaaaaaagggccagtaattggattcgatattaatcaaaatcgtattgatgaattaaagagtggaaaagaccatactttagaagtttctccagaagagcttcaaaaagcagaacaattaagttttagtgcaaacttagatgatttaaaaacgagtaatttttttattgtaacagttcctacacctgtggaccaagttaaccgaccagatttaacccctttaaaaaaggcaagtgagacagttggtcaagctctaaaaaagggcgatattgttgtttatgaatcaacggtatatccaggtgctactgaagaagtatgtattccaatattggaaaaagtatcgggacttaaatttaatcaggacttttttgcaggatatagtcctgagcgtattaacccgggagataaggttaatacactaaccaaaattaaaaaaattacgagtggtagcacaccagaagtagctaatacggtggatgcagtgtatgccagcattattactgcaggtactcataaagcttctagtattaaagtcgcagaagcagcaaaagttattgagaatactcagcgtgatttaaatattgctttggttaatgagctatcggtaatttttgaccgtattggtattgataccttagatgtgttggaagcagcgggtagtaagtggaacttcttacctttccgtcctggtctggtaggtggacactgtatcggtgttgacccttactacttgacccataaagcagaagaggtaggttatcatccgcaggtaattcttgctggtcgtcgtattaatgacaatatggcgcgctatgttgctcgtaatacgattaaactaatgcttcaaaatggtattgatgtaccgcgctcaaaagtaggggtattaggtgtcacatttaaagaaaactgtcctgatattcgtaatagtaaagtagccgatttaattaaagagctcgaattttggggtgcacaggttgtggttgcagacccttgggctgatgcagaagaagttaagcatgaatatggtgttgagcttggtaccgtgaatgctcaaaatccagttgatagtttgattgtcgcagtaggccatagtgagttccgttctctttctgccagtgaattacgtagctacgtaaaagctgaaaaaccagttttagctgatgtgaagagtctttttgaccgtacacaaatgtcagatgttggttttactgtattccgtctctaa

SEQ ID NO: 48533 - DNA, 951 bp, Acinetobacter baumannii
atgaaaaaatttgcattaattggtgctgctggttatatcgcaccgcgtcacttaaaagcaattaaagaaactggtaatactttagcggttgcgatggacgtaaatgactctgttgggattatggatagtcattttcctgaggctgagttttttacagaatttgaagaatttgaagcatatgtagaagatcaaaagttaaaaggtgaaaagctagactatgtagcaatttgctcacctaattatttacatgcgccacatatgaaatatgctttaaaaaatggtatagacgttatttgtgaaaagccattagttttgaattcagaagacttaaatatgttggctgaatatgaaaagcaatatggtgcgaaagtaaactcgattctacaactacgcttacacccgtctattattgcactgcgtgataaagttcaagctgccccagccgataaagtatttgatgttgacctcacctatttaacttctcgtggtaaatggtatttaaagtcatggaaaggcgttgataacaaatctggtggtgtagcgacaaatattggtgtgcacttctacgatatgttgcattttatttttggaaaaattgtaaaaaatgaagtgcattatcgcgatgagaaaactgcatctggttatttagaatatgagcgtgcacgtgtacgttggttcttatcaattgatgctaataatctaccagaaaatgcggtgcaaggtgaaaaattaacttaccgtagtattactattgaaaatgaagaacttgaattctcaggtggttttaccgatttacatactcagagctatcaacgtgtattagaaggtaaaggctacggtgttgaggagaaccgcgcggcaattgaaacggtcgaggtgatccgagtttctccaattattgaaaatcctgaaaatccacatccactattagcaaaggtgaaaaaggcatga

SEQ ID NO: 48534 - DNA, 579 bp, Acinetobacter baumannii
atgagcttttatcaacatgaaactgcgatagtcgataacggtgcacaaattggtgaaggttcgcgtgtttggcattttgttcatgtctgtggtggggccaaaattggcaagggtgtttctttaggtcaaaacgtatttgttggtaaccgagttgtaattggtgatcattgtaaagtccaaaataatgtatcggtttacgataacgttactttggaagaaggggttttttgtggcccaagcatggtatttacgaatgtttataacccgcgttccctcattgagcgtaaagaccaataccgagacaccttggtaaaaaagggcgctacgcttggtgcaaactgtaccatcgtttgtggcgttactattggtgcttatgctttcattggggcgggtgcagttgttaataaagatgttcctgcttatgcgctgatggtgggtgtacctgctaaacaaatcggttggatgagtgaatttggtgaacagcttgatttacctttgcagggacaagctcaggctatctgttctcatacaggagcggtttatcaactcgatggaacgacactaacaaagcaaggttaa

SEQ ID NO: 48535 - DNA, 1080 bp, Acinetobacter baumannii
atgattgactttattgatttaaaagcacaacaaaatcgaattaaagataaaattgatgctggtattcaaaatgtattgacacatggtcaatacattttagggccggaagtaattgagctagaagaaaagctagcttcgtatgtgggtgctaagcactgtattacttgtgcaaatggcacagatgccctgcaaattgcacaaatggctttcggtattgggcctgatgatgaagtgattactccaggttttacttatattgctactgctgaaacagttgcactcttaggtgcaaaacctgtatatgttgatgtaaatccgaagacttataatttagatattgaaaaattagaagctgcaattacacctcgaaccaaggctattattcctgtgagtttatatggccaatgtgcagactttgatgcaatcaatgcaattgctaaaaagtatagtatccctgtaattgaagatgctgcccaaagctttggggccacatataaaggtcgtaaaagctgtaacctaagtacagttgcttgtacgagtttcttcccaagtaaaccattaggttgttatggtgatggtggcgctatttttaccaatgatgatgaactagctaaagtgattcgtcagattgcacgtcatggacaagataagcgttatcaccatatccgtgttggggtgaacagccgcttagataccttgcaggcagcaattttattaccaaaattagaaattttggatgatgaaatgcaagcacgtcaaagagtagcggaagtttataaccgactatttaacgaggtagggattcatactacgccgtatattgaagcgcataatacgagtgcatgggcacaatatacaattcaagttgataaccgtgcagaagtacaagagaaattaaaagctcaaggtattccaacagcagtgcattatccaataccacttaataagcaacctgctgtagcggatagtgacattcatctccctattggagatgcgattgcggagaaagtaatgagcttacctatgcatccctacttagctattgatgatcaattaaaaattgttaaggcttttggttga

SEQ ID NO: 48536 - DNA, 1353 bp, Acinetobacter baumannii
atgaggttaaatgctcagggaggctttttaaaagccgtgtcagtcctagtcggaggtacagcttttgctcaaggtttggctataatagctttgccttttataacacgattatatagtcctagtgatttttctatatttgctgtttatgcatctatattaggtattctgacagtagctagctgtttgcgttttgaaattgctataccaattccttctgaagatgaggaagcagcaatattagttatattggcattaattagtaatcttgctatcagtatattaactggacttttaatttgggtatttcatgtagaaattatttctttattaaaaaaacctaattttaatcatataatttggttaatccctttgggcgtttttttttcaggaatatatacagcgcttcaatattgggctacccgaaagaaaaattttactgtaattgctagaacaagagttgtacagtcgataggtggggtagctacacaaataatattggggttttggggtacagcagctttggggctagctctcggtcaaattattaaggtttccttcgggatcggaaagttagctaagaacttttggaaggaatcagaagtttttataagaaatataacaattataaaattgtataatgtttttaaaaaaaatgatcaattccctaaatattcaactcttgattctttagctaattctgctggagctcaacttcctataattattattgctacacttgctttaggttctgaagctggttatttactgatagcaatgcaagtattggcggtgcctattcagttaattggcggggcagtttcgcaagtatatttagctcatgcccctgcggctgtgcaagaaaaaactattgctcaatatactataaatatactggaaaatttattcaaatatggtgttagtggtctaatttttataggtctagttagtcctatcttagctaaatatatatttggctacgaatgggaaaaggtcggtttaattataagctggatgataccgtggtttgctttccaactaatagcttcacctatatcaatgattatgcatattgttggtcgtcagaaacaaatgcttttattgactctaacaggttttatattacgtataggtatattatatggacagttctatttaaatcctacctatttattagaggcatatgcaatctcaggagggatattttatggaatttgttatatcgttttttctaattctgctggccttgaagttaaagatcatattctattggttaagaaagttggtttcttattaatatttataacttcattgggcgtaatggtgaatataactttaagagtgttgggtctatga

SEQ ID NO: 48537 - DNA, 567 bp, Acinetobacter baumannii
atgaaaaaaaaacttcggaaactaatctattttatattgccttgtattcgtctatttttaaatttgttttttaaaagaaaatacttagaaggacgctttttttctaaaagtttaagtggctatgtttgggctgtaagatctatttgggtgaaaaatatactgagattaagcaagcctaccccttttcctacggctttaacttgttcgatttcaaatccttataacattcactttcatccagatgatttaaataattttcaatcacctggaacgtattttcaaaattttagtgctcacatatatattggtaaaggttcttatattgctccaaatgttggaataattacttcaaatcatgatcttgctgatttggaaagccatacagaaggcaaagatgtagttattggtgacaaatgttggataggcatgaatagtgtaattttgccaggtgttgttttaggtaatggaacaatagttgctgctggagcagtcgtaacaaaaagttttaaacagggtaatatcgtaattgctggagtgcctgcaaaaattattaaggagattaagtaa

SEQ ID NO: 48538 - DNA, 1164 bp, Acinetobacter baumannii
atgaaaattggattgacaaaatttaattatccggaaattagatgtgttacaacttcgcaggaaaatgactatataaatttaaaaaaatataatatttattattattttaataatataccagtcattaagaattattttcatcgttttttgtttaaacctatttctgtaaaaaatgtagatgtaatacattcttttaatgatatttgtttaacaaataataaatgggtggttactttcgagacaatgttaccacggtttttggatattttgagtaatcataagaatttgaatcctgaatatatttataatgatgaaataaataaatatttggaagttgttgcaagggataattgtttaggtgttattgcattgtcaaaaagcgcaaaaaaaattcaatcagatattctaaaagcttatccaaaagtaagagataagattgaaaaaaaaatgttcgttttgtaccctcctcaaaaaatatatactactcaacatgagattgaagaaaaagtcttaaaaccattaaaattaattttcgttggaaatgatttttatttaaagggtggtgcagaatgtatattagcgattaatgagttacttgaagaggggataatttctgaaaatgaaattatgttgacagttgtaggaattttaaatcggacccataattattcctttggtatttatcaagatgattctgatttttcaaaaaatattaataccataattatgaacagaaaaaatattaaaatatattctaatgtggacaataataaagtaattgaaatgattagagagcatcatataggccttttaccgacatgggcagatacatttggatattctgttttagagttccaagcttgtggttgccctgtaatttcaacggatgttagagcattgtcggaaattaataataacgatattggttggttaattaatgttgataaaaaaaaatatggtgagattgtagttgattcttattcaaagaaagacttatgcagaagaactattattgatcagttgaagaagcatattctcagtgcatatgaaaatcctaatgttgttattaataaaggtgttgaatcattgaatcgtattaaaaaagaacattctattgattattataatgataaaattaagagtgtttatactattggtatttaa

SEQ ID NO: 48539 - DNA, 492 bp, Acinetobacter baumannii
atgctctctatttatttaacagatactcaacaacatgtgcaatttaatgattacccaagtgatcagcctgttaaatttctgttaaatcttaaaaagatttttccaagtactggtgatttattattacctgttttacctgaagataatgatctggaaaatgtaacttgggaatcaacctcaaaagactttgaaatcttcaaaaagttattggcaggttggggggtgattgagcttcgtttaaatgccattaccgcttataaagataaaaattttgcaaatgagctaattaaacaagctcaagcgaaacgtaaaaaagtagcacaaaaaaatcatcaactttctctagttgcattggattatatttttatgcacgaaattcatgcactcattgatgctgaactgttcacaataggcgagaaattttatttgccaaccttgcgggagcaatggaaaggtaccgtttcggaccaagtgcttaatggaaagctctaa

SEQ ID NO: 48540 - DNA, 570 bp, Acinetobacter baumannii
atgacacatctcaatgagttatatcttatcttaaacaaatatctaaaatggaacaagtcacatttaaagtgctttgcgctcatcatgcttgtgattattttaaagcaaacatgtaatctttcttctgcatctaaagccttgcccatcaagtgcttaccacaatcattttatcgacgtatgcagcgcttctttgcaggtcagtattttgattatcgtcaaatttctcagttgattttcaatatgttttcattcgaccaagtgcaactgactttagatagaaccaattggaaatggggaaaacgaaatattaatatcctgatgctcgcaatcgtttatcgtggaataccgatacctatcctttggacattgcttaataaacgtggaaattcagatacgaaagagcgtattgctttgattcaacgctttatagccatttttggtaaagaccgtattgtgaatgtgttcgcagacagagagtttatcggtgagcagtggtttacatggttaattgaacaagacatcaacttctgcattcgtgttaaaaaaacttcattgtcaccaatcatttag

SEQ ID NO: 48541 - DNA, 1653 bp, Acinetobacter baumannii; identical to SEQ ID NO: 45955

SEQ ID NO: 48542 - DNA, 1044 bp, Acinetobacter baumannii; identical to SEQ ID NO: 46221

SEQ ID NO: 48543 - DNA, 558 bp, Acinetobacter baumannii
atgtcaaatatggaaattccctttagttcatcaatgattatccatacttcaagatatctttttgatcaacatggatttcataatgttggagtagaccgtatctctaaagagtcaaatgttagcaagatgactttttataaatacttcaaaagtaaagagaaactaattgagctgtgtcttgagtttcatcaggaaactttaatgcaacaagtaagttcaatcttaagtgcaaacttaaaaagccaaaatttagataagttaaaagaaatttattttttgcatgctgatttaaaaagtcactaccatttaatatttaaggctatattcgaaatacaaaaaatatatcctcaagctcatcgagtagttattaagtatagagaatggttaattaatataatactagaaatattattaaatattaaaagcaatgcttctattgaagaagcgagattacttatatatatcattgatagttctattatccagtcgcttataaatgatgagattgatcatagagaatatatatggagctatttctctagtaaaatttcactctaa

SEQ ID NO: 48544 - DNA, 696 bp, Acinetobacter baumannii
ttgtcgtgtacagagattttctttgaagaggtggatgatcaacatccggtgggctttctttcagttttagaagtctttaaggatggcacttacaccccgcccgaaactattttaaaactcgattaccacctctcatatccttgcgtatttaaaatagatagcacttggtacatgattccagagtcttctgccaacaaaactattgaactctggaaatgtactgattttccaatgaaatgggagaagcattctaacctaatggaaaatattgaagcggttgatagcacccctttttaccatgagggcttatggtatctttttacctcaacgcgtcgtgattgtaaaaagtttggtgaccgtttagatttgttctttaccgaagatattttaaatcctaactggcaagagcacccaatgaacccagtgtgccgaggaagtcagcagttccgtatggcgggcaaaccttttgtttacaaagggcaactggttcggccaagccaagattctttaaaacgttatggcggcaatatcgaattaaaagcgattactcagcttagtccagcagcttatgaagaaaaattactagaagtagttttaccagactggaatcaagcagatgacggttgccatactattaatttcgaagataatttcgtcgtacttgatgccatccgccttacaccaaaaaataattaa

SEQ ID NO: 48545 - DNA, 1746 bp, Acinetobacter baumannii; identical to SEQ ID NO: 46022

SEQ ID NO: 48546 - DNA, 6426 bp, Acinetobacter baumannii
atgaacaagaatagttatcgcattatttatagcaaagcacgtcaaatgtttgtggccgtggctgaaaatgtacgaagccaaaccaagacttctggtcaaagtgaagcaagtacccagaacaatattgataacactgaatctcaggcatttcatcaactctggcaagtgaaggcactggttgctagtataagtttgtggatgcctttagcacctgtttatgcgggtattgtagcggacagtgccgcaaatgctgcgaatagagcagtgattggtgctggtaagaactcagcaggtacagtcgttcctgtagttaatattcaaactccgaaaaatggtatatcccataatatttataaacagtttgatgtattggctgaaggtgcagtactcaataacagccgtcagggtgctacgacaaaaacagttggaaatgttgcggccaacccatttttagccacaggcgaagcgcgagttattttaaatgaagtaaattcatcagccgcttcacgctttgaggggaacttggaagtcgcagggcaaatggcagatgtgattattgctaacccatctggtatcaacattaaaggtggtggctttattaatgccaacaaggcaatttttaccacaggtaaacctcagttaaatgctgatggcagtatcaaacagtttacggttgaccaaggaaaaattacggtttcagcaaaccctaattctaaatttggcttggggggaaataataacgatgcaaactatgtggatctctatgcgcgtgcattagaactcagtgcggaacttcgtgccaaaaatgatattcaggtgattgccggggcaaataatgtcagtgcagatttacaggatgttacacctaaaacaggtactggaactgcaccgacattggcggtagatgttaaagcgctgggtggcatgtatgccaataatatttacttgatgggaactgaaaaaggcttaggcgtgacgaacgcagggactattcaggcagtcaacaatctggtgattaccagtgccggaaagattgaacacagtggcacaatcagttcgaccagtaaaacccaaggtttagtgaacatacaaacaacgggtacgggtacagctgccgatatcaactcatcaggcagtattaacagtaatagtgccttaaatatcgattcaggtaataacctgaatgtaaatgctaaagaaattattattaataacggcagcctagcatcttcacctctaattgttaatgccaaaggtaatatcaatctggcagcagatacccgcattatggatgactcacaaggtggtgatgtctatatcgatgcagcaaatatcaatcttgcagcgggatcggaactcaaaagtaaccgtggtacagcaaccatacaagtgcaaaaagacttggtcgcagccaaaggcgcaaaactgattgctgccaaagatttaaatgttttaagtaatggtaagttatcacttacagagaaccatatacaggcatcattaggttcaatcaacttacaagcagattcagccaatacccaaaatatcattgaccttcaaggcgggacgatttatgcgggtaaagatttaaacctgtatagttcaggagatttaaatctaaagaatcttggattttcacttgaaaacgctgcaacaagagttaaaaacattaaagcctacagtggacgtgatctggtctggaacaatgctgacaaggcacttccccttattacaggcatggttcagcttgatgcagccaataatttaaccgttacggcaaaagaaatctcgaataaagacagtattcaactacatgccaatcaaatagcactcaatagtgcattgacctcacaaaagaatattgatgtgagttctgaaattgctgatcttgttttaagtcaggcactcaaggctcaaggtgatattaatctaaccgcacttgctggtggagttactgcaaatagcttaaaggccacatcttcggctggaaagatttctatactcgcgaataaaaatataaatttaaactcgacccagacaagcaaggcgatgccttcagctgataaagatgaattaacaactgatcagacggttattagtggcttaaaaggggtaacacttggctcgattggtgatggcatcgttaacttgcaatcggtacaagttaatgcaagtcagggcgatatattagtttcgagtaataatggaataaatttaaaagctaataatgatgtagttgttactggggatacgggccgatttaaaacggtaaataatgttttaaaaggacaaactgtttcgatagaaaatagtaaatcggatattaaaatccaaaatacagacctcagctctacggttggtaaacttgcgatcaatagtcgagcgggcatgagtacaattatcgacagcgtattaacgtcaaaaggtaatactgaactctacgcaaaagatttactgactttacagggcgtgaatgctacttcagaccagcatctggcagtaagctctggtcgtacggtttatagcaatgctgagtatacgccagcgaccaaatggattgcggataaagtcactaacttaacatctaagggtgtgacctctgtaacggctacaggaaaccaagtattacaaaatacaaatttaaccggtggagccgttttattagaggcgggtggttttattttaggccagactggattgaacttaaatgcggtcggaagtgatttacttaagaatgatacaaagttaaatagtttaaatggtgacctaactattcaaacaaattctaacttaacgattgatccaaaagcttacagcttaaaggctgttggtgatattgagcttgtttctaaaactggtactttgaccttaaaaggctatggtggtactgcggggaatggatcggaacaagtcgttaatttggatacagccaatggtagtatcaatttagagggtgctaaagttgatattcaaggttcacaattaaccgcgcaaaaagatattaagatcgtttcaagtaaagatgatgtgctgattgatggggtaaaaaataaattttctggtttacaaaaattaaatttagctcaagattattctctagaattagataggctaaataaagaacgtttaaagttgcaatcacaagaatattttaatgatttttctaatatgcaaaagaaatatcaatattataatcaagtacttaataaatattgggatcgtagtactttagatcaaagtaaaaatgaaaatgcagtactttgggttaatgcatataatgactatcataaaaattataatgaatttaaaaataagtatatggtgaaaataaattatccaattcttggagaaccccctatattaattaacttaatggatggttctccattttcggcagattacgtttttagttttaaatatgatgataactatcttaatgatgtcaaaaggaatgagctattttacaaatcaaacctaaatggttctgaacattctgaaactaaattgaactcaaaaaatggaaatataaatgttacctctgctaagggtttatctattagtggtggaaatatttctgctcaattgggacaggtgaatttagaagcaagtggtattttagccgaacaatataaatctacaaccattactgagtctaatccacagccaagaatattaaatgcgagtattattattgatggccatacagatttctatgataaagggaatgaaaatgatgataattatagtatgcgaacgttagtcagtcctaccattattaatggtgataaaggggttaacataagaactgtaggtaaaactaaagatgataatctagtcttacaagccacaggtattacatcaaaaaatggtgacgtaaaaatagaatcaaataaaagtattttatttgatgccgcagttgaacaaagttatgaccgtacaacaactactgaaaagaaaaaatcatggggaggtctaaagaaaaaatatattacgactgtagctgagaacaatgatacgaatgcagcttcagttgatatttctggaaaaaatatttttattgaaacgaaaaaactagatccatctgtagatgttaaaaatccagataataatattgatatttattcggggcgttttactgctgatggtggaaaaattacgattaattctggggggaatcttaacttttatacagtcgaagagagttctgatagtaatgtagatattacaaaaaaatcaacgtttgctggaattaaatacaatacttctaaaactaatgcaactcgtacgcaggttactgaattacctgcaacattaaaggcagattacattggtactaaatctggatttgatacccgacttgttggaaccgagtttgaatatttaaaagacgcaactatagaagctggtggtaagttagacttcattgctgcgaaaacatctattactgacctagttaaaaaagaaaagaattctgtagtctggcagtcaatgcaagataaaggctcaattactgaaactgctcagctaccaagttttaatgggccagttttacctacctttaaagcggcaggtggtttgagtgtacaagttccaattagtgaaaaagacgctaataaagttgagttgcgggatgaaattctaaaactggctaatcagccaggaaatgcatatcttaaagaattagttaaccgaaaagatgttgattggcaaacagttttattaactcaaaaagattgggattataaatcacaagggttaacggcggctggtgctgctcttattgtcattattgtaacgattgctacgatgggttcaggaactgctgcggctgcaggagctgctggtggaacagcagcaagtgggactacagttggtttgggtgcaagtatgattggctctgctggtataacgacaactgcggctggagcaattgttccatctacccttggtgctatggcaaatgctgcaattacaagtttagcaactcaagcaagtgtaggattgattaacaacggcggagatatcggcaaaacactaaaagatttaggaagtaaagattctattaagaatttagcggcatctgttgttactgctggtttaatgagccaagttggttctgcattaaatttaaaaccagatagcactcttctaccagaccgactagctaataattttgcatcatcagtaggatcaactttagtacaaactgcgattaaagggggagatctcggagataatttacaagttgcattactagcaggtttagctggagcattacaaggcgaattagctcaaaatctcaaaggtctggaagatgtaaactatattttacataaaattgctcatgcagcagttggatgtgcagcggcagctgctacaaaacagagctgcgaagctggagcgattggtgctggtgttggcgaaattattgcacaagaaatgcttcatggccgaaatccaacattcgtttcagcagaagagaaagctaaaattgaagcttatagtaagttaattgctggtacaatttccgcttatgctgggtatgatgttaatacagctgcaaatagtgcaactatagcaattcaaaataatgcttttaaggataaagcattattaaaacttgaagctacacgtaaatatttggatgataagtctaaagctgctttagatggcttaattaatgcatataaaaaaggtgatatagaagctgctaaaaaatttaaaaaccaattagatgattcagtaacaacttgggctaattcaagtagtagttatttaaatatagaaacaaaatctgccttaggtgagatcgttattgttgttagtgacttagttattcctactaattatgtagaaattttgccagttggtaaactttcaaaagtcgctaaaatattaaaaattggtgaggatggaactaagtctgctgggcgtttagcagaagagcttgcagagttacaaaaagttgatattaaatttggtaaaacattacctggcgctaaagcacctatcactgttacagctgaatcaaatataggtggtaagcatatgttcgataccaatcaaactgctagaccagaggttaatcgaacaaatacaccaactcttgctgctggaaatgcaaaaatagatccaagtaaccctaatttaacaatgaaaaatgcacatgcggaaattgccttaattcaaagagcatacgatgctggtttaacaaaaggagaaactatgcaggtgcttgttagaggaaaagaagtatgtgaccattgtgggcaagtaatgaaaactatgtatgagcgttcaggattatctaaattgattattcatgatacaacaagtggtactactactacttattataaagttattgatgctaaaactaaaattgctacaactaaaattgaagtagctccaatttttggtcattaa

SEQ ID NO: 48547 - DNA, 1341 bp, Acinetobacter baumannii; identical to SEQ ID NO: 46010

SEQ ID NO: 48548 - DNA, 1320 bp, Acinetobacter baumannii; identical to SEQ ID NO: 46060

SEQ ID NO: 48549 - DNA, 678 bp, Acinetobacter baumannii; identical to SEQ ID NO: 46058

SEQ ID NO: 48550 - DNA, 705 bp, Acinetobacter baumannii
gtggttttaggctgtggtcagttctgtaccaatccgggtttaatcttgggtattaaatcagctgaatttagccagcttattagcaacctgactgaaattatgggggctaagcctgcacagactatgctcaatgccggcaccttaaaaagttataccgctggtcttgagcacttaaccgagcatcaaggtattaagcatttggcaggtcaaactcaacaaggcaatcaggctcagccacaactgtttaaagctgatgttgagcttttactggcaggtgaccagcttttacaggaagaaatctttgggccaaccacagtcatcattgaagttgaagataaagcccaactcattcaggcattacaaagcatgaatgggcaactgactgcgactttaattgccgatgaggctgacttaaccgagtttgcagaggtagttcctgtattagaagaaaaagctgggcgattacttataaatggctatccaacaggtgttgaggtgtgtgatgccatggtacacggcgggccatacccagccacttcagatgcacgaggtacttcagttggaaccttggccattgaccgttacttgcgccctgtgtgttaccagaactatccgcaaagtttattgccggaagccttaaaagacagcaacccgttgcagattttaagattggtgaatggtgagatgaccagagaagcgatctaa

SEQ ID NO: 48551 - DNA, 1104 bp, Acinetobacter baumannii
atgtatagtaaaaacaatgtcttgcttccaagcaaatcagcatattcattagaagaagcatgtaaagaattgaatttatttttcaatcgagatgatatagatattagatatatattagatttagttcatcaagggcatatttggatgcatgcaaaatttagtaagaataattatctttttgccatccctatggaatgggagttagatgaaaattttaataatgaaaatgaaaagagaatagaagaaatacttttttttaatagaatgcttaattatcaaaatatttataataaaatgggggattatgatctatatcttaagttaactttagagacagcattcgatttgcttaataataaaattattataaaaccattaatattagatatttatgatccgtgtgaatatttttacctttgtgataattatcttaaaattgattccggatattatttggaatttaaaaaatatcctaaagggcttaaaagagatgagtattttgatacggttcttataaatcattcagaaaaagaaattattaaaaaaatgtctttttttgagatatatgatgaaatttataatggtacagaatttgccgatctatactacgagtttcctgaggtaatggagattgtagaaatacaaaataggcacgcaactgatagaatagataaatttaagtggaaaaaaggatgggagaagtattactggtacggcgataaacagttagaggattttgaaatggaatataatttagaagatatttatattctaaaagaagacatggattttttaaaaagaggtgaaagtagaaaaattagggaaaggaaagattatatgtcacctcatattagaaaacagtatgaaaaattagatgtaagatcaaattatactagtaaaaatagcatttctaataaatcaataaataaaattatctatgctttggctaatatggcaaatatagacatctcccaacctcaagctgctttttctcaactacaattatattgtgaaaaaaataacttggagttaccaaataaggatacatgtggcaaggcttttaaagatgctaagtactattttgataattttaattctaaatag

SEQ ID NO: 48552 - DNA, 1308 bp, Acinetobacter baumannii
atgaaaaagtatgattatgatatagcagtaattggcgctggatgtgcaggtgttgttgcagcacgggatttaagtaatgcaggtcataaggttgttttattagaggcacgtgaccgtattggtggccgaacctatacaggtgaagcatttggccgacaagttgaatttggtggtggttactcacactggactcaaccttatatttggagagaactacaacgctacggaattggcttaaatcctcctacagaagttgataaaacggtttggtttgcagacgggaaactacacacgggaactcaagctgaatatgctgctattgctgaaccattattaacagctttctttaatgacgctcgtcagtggtttcctcttccttatgatgtaaatgctatcgatacgagtgatattgaaaaacaaacattaagagatcgtcttgataccttaaatttatcaacttatgaacgtgacgttttagacggcctattatcaacacttgttcactcttgggatgagcaaggagtcgcacagctcttattctgggcagctacctattttggaaattggggtgcgttctttgaagtagcagggtcttggccaattgccggtggaacacaaaaactcgtaagagctatttataatgattcaggtgctgaattacgacttacaacttcagttgcagccattgatgatcaaggtgagcaggttgttattacgactcaatctggtgaaaagattgtgacaaaaaaagccctcgttgctgttccattaaatgttttatctgacatcaaaattacaccagaggttaataaacctgctcgagatatgattgttgcaaaacatccaatgcgtactgctaaattatgggcacgtgtacgtggaaaaatcgagccatttattggatttgcgccagttgagcaaaacccaatcaataccgttcgagttgaatatgaacatgaagatgactcaattttagtctgttttatttctgacgagtcaactatagatgtgaacgatattgaagctgttcaaaaagctttacagatgtttaagcctgacattgaagtgcttgatatcgcatcacataactgggctaaagacccttatgcacaaggcacatgggtacactatcgccctgggcatttgtccgatgcagctccgctcatgcgtaaacctcatgggaatatctatttcgcaggaggagatattgcaacaatgagcatgggcggtatcgaaggtgctctagagtctggtattgaaactgctgcaagcatcacacatgcattagctcaaaaattagcagggtga

SEQ ID NO: 48553 - DNA, 1248 bp, Acinetobacter baumannii; identical to SEQ ID NO: 46162

SEQ ID NO: 48554 - DNA, 3462 bp, Acinetobacter baumannii
atgtttcaacaagaaatctctcaattgaatttgcaacagctcaaggccggtgaaaagcgttgggtggggtcattattaggttcatcagcagctttattgcttaaagaaattgccactcaacattcttctttattggtattagttgctagaaacaaccaacatgttgctcaattagaaagtgaacttgagttttatggagttaagccgacaatttttccggattgggaaattttgccttatgaccgtttatctccccatcaagatattgtgtcagaacgtcttgctattttatctaatatgcctcagcaaggcgtattactgatttcagcaagtaccttggctcaacgggttgcaccttactcatgggtattgggagaacactttgatataaaagtgggtcaaaaatttgatttagaacaacaaaaattaaggttagttcaggcgggctaccacttagtagatacagtttatgaccatggtgagtttgctgtacgcggcagtattatggatatttttgcatctgggcaagaatctccaatccgcatagatttatttgacgatgaaattgattctttaaaattctttgacccagaaactcaaagaacaacaaccacgctaaaaagttttacggttttacccgcgaaagaattccctttaaaagaaggacgttcagtttttagagaccgttattctgagttttttcctactgccaatcctaagaaaaatccaatttatcaggacgttttagatggtatagcatcgcctggtattgaattttatttaccgctattttttaataaagaacaaatgcagtcacaaagtatgtttacaacatacttaccaaagaattgcattgtaattacaactaatgatattgatactgatttaacgagtttctggaaagaagttatgcgtcgttatgaagaccgacgccataatatggatcaacctattcttgctccagaagagctatttatttctccaaatcatctgctaagtgctctaaaccagtttccacgaatgcttgtgagcgcagaaactattgaagaaaaagctggtgcacttaatcttaaaactgaacaaccacccaagttgccagtcgatccgaaaaaagaaaaaccatttagtgccgtaaaaaaatatattgatgaagcaaatcatcctgttctattggttgcggaaagtgcaggacgtcgtgaaagcttaaaagatgcgttgcgttcaagtttaggtgagattccgaatgtagagaattttgagcaattccaaattagtcagtttgcaattgctattactaatgcgcctctagatcgtggcttacttttaactgatcaattaacggttatttcagaaaatcagctttacgagcaccgagttgtacagcgtcgtcgcaagcgtcaacaggaagtttccgaagagtttctgattcgaagcttaactgagctaagcattggtgctcctgttgtacatatcgatcatggtgtggggcgttatgctggcttaattacactcgcgattgagggacaagactatgagttcttacaactagattatgccgaagatgcaaaagtctatgttccagtaacgaacttgcatctaattagccgttatagtggtggcgacccggatttagcaccgttacataaaatcggaactgatgcttggagtaaagctaagcgtaaagcattagaacaaattcatgacgttgcagctgagcttttacatattcaggcacgtcgtcagtcaaaacctggctttgcttttgaactggatcagtcgctctatatgcaatttgcaagcggttttgcgtatgaagaaacccttgatcaggctaatgcaattgaagccacgctctatgatatgcagcaagcaaaaccaatggataggttggtgtgtggtgatgtgggttttgggaaaaccgaggtggccatgcgtgcagcatttgtcgcagtacaaaatggcaaacaggttgctgttttagttcctacgactttactagctcaacaacattatgagtcttttaaagaccgttttgctgattggccagtacgtattgaagtgctctcacgttttggttcaaacaaaacacatttgaaaaatattgaagacttggcaaatggtaaagtcgacattgtggtaggtacacataagcttctacaagagaatgttcagtttaaagatttaggcttaatggttgtagacgaggagcatcgctttggtgtgcgtgataaggagcgtatcaaagctttacgtgccgatgttgatatgttgacacttacagcaacgccaattcctcgtacgcttaatatggctttttcgggtatgcgtgatttgtcgattattgcgactccgccagcccgtcgattagcagtaaaaacctttgtgcaagagcatacagatgcttcaatcaaggaagcgattttgcgtgagttacttcgtggtggacaagtttatttcttacataatgaagtagagaccattgagcgagctgccgaaaatattcgtgtgcttgtacccgaagcacgtgtagcggtagcacatggacaaatgcgtgaacgcgaacttgagcaagttatgcagcagttctatcacaaagaatataatgtgctggtgtgctcaaccattattgagacaggtatcgatgttccaaatgccaatacaattttgattgaacgtgcggataaacttggtttagcgcaattacaccagttacgtggccgtgtaggtcgttcgcatcaccaagcatacgcgtatttattagtaccttcgattaaacacttaaaaggtgatgccgaaaaacgccttgatgcgattcaacgtgcttcgacattaggtgcaggctttatgctcgctacggaagatttggaaattcgtggagcaggcgaattgttaggcgagcaacaaagtggctcaatgcaggcgataggatatagcttgtatatggaaatgcttgagaaagcgactaaagcaattcaacagggtaaaaccccgaattttgatgctccattgtcgttaactgccgaaattaacttacatattcctgcacttattccagatgattatctgggtgatgttcatcaacgtctattattctataaacgtattagtaataccgatacacaggaaaaactagataacatccgtatggagcttattgaccgtttcggtattccaccgcagtcggttaagcacttatttagcgtgcatcaaatccgtttgaaagcagaacatttaggtattacgaaaattgatattaatactcaaggtggaaatattgagttttcaccagatacgccagttcaggccattagtattattcagttaatgcaaaaaaatccgacttattaccgtatggaaggcggacaacgtttgaaggtgatggtgcagcttgaagagtatgaaaaacgaattcaatttatcaatgatttattgcaaaaattgatgagtgaactacatgcctga

SEQ ID NO: 48555 - DNA, 1122 bp, Acinetobacter baumannii
atgtcggtaattgatgtaggcggtgaagtacgtgaaggtgaagagcttgatattggggcagttgagaactggttaaaaaaccaaggtgttgagttggttggtccagcagtcgttactcaatatacgggcggggcgtcgaattggacttatcgtttaaaatatgaaaataccgatttaattttgcgacgtcccccaaaaggaacaaaagcgaagtcagcccacgatatggcccgtgaatatatggtgcagaaaaatcttgccccttattatccagtgcttcctaaaatggttgcactttgtcaggatgaatcggtcattggctgtgatttttatgtcatggaacgcattgaaggcattattcctcgtgcaaaattaccgcctgagcttggttttaatgaagatgatgttcatgagctttgtgtaaacgttattgataagttgatcgagctacatcaagttccttatgagaacacgcctttagctgaactaggtaaaggtacaggatattgccgtagacaagttgaaggttgggataaacgctatgaaaaagtccgcacaatcaacgttccttcatttaaatatgttcgaaaatggctaaacgataatatccctcaagattctacaacttgtattattcacaatgattggcgttttgataacgtgattttagatccagaacatccaactgaagtgattggagtgctggattgggaaatggcgactttgggtgatcctttaatggatttaggtagtgctttggcctattgggttgagcctacggataatatgatttttagatcgacacgtcgtcagcctactcacttaaagggaatgttctctcgcaaagaagttgttgactattatttgcaaaaaactggtctggagcctcaaaactggactttttatgaagtgtttggtgtattccgtttagcagtgattgcccagcaaatctattaccgttattaccataaacaaacaagaaaccctgcttttaaagatttctggatagtgattcatgcactacatatcagagctttaaaacttatcgcccagcaaaaattgcaagaatcggaatttgctcagcaatctctacagaaaatacagggtattttaagaagatga

SEQ ID NO: 48556 - DNA, 1242 bp, Acinetobacter baumannii
atgtttgaactctcaaaaaaagctcaggattttgctgagcgaactaaaaaatttattcaagaagaaatagaacctgtcgaagcaaaattttgggaagaagttcatgagttaaatccagatggaaactggaaaaaatggcagtggcccgagcttttagaaactctaaaatctaaagctaaacaggcaggcctttggaatatgtttttacccgatgaaaagctaggtgcagggttatcagttcaagaatatgcacatattgctgaattgactggtcgtagtttattggcgcccacggtttttaactgtaatgcaccagatacgggaaatatggaagtgttatggcgctatggcagtgaacagcaaaaacaacaatggttagagcctttattggatggaaaaattcgctctgttttttgcatgactgaaccagatgttgcatcaagtgatgccaccaatatgcaagcgaccgcactcattgacggtaatgaaattgttttaaatggcaaaaaatggtggtcgtctggtttaggtgacccaaatgctaaagtcattatttttatggcccatactccagatgaaactaaagaccgccattatcaacactctatggttttagtaccgattgatacggcgggtgtagaaattcaacggatgttacctgtgtttggtgactatgatgcgccacatggacacggtgaggttcactttaataatgttcgagtgcctattgaaaactttattggtggagcgggtcaaggttttgaaattgcacaaggtcgtttagggccggggcgtattcatcattgtatgcgctgtatcggagctgctgaaaaagcactagagcttatgattgatagaggcatgtctagaacggcgtttggcaaagaaattctaaaactcggcggaaacctagagcgtgtagccgatgcgcgggtagccatagatcaagccagacttttaaccttgtatgctgcttataaaatggatactttaggaaatatggccgctttaacagaaatatctgcaattaaagtggtcgctccaagcgtattagaaaaagtagtcgatatggcgattcagctacatggcggtgcgggcgtttcaagagatacaccattaacaggtttctttgctcaagcacgcagtttacgtttagctgatggtccagatgaagtacataaaggcatgattgccaaattagagttggccaaacgtggttatggtcgtcataagaaagtataa

SEQ ID NO: 48557 - DNA, 1764 bp, Acinetobacter baumannii
atgtcagagaaaatttcacgccgagaattaattcaaaaaagtctgctcggttttggggctttatctatacctgttgcttttacaggttgtaatgatggctcagatgatgaaagcccagaaatacaagcagattttcttcatggtgtcgcaagcggggatccactacaagataaagttattttgtggacacgagtaacaccgacagactctggggtgcgcttaaaagttgtatgggaaatttcaaccgataatcagtttaaacaaaatttaaagacgggaatggttgaaacaagcaagactgatgactttacagtgaaagttgatgcagctgggttacaagcagatacggtgtactactaccgttttaaatttggtaataaagtttcaccggttgggcagacgaaaacattaccaacatccaccaataaagtgagctttgcagtatgttcttgttctaactatcctgcgggttacttttatgtttatcgtgaactggcaaaacagaatgttgatgtcattattcacttgggtgactatatttatgaatatggggcagatggctatgcgacagaagatgcaaccaagttaggccgtaatttacctgccgataataataaagaaattattaaattagatgattaccgcaaacgttatgcgctttatcgtcaagataaagatttgcaagcagctcatcagcgccatccttttattgtgatttgggatgaccatgagttggcaaatgatgcttggcgtgagggggcggaaaaccatcaaagtaatgaaggggccttttcggaccgtaaattagctgccctacaggcctattttgaatggatgccaattcgtccagtttctagtacagatcatttaaatatttatcgccagtttaattttggctctcttgttcagttaaccatgctagatacgcgtattattgcgcgtgataagcagcttgcatatacagactatatgacggctacaggcttggatattgcaaagtttcaggcagatttaactaatccggtgcgtactttgatgggatatacgcaaagagattggttggtcgataaattaaagcaatctacagcaacatggaatgtagtaggacagcaagtattaatgagtaaaatgtggattccagctgagttgttggcgtctttagggcaaattacttcaggaggaacttcgcctgaggcgcttgctaagatgaatgcacaaattaccgagttagtcgctttaaaacttcgtttacaacaaaatgatccgacattaacagcccaagaaaaagcaagaattatgatggttgcgccatataatctcgatgcttgggatggttactatgctgagcgagagtttgtgtacgataaattggcagagtttaataaaaagatcattgtgttagccggggatacacataatgcatgggcatcttatttatatagccagaaagggaaatatgttggagttgaattagcgaccagttctgtatcgtctccaggtttagaaaaatatttaagtattccactggctcagcttcaacagtttgaatttgcatttactacattaattgatgaattggtttattgtaatttaaatcaacgaggatatctgttggttactctagatcaggcgcaagttcattctgagtggagatttgtagattcaattaaaaataccgaatatcagatagattcaagccgacaaaacgatattgtattgaatctaaatttgatgccgttaaaacaaggtcaaaagactgcttga

SEQ ID NO: 48558 - DNA, 3195 bp, Acinetobacter baumannii
atgtttaataatatttttcagatcttagagagttttggttttctctcacagcatcgttcggtgtatctccagttttcagatgcatccctgaatagtcaggtttttttacaacgtatagatgggcaacattatcttaatcagggcatgacagccgagctgatttgtttatcaaccaatgctcatattccactcaaaacatttattggggtgcaggttgctgttgatcaagtaacagatcgaggaagttttttccgtactacaggtattattactggagcatcacaagggcaaagtgatggtgctttaactttatataaacttgctataagtgatccaacttatctctggcataaacgcagaaatagccgtgtgtttatgaacaagagtgtgaaagaaattagtgaaattctgtttcaagagtggcaaggaaaaagcccattatttgcttctagtctgactctagatttgagcggcttgaaacagacctacgatgtccgtccttttgttatgcagctcaatgaaagcgactatgactttttaactcgcttatggcgtagtgaaggtattagctggctcattgatgaagcagagcttaccgtggcgagcaatatggacaatattcagccacaaaaattacgtcttattgatgataataaccaatatcaagctctgacaagaagagcgattcgttaccaccgcagtagtgcaactgaacaatttgatagcatgaccagcctaatggctgatcgcagtttacagccgacttctatatttgtgcagcgttggcagccagacgtattacaacaaacagatggggcaggtagtgtccaaagtaaacatcagcatagtactaactacgacaatcaaagcttaagccttgaagaagcatggcactttagtccggcatggatgcaggatttaaatggcgaagatggggcaacctcagcaagtaatcaacaactagaaaagtttaaccagaacctaagtgcttattatgatgctcagtctaagcagtttattgcaaaaaccacagtacgagatacacaagttggctattggtttgaactcaatgaacaccctgaaattgatcagcatgaaagcacagataaagagtttttaatcataggtaagaattattataaccaaaataatttacccaaagatttaaaccagcaaatccaaactttagttcaacaaagcgattggcaagcgagtaataccgacgagcgtcaagcgaatcagttaattttacaacgtcgttatattccaacaacaccagcttataacccacagactcatagcccagtcgctcatccacaacgtgcgaaagtggtgggtcctgaaggtgaagaaatctatgtagatgagtgggggcgtattaaagtccgcttcctatttacgcgtagtgatgaccatagccatgatgggggcgcagggaccaataataatgacaccgattcagcttggattgacgttttaacgccatgggctggagaaggttacggtgcacgttttttaccgcgtattggtgaaattgttgttattaacttctttaatggcgatattgaccgaccgtttgtgatgggtcgagtgcatgaggcacagcgtcatccaactaaatttgataacaaaggtaagcttcccgatacgaaaaagctaagtggtattcgttctaaagaggtgtcaggtggtgggtttgggcaactcagatttgatgatacaccgggacaaattagtactcagctacaaagcagtcatggtgcaagtcagttaaacctcgggaaattgagccatcctaaagataaagcggaaagtgaagaccgtggagaaggatttgaactgcgtacggaccaatggggagctttgcgcgctgggcaaggcttattggtatccacccataaacaggataacgccaaaggagaccacctcgatgccgaagttgcgaaaaagcaacttgaaggtagtcaaactaacagtaaagcactgagtgacattgctaaaaaccagaaaaccgatgaaatcgaatcgattgaacagttaaaagattttgcctcacaaattcagcagcaaatcgctaaattcgaaaaagctttacttcttttgagttcaccggatggtatagctctaagtagttcagaagatattcacatctcggctgatgcacaaattaatcagattgctggagatagcattaatataagtactcaaaagaatgtgattgcccatgcccaaaataggctcagcctttttgctgctcagagcgggctaaaagctgttgctgcacaaggcaaggtagaaatacaagctcaggcagatgcactggatgtactgagtaaacttggaattactatttcatcaaccgatgacaaggtcatcattagtagcccgaaagaagtcaaaatcacgggcggctcatcgcaaattactctaaatggttcaggaatctttccgaaaactggtgggaaattccaagtcaatgctggacagcatttgtttatgggaggagcgagtgcaaacgccagtgctcctgagttgcctaaagctaaacctatgcagggagcattggagctactgcggagttatggtggagataacttcttcaagcaaaatagctataaagtcattgattcattaggtaagcaaattacgggcaaactcgatggaaatggttttgcacaagtaacaggtattgcacccggaccagctaaagtagtttttgagaaggataatacaagtgcatggctacaaagcagtgattttaaacgtaattatacgtgggctgaaccagtcaaaagtgttcaaggattaatgaaaaatgccctagaagcagtggggcaaaatacgatgtctcaattgcaaaataatcttctttcaacggataaaaatagtttcaaaaacttaggtaagaatactttagataatttagctggccaaacagtagcccagattaaaaatcaggtaactaatactgcccttaatactgtttcaaaacaacttaatctcaatttatctgccgatcaaatgaaaagtcttggtcaaatggcgacgaatccaagtcaatctcttgaaatgcttaaagagcagggcggagattttttgagtgatcaaatgaccgcaaaattatttaagaccacaaatcaagagtcacctattcagcagggcgatttagatacttttgtacggtcaaaaaagtag

SEQ ID NO: 48559 - DNA, 4698 bp, Acinetobacter baumannii; identical to SEQ ID NO: 45899

SEQ ID NO: 48560 - DNA, 372 bp, Acinetobacter baumannii
atgaatactaaagaatttgtcaaagaacttataaatactatttcagacgaatatatcgatacttataaacagatttactcctctactttaatcgataataaaattaaagaagatccctactggtttgatgctctcactttttatcaatctttatctcaaaaagataaggaaaccttatttaaaatcattaaacagacgactattgatactacaagtataattctaggtattattgatggtccggtgagcttaaatcagatccctggtgactttacgctgacatatacagaaaatgagaagacagtaattttaaatggagatctacaggatgaattccttaccaaaataaaagaaagagacagatcacaatga

SEQ ID NO: 48561 - DNA, 960 bp, Acinetobacter baumannii; identical to SEQ ID NO: 45912

SEQ ID NO: 48562 - DNA, 255 bp, Acinetobacter baumannii; identical to SEQ ID NO: 44740

SEQ ID NO: 48563 - DNA, 273 bp, Acinetobacter baumannii
atgcaaaacaatttatcaaatcaaacaaccgaacgcaaccagccagaatttttagtgggtgacgttgtagtgcttactaaagagtgccgtactttcaaatcaaatgatttgtttgaagttaaaaacaaaactttgactaggttgtggactatcaaatcggagaatcatttgattctggtttcatcaaaagaaatccgtacagcaacagtagcagagctcaacgccaaacgccggctaacaagcgcagagcaagcattagcggaggtgtcatga

SEQ ID NO: 48564 - DNA, 321 bp, Acinetobacter baumannii; identical to SEQ ID NO: 46215

SEQ ID NO: 48565 - DNA, 753 bp, Acinetobacter baumannii
atgtctttacacactcgaattaggcaaaaacttgaagaaaaaaaattaagagccgctgatttagcaagagcaactaaaaaatctcctgttgcagcaaagaaatggctagatggaactagcgtacctacagcagaaaatttgaaagtcattgcgaaatttttaggtgtgagtgacgattggttgctttatggtggatcggatgaacaagaatcgagtaacaatttagctcaattaaatgttattgatattgaagcatttaagcagaagtacaatattccagatagtgaagatgccgttaagtttgttcaagcgccagctaagcctttccctatacaaaaaagatatgttccagttaaagcctattcaaaaatgggaatggatgggtatttcacagatatgggatacgatggaaatgctggggatggctatgttccaactcatacagcaggtccacgagcctatggcattaaaggcactggcgactcaatgtttccagcaattcgtaatggctggtatgttgtatgcgaccctgatgcagatcttgtgccgaatgagtttgttcaggtgtgcttgaaggatggaagatgcacaattaaagaatttgtcggcatcaatggtggggttttaagtttgctttctgtgaatggtggtgagcgatttttctttgaaatggacgaagttgaaagtattaccgctattacagatatcgtgccgccaagtcagcacagacaagaacatccttattcgcattaa

SEQ ID NO: 48566 - DNA, 216 bp, Acinetobacter baumannii
atggacaattcaaaacgaccaatcaaccagattattgctcgcatcaatgatgctgcgaaacatggtgaagctttggtgctaacagccgaagaagtgaagatcctctcaaaggacattggtgataaagtctttattccagtccttacaaatgaacaagtagtgcagttggtaaaagaaggaaagcttgggcagaaaattaacaacaccaaagattaa

SEQ ID NO: 48567 - DNA, 1008 bp, Acinetobacter baumannii; identical to SEQ ID NO: 46193

SEQ ID NO: 48568 - DNA, 444 bp, Acinetobacter baumannii; identical to SEQ ID NO: 46179

SEQ ID NO: 48569 - DNA, 291 bp, Acinetobacter baumannii; identical to SEQ ID NO: 46180

SEQ ID NO: 48570 - DNA, 324 bp, Acinetobacter baumannii
atgtctaatttcaaaaagcaccctgacggctataagtcttttttaggtcgtgatgataaagggctgtattcagttcgcatcggctggcaagtgtacgcatctaatgctaatggctcagttctttacaaagttaaagacggatttaagacgcctttaaatgtgttcaggttccaaactgactatccaaaagtttggaatgaactcacacaagaaattgattttcagcgcagaaagcagctcgctataaaactgcgtgaaacaaatatccctacctatgaccgcaaagcttataaaactaagcgcggcttcactggctcaagataa

SEQ ID NO: 48571 - DNA, 699 bp, Acinetobacter baumannii
atgaaagttttaaattcttttgcaataatgatagcttgtagtgtttcttttaatatttgttatgcaaaagaaaatagcgagtggaatgattatttacaagattctacccaaataaattcacctatagaatatatagattcttataataaatatacagttctaaatcctaatttaaaaattaaattagtggattttggtaatattaataaaattaaaaaagatattaaatattctttaaaaaaatatggagttcaaattttaaatcggaaagaggtatataatatttttgaaggtaaagttcctttaaaatctaatgttgactttacattgttatacaatgataaaaatattgtggcttttagaattcgggaaaatagtaatatagattatgtgaaagaaccatataaaaattttactgcaaatgcatatttttataatttgataaataataaatttattgaagtaccagttttgaattcagatagtgaggataaaagtaagtcgaccgatatcttacaaggagatcagttaacatatgattcaaaaaaaggacaatatatttatctagcaaatataaaatcttataaaacaggaaaaactcaatctataaaaactatttttaatagtaatttaaagtgtatttcatctactttaggatgtgagacaataggggttcttcctgctacaaaagctaattag

SEQ ID NO: 48572 - DNA, 1860 bp, Acinetobacter baumannii
atggcacttttgcaaattgctgaaccgggtcaatccagtgccccacaccaacatcgcattgcgattggtattgacctaggaacaacacactcattagttgcgacagtgttatcaggcaaacctaaagtactcaatgatgttcaaaatagaagattacttccttctatcgttcattatggggacaatacaactcattatggtgaagaagctaaaccgtttatcattgcagatccaaaaaatacaattgtttctgttaaacgatttatgggccgttcaaaggcagatattaaatttcaacacccttatgagttagtaggctcagaaaatgaaatgcctgcttttgaaacccgtgctggacgtaaaacaccagtagaaatctcagctgaaattttaaaacaattaaaagatcgcgctgaagacagcttacaaaatcctgttaatggagcagtaattaccgttcctgcatatttcgatgaagctcagcgtcaagcaactcgcgatgcagctcaacttgccggtttaaatgtattacgtttattaaatgagcctacagctgccgctgtagcttatggattagatcaagaaagtaatttagcgaccgaccgtaattatgtaatttatgacttgggtggcggtacttttgacgtatctatcttacgtttttcacaaggcgtatttgaagttttagcgactggcggtcacactgctttaggtggtgatgacttagaccgtctaatcgtaaaatgggctaaaaaacagcttaatattgatgtattaagcgatgaagattatgccgtatttattgtggcagcacgtcaagctaaagaacaattatcaactcaagattcagttgaattaaagttactcgaagcaactctcacactagatcgccctacatttgaaagcattattcaagtagcattagataaaacgattagtgtttgtaagcgtgtactgcgtgatgcaaaacttgagttaactgatatccaaaatgttgttttggtaggtggttctacgcgctcttatgctgttcaaaaagcagtacgggaagtttttgcccaagaacctctttgcacgatcaatccggatgaagtagtggcaattggcgcttctattacagccaaccagttaattggtaatagccaagatggctctcttcttttagatgtaactcctctttctcttggtctagagactatgggaggactcgttgagcgcctgatatctcgtaatacagctattcctgttgcacgtcgtcaagagttcaccacttatcaagatggtcaaactgctatgttaattcatgtagttcagggcgaacgtgatttagttgaacattgccgttcattaggtagatttgtacttcatggcattccaccaatgactgcaggccaagctcgtattgaagtcactttccaagttgatgcagatggcttactcaccgtttctgctcgtgaagcaacttctggcgtgcaagctcatatcgatatcaaaccatcttatggtttatctgaggcagatacggaacgcttattaattgaaggtttccaacatgccgaagaggacaaaaatcttcgtcatttaaaagaaactaaagttgaagcagaacgtgagcttgaggctcttgagcaagcattaaaagtagatgcggatttacttgatgaaaagcagcttgacgcactcaactctgctaaggaatcattaaaagctcagcttgaaggcagtgatattcaagcaattgagcacgcagttcaacaacttaaagtacatagtgatgcttttgcagcactacggatgaatcgacatattgaccatgccttaaaaggcacgaagctcgatgattggtcaaaatcaaattaa

SEQ ID NO: 48573 - DNA, 1470 bp, Acinetobacter baumannii
gtgcaattagagaggtttatagatcgggaacctaagcagtttgcatattttcatcgtttgatgggatattcaattctgtcattaattttagtgatctatgcctttacctcaccgaatactaattatcaaatctatattcctcctttttttctttttttactttttgtcagttctaaactagaacactggttgcagtaccagtttgataagaaaactcaaaaaagtgttttttttgcaatagatgcgattgtagtggctgttactctagcaggagtgcaccttaatctcgttccaacatttattgccctttttgcattattttactcagcaattaatagtcgtatttcctttgcagttatttgtttaacgagtctgcttggggcgattattttttatttaagtacatttttcctatttggttttcatccatatttcgaagccacaagccaagaattaacagtaattaccttacttggtttggtaatgtttatcactatcggaaattattaccaacaccgctgggttaaaaaaattagtcagcaacgtcagcattattatgaccagatgacacgttatattgcttttgctaatcagttaagccgctatgctccattacaattatggcagtcgattatgcgtggggaagctgaagcaaaaatcgaatataaacgtaaaaaaatgaccgtattcttttctgatattcaggggttcaccgaactatcagaaactttaattcctgatgacttagctttcttgcttaacgattatttaagtcatatgactgaaattgcaaagcaatatgaagcgacggtcgataaatttatgggagatgcgattctcatattttttggagatccgaattcacaaggggttgagcaagatgccaaatcctgtgtagaaatggcaattgctatgcgtcagcaaatgaagttgttgcgcgaacgatggaagaaaatgggatattcagccttacatatccgtatgggtattagtacaggttattgccacgtagggaattatggtgcaacccatcgtatggcttatacgattgtaggtcgtgacgtaaatttagcggcacgtttacagtatgctgctgaaattgatgaaatactcatttctgatgatacttatcaattgatcaaaagtgattttctatgtgcgcctaagaccccaatttatttaaagggtattcaaggggcagtaaaaacatggcaagtcatggaaaaatacacaggaaataaatcagatcatcaacaatggtttgattatgaatataaaggtttccatttagttttaaatttagaagaagtacaaaactacgaataccctgagttggttgaagtgcttgaaaaaatgattcagcgcattaaagttcaacaaactttggttaatactcaaggtgttgctcagcttagacttgaggatgaagttaagcctataaatatcgatgaagaacaagatcaggtataa

SEQ ID NO: 48574 - DNA, 369 bp, Acinetobacter baumannii
atgcgaacattgttttggcgaactctggtcgtgatttttatcacgcttggtattattggagcaattttaccaggcatgccgacaacagtgtttcttattctggctgcttgggcggcctcaaagggatggcctcagatggatgcgtggttgttaaaccaccccaagtatggaccaaccctgcgggattggcgagcaaatgggacagtaccgcgtaaggcaaagtggattgcaaccattatgatgaccgcaagtggtattctgatgctgtttacttcggcgccgttttgggtcaaggtttttaccgatactaccatgcttgttgttgcaatttggttatggctacgtcctgagccaaaattaaaagattga

SEQ ID NO: 48575 - DNA, 909 bp, Acinetobacter baumannii
atgaatattgcctcaattaaaacatcctattttgagccatggttacagttcagtcacccaatggtaagacaattggcctttacaattgccagcccgaacctacttagccaacttccctgcagccttactattcgacatagttttcaattacatacagataaaaattgggaacaacattttcaaaattacttaccccgcctaaagcagcttgatgaagcaccagaacctttacttcaatttatgtctcggcttaagagcacacgcttaggtttacgttttgaaaatttactttggttttggctacaagaagatcaatatcatccttatcagttattaggccatagtattcaaaaaattgatggagcaaaaactttaggtgaactcgattttttagttttaaatcaaaatactcaagaaattgaacattgggaagttgctctaaaatattacctaggtgaaggtcaattaaatttagaacaatggattggtttaaatagacaagatactttaagtaaaaagctttaccactttactgacaaacaatttcaattttcagaagctttgggttttaaagttcaacaacgtttcgctgtcttaaaaggacaactttatcttcctctaaatttacctcaagaacagcttattcctgaatgggtaaatttaaaacgtcgcttaggtacttggggtacagaaatccctaaatctgacttttaccgcttagaaagacatgaatggctttgtcctcatcaaaaagcgagttcaaacactgcttattggtggactgatggcctatattgtcaaaatattaatgaaacccgattttatatgttcaggcaccctgctttactaagcttaaaaccttctctcatcaaaaataacggtattttacaagagaccacgtccttatag

SEQ ID NO: 48576 - DNA, 765 bp, Acinetobacter baumannii
atggctgcaggttttcaagtagttaatgatagaaatactattcaaattgatagtaattatagcaatctacacttacattctgttttagatattaaatcaggggtactaattgatagtttacccggttttaatcctagatggcgttttgatgggaagatgcgtaagcttagtgttccaaaagctgatttacctcttcctgttattgctttagaagttattaatgactgtagttgtgcttttggtggaattcaatctaatggcgataattgggatattgttgtttactacggtaagcgagtaacaggcggtgtatggactatagaagaacccccagcagctaaggtatatatattttctactagggttcagcccttatcatctggtgtaggtttagaaatctacagagaagacggtactgtagctttttcatctcaagctaagcctttaactattgtaactagtttacaagagattagtggggttgattatttatattcaggaaatatagctaataaggctttattatttcagggtatggatgttatatggagtttttctatggatgttgatgaattttatgtatcaactttctatggatatcaagataataaaatttatcaaattggtagaaacacctctgaccctaatggacatatgatgcctgaattatatgcatggtttgatcattttgaagttaacacacatagttggtatcaattaacagctccttatcctttgttaattgatacgactattcttaattaa

SEQ ID NO: 48577 - DNA, 744 bp, Acinetobacter baumannii; identical to SEQ ID NO: 46055

SEQ ID NO: 48578 - DNA, 633 bp, Acinetobacter baumannii
atgttacgcagcagcaacgatgttacgcagcagggcagtcgccctaaaacaaagttaggcatcacaaagtacagcatcgtgaccaacagcaacgattccgtcacactgcgcctcatgactgagcatgaccttgcgatgctctatgagtggctaaatcgatctcatatcgtcgagtggtggggcggagaagaagcacgcccgacacttgctgacgtacaggaacagtacttgccaagcgttttagcgcaagagtccgtcactccatacattgcaatgctgaatggagagccgattgggtatgcccagtcgtacgttgctcttggaagcggggacggatggtgggaagaagaaaccgatccaggagtacgcggaatagaccagtcactggcgaatgcatcacaactgggcaaaggcttgggaaccaagctggttcgagctctggttgagttgctgttcaatgatcccgaggtcaccaagatccaaacggacccgtcgccgagcaacttgcgagcgatccgatgctacgagaaagcggggtttgagaggcaaggtaccgtaaccaccccagatggtccagccgtgtacatggttcaaacacgccaggcattcgagcgaacacgcagtgttgcctaa

SEQ ID NO: 48579 - DNA, 633 bp, Acinetobacter baumannii
atgaaaaactactttaacagccctttcaaaggggaacttctttctgagcaagtgaaaaatccaaatatcagagtaggccggtatagctattactctggctactatcacgggcactcatttgatgaatgcgcgcgatacttgcttccagatcgtgatgacgttgataaattgatcattggcagcttttgttctataggaagcggggcttccttcatcatggctggcaatcaggggcatcggcatgactgggcatcatccttccccttcttctatatgcaagaggagcctgctttctcaagagcactcgacgccttccaaagagcaggtgataccgtcattggcaatgatgtctggataggctcggaggcaatgattatgcctggcatcaaaattggagacggtgccgtgataggtagtcgctcgttggtgacaaaagatgtagagccttatgccatcatcgggggaaatcccgcaaagcaaattaagaagcgcttctccgatgaggaaatctcattgctcatggagatggagtggtggaactggccactagataaaattaagacagcaatgcctctgctgtgctcgtcaaatatttttggtctgcataagtattggcgcgagtttgccgtctaa

SEQ ID NO: 48580 - DNA, 780 bp, Acinetobacter baumannii; identical to SEQ ID NO: 30171

SEQ ID NO: 48581 - DNA, 348 bp, Acinetobacter baumannii; identical to SEQ ID NO: 6026

SEQ ID NO: 48582 - DNA, 840 bp, Acinetobacter baumannii; identical to SEQ ID NO: 6027

SEQ ID NO: 48583 - DNA, 1542 bp, Acinetobacter baumannii; identical to SEQ ID NO: 30088

SEQ ID NO: 48584 - DNA, 738 bp, Acinetobacter baumannii
atgctaaaaggcttgttcaagttgccgctgcgggcgctagaaggcttcattaactcgttgttccaactgatggcggtgcctttgcagtcgccggactatagctgtatcagcaagcgcgccaagaccgtcgacatcaagtaccgcctccccagccaaggcccggtggctcacttggtcattgatgccaccggcctcaaggtctatggcgaaggcgaatggaaaattcgcaaacacggcaaggagaagcgacgagtgtggcgcaagctccacttggcggtggatgccacaacccatgcggtcatcgctgccgaagtcagcctggagacggtggcggataacgaggtgttaccgacgttgctcaaccccttacgacgcaagataaaacaggtcagcgccgatggtgcgtatgacaccaaggcctgtcatgcgctactgaagaaaaagggggcgaaagccaccataccgccgagaaaaaatgcggcaccgtgggaggaaggccatccccgcaacgaggcggtgacggcgctcaaggccggtgaactgaagcaatggaagaaagactccggctatcaccagcgctcgatagccgagaccgccatgtaccggttcaagcaactcatcgggccaacgctgagcctgcggaactacaacgcccaggtgggcgaaatcctggctggcgtgaaggtgatgaacaagctgatagggcttggtatgcctgttcgccagccagtgaattga

SEQ ID NO: 48585 - DNA, 774 bp, Acinetobacter baumannii
atggataagaatgatgttgttaagaagatacttgaatcaaaaaagtacgaaaaccttgattcagatattgttgaaaaggttgtttccatttctgagaagaaatataaattaaaggaagttgagaattattctaaaaagaaattgcatcaaatatgggggtcttactattctgcctatcctaattgggataaattattaaaaaagtacaatcaggggcagttatcaatagaagatttactaaagattcattcttcgacgaatgaaagagtcgcaacattaaatgacttttacacttatgtatttggaaatatcaaacatgtctcatctattttagattttggttgtggcttcaatccattagctttataccaatggaatgaaaatgaaaaaataatatatcatgcatacgatattgatagagctgagatagcttttttgagtagcattattgggaagttaaagacgacgataaagtataggtttttgaataaagagagtgatgtctacaaaggtacttatgatgtagtattccttttaaagatgcttcctgtgctaaaacagcaagatgtaaatatcttggatttcctacagctttttcatactcaaaactttgtaatatcttttccaataaagtctttatctggaaaggagaagggaatggaagagaattaccagctatggtttgaatcttttacaaaaggttggataaaaatccttgattcgaaggttatagggaatgagttagtatatattactagtggatttcagaaataa

SEQ ID NO: 48586 - DNA, 186 bp, Acinetobacter baumannii
atgttccccaatcaactaacattttattttaactacagaatttctggggatacctcaggtggtttgcaactctttggtttaattggtttgatttatgggccaattatttttgcgttaaccatggtgctgttacggctttatactattgagtttaaagattttctggaacgccaagacaatagctaa

SEQ ID NO: 48587 - DNA, 1176 bp, Acinetobacter baumannii
atgaatgtaaaagctatgctcgctgatttcctcacctttgtcacgccaaaatcaatgcataaagcccgattttcggttttgctagatgcggtaaccgccctggcaaaggatgcgtgttgcaccgttactgcgattggccgggcgatgcctggctcttcagataaggtcagtatcaaacgggcagatcgtctactcaataatcctaacctgcaacgagagctgccattgatttatgctgcgctgacggcttctattgttggccataaaactaagccgatgattttggttgactggagcaatgccgatactgccaagcgacactttatcctgcgtgccagcattgccgctgacggtagagcgttgactctgctacagaagattgccgccgcagaagattatacctgcccacacctacacggggcgtttttaaagcagcttaaagccatgctacccaaggactgtaagcccgtaattgtcactgacgcggggtttaaagttccatggctgaaacaagtgcgtaagctgggatggcattatgtagctagagttcgaggcaatgtgaagcttaaattggcagagcaggacaagtttatcagtgttaatcagctttatcggcaagcgaagaaggatccaaaaagtgtaggaaaaatcatgcttgcccaaacacaacactatgaaacgcaggccgtcctggttggcaaaggttataagctattgaaacgcgataaaaataagacgtataaggaaccatggttgttggtgtcatccttagctgactgccatgggtatgcggataaaattgctaagtgctacagtagccgaatgcaaattgaagaaagcttccgtgatcagaaaagtcaccgctatggcctgggtagcgatttgcatggtaccaagaagaaatctcgcttagagatactgctactactggccgcattggttaattggtttcattacctgctaggtagcgcagcggagaaagcgggtttgcacctgcgttatcaagctaacaccgttaaaaataggcgggtattggccctgaatttccttgggatattactttgcaaagaacccaaacagcgaatacgcaggcaatattatcagcagggacttaaacaaatactacagtgggtggttcagtgggactgggcagtaatcaaacaggctgatagctga

SEQ ID NO: 48588 - DNA, 1476 bp, Acinetobacter baumannii
atgagtttaattattaaagcgagaaacatacgcttggattatgctgggcgtgatgttttggatattgatgaattggaaattcactcttatgaccgtattggtcttgtgggtgataacggagcaggaaagagtagtttactcaaagtacttaatggcgaaattgttttagccgaagcgacattacagcgttttggtgattttgcacatatcagccaactgggcggaatcgaaatagaaacggtcgaagaccgggcaatgttatctcgccttggtgtttccaatgtacaaaacgacacaatgagtggcggagaggaaactcgtgcaaaaattgctgccgcattttcccaacaagtacatggcattctagcggatgaaccaaccagccaccttgatctcaatggaatagatctacttattggtcaacttaaagcatttgatggagcattacttgttatcagtcatgaccgatattttcttgatatggttgtagacaagatatgggagttaaaagacggtaaaattacggaatattggggtggttactcggattacttgcgtcaaaaagaagaagagcgacaacaccaagccgtagaatatgagctgatgatgaaggaacgggagcgattagaatctgctgtgcaagaaaaacgccagcaagctaatcgattagacaataagaaaaaaggagaaaaatccaaaaactctaccgaaagtgctggacgacttgggcatgcaaaaatgactggcaccaagcaaagaaaactgtatcaggcagctaagagtatggaaaagcgtttggctgcattagaagatattcaagcaccagagcatttgcgttctattcgttttcgtcaaagttcagccctagaactgcacaataagttcccgattacggcagatggtctgagcttaaaatttggtagccgtactatctttgatgacgctaactttataataccgcttggcgctaaagtcgctataactggatcgaatggaacagggaaaacgtccttgttaaaaatgatatcagaacgtgctgatggattaaccatatctccaaaagctgaaattggctactttacacaaacaggatataaatttaacacgcataaatctgtgctctcctttatgcaggaagagtgcgagtacacagttgcggaaattcgtgcagtattggcttcaatggggatcggagcgaatgatattcaaaaaaacttatccgacttatcgggaggtgaaatcatcaaactgcttttatccaaaatgcttttaggaaaatataatattttgcttatggatgaaccaggaaactatcttgacctaaaaagtattgccgcattagaaacaatgatgaagtcctatgcaggaactattatcttcgtatctcatgacaagcaattggtcgataatattgctgacattatctacgagatcaaagaccacaaaatcatcaagacttttgagagagattgttaa

SEQ ID NO: 48589 - DNA, 885 bp, Acinetobacter baumannii
atgacaattcaagatattcaatcacttgctgaagcacacggcttgttgcttacggacaaaatgaatttcaatgaaatgggcattgattttaaggtcgtttttgctcttgatacaaaggggcaacaatggttgctgcgtattcctcgtcgtgatggcatgagggaacaaatcaagaaagaaaaacgcattttagaattggtaaaaaaacatctttctgtagaggttcctgattggagaatttcatctacagaattagtggcttatcccatacttaaagataatcctgttttaaatttggatgctgaaacctatgaaataatttggaatatggacaaagatagcccgaaatacataacatctttggcaaaaaccttatttgaaatccatagtattcctgaaaaagaagttcgggaaaatgatttgaaaattatgaaaccttcagatttaagacctgaaatagcaaacaatttgcagttagtaaaatctgaaattggtataagtgagcaattggaaacccgctacagaaaatggttggataatgatgttctatgggcagatttcacccaatttatacatggcgatttatatgctgggcatgtactagcttcaaaggatggagctgtttcaggcgttattgattggtcaacagcccatatagatgacccagcgattgattttgctgggcatgtaactttgtttggagaagaaagcctcaaaactctaatcatcgagtatgaaaaactagggggtaaagtttggaataaactatatgaacagactttagaaagagcagcggcctctcctttgatgtatggtttatttgccttagaaactcaaaatgaaagccttatcgttggagcaaaagctcagttgggagttatataa

SEQ ID NO: 48590 - DNA, 264 bp, Acinetobacter baumannii
gtggttggtgttacgcttacttatcaagaacagattgaagctatgcagcgcttactagaagcaccaaaagccaatatgactacctttaccgatcagagctttaaacaggatatagcaacggatcctcggtcggaactagcaacgaactatgacgaattgactactcctcagcaagacaataagcgtattcctatcccggagcatgttgaaccagaacagaagaagagaggcttcctaagccgctttttccttccatatggttag

SEQ ID NO: 48591 - DNA, 1560 bp, Acinetobacter baumannii
atgaaaaagacacctcaatccttacctgatgatgttgaactgctcaagaaaatgctgcttgagcagacgcaaaagcttgagcggaaactggcgcaaaaagataaacgcatcgccaaattagagcgggttaaccagcaactgtcggacaagctgcagcaattgctggagcgttacaacctgaagaagtaccagaaatttagccccagcagcgagacctacgaaggtgatggcgaagtcttaaatgaggccgaacagctgattgaagacgagtcagtagcgacagagccagataatcagacgaccgagagcgctgagaaagccgctaagccacgccgcccacggattgcccctgagctgccgcgcgttgatgttatccatgatattgacgataaaacctgtacctgctgcggccatgcgctgcatcaaatgggtgaagaagtcagtgagcaactcgagttcgtcccagcacaaatccgggtgcttagaaacgtgcggctgaaatacagctgccggcagtgtgagaccaacggcaccaaggtcgagataaaaattgccgatgtgccgccagcagttatcccgaaaagcatggccacaccgagtctgcttgcccaaatcatcagcagcaaaatgcactatggcttgccgctgtaccgtcaggagcagttgtttaatcaggccggcattgagcttagccgtcaaacgatgagccgctggctgataagctgtgcagagaaactgaaaccgttactggcgttaatgaaagctgagcttctgaaacagccggtgctatgggcagatgaaaccacggttaatgtgctggatgttgagaaaagcacctgctacatgtgggtatatggctgtggcttagagcaaagtactggccccaaactggtgctgtttgattatcaggatagtcgcagcagcatacatcccaccgacttcctggcggggtttgccggctatctgcaggttgatggttatgccggatatgagaaaacccatgcaaccttagtcggctgctgggcacatgccagacgtaagttcgttgaagcacaaaaagcgcagggtaaaggcaaaacgggtaaggcggatgtggcccttaaccatatccagaaactctatgcactggagagtcaattaaaaaccgtgccgcctgataagaaatatgacgccagacaaacgctagccaagccactgttagaacaattcaaaagctggctggataaatcaagcgagagtgtcacgaaagaaagtttactgggagccgctattacgtatagcctgaaccagtggcccaagctgatgcgctatctggatgatggcaggttgaatatcgacaacaatcgcgctgagcgcgccatcaaaccgttcgtgattggtcgcaaggcatggctgtttgccaataccaagtcgggtgcacaggccagtgccgcattgtacagcttggtcgaaaccgccaaaatcaatggtctggaaccctatgattacttatgccggttgctgacagagttgcccaaagccaatacccacgagcaattgcaacaactactgccttactga

SEQ ID NO: 48592 - DNA, 357 bp, Acinetobacter baumannii
atgaaaatgtttcttgatgtgccccaggtctatttgcataaacagccggtcgactttcgtaaatctattaatggtttatcgttgctagttgagcaagagatgcagctctcgccttttagtggcgcactgtttgtattttgcaatcagcagcgtacccggttaaaagtactgtactgggatagcacaggcttttgcttgtggtacaagcggcttgaaaaagacaagttccgctggccaaggcagatgcctggcaaaatcctgtctattagcgaacaacagtggcattggctgttgcaaggtgtcgatattcaaaaaatcaccgcccatcagccactgcattaccagagtgtgggctga

SEQ ID NO: 48593 - DNA, 285 bp, Acinetobacter baumannii
atgcaccgcaccaaagaacaatggttcgctttattcgccgagcaagcccaaagtggcctcacccaaactgaatttgcaaaacgtcagggcatcattcctacatattttagttatcgcaagagacaattgttggcgtttcaggatgatgacggtggctttattgagctgacgccacagggcttgcagctgaataaatccattttactacgtaagcgtgatgtggaattgcagtttccagccggcactgatgtgctgtggttagcggccttgctcagagcgctctga

SEQ ID NO: 48594 - DNA, 1842 bp, Acinetobacter baumannii
atggtttttctacgtcaacaactgttatttatctttattgcctttttatccacctgcgtaggtgtatacgttgcatgggatatgaacctgacatgggttaagttttatagctatttaatttcagaaaaagctattttttcaattctctttaactatgctgtcattcaactattttttattgtagttggtcgtaagtataccgctctttttttaagtcaattattcgttatttttttaaattttattaataaaaagaagcaacaatatttatttagtaatttaagtcctgaagatatttttttacttccagaagccatgaaggcaactccttggcatttacaacttatcttttttactctggtaattttctttcttattgtactgctgatcgctatacgtaaagaaagcaaagccacttttcatatctatgttcccaatattgttatttttggattacttggtagtggcttaatctacttaaattttattaaaaatcctacaggggcttgtttctctgaaaataaacccatgatttgtgcaagtttacaggagtttccaaataccagaaatgactggattggagactatcggaaaatacaggagtatggatttttaaccttttatgtttctaaagtattggacaatgtaacaagtgtattgttacctaatcggaaaatgtctgagcaaggtatgcagcaaattttgcagcaacatcatttggttcaacctttagaaaagaatgagagagaatatccgaatattattattgttatggaagaatctttttgggactctcatcatttagaaagtggattacctaaagatttattatcttttgtttaccaaaatcaagtttctaacttattgtcaccttcttttggtggaggtacggcgaatgtcgagtttgaagtacttacgagcctcaatacaacttttttcccaaatgaattgttatatgtttctaagctaaagaagccaatttatgctctaccttattatttaaattcaattggttatcaaacatttgcaatgcataataattatagttactactataatcgtaataaggtatatccagatttaggatttgagaaatttatatcgcttgaaaatatgattgctaaaaaagatcttgggaaagtggttaatttgggtggttggacgacagatgatcttatttttgattcaattaagtctactttaaaagagaatgagctacagccaaagtttatttatgcaattactgtcgaaaatcatccaatgtataatgatgaccgatttggcaaacaaaattataaatttaataaagagttgtctgaaactgaaaaacaaaaactaagtacttatactgctggaactgtgcgtgctaaccaaaagttaaaagaactcgctgaatatttaaagacagtagatcgaccaacaattttagtagtttttggtgatcatttacctaatttacaagaagtttatgatagctatggtttttttaaagatgatcctgagcgaactaacttaaaaaattaccagacaccgtttgtagtgtggagcaattataaattagataagaagcctttaaagcagccttatattgctgcaagtttcgttgctccaaaactattaaagctagcagggttgcctttgtcagattactatcaatttattgatgatgtctcgagttgttatagtgccattcaccaaaaatttatcaatgaaaatctaacgtgtaattttgataagaaagcgctgttaaaaggttatgaaaatctaaataaggatgtattagatggatataatcatacttataaaattatgcagaataaccaaaaagagatggaacaataa

SEQ ID NO: 48595 - DNA, 672 bp, Acinetobacter baumannii
atgactttaagattaagtgtcgctgcgatgggtttattactcagcggttcagtattttcagcagttacaattacagcgccagaggaaatcgtaatccttgcggtgaatggtcaggaagtcaactctggattattccgttcttctaaaaataattataaagtcgatgctggtgagacaagcctaagtgtacgttatcaagaatattttgagcatttaagtggcgaacacgatattgttaagtcaggagtggttaccattcaaactccagcgcttaaagatggtcaaacttataagcttgcaatggtagatgctccaaaacaatttgaacaagccaaaaaatatgctgagcaacctacagtggctttatataattcaaataatgagttaattgttcaacaaactggtgccaataatgaggcaaggccgtggtttgcatcgggattgctagggaaagttactgatttcacgactaaatcatctaaacaacaacctgacgctgtgtatgcagctgcaaaacctaccacgactcaagctaatgcacctgttgcaacaactatgcctcctactggtgtagcacaaactaatgatcagcgtttggcagaaatttggaaaaaatcttctaaagcagagcgtcaaaagtttatggcttggttggctgagcagtcgaattaa

SEQ ID NO: 48596 - DNA, 669 bp, Acinetobacter baumannii
atgagctgcacctttcaactgtccaaagtccctgaacatttacttcaagccttacatgaagtcattcctcattgtgaattaatggcacaacagttgccagaaactccaatttctttatggttgattccacctgtttttccaactgatcggttggatgacgaagttattcgccgtatctggaatgacacgccgtattggattttctgttgggcatcaggcttggcgatggctcagtggatacttgcagagccgcaccatgttaaagataaagtggtgttagatttcggagcaggttctggtgtagtggcaattgctgcaaaaatggcaggagcaaaacgcgtaatctgctgtgatattgatcaggtcagtttaaatgcttgccgtgaaaatgctttacttaatgatgtagaactcgaatatttggatgatttatataaggctgaacaagtcgatgttttacttgctgccgatgtgttatatgaccaatgtaatcgctttttcttagatgaatttttaaaatttgcaccagaagtttgggtagcagatagccgagttaaaaattttagtcatccaaaatatgaaaaaattgaagaaagaagtgcaacaacttggccagatctggatgaagcgaaagaatttagaaatgtaagtttttataagacgctgtaa

SEQ ID NO: 48597 - DNA, 423 bp, Acinetobacter baumannii
atgaataaaagtattctatgtttggcattaagtagtatgttcattttaactgcatgtcagactacgcctcgacaatataatggttcaactggctaccagattgaaaaccaaacaaaaacttcagcgactttagcttacactttagctggtcgtagtaaccagcaacttgatgagcgtaaattgcaacgtgcttgtcaaaatgtgttaggtgctcagaaagtttataaattatcaattttaagcatcaatgaaattcctaatccagctaaagatgagcattacggaattcaactaggtgaaacccgcgcttcttttggcttatcaaatacacctagcttaaataatggtgaagattatgcgacacgccaagcacttgaagcacgtccaagtacattaaaagtcgttcgttatacttgttcataa

SEQ ID NO: 48598 - DNA, 1320 bp, Acinetobacter baumannii
atggttgatcaaccttctaccgcaacaactccacattctaatttagatacaaaaacccgtctaaaatcaattttgggcggttctgccggtaaccttgtcgaatggtacgactggtatgtatatgccgcatttacgctctattttgctcatgcatttttcccaaaaggaagtcaaaccgctcaacttcttcaagctgccgctatttttgcagtgggtttccttatgcgtcccattggcgcatggattatggggatctattctgaccgtaaaggacgtaaagcgggccttacgctttccgttactttaatgtgtatcggttcgctactgattgctgttacaccttcctacgaaagtattggcgtatttgctccattgcttttggttattgcacgtttaattcaaggcttaagtgtaggcggtgaatatggcgcaagtgcaacgtatttaagtgaaatggcagaaaaagatcgacgtggttttttctcaagcttccaatatgtcactttaattgcaggacagcttacagctttatgcgtactactcatcttgcaaatgatactcaccgaagaacaactgcatgactggggatggcgtgttccgtttttcatcggagcccttttagctattgtggtgttccgtattcgtcgtggcttattggaaactcaatcctttaaaaacgctcaagcagaaacagatcagccgaaatcaggaatgtttgctttatttaaacattatcctaaagaggccttcactgtattattcctaactgctggtggtactttagctttttatacttacaccacctatttacagaaatatttagtgaatacttctggttttaccaagcctgaggctactcaaattaccactttagccttattcatctttatgtgcttacagccattggcaggtgccttatcagatcgaattggccgtaaaccgcttatgatcgccttcggggttacaggtgttttattcacttatattttgtttgatacacttgcaaacacgcataactactggactgctttctggttatgtttaggtggactagtcatggtaactggctacacatcaattaatgctgtagtgaaagctgaacttttccctgcacatattcgagctttaggtgtcgcattaccttatgcaattgcgaatactttatttggtggtacagccgagttttttgcattaagttttaaagaagccgggcacgaatcttggttctttatttacgtcagtatcatgattttcatttcattgctgatttatatcttcatgaaagacaccaagcatcattcaaaaattaaagaacattaa

SEQ ID NO: 48599 - DNA, 1509 bp, Acinetobacter baumannii
atgtcaaattgcccgaaaaaatatattgtcgcttttgatcagggaacaacaagctcaagagcaattgttttagatcatgatgcgaacgttgtcagtattgctcaaagagaatttacccagatttaccctcagccaggttgggttgagcatgatcctatggaaatttgggcaactcaaagtgctgtatgggtcgaagcattggctcaagctggcatcaagagtgaacaagttgcggcaattggaattacaaaccaacgggaaaccactattgtctgggacaaaaaaacaggaagacctatttacaatgcgattgtttggcaaagccgacaaacaacggaaatatgcaatcaattgtataaagcaggttggcaagaatatatccgtaagaccactggtttagtcattgatccatatttctcggccacaaaaattaaatggattttggatcatgttgaaggcagccgtgagcgtgctgaacgaggagagctattattcggtacggtggacacttggctgatttggaaactaactaatggggccgtccatgtcactgattttaccaatgcatctcgaaccatgctgtttgatatcgaaaagcttgagtgggatgaaaagcttttacaagctttagacattcctagagcaatgttgccggaggttcgtagttcatctgaggtttatggatatacacataccattagtggacaagaagtaggaatcccaattgccggaatcgcgggtgatcagcaggctgcgctttttggtcaaatgtgtgttgagtcgggacaggctaaaaatacctacggtactggctgttttctactcatgaatacgggtaaaaagattgtccgttcagagcatggattactcacaactattgcctgtggtgcgagtggtgaggtgaactatgccttagagggtgccgtatttaacggtggttcttgcgtacagtggttacgtgatgaattaaaggttattaagaatgctaaggattccgagctttatgcaacacgtgtaaaggataataatggtgtatatgtagtacctgcttttaccgggttaggagcaccgtattgggacccgacagctcgcggcgcaatttttggtctgacgcgtggggctagtattgaacatattatccgcgcaactctagagtctatagcctttcaaactcgggatgttttagatgccatgcaacaagatgcagaagaagagcttcgtacactccgtgtcgatggaggagtaacggaaaataatttcttaatgcaatttcaggctgatattttagcgacaccagtagaacgtccaataatgaaagaaactactgctttgggtgcagctttccttgctgggctggcgacgggtttctggcaagatctacatgagttaagaaataaatctgccatagaaaaggtatttgagccaaaaatgtcttctgagcaatctgagatgatttataagggttggctcaaggcagttaaacgtagtcaaagttgggctgaggattag

SEQ ID NO: 48600 - DNA, 1518 bp, Acinetobacter baumannii
atgaaagtacaacctaatgattattcaaaaatatatgatcttgccgtaattggcggtggtattaatggtgttggtattgccaatgatgcagcagggcgcggattatcggtatttttatgtgaaaaagatgatttagccagccatacctcatctgctagcagcaaattaattcatggcggcctacgttatttagaacataaagaattcaggctggtcagagaagcattagcagagcgtgaagtattgctagctaaagcgccacatattattaaaccaatgcgttttatcatgcctcatcgaccccatttacgccctgcatggctaattcgagcaggtctatttttttatgatcatttgggaaaacgagaaaaattattaggatcaaatctcatttatttcaaagaagatagccctttaaaaccagcgataacacgtggttttgaatattctgactgtactgtagatgatgcgcgtcttgtggtattaaatgcactacaagctaaagagaaaggggcgaaagtcgttacacgtacgcgttgtgttaaggcttataggcaacaggaattgtggcatctggagttacaaagcggagctgagttctatcagatacgtgcgaaagctattgtaaatgcggcgggaccttgggttgaagaaattattagtgaaaacctgagtttaagttcaccttatcaaattaggcttatacaaggaagtcatattgttgtgccaaaattatatgactgccataaggcctttattatgcaaaacgaagatcgaaggatcgtttttgcaattccttatttagaaaaatataccctcattggtacaacagatcaggaatacacaggtgatccacaaaaagtagagattactgatgtggaaatcgattaccttttgacagtgacaaattcacattttaaaaagcagttgacgcgagctgatattgtaagtcagtactcgggtgtgcgtgctttatgtgatgatgagtctgataatccatctgcaattacacgcgattatactttggctctacaggcagaagataaaactacaccattgctctcagtgtttgggggcaagattacaacttaccgaaagttagccgaagctgctttagagcatctggctccgttttttaatgacatggcagaggagtggactgcagatgagccattacctggcgccgaaaactggaccacactagatgatttaatcaatcagattaaaacacgtgtaagtggaatttctgactcacttgccaaccgttgggctcatgcatatggcacaagagtgtggaatatgcttaaagagcgaaatgctatagaacaattgggtcaacattttggccatgatttgtttgagtgtgaagtcagatatttgtgtgaatatgaatgggctcacacagcagaagatatactttggcgcagatctaaattaggtttggcatttgatgaaaaacaggtaaaagttttagaagcttatttatctgaacgtcgattaaaagacgatgccgcataa

SEQ ID NO: 48601 - DNA, 1833 bp, Acinetobacter baumannii
atgaccacagtgaacgcaccagaattcgttcgtcatcctaagcttatagcatgggttgaagaaattgcaaacttaaccaaaccagcaaaaatcgaatggtgtgacggaagcgaagaagagtatcaacgtctaatcgacttgatgatcgctaacggcaccatgcagaaattaaaccaagaaaaacatcctggttcttatcttgcaaattctgacccatctgacgttgcgcgtgttgaagatcgtacttacatctgctctcaaaataaagaagatgctggtgcgacaaacaactgggaagatccagctgttatgcgtgaaaaattaaatggtttatttgaaggttcaatgaaaggccgtaccatgtacgttgttcctttctctatgggtcctttaggtagccatattgctcacattggtatcgagttaactgactctccttatgtagctgttagcatgcgcaaaatggcacgtatgggtaaagcagtttatgacgtattaggtacggatggcgagtttgttccttgcgtacatacagtaggtgctccacttgctgaaggtcaaaaagatgttgcttggccttgtaacccagagaaatatatcgttcattacccagaaactcgcgaaatctggtctttcggttctggttacggcggtaacgcgttacttggtaaaaaatgtttagctcttcgtatcgcttctgtcatgggacgcgaacaaggttggttagctgaacacatgcttattcttggtgtaactaaccctcaaggtgaaaaacactacatcgctgctgcattcccgtctgcttgtggtaaaacaaactttgcaatgttaattccaccagcaggttatgaaggttggaaaatcgaaactgtaggtgacgatattgcttggattaaaccaggtgaagatggtcgcttatatgcgattaaccctgaagctggtttcttcggtgtagcacctggtacaaataccaaaactaacccgaactgtatggcaactcttcacaaagacgttatctatacaaacgtagcagtaactgacgatggtcaagtatggtgggaaggtctttctaaagaagttccagcaaacttaactaactggaaaggtcaacctcacgtaaacggcgaaaaagcagcacatccaaatgctcgtttcactgttgcagcaggtcaatgtccatctatcgatgctgattgggaaaacccagcaggtgttccaatttctgcattcatcttcggtggtcgtcgtgcagatacagtacctttagtttctgaagctttcgactgggttgacggtgtatataaagcggcaactatgggttctgaaactactgctgctgctgttggtcaacaaggtattgttcgccgtgacccattcgcgatgcttccatttgctggctataatatggctgattactttgaccactggttaaaccttggtgcgaaagtaagtgaaaaagctgaagcttctggcaacaaattaccaaaaatcttcaatgtaaactggttccgtcgtgatgctgaaggcaacttcgtatggcctggtttcggtcaaaacatgcgtgttcttgagtggatcattgatcgttgtgaaggtcgtgcgaacgctgttgaaacacctatcggttttgttccaacatatgaagacttgaattgggaaggtactgagttcactaaagaacaatttgacctcatcacaaatcaagataaagaccagtgggttactgaaattgaaagccacactgagttattcaataaacttggcgaacgcttacctaaagcattaaaagaacgtcaagcagctttacttgaagctgtaaaaactggcttctaa

SEQ ID NO: 48602 - DNA, 939 bp, Acinetobacter baumannii
atgcggcctttgaaacctctttcaatcatctataacgaaaaatcaggatttcatgcttcaaaacatgaagacgtctatgagcagctcatgactgtatttacagaatatggttttgaaatacaagtatttgaattaaatgaaaatacattatttgatgatttgataaataatgttattcatcgacattcacaaaatgaaaatacaggagtggttgttgcggcaggaggagacggtactttaaatgcggttgcaactaaacttaaaaatacttctattcccatgggaattctgcctttagggacttttaattatgttgctaaagttttagagattccgttagaccttttagaggcagcggaggttattgcaacaggtaaacctaggtcagtacatgtagcagttattaatgatcatatttatctaaataatgccagtttaggtttatatcctctttttatcaaaaaacgcgaactctacaataaatatttaggaagactgcctttacatgcctatacctcagctttagatgttttattgagagaaaataaatcaatgaagctttctataactgtagatggcaagaaatacccagttaaagcgccgctcattttctttggaaataaccaattgcaactatgtgatatgaagctcagaattgcagaatgtgcagcacagggaagagtcgctggagttgtaattacaaaaagtgataagctgagtttactaaatatgctttggcaatgggttcaaggtaaagttgaagatgcacaagatgtatatagtttttgtgctgatcatgtcattgttgattgtgcaaagaaaaccaaactcacagtggccttagatggagaaatcatagagatgaaacctcctttaaatttcactgtagaaaaaaatgctttaaatattatggtgccgaatgttactacatctgtctga

SEQ ID NO: 48603 - DNA, 759 bp, Acinetobacter baumannii
atgttactacatctgtctgatttacactttgggacagaaaaaaaagagtgtttagaggcaataagagatttttgtattcagcaacagcctgaagtgattgttgtgagcggcgatattactcaacgcgccaaatatgaacaattttttaaatgtcgacagtatttagatagcctcaatattccttatcttgtggtgcctggtaaccacgatatacctttgtatcatgtctggaaccgttttttttctccatttacccgttatagatatttttttggtgaattagagccgactttagaaactgaacatttttatattgttggggtgaatagtatacgtcgtcgttatcatacgcgtgggcatatttcgattgaacaaattcaagctacttatgagcgtttagacaggggacctaaaaataaaataaagctagttgtttttcatcaacccttttatacgccccctgataataagcatggaataaaagattgtccggttctgggtaaaatcgctttagaaaagtggagtacaactggtctatttggaatgttacatgggcatctccataaaacagctatatatgatttaactcagatttattctctaaaaatagatcatcctatttttgatatacatgcaggtacagcaacttctactcgcctatatcatcataatccaaatagctttaatacaatttcaaatgaaggaaaaattcagcattattggtttaattacgatttaaagatttttcaattaatttaa

SEQ ID NO: 48604 - DNA, 1374 bp, Acinetobacter baumannii; identical to SEQ ID NO: 45850

SEQ ID NO: 48605 - DNA, 279 bp, Acinetobacter baumannii
atgaaacgtttaaataaattagcccgcatgactccagaggaaaaatctgcacttaaaaaagaattttgggaagctgcaaatgatgagccatttccgccagaagtggtcgccgtggttctggatgtttcaacttcgcttctgcagcaaaagcgaacccatggtggtggaattccctatacaaaagtcagtccacgtaaagttctttacatcaagtcagacgttattgagtatgtaaagaaaagaaaaggaactaatacgtctaatgtaagcggctcataa

SEQ ID NO: 48606 - DNA, 351 bp, Acinetobacter baumannii
atgagtgaattatatagcagtcaagctgtcaaagatgttcttaatgaaagagaacgccaaattataaaagaagggtatttacctgaatttgataatctctatgaagcaaatgaattgccacgagctgcatcttgttacgttgatcatgtagtaagtagaggttgggtttataacagcaaagatttcggccccgaagtgtatatggatgaggatgctgcaggatggtggccttttgctgatactttctggaaaccaaaaagcccaagacaagatttggttcgtgcagccgctttattaattgcggagattgagcgtcttgatcgagaagttaaagcggaaagtaaggagtaa

SEQ ID NO: 48607 - DNA, 390 bp, Acinetobacter baumannii
atgttagatttgaataaggaaagagaggcttttctgaataccttccaatattacaaaggaagaagagacattatttttagtaatgagcatgaactgtttatgactagatcaaacaatccttctgaaattgctcagaaagaaataagcaacatgaatagacgttgggatgcttggcttagatgtgcaaagcatcgtgatgcagagctagaaaaagccaaagctcaggcggtgccagagggttactgtttggtaccgaaagagattccagacagcgttgttagctgtttagaaaatagtggattccattggggcgatgggactcgtgatcattacacgcctatttattctttgatggttgaagtggcaagcgaatcgggagctgagggatga

SEQ ID NO: 48608 - DNA, 549 bp, Acinetobacter baumannii
atgaactttttgaaacaagtaactcttaattataagcaccttcaagcaacaagtctttttgctgcacatcgtgaagtaaggttctacttaatgggtgtattggttaaagatggagtgatggccgcaacaaatggacattgtgctcttatctgtgacgctccagaagtaaaagatttagaggtgattatcccaattgaaatagttaaatcttttattaaaaaggtcggtaataacccaaaagtaaagactatcactttaagccaaattgatgatgaattttggttgctggattacgaaaatgggatgtttgaattcttccgaccaattgacggcaagtttccagatataagccgtgttgatattccaaaaccgaccgaaccccctaaagagtttgtgcagtggaatttagaatatgtgggccaattcatgaagtgctccaaaattcttaattgccgattccctctcttttatccatctggtgccactacttcaacttatgtggaatttgtggacggcgtacacggcctattgatgccattgcgagtttga

SEQ ID NO: 48609 - DNA, 435 bp, Acinetobacter baumannii
atgagtaatgtaattcgctttagacgaaatgggcttgcacataagatcagcccgcaagatgtaaaacaaagattaatcaacccaagtaaggatgttgatctaaagaaagcagatcaaataattggaattgattttgaaagcttgccacatgatgagcttttaaagttggctagagctggagctatagaccttatagaaacagatgctcgctataagaaaaccaataatgcaactaaacagattcttcacttgctaggtagattcttggatcgccgatctaaagaggaatggaagaagtataacgactccatgacactagattcagaagcagcagcaagagctatcgcctttgaggaagccaataacatcttgccagaattagcgggcagtacgtttgccaatgtgtttgcaaataaaaatgaggtgcaaccatga

SEQ ID NO: 48610 - DNA, 417 bp, Acinetobacter baumannii
atgcgtactagttcacaactttttccagaaaacaaaagcgtgactgtggatgaccttattgcagctcgtagtgaagctaagaatgatatgggtgatatcaatgccctactgtccgcaattgagctaagtcttgttgaaaaactaaaggatcacaacttaagtaagtttgcctttgataaaacctttcgcttgattgatattgccaaaactcaagcagatttatctcaggattatcacaacggtgagcttgctcaattaactggtggtcaataccaacttgatgagttgaaaaataatattacacacctagaggttgtcccagagacgcaagtaatcaacacaaatcatttagctccagcgaatgcggccatctctaaaacacttacagaaggttttaagaatgacggacggcgttaa

SEQ ID NO: 48611 - DNA, 723 bp, Acinetobacter baumannii
atgaaccaaatcacagatattagtcaacaggactgcattagcccataccttcgctcatcaaacaaaaacaagactcctgaaaagatgcttgcccaaattaatgcatggttgcttgatgaggacttttgtcattatttttcaattcaaatacaaggccaagaggtttatccattcggcgtgataaatcgtccgttctttcatcttgatcaagcagaaagaaagctagaaagcttaaaaagcgcaaaccctaaaatttgttactacatgagttatggtgcttttgataaatcaatcttagattttgaaaatgaaaatgcccctatgtgggagcgtgcttggcttaatcaacatgaattccgtttgatcaaattgaatgttgaaaaaatggctgaagaagatttagttaagctaattccaaactataaagatgttctaacttggcaagcagaacaaaacacaagtcaaagctgtcattactacttttctcaatcttttgatgattcagaaaatgagattaccacatcatcaccattctatttcaacctaaaagatgcattgatagctaagttgtattttgaaaaaacaatgcctaaacgccgcttcaaaattcattctggagttatgtctacacaaggattaatgaagcttgatggtggaacaagtgaacactctcaaggcttagttgatgctcacaaagagcgcttagcttcacttaaaaaataa

SEQ ID NO: 48612 - DNA, 657 bp, Acinetobacter baumannii
atggaattacatgaaagaattgtccagaaaatgaaagaaaaaaagttacgacaagtagacctagccttggcaacgggaaagtcaaaagtagcagtattaaaatggataaatggagaaaatgtacctaagaccgaatcgcttaagaaattagcagaattatttggtgtttcagatagttggttaatgcatggtactgaagaaaaactggacaataatgttgttttaagtgaaaagatgccatcagatggtcgtcctgttccagtgatatcgtgggttgcagcaggttcttttagtcccattgaaactgttttaaaagatactgaaattgaggaataccttcccccaaatcgtagatgtggaaaaaatggatatgcattaaaagttgttggatactcaatggcgccaactttcttacccggtgacagaatttatgtaaacccagacatacaaacatttgatttaaaaacggatgatcttgtaattgttgcatgtgctggcgactcagaagcaaccttcaagaaattaataattgagggagaaggctcaagtaagtttcttgaaccattaaaccctgattggcctgataaaattataaaactatcagaagattgcagacttgttgggaaagtagtaggactttatagggatatttactag

SEQ ID NO: 48613 - DNA, 138 bp, Acinetobacter baumannii
atgttggtttctagaattaccttatggaagtgggaaaaagaaggaattccgctaagaacacaggcctttttagaaattgaatcaaaagggattttaaaggcggatttacttagcaaatcgagtcaatcgttaaattaa

SEQ ID NO: 48614 - DNA, 297 bp, Acinetobacter baumannii
atgaatgaacaaatcttagcacaaaattcagactgtgcaagcccatatgatgaggaggatcaagtccttactcaatggcaaattgatcatgacgcatatgcagactcaatagctgagtacaaggaatctcgcaaagaacctgaaaaggctttgggcgttcaaaaagatttcaacaaaacttcccatccaattggggaggttatagcggacctgcaaaaacattctcacctttatgcacttttgaatcgatttgagagcgctgtaattaaccgtctaagagcaaaggataagttgtaa

SEQ ID NO: 48615 - DNA, 1071 bp, Acinetobacter baumannii
atgcacgataataattctattgatggcggggtaattttgcctgatccattaattgatagtgatgtggatttacgcgactttgcatacatgccacttgatgtggtgcgtttcagagacagcgatttcacagctattacagatggggaagcatttaaggcaggtgttttgctttggtgtgcttcatggcatcaagtgcctgctggatcacttccaaatgatgatcgtattcttgcaaatcttgcgggttttggtcgcttcattggggaatgggtaaaggttaaagctgaggcattgcatggctggaaagagtgcaatgatggccgcatctatcacccaacaatctgcgagaaagcacaggaaagctgggcatcaaaacagggccatcactacgcaaaatttgcggacagaatgcggaaatacaacaaaaagcttgagtcagaaggcaagaaatccatagatattccaacaagtgaacaatggatagctgctggatgtccaaaagattgggttgagtcttccacaagtgttccacaagaattccatcggaattccaacggaactccaaaagaaagccaaaatcaatctagcggaattccttcgaattctgctcttaagggagaagtaatagaacataagggaaataatataaatatatgtccgcctaacggcgaacctgtacccgctgaaaaaccaaaagagagtttcaaagaagaaatccaagagatctttgaattctggaaaacaacgtttaacaaaaacagccgtactgttttggacaataaacgtaaaactaagattcaagccagactcaaggagggttacacagttcaagacattaaattggcaattactaattgctccaagtctgaataccaccttcaaaacaactttactgacattgagttaatttgccgtgaagcaacaaaacttgatcggttcattggtatgtctgggcaagagccaaacgtagcgcaccagtcttctgagcaaccacaggaacagcaagttttcagaccaacgccagtgcgtgtccaatatggcaaagcctatgctgagggtggtacagaatga

SEQ ID NO: 48616 - DNA, 1413 bp, Acinetobacter baumannii
atgactaatgatttgaatgtaactggtattgaaaaggacccattgtcagatccaagcattgaatcctctgttctggtttcaattctgacgattagtgaggctgctgattatgtggcacaaatgcatgagcatttattcactattcatactcatcaagtgatttttaaagctatgcgctcactttatgagcgtggtgaaattattgatgaacttacagttttgagagcaattaagtcgcttggggcagagtcaaaaggtatcaatgaacaatacatcattgagctattagggaatgtcgtaggcaaagcaatcaactttaagtcatacatcaagatgctggaggaattgcaccttagacggcagcttcgagatgttggcaaaaaaactcagatttatgcaaatgatgtgggttatggatctgccgatgatgttttggaaaaggcaaataccctcttaagcaatattaattccgtgtctaacaagggtgatgtagagcacctttctcattctgtaatttcaataatggaagagatcaacagcatccaaactgaaaggatgagcggtcaatacagagttcgtggggttaatactggttttgtagctcttgatcatcgaattggggaaattaataacggcgatttagttgttattgcagctcgtccaagtatgggtaaaacggcctttgctttgaacttggcaaccaatattgcaactaatttacgtaagccggttttgattgaatccatcgaaatgaaaagagatgcaatcaccaagcggatcatctcaagcgtaggggatcttaaactttcaaaaatcaaaaatgctgagttggatggcgaagattggacttgttttactgaggctgcaaaagttattcaaaattcgcctctcatgatcatggatggcgccgtcacaatttctgatatcagaaagcatgcgcgcaaagtgagatcggaagagggttcgctgggtgccatttttgttgattacttacaaaaaattattacaccgcatttgccagcaagtgcgtctgaaaatgaccgtttgacttatatctcagattcattgaagcgcgtggcaatggaatttaattgcccagtgtttgctttatcgcaattaagtcgtcaattggaaaaccgatcagataagcgaccaattatgtcagaccttcgcggatctggagcaattgagcaagatgctgacgtaattttattcctttaccgggatgagtattacaacggcgagaagtcaaaaacacccggtttgcttgaagtgaacgccgcaaaagtgcgtgacggctcagtaggcaaaacctttctttgttctgagctggactatagccgcttctcaaatgtgcatagtgatcaattggcagctcttgaaagtaaagataattcaggaagcttcatatga

SEQ ID NO: 48617 - DNA, 279 bp, Acinetobacter baumannii
atgaaaacgttcttatcaatcatggttcttatttgtatttcaacttttctgggtttggttatagcagctttggttgccaagactcatcaacccaaaaacaaacgaacaacctttcgttttccattggccttcatggacagcactttttacttcatttgcacattgacccttcttgatttgtgtgggcgtaagcaattttggtgggggtatttaatcgtaattttactaatcctgtttctaaatttttattgttatgacaagtgggagcgcagccaatga

SEQ ID NO: 48618 - DNA, 345 bp, Acinetobacter baumannii
atgaaaccagaacagtttattcgtgagcaaggattggataaggcgcgagaggttgttgaaggcatcccaagtaaatatatggagtgctactactcaacattgtgttactgcaccaaagcaaaaaagtattcagatcgttttaatccgagaattgagcttgtgaacatggatgacctcaagcgtcttatggagtcagttgctttggtgattgagcactacacagttgaaagagccaagatatatgcaaattcaccttacaccgcacctgaagtgaagcaagcattagaaagagcaattgttgattacgaatcaatatatggaggcggtgaatctcatgccaactag

SEQ ID NO: 48619 - DNA, 1122 bp, Acinetobacter baumannii
atgaactctcccaatgtaaatagctatcatccggatttggtagttgaagaagcgaaaaatggttggcgtattgtacgtttgaatcgacctaaatcattacacgctttagatgaatcaatcgtaacggctctattacgtgtatttgaagacttccgtgatgatgagcaagtaaaagcaatttggttggactcgactacaccaaaagcattttgtgcgggtggagatgtacgcaaattacgtcagctggtaattaatcaggaagtagaaaccgcaaataaatttttccagcaagaatatgctttggatttattgttacataactatgctaaaccggttgttgtttggggcgaaggctatgtaatgggtggtggtttaggcttgtttatggctgcacctttccgtttggttacaccatattcacgtttggctatgcctgaaattaatattggtttataccctgatgttggagcaagccgtttccttgctgaccgtgggcaaattggtttatttaccggtttgacaggttctattatgacggctgctggggcatatagcattggttgggcgacgcatatttgtgaagcgcaacgtgataatgttctacagaaagtactcaatattaattgggctcactatccggcaggtgatttccgtgcgattgatgatactttaaatagtttgcatcgcccggttgcagcagggccattacaaaattcgttagacgttatacatagtgtttgccgtggttcaagctttgaacaagactatcaagcgatcgtcagcttgcgagatgcaagcagtgactggttgcgtcaagcgagtgaaaacttacaaaagggctcgcctagtacggcagcaattacttggttgttatggcaatggggtaaacaagttcattcttgggatgaagtttttgatttagaagcgcaaatctctgaatggaaaattcgccatcctgactttgtggaaggcgtacgtgctcgtttagtcgataaagatttatcgccagaatggaaagcatgtgaagaccttacattacgaggtattttggccgatgatccaccgatcacgacgattgatagctggaatgcattacttagacaatatggcgtagtgtcataa

SEQ ID NO: 48620 - DNA, 219 bp, Acinetobacter baumannii
atgtcatgtatgctgactttagaagaaatcgaaattaaacggcaagagctggaaagacatcttgaagatgttatggctgttgaactgaagaagtggcaaagcgaaaataagctatgtgtttccgatgtgaatatacgcttggctaatgttgattgtctcggagggcctaaacataacgttgttactggagtaagtgttgatttagattacaaaccttaa

SEQ ID NO: 48621 - DNA, 516 bp, Acinetobacter baumannii; identical to SEQ ID NO: 46038

SEQ ID NO: 48622 - DNA, 354 bp, Acinetobacter baumannii
atgagcaattttgtatttaagcgtggtgacactttcaacttaaatcttcagctagttgatatggatgaagccctgcaatatccaccagatgatgtgcgccgtgcaattgatcttacaggttataccttcacttcacaggttaaagctctggctgatggtgctactgtggccacattaacttgtactgcattaagccaaagcacacagaaagggtggctgaacattaaatctagtgcaagcactgcaacttggcctttagggctgtgtcagatggatattaaagctgtagttagtggcactacacagcacactgaaactttgactttccaagtgattgacggagtaacagcataa

SEQ ID NO: 48623 - DNA, 918 bp, Acinetobacter baumannii; identical to SEQ ID NO: 46092

SEQ ID NO: 48624 - DNA, 642 bp, Acinetobacter baumannii
atgcctgtatttagcactcattttaagagtgacggcatttctatctctttacatacaacaagaatttataacggtaaaactatgccaaatttagaaacctcttctaaaaaattacacattattcgtaccgctattcgtttgtttaccacacatggatttcatacaacaggcgtagacctgattgtcaaagaatcagaaataccgaaagccaccttgtataactattttcactcaaaagaacgacttattgaaatgtgtatagctttccaaaaaagtctacttaaagaagaagtgcttgcgattatctattcaagccgttattgcacgccaaccgataagctcaaggaaatagtagttttacatgttaactctaacagtctgtatcacttgctacttaaagccttttttgaaattaaagtggcttaccagcaggcttaccgtatggcaatagagtatagaaaatggctgactcgtgaaatttttgaactgatttttagcttagaaatacgtgcgttaaaacccgatgccaacatggttttaaacttaatagatggcttgatgttcgggtttttgagtacaaagagtttggatgaaagggatgtggtggtggagtatttttttaagccaacttgtttgaggtaa

SEQ ID NO: 48625 - DNA, 906 bp, Acinetobacter baumannii
atgtcttattttgatatcaatcgttctggcgagttggcaatttttataagagtggtcgagcttggaagtttttcagcggtagcaagagcatgtaacatgacgccgtctgccgtaagcaagttaatttctcgtttagaaaaaagattgggtgtcaggctactcaatcgttcaacacgtcagtttcagcttaccagtgaaggatgccagttttatgagcaaggcattcaaatactcaatgacttggacgaactggaacaatcggttaccgcaaatcatataccgaaagggcgaattagaatccataccagtttttcatattggatacactttttattgccatgcattagtttgtttaatcaacgttacccggaaattgaattagaagctcatttgagtgatgaagtaattaatttggttgaacaaagaattgatgttgcgattcgaacaggacctttgaaaagctccaatctggtggcccgctcgcttggcagtacttataaacagtatgtttgctctcctctatatattgaaaagtacggttgtcctgagcatccagatgaactacatgaacatcagcttttagatgtaagttatcagcgccagaacaaaacctggttatttaaaaaagcaactcaggaaatcagcctaaccccctctaaagttttaaaagtaaaccatggcgaagcaattttacagttagcactggcaggtgccggtattgctcaactaaatgaattccagattcgaaatgcgttacagcaaaaacaactcgtcaaaattcttgaagattggaatattcatgcttctgaagaatttcatgctgtctggattggccacgataagtatgttcctaatcgcgtacgtacattcttggattttttggtagagcatgcctctataaattag

SEQ ID NO: 48626 - DNA, 1287 bp, Acinetobacter baumannii
atgatgaaaattttaaatacaacggttcaaaaaagcttgttggcagtttctgtgactctgcttatgtcttctgcttttgcaggccaagtaaacccagaaatagagcaacttcgccaagaaataaaagaactacgagctatgctacaaattaatatggaggctcaaaaatctttagctcaaagaagagtagaacaagctgctcctgtagttactcaagctccaccacctatacagcaaacattaactaaatctggtgcggaatttaacttatacggttatatacgagcagatgcttcttatcaaattaagggtgcatctagcatgtataacaatattagcggcgttcctcttgaaaatacgccagaagaatctgcccagaaagaccagttgcacagtactgtgtatgtgacacgctttggattgaattttaaaacccctacagccgttggtgacgtaggcggaaagttagaaatggacttttttggggcggctacacgtgatcagtttcggatacgtcatgcctatttaacttttgataaatggcttattggtcaaacatggtcgacatttattgcccctgaatattacccagaaacgattgatgcaggtacatttgtaggtagtgcattattaagatcaccgcttgttcgctatagcgataacttaacggcaaatacaagttttgcagtatcagttgaagacccgaaatatactgcggcaacagatccagataataaaatgcgtttacccgctttagtggggcgtttaaatcataaatttgccaatggttcaatgctttcaggccgtagttttgttgcagaaaaaagaactaacaatgatagcgagtgggcgtggggggtaggcttgggcggtaaatatcaaattacccctgatacattacttaaagccgattattaccatgttaagggtgatggacgtttcttgctatggagtaacagtggctatgcaatagatgatcaaaataatatgcatagcaatgaatttgacacggtttctttgggtatcactcatcaatttacaccgcaaattcgctcgactttaggctatggctatatgaaggctaaagatgataaccgttttgccgaattacagcgtactagtaccacccaaaacaaacagctttggcaaggttgggtgaatgcactttataacccgtataagccgattactttgggtatcgaatatgtttatggggaacgagaaacatttgataatcgtaacgggattgataaccgcttcaacatgatagcgagttatgatttttaa

SEQ ID NO: 48627 - DNA, 558 bp, Acinetobacter baumannii
gtgttgccaccagatgctcatatcttaattgtgggctgtggtacgggttacgaactcgattatttacttaaaagacatccaaactggcaatttacagcggttgatccatctttaaccatgctgcaaaaagctcaggagcaggtggagattttaggtaaatctacccaagtcacttttgttcacggtgaaacttcagctttacctctcgagagttgctttgatgctgcactttctattctcgtggctcattttattgcagatgacataaaaccagccttctttaaggatatttataagcgcttaaaagaaaaggcgcctttacttacctatgacctcatgacttgtgtaaatccacagcagcttcaagcattacattatttgtgtttggctcaagggttaacagaagaacaatgtcaaaaaatgttggagcgtatggcggaggacttttttagtttaacgactgaaggatatataaaacttttggaagagacaggctttgaaagcgtacagccatatacgcaaattttgacttatcaagggattattgcaaaaaaataa

SEQ ID NO: 48628 - DNA, 252 bp, Acinetobacter baumannii
atgaaagatcagtacaagaaagtgagccaaaaacacatgcttggttttatgtactacttgcaattgctgggctacgtaatagtccggcaaggcatggatcaagcgatgtttctaaccaagcattatgcggtaccagtcgcttggcgccgcataacgatcgactatcacaaccggttaaataaacccgcgcagcagctttataaagagtttgttgaatggactaaagaagaatatgcagagatggtggcttaa

SEQ ID NO: 48629 - DNA, 933 bp, Acinetobacter baumannii
atgaaaattctaaataaagttgaagccaaacttgcttgggccaacggtgaattacttttagtaaataatactgagcgtaatggctgggaaccatttaacccttatgactttggctttgatgtttttgataaattcgaatttcaattaaagcctagaactatttttattggtgaatttgaggtaccagaaccattaagagttgcgccagaaaaaggttctacttgctcttaccctagcccaactgttgaattaggtgtgcagcagtttaagtggaatggatctaaaggacaattgcgcatgctccagcatggccaagttcactcaagttttgataatgcatttgctcattgctgcgcgattattaaaatcagcggtggtgagtttgcggaagacattctaaaacttctaaataagcctactgaagaagtcgaagaagaaaagccttcagaaagtcatgcggaatctctaaaagttaaaaattcaaaaccagaggttgtagaaaaagcacaaacagctgagccggctattgaatcagaaaccgctgattcagaatatcagaagaaacttgataccctgctgcaacgagttaaggactcaaaaacaccagacgaagtaaatgcagtttatcgatatacacgcacttggtctgataaacaaatggagcctttgctacttgcaactcacaaacgtcttgaagagctcgaaaaatctaaggcgcaagcaactgaaccaccttcactaatggtccagatccaaaacgcgcccgacctcacaacattagatgctttggaaatagatgtggccgcacgagatccacagattcaatcacgactcatggactttgttaagaaacgccgctttgaattagagaaccctacatctacgccacttcaagaggctgagcctgattatttattaggagacggtttctaa

SEQ ID NO: 48630 - DNA, 699 bp, Acinetobacter baumannii
atggcttatgtaatgatgcttgctcgagttttttcctcagaaaaatatgcaaacgaatttattaataacgggaaatttcgcttaaatactcttaatttctttaagggatataaggaagagctctctaataatataggggatcaatacgaaggcataagctttcgtgctacaggtgagcaagaagtcaaagttactatagaatataataatgaaagccatgagattgaggtaaatgaaatttacactcatgataattatgttctaaataataatattttctgtatgtatgccccagctgtagaacaagaaaaaaaatttactttagaggatatacaagaaattgttgcatttcaaaaagatgctgaaaacctaggaaattatttagttttaattgcaaatcccgaagaattttttgaaagatttgctaaaactgttaaaaagctggggtataaaatgaagagagaccttgtagagtacgttgattttaataacagtgtacatgtacctagggataaaattggctttgtcaaaagtgatcaattttctcatcaaaaagaatatagattgatgatcgatgatggaagaaacgtggatgagcatattgatttggaaataggttcattagctgatattacgtatttaattccaacagaagattttaataaatctttagaaataaaggttaaagaagaaaattaa

SEQ ID NO: 48631 - DNA, 708 bp, Acinetobacter baumannii
atggataaccaaaatcgaaatatttattataatttagaattattgcaggcaattagtaattggcaagcgggtagtaatgagaaaaaaggaaataaattaaaagaattatgcgttaatctccctgaaaaatttcgtttacttccaccaaacttggttttgtttagacaaatatccttagataacgtagggctatcgcgttttttaagagaaaaaaagcttcctgagaagatatcttcttggaccacagattataaatttgctgaaaaattcaaaggcggtgtaccttctgaactcggggattttaaagctaccatttttaaaaccacgccactaaataatcaagtaatagtaagtttaagtgaactgtataagtgttctgatttctgtaatgcaatgaaacttaataaaaataagattgataggtatcatgatggtgctggtaaatactgggatacccagtctgaggtcataatggcaacagagtatttggatcactcaaatatatattcaatgggtgggtattcagggacacctgagcaaattgcagaacaagcttcgagagaaaagaatattcctatatctttaactattgatgatattaaagaattgagtagggattacattggaccttggtggttaagtccagaagggacgagacgcgctgttgctcgtactttggaaattgctcgtaatagggggatgctctaa

SEQ ID NO: 48632 - DNA, 300 bp, Acinetobacter baumannii
gtggaacttacgcaaattaaagtaacaatagatcgagaatatgatctcttcgtaaattcgcacgaatttaagacgtatcagcacgataaagaaaagcaagctagatttttaggccatgcattaacaacattgaaatacccttatacgaacatcattactttaggtggtggtcgatataaagttgttggtcatcatgatttaaatgttgatatcgatctattccaagctccatctttcgtatcaaagcaagcatttaatacttggtttgctaatatcctatctcaacatttatattcttaa

SEQ ID NO: 48633 - DNA, 555 bp, Acinetobacter baumannii
atgaaaaattatttaatagggttagttatttctttaggtttaactggatgtgtggtattaccaaacatcgactattcacagccaaaagttgaacgatttaatccagttaagaattggattagtgtagattctgcttcagttaaagatatgcctaatggtaatgaaatctttaagttgaaaggaggtagtgaagtttatgtattcagatatcaagatgaatgggcattattgactcctgcctctgataaacaacaatggattaactttagatatttatgtggttttgctggttgttatactccaccaattgtttatagaaacactaaaaggggcttggataaccagcaacctatttactcagttcaacaacatgagcctaaaagatatagcaataccaagactagaagcatatctactaacactcgtacttcaagaagctatagtcaaacgaccaatagttcttgttattgtacatctggaacatattgtgttgggccgagggggggacattactgccttaatagcacaggttcaaaaagatatcttccacgataa

SEQ ID NO: 48634 - DNA, 801 bp, Acinetobacter baumannii
atgagtgaagagattatttcggcaattgctacaattaagggtgcacaaattcaagcttattacacattaatagcatcatgtgtaggagcagttggcatagtagttggtattatactttcttggtataccgctttacatttacaaaaagtatctcgtttagcagaaacgagaaaaactgtttatttagagtttgctgaagcatattctaagttaatagctggtttacaattaattcaaatcgaaaagcataaatatcaaagtgagctttttagtagtttttctaatttctcaacttgtacagacaaggttatgtttgtctgtaatacaaaaactaaaaaagaagttgtttgctatttaaataatattttaccaaagattgaattaatcatatttgaaatcgcaagttatttcgatttatctcaaagtttagaagttttagtaaaagatcatcaggaaagtttagaaagcttagataggttttatctaaaattagatgaattacatattgataaccctgaagatgagcgatctaaaaatatatttaaattaatagattttaaacttaaacagtcagagaggttaatacaacctatatcagaaaaagaaaaagagcttgaagaaaagcatgaagaaattgccgaaaatattaaaaaatttacaaatgaacttaatgaaggagttactgaagtaatttatttattaaggaaggaaataggggctaagacggatattcatcttgataaaaaattatcaataaattatcagtctcaacttccaaaaaaagaagatgagttgaagtaa

SEQ ID NO: 48635 - DNA, 687 bp, Acinetobacter baumannii
atggcgaaaaagagcgatttgcaacgtcgagtacttattggaagaaaacttgcaatggcgcgtgatatggctcaattacgtcaagaagacgtagctttagagatattcggtacaccacataaaaaccgaatgagtgaaatcgaaaatggtaagttaatgccagatgcagaattactttcggtgctatgtcaaaaatacggtgtttcagccgactgggttcttggttttactattgagccagaactagacaaaacagcttctgtagctggtattctgtttaacagtctaggtgaaatgatgagtgaatacactcaagccatggcatttcaattaagtatggctgcagcacagcatattgcatctttcccgaaagccttaactgtagagctgcttgaagcatcaaaggggctgattcaagcttgtttatcgcaagaccagtctattcaagaaaaggttttacctgaacttcacactcttatgcgtattgttcgtgagtgtgaacagaatcgtgcaaaacaaatccgtaatttagagatggctattgatgatgttttccagcgtgaagagaatgatttacagcaaaaagctttaattgatcttatccaaaataaaaaacgttttagcaaggcttctttacagcagcaagctttagatgaagtgaaacaaataggtctatttgctgaataa

SEQ ID NO: 48636 - DNA, 264 bp, Acinetobacter baumannii
atgtcatctagtattaccgctgctgaagctgcaaaaattgcggagcaaagcaatccaaccgttcttgatattattaatattctcagtaatgcaattaaagctgactcgtgttttggaaaacggttttccagttggagttttgacaaaagtgccgtgagtttagagtatttagaagaggcaaaaattcatttctcaaaattaggttatgtagtagaaattattactgatagccctgtaagtaacacttttaaagttaacttttaa

SEQ ID NO: 48637 - DNA, 258 bp, Acinetobacter baumannii
atgagtgaagtaaaagttaaaacatgtgatttttgtgatgatggaaatggtgaatgcatttacccctattacggtcttgcccctcatattcacacaaagccaattgggggcaccgtatttctaaacgagtcattacctgaaaacttctgtcctgatggggatggtttaggcatgtatacacattgtctgaattgtgggggtgacggcacctatgagggtactcaattagaagttaaagcggaaagtaaggaggagtaa

SEQ ID NO: 48638 - DNA, 2538 bp, Acinetobacter baumannii; identical to SEQ ID NO: 46902

SEQ ID NO: 48639 - DNA, 135 bp, Acinetobacter baumannii
atgaataaattcgagattttagcgtggggtttactcatttcattttttacagcagctattagcggtgcggtggtttggtggtggttggcgcgtaaagagcttgatgagaaaggagccagccatgaaagcaactaa

SEQ ID NO: 48640 - DNA, 930 bp, Acinetobacter baumannii; identical to SEQ ID NO: 46074

SEQ ID NO: 48641 - DNA, 408 bp, Acinetobacter baumannii
atgttaatccttcatggcttgcatctggcacgggagagattcaatcaagcacgagagataaatttaaacaactggatatcgaagagttcaaaaagaaatacaacattagtgatagtgatgaagctcttttattttcaacaattatcgaaaaaccgtttatcccatcatctaagcgttgggttcctgttaaggcttactccaagatgggcatggatggctatttcacagatatgggttatgaaggcaatgctggagatgggtatgttccaactcactcagcaggaccaagagcctatggtattaaaggcactggcgactcaatgtttccagctatccgtaatggatggtatgtggtttgtgatccagatgcggaactcgtgccgaatgagtttgttcaggtatgcttga

SEQ ID NO: 48642 - DNA, 2364 bp, Acinetobacter baumannii
atgttcttactgaaaaatctcgtctcttcaatatcaaaagttactcaggacctgggtaatattgtatcgataacccctgtagtaaacacaggttcctctgttaatgtaaatgtttctgatatcaacattgctaatgtttcaacaacaggcttactttctaatgtgatttcaactgtaaccgatacagtttcacatacaaccacagacttagtttctaatgtagttggtaccgtaacaggtactgtaggttctacaagcccaattgatactgtaaccaatattattggcggcgtaacgggtggcgttacaggcaaccctcttgaagttgttactgacattatcggcggagtaacgggtggtgttgtcggcggaacttctccaatctctccagtaatcgatgttgttcaaggcggcattgatattcttcaaggcgttgaaagcttaaaaactgaaattattaatacaggcattgaaactgtagctgatgcagttattggtgtattacctcaagctgagcatccagtttctgaaattgcagaccttggcacattaacttttgaaacttctcgtgacacagtcaatggtgctcttgaagttgtttctgatttagtcggtggtgatattcaaggcgctactgaatcagcgactggtattctcgatacgcttattacaaatggcacaactgctacaggtattgttactggtgtggttggaagtgttactgatgttattggtggcgtaactggtggtgttgatggcaacccacttgaagtgattacagatattatcggtggtgtaactggcggtgttgatggcaacccacttgaagtgattacagatattattggcggtgtaactggtggtgttgggggtgataaccctcttggcgtagtaactgatattatcggcggcgtaaccggtggcattattggtggcggtacatctcctatttctccagttattgatgttgttcaaggtggcatcgatattcttcaaggcgttgaaagcctaaaaactgaaattattaacactggtattgatacagtagccgacactattattggtgtattacctcaagctgagcatccagtttctgaaattgcagaccttggcacattaactttcgaaacgtctcgtgacacggtcaatggtgctcttgaagttgtttctgatttagtcggtggcgatattcaaggtgctactgaaaatgcaactggtattttaggaacacttattcagaatggttcaacagcgactggaattgttactgatattcttggtggcgtaacaggtactatcggcggcgtaactggtggtatcggtggtgacaatccgctcggtatagtaactgacattatcggcggtgttactggcggtatcggcggtgataatccgcttggtgtagtgactgacattatcggtggtgttactggcggtatcggtggtgacaatccgcttggtgtagtaactgatattatcggtggtgttactggcggtattggtggtgacaatccgcttggtgtagtaactgacattatcggcggcgtaaccggtggtattattggtggcggtacatctcctatttctccagtaatcgatgttgttcaaggtggcatcgatattcttcaaggcgttgaaagcctaaaaactgaaattattaatactggtattgatactgtagctgatgcagttattggtgtattacctcaagcagaacatccagtttctgaaattgcagaccttggcacattaacttttgaaacgtctcgtgacacggtcaatggtgctcttgaagttgtgtctgatttagtcggtggtgatattcaaggcgctactgaatcggctaccggtattctcgatacgcttattacaaatggtacaactgcaactggtttagtaactgaaatcattggtggagtaacaggaactattggtggcgtaactggcggagatagcccactaggtttagtaactgatttacttggtggtttaactggtagcgtaggcggcgacagtccgcttggtgtagtcactgaccttctcggtggtttaactggtagcgtaggtggcgacagtccgcttggcgtagtcactgatctgctcggcggtttaactggtggtgttactggcggtacagacaaccctatcggtatcgtaacggatatcgttggaagcttaacgggtggtgttactggtgaaggcagtttagatgttatttctaatttgctaggcggattgactggtggtagcttactcggtggtgtaacttctacagtatctagcgtaacaaatacaacgcatacgatcgtaccgacatcattacttactgataacttcctagaaaactcattcaatactgtttaa

SEQ ID NO: 48643 - DNA, 2229 bp, Acinetobacter baumannii; identical to SEQ ID NO: 45855

SEQ ID NO: 48644 - DNA, 354 bp, Acinetobacter baumannii
atgaatcagctttttgtatatggaactttatgccctaataaagcaaatgctcatattttagagcagattggtggtaactggacaaaagcgagtgtacgaggagtgattcatattttagattggggaccagacaaaggcttaaaggccttagaattagatccagaagcagattgggtagaaggctatttgtttagcacagaaaagttagcagaaaactggcaaatgttagatgattttgaaggctttcaataccaacgcgtgacagcagatataaaattagaatcgggtgagtatgttaaagcctggacatatcaaatcaatatgcaggctaaagctccccacaattacaagtaa

SEQ ID NO: 48645 - DNA, 567 bp, Acinetobacter baumannii
atgtcagatattttaccattaagctggtttcaacgagaaacttcggaagtagcatatgatttaatcggctgcgtattatgtaagcgacagccggatggacaagttatccgctgtacaattagtgaaacagaagcttatttgggcgttcgcgataaagcctgccatagctacaatgacaaacgtaccgcacggacagaggtgatgtatcgccatggtggtaccatttatgtctatttaatttatggcatgtatgaaatgctcaacattattactcaaacagaaggtgtacctgaaggagtgatgattcgatcagcatttttaaatagtgcttcaactaaaaaagaatataagcttttggctggacccggcaaactgacacgttatttgggcattgatcggaccttaaagggccagactttaggtgaagaatctggactatggattgaagcagccactacacagccagaagtggttttaacgccacgtattggaattgattatgccgaggaagcaaaagactggcctgaacggtattgctggaaagatcatccatcattaagtcgataa

SEQ ID NO: 48646 - DNA, 714 bp, Acinetobacter baumannii
atgtccttattacgcttagaccgacttcattactgtattttgatgagtatgggctgtatttctagcccacttgtttgggcagaagacttaaattcagacgttgcccaattgccaactttacatgtggaagcgacacgtactgacaccggttatttacaaacaccagcttcggttttccgaatcgaggcacctcaagtggatagttcttcacaagtaaatttaactgaagttgtgaagggcataccgagtttacagattcgtaaccgtgaaaattatgcgcaagatctacagctatctatgcgtggttttggtgcacgttctacgtttggtgtacgtggtattcgtctttatgtggatggtatccctgcaacaatgccagatgggcagggccaaacatctaatatcgacttaagcagtttagatcatgttgaagttctaacagggcctttttcttcactttatggaaattcatcaggcgggactattttaacttctactaaagaagggcaagggaaagactcaattgagctgagttattcgggtggtagccatgataaaagccgagcaggacttgtgctgcaaggtggagcaaagggtgcgaatgaaccaagctatattattagctcatcatactttgataccgacggttaccgcgaacatagcggtgcagaaaaagtactaaataatgcctctgtacacgataaaaatagataa

SEQ ID NO: 48647 - DNA, 1293 bp, Acinetobacter baumannii; identical to SEQ ID NO: 46047

SEQ ID NO: 48648 - DNA, 399 bp, Acinetobacter baumannii; identical to SEQ ID NO: 46160

SEQ ID NO: 48649 - DNA, 441 bp, Acinetobacter baumannii
atgaacgtaaaagctacccctttcaactcctttgcatttgtcagcatggctgctcttgcaatttctggtggttctttagttgcttgccaattgcagccagctttccaagcaaaagaagccccttctctatttacccctaagactcaaccaagtacttacggtgtcttaactgccaaaatcacaggtaaacattctggcgttgccgtaatcaaattagatagtttccgtttaaacgttagctttgattttgaagctcatccagacagttacggcgttccgggttctgaattcactgctgttgaaattactcaactcacagtaaatgaaattactgatgttaatggtaagtcatataacgatttcaccgaatttgaagacatccgaaacatcaatggccttctaaaaggcttcatcgaacgtaacaagttggtggaggcttaa

SEQ ID NO: 48650 - DNA, 399 bp, Acinetobacter baumannii
atgtacaagttaaagctaaatcctcagaccagcggctatggcgtaacaccaggtgatgatgtgaaacgtcagcagatggatggcggacgtggtcgctattacatcgatgtaaaacgtaatagtcatattgtcgatgtgaactggaatttaagtaaaaccgatttcaataaaatgatggctttctggcggatctatcagaataagccagcttcattctatgcggatttggtcatagaccaaggaacacgtcagcaataccaatgcaatttcattccgaactcgttcaagaccaatgaagtgaatggcaacctttaccgggtaaatgcacagctcgaagttgttcaaaaccagcctaaccttacggccgatatagctttgattaaggattgggaggtctaa

SEQ ID NO: 48651 - DNA, 507 bp, Acinetobacter baumannii
atgcgccgtgcaatgatgagttctaatgcctttatagaaagccaaaagcaagctgacatctttaatcaaccggttcaagatactcagattatctataaaggtaatagagacacacctaagttggcgtcttcggcaaattctgacttattccatgatggcaaggtctacttctcatcaaatggtttagttcaggatcgttcaaatctggatgatgttcaggactttactttaggacgtacttcacgccctcaagctgagattatgccttcaattgagcaatcctctccaactatcaatttcaagattgaagtcgtgaatcaagtcagtggtgcaactgttgaagctgaacaattggatgagaaaactgtccggatcattgttacagatgaactggataagcagcttccaagaaaggtaccgaaacttgtaagtgaccaaatcgcaaatccaaactcaaccattagtcggtctttgactgagaatacgacagcaagacggaatcgttaa

SEQ ID NO: 48652 - DNA, 219 bp, Acinetobacter baumannii
atgaatatctgtgttggtggtgaacttgacgggcaaaagattgaaaaagaagggcgattgttaaaagcttcagatatcgacccatcttttaaaactgagtactacaagcaagtttttaaccgcgacaatacggtgttccatttctggttgccaattggatctgacttacatgatatgtctgagaaagttctaaatatccttagagcacctaaaaactag

SEQ ID NO: 48653 - DNA, 753 bp, Acinetobacter baumannii; identical to SEQ ID NO: 46211

SEQ ID NO: 48654 - DNA, 402 bp, Acinetobacter baumannii
atgtcatcagtcagcattgctgaataccgcaagttatttcccataaagaaaaataaaaagcgccgttcagcaaagcaagttgccagacaaccaagtgtgggtgaagtggttctggcaacgcatttaagagcatgcaagattggatttgaacaggaatataagttccatcctgaacgcaaatggagagcagattttttaataaagggttcaaagattttgattgaggtagaaggcgggatctggagcggaggccgtcacacaagaggtaagggctatttaggggatatggagaaatacaactccgcagcaatgatgggttttacagttttacggttcagcacagagcaagtgaaatccggtatggcattaaagcaaattgaattattaattaagggtaaatag

SEQ ID NO: 48655 - DNA, 225 bp, Acinetobacter baumannii; identical to SEQ ID NO: 46246

SEQ ID NO: 48656 - DNA, 363 bp, Acinetobacter baumannii
atgaaaagtcatgatcatttgcttgatagacaatatgacgaggaaaactacaactgtgttcattttgctcatgaagctgcattggatctatatggaatagaccgggtggaagcacttgaattttttatgaagcctattaaagaaaaggtatttctaccatcaaggttaaaacttttaaatccactgcccatgcccaaggaaggctgcatagtcgcctttcactcgagataccgaaacaagcccccacatgtggggctttttcgtttggggcgtattttgcatttgcaggaatcaggcgtttcatggatgccaattcaagtcgttcaagcatttggatttaatcgtgtgagtttctatgattaa

SEQ ID NO: 48657 - DNA, 570 bp, Acinetobacter baumannii; identical to SEQ ID NO: 13730

SEQ ID NO: 48658 - DNA, 300 bp, Acinetobacter baumannii
gtggctgatcaaatttataaagatgctgtcgttatttgtttcgatgagttttttgtctcgaacgtaactgatgcaatgattttgagtgacttattccaaaagttatttgttcgtggtgtaacactcattgcaacttcaaacattgcaccagacggtttatataaaaacgggattcaccgtgatcgttttattcctacaattgaaatggttaaaaagaactgtgtcgttttaaatgtagatgcaggagtggattacgttggccagaaagtttatttaactctttatgaacatgttgcataa

SEQ ID NO: 48659 - DNA, 567 bp, Acinetobacter baumannii
atgatgggcttaaaaatgcctgatatgcgtatagatttaccatttccgaaaccctctgatccagataccgttactcaatattacgcatattatggagatgatctacattttaattctacacatgcagcatttagcctaagtaagaatgtgctggaaataaaaattccttcagcagatattattactcatcgtatctatgaggctaaatgtattaaagaaatagaaagattaaatgaacaagatcatcaaataccgcctattattcaatatgtgcaagattatttagagctacaacaaggaattatcccgagcatggcggaaaccgcttttgctttgaaaatgcctgaaaggacattaaggcatcaattgcagcagcttaatacgagttataaacaaattcgtgaacagattattaagaataaggcgcttaaacttatggaatataaagagtattcaatagaagttattgcagaagcacttggttattctgaacctgccgcttttaatcatgcatttaaaagatggtttggacagagtcctcggcaatatggaaaagagttttactga

SEQ ID NO: 48660 - DNA, 294 bp, Acinetobacter baumannii
atgtcagtaacaacttcaagagggttgcctgtaacgccacccgttacgccgccaataatattggttacagtatcaattgggcttgtagaacctacagtacctgttacggtaccaactacattagaaactaagtctgtggttgtatgtgaaactgtatcggttacagttgaaatcacattagaaagtaagcctgttgttgaaacattagcaatgttgatatcagaaacatttacattaacagaggaacctgtgtttactacaggggttatcgatacaatattacccaggtcctga

SEQ ID NO: 48661 - DNA, 450 bp, Acinetobacter baumannii
ttgggcggtggtttcccggtcggtgcaatgttaacaactgataagtttgctccgcatttttctgtcggtacacatggtacaacttacggtggtaacccgttagcaagtgcagttgcaggtgcagtttttgagtttattaatacaccagaagtacttgaaggcgtgaaacaccgtcatcaatatttccttgatgcattaaatactttaaatgctgaatatcaagtatttgatgaaattcgtggtcaaggtttattgattggctgtgtactaaaagctgaatatgcaggtaaagcgaaagatattaccacatgggcaggcgaagaaggattactcgctttaatcgcaggacctaacgtggttcgtttcactccttctctaattattcctgaacaagatattgatgaagggattgctcgtttaaaaagagctttggcaaagttggctaaataa

SEQ ID NO: 48662 - DNA, 570 bp, Acinetobacter baumannii; identical to SEQ ID NO: 13730

SEQ ID NO: 48663 - DNA, 363 bp, Acinetobacter baumannii; identical to SEQ ID NO: 46158

SEQ ID NO: 48664 - DNA, 774 bp, Acinetobacter baumannii
atgggtaaattatccctactatgtgcttttgttccaaatataaagaaattagtagttttggaacatgtttcttttattagtcgccctaaaaaaatacaaattctaagtaagttcttatatcgtaatattgatcaagtggtaacactaacccaaaatgataaagaacaatttgataagtttcattcaaatgtaattgtcattcctaatttttctcccttttctatcgcttcgcaaccacaaaataataataaacaaattgtaacgattggccgtttaactgatcagaaaaactatattcatttacttcaagcttggaagaaaatatatcaatctattccggattggcagcttaatatttatggtgaaggtgagcatgaggagatgttgcaagattatattaaacaacattctcttaaaaatgtgagtttgaagggtagtacctcaaatgtaaaagaagtttatgaacaatctagcttttttgtaatgtcatccaaatatgaaggtttaccaatggtgctaattgaggctcagagcttcggtttacctattgtgtcatataattgtccttatggtccaagtgatgtcattcgcgatagtaaaaacggttttttagttgaagatcaaaatgtggaagagttagctgcagcgattttaaaacttgctttatctcctcagctattagaacagttttctcaaagttcattgttaaatgccaaaaaatatcagcctgaacagattttaaaaatctggattgaaaaggttttagaaggataa

SEQ ID NO: 48665 - DNA, 351 bp, Acinetobacter baumannii
gtgggtgataatagttacttgtatggtagtaactctccatacgcagtagatgggaattctattgagcaaaatgaatttgtagcagtacaagtgggtggaacttataagattttacctaacttacgttctactttagcgtatggtgctcagttctctgatgatggcactgattatgcgagattaaatgcctctgcaaatgaaaaagttcaacaagcatggatcaactttatctatacgccagttaaaccaattgatttaggcgttgagtatgtaaacggtaagcgtgatacctttgatggtaagtcttacaaagataaccgtgttggtttaatggctaaatatagtttctaa

SEQ ID NO: 48666 - DNA, 396 bp, Acinetobacter baumannii
ttgaattatccacaggtaaacgcagttaaaacacttactccattaggaattgtatttagtcatccagaaatggcaattgtgggacaaagttataaacaacttaaagataatggagtagattttgttacaggtgaagcatcttatgaaagacaaggaagagctatcgtactcgggaaaaataagggtgctattgaagtttatatagagcgaggaagtcagaaattgcttggtgcagagttatttaccgaagctacagaacatatggctcatctattaagctggattattggagaagagctaactttaaatgatattttagagaaacctttttatcatccaacactagaagaaggcctgcgtactgctcttaaacatgctcgcagacagttgaaataa

SEQ ID NO: 48667 - DNA, 162 bp, Acinetobacter baumannii; identical to SEQ ID NO: 46255

SEQ ID NO: 48668 - DNA, 255 bp, Acinetobacter baumannii
atggatttggcagttggtgccaagaaagtatttatcactacagaccacatcaccaagcaaggtgagccgaagattgtcgctgagctcacttatccggtaacgggtaaacactgtgttgaccgtatttacactgacctgtgtgtgattgatgtgaccaaagacggtttaaaggtgattgagaaagtggaaggtcttagctttgatgagttacaggctttaaccggtgcaactttgattgatgcgactcaagggtaa

SEQ ID NO: 48669 - DNA, 162 bp, Acinetobacter baumannii; identical to SEQ ID NO: 46251

SEQ ID NO: 48670 - DNA, 390 bp, Acinetobacter baumannii
gtggaggatgaacttttagcaaagaaggatagtcgtgtcatcttacatggacatttgaataatatcgaaatttcacaattgatgtcaaaaatgtggattgggctagcatcatttggtttatttagaaaaggaatgaaagaagcctgtacattaaaagtaagggaatacttaaattatggtttgcctatttattctggtcataaggatatatttccagaggaatttgaatactataaatttggagaaccaaaatttgttgatatcttgtcttttgcccatttaatgagaaaagtcagtaaatctgatgtaaagcaagccgcaataaaatttattgataagaaaattcttctaaaagaattgtatgaacaacttctggaagaaaagagttaa

SEQ ID NO: 48671 - DNA, 336 bp, Acinetobacter baumannii; identical to SEQ ID NO: 46142

SEQ ID NO: 48672 - DNA, 435 bp, Acinetobacter baumannii; identical to SEQ ID NO: 26756

SEQ ID NO: 48673 - DNA, 348 bp, Acinetobacter baumannii
atgaaaaaaattattttgctgggtcttattttccttccagctttgacatttgcaaaacctgtacaacaagatagctatagtgtgcatgagcaaaattgtagaacgataatggaaattgctcaggttattatggaaaaaaaacaaaatgggttaccactttctaaagcgttagaagaaaatgacgatatttttaaaaaaattcataataaaaatgtggaaaggttatataactcaattactcgtgatgcttatgagcaaccaaattattccacaccttcaatgaagcaggaacagttaaatgatttcactgcgacaacctatttgggttgtatggcaacgcatgattaa

SEQ ID NO: 48674 - DNA, 462 bp, Acinetobacter baumannii
gtgccgaaatttttaattgttttcctatttttagctataagtcaaagtacggtagcgaattataattttaatgcagatgatgagcttattaaattagggattattgggcaaaattttaagtataaagatcttaatcttgcaactgaattttttaaaaatgaatctgaagcagcaaaagcttcatttccttataaatccaatgattacgttgaaataatagaaggaataacaagtccattttattcatcaattacgctaaagttatttataaaaccaccaattgaagatgaaaaagaggttacagattttatggaatctgatgaggggatgcaaatttggtgtaatgaattgttcaaatttaactatatgagagaaaataaccatcaaattgatatattttatttaactaaacttggggaaaaacttaaactaattaccctcaataaagaaaattgtaaatag

SEQ ID NO: 48675 - DNA, 459 bp, Acinetobacter baumannii
atgacatctacacaacaagcaatgccagagatatctcaagtaatagaagtccctaataaaacaaaagatcaaatttttgaagattcaaagatttggatagcccagtcttttaagtctgcaaataatgttatccagtattctgataaaagtactggttcaataattgggaagggtaatattccgtatccttgtgatggttttattgattgtggggcgtttggcaacgataaagttaattttacgattaagattgataccaaggaaaataaagcaagagtaacaattaatgatgttactagaacaaatctaacttatgtacaaggcgctattaataacattggtaaagatgttcctatcacaattgttcagcatcaacaaaaaattgctgtaaaacttaataatgtgattgaacaatacaagacagcaattacttcgaagcagaccaatgaaaattggtaa

SEQ ID NO: 48676 - DNA, 537 bp, Acinetobacter baumannii
atgaaacgcagtttaacattgctactgagcacatttatctcaatacaagcttttgctgaagaaaatgcttgtgaaaaaatttgggatagtttcaaaaataaaaatgaaagtatcaaaattgataaagttaatgtcccctgtaaacaaatttgggaagatagcaataaagcaaagcttgtaaagactattggcttaaacccaaaagatgctcaatggatgtcaacaggggaatgccaagttattgaagtaaataaaaataaataccaagtttattatgcttatctaaaaaatgatcatagtgatataaatatcattaatgacactaatggtaattatttttcatattatagaaatttaggtcgctatgatatgtttgaagataagttttatccaacaaaaaaagctaataaaaatggtgtggaattaagctgccctggattggggaattttgagaaaatgaaacctattttaagttcatatatcaataataaaaaaattgatattaaacgatttagttttgaggacttaaataaatga

SEQ ID NO: 48677 - DNA, 474 bp, Acinetobacter baumannii
atgaataaaattttaatagcgctaagttttttatttttgacggcttgcaatgattttaacaaactggaaaaagaatctaatgcatctattgaacatcaaaatgaatcaaattcagttataaagtcacagttaagtaactctaatgactcactaataaaagaaactactgtttctcaagtaaaagataaaaaaatagaaaattcaaaaccgcaaatggatgctcaggataaaattacttgtatgggtaaaaccttaaatgattggtatacttttgatgaaaagttagaacaaccaaaatgtaagaaattaaacggttataaactcaagaattatcaatgctctgttgagaaaaatgtattcgatttaaattctgatgctattagaattactatgaaagatactagagtatttgcattccattctcttgaacaatgtcaagaagctgttgaaatgtgggaagcgaatggtatttag

SEQ ID NO: 48678 - DNA, 702 bp, Acinetobacter baumannii
atgaaccataagattattgtagaaagttttaatgatcaggctatatatgctcatgttttaaaaaatttctgtacatcaaatactgatgtagaaacttttacagatggtttagactggattgaactcgcaggtttagaacggactaaattaatcactaaattgaaagacattcgttcagaattgataagagcacaagaaatcacaaaaattggaatcattattgatttagatgattcatcagtagaagagaggataaaatttttaaatgaactttgctctgaagcatttgaattaactattgatatagaaaaagtaagtgaatttaagctttatgaaattcctgaacaagatattgaatttaaattagcttattgttttagtggtttaaatggtcaaggggaactcgaacatcttttgaaagaaatagcagatactagtaactctcaccatgcaaattgtctagaaactggctggaaacaatgtcttgcctctaaaggaattattgtgagggataaggatttaagaaaattatggatggatttttataaaagaatggattgcttatctcataaggaaagaaagcaagcaaagcaaaatgtgcaatgggatacatttttatcgctttaccccgaaaaatttgatttctctaaagatataccagagttaaatgacctcagacaatttcttacgttttttggttaa

SEQ ID NO: 48679 - DNA, 1110 bp, Acinetobacter baumannii
atgataaagtatatttcaattgaaaattttagatgttttcaccaaagtacatttaaagaattctcgcacgtaaatctaattggcggtttaaacaactctggaaaatcagcccttcttgaggctattttacttttattatcacctcaacttgaaaccataactttattaaacaaatacagaaatgaactcgtaacaaaaaagaatacatttgataagacttgggattatctattttttaatgcaaacaaattagaaccgattaagttgaagacattaagtgatagatataattatgaatattgtttagcaataaaaaaatctgaaaatgatcaattcaataatgttgctttttatgaaaaattaaaaaattcaaaagaagagagtttagaaagggctataaaagatttcgaacttttcacccaaaaacaaaatattattcattcattagatttatatattacagatgatgagcttaacaactcatttatgggaagttttagttttactgattcaggtagattaacaatgttggaaacaccaacatatctatttaatgaagtagcatatcgcccagctaaacaagtaattacacccaatcaactttcgaaacttttggatatttcagttgataagggacatttaaatgaaataatggaaactattcaaattattgatgactcgattatcgatattagagtagtagaaaataaagttttattatcccgtgaccgagtatcatatttacctattagtctttttggtgatgctattacatcaacgctttatatgatcttaactttatttagtgtagatgaagggggatacctattaattgatgaggttgaaaatggtattcatcactctaaacaacttaactttattagacatatttgtaatttagcatttaaaagaaatatccaaatctttatgactacacatagtgctgaattcattaagagctttaatgaatattcattagaaaatgaaggtacgaaacttcgctatttagaacttgtgagaacacgtaaaaatagaataattagtaatataattgaacctgaagttcttgaatataaaataaatcattcaaaaaattttcgtggtgagtaa

SEQ ID NO: 48680 - DNA, 171 bp, Acinetobacter baumannii
atggaaaacatgttaactcacttagtatctaatgcatatgatcagcaatttgattctgcatatcaattatttatgaattatcatcaaggtttaaataaatttcataaaaatgaatctgaagctgaaaaattttttaatttagctattaaactagacctcttgcgaaagtaa

SEQ ID NO: 48681 - DNA, 948 bp, Acinetobacter baumannii
atgaaaaatttaaacatattgaaaagtttagaggagaaatttagtattcctcaacacgaactacaagaatttattaagagttcaccaaggaaatataaagtttatcaaattcctaaaagaagttctggtactagaacaattgcccaaccaacggctgaactaaaagaatatcaacgtcatttggtgtctatattttctccaattttacccgtgcatgaaacttctttagcgtatataaaggggaaaagcataaaagacaatgctctcatacattgtaaaaatagatactttttaaaaatggatttcgccaattttttcaattctattactccaaatatattttggaattgctgggaagaaagcaaaaaccaaaataaaattaatgacttagataaagaaatattaactaacttaatattttggaaaccttcaaaatatcaaaaaaatcttgtcttaagtattggagccccaagttcaccattaatatcaaatttttgtatgtataaatttgatattgcactaagcgagatctgccataaaaaaaatatttcttatacccgttatgctgatgatttaactttttctactgaatacgctaatatcctatttgatttaccattaatagtttctaaaattttaatggatttatatggtggaagtttagaaatcaatcatttaaaaacagctttttcttcaaaaaaacataacagacacgtaacaggaattaccataactaatgaaggtaaaatttcattaagcaggaaaaagaaaagatatattaagcatttgatacacaaatttatttttggctctatagaaattaatgagcttacatatttaaaggggtatttcagttttatacagcatatcgagcctgactttttatctcgattgaaatctaaatattctgatgagactattaacctcattagatctatggagctctaa

SEQ ID NO: 48682 - DNA, 603 bp, Acinetobacter baumannii
atgctaaaaaaatttttaagtataattttaatgttagtaatttatgtctttatttcaattgtaagttttttaattgtaataatttttttagtatgtatggcggataatttttttgaagagagtttaaataagaaaagattgaaaaatagtattttatatgatcataaaatctttcctaatctgacaaaatcaatatttttttatcaaaggctagattcatctgacgaaggttattggattgtagtctatcccttagataataaaactaaagtaaattttttatctaaaaagcagttgcaaggccagaagaaaattacctattcaacagttgaatgtattaagccaactataaaaaaacgttggaaaacatttaactccaacattcattatgttcaaccacctgaattgctaagggatcatgatgattttgaaagacatgattcttttaatgtgtatggttcagaaaaaaatattggtttagttgaacaagtttgccagcaaaataaattcattattttagaagaaagtcagaaaaatgatcacttatattgggcaatctctgcaaatggaaaactattatttagtgtgtataaaattgattga

SEQ ID NO: 48683 - DNA, 276 bp, Acinetobacter baumannii
atgcaaattaaaaaagacattgtggtattggcagcagacacgtttgcacgacttttagcagttcctgctttggcttacgcggtctgcatgtggtttgatttaccaagtttgcaaacacaaattttagttattttctttgcactaccgactgcttcagcttcctacattttaactaaggttttggggggtgatagtcagcttatggcagccgtgattagctttcaaaccttatgtgctgccgtgactttgccactagtgatttggtggatttcttaa

SEQ ID NO: 48684 - DNA, 624 bp, Acinetobacter baumannii
atgaatagcattgttttatctctttttcctttagttgcactaattgcatcgggatacttatttaaaaaatatcatttttttagcgatgagttttgggctggggcagagaagctgaattactatattctatttcctgctttgcttttcagtacgctatcgaccgcgaaaattgacttacaaagcttgagtgcagccattattgtgatgttgattgtggttttggcagtcaccgcctttttatacatcctccgaatattttggcacataccacccgcacgttttggtgtgcatgtacaaagtatggttcgctttaatacctatattggtttggctctagtcacttcgctttttaaaagtgaaggaatggcaattctggcaattttattagcgctttgcattccgcttgtgaatgttatttcggtgctcgctttaacgtctaaagaacacatggcaattaaacctgttttgattgctcttcttaaaaatccattaattgcatcgtgtgtagtcggggcagcagtcaatgcacttcacctcccgatttgggaaggctttactcagtttattaagcttttttcagtgtcgagtttgccactaggtttgttatgtgttggcgcagcttaa

SEQ ID NO: 48685 - DNA, 405 bp, Acinetobacter baumannii
atgcgacaacttttacaaacaggctggatgcataatcgagtacgtatgattacggccatgtttttatgtaaaaatcttttgattgattggcgcattggtgaacaatggtttatgcaacatttaattgatggtgacctcgccgcaaataatggcggttggcaatggtgtgcctcaacaggaacagatgccgtaccttattttcggattttcaacccaattgctcaatcaaagaagtttgatccggagggagaatatattcgccaatgggtgaaagaattggctcatttggacaataaaacgattcatgaaccctactcaagcaaaaccgatcttggtttaaattatccaaaacccatagtagatttaaaagaaacatgcggaaaatcaaataaaatatgttggtag

SEQ ID NO: 48686 - DNA, 270 bp, Acinetobacter baumannii
atgacaagaataattgtagcatccaaagagggtttggacgttctgcaagatggtcagctcaataaggtggttttaaaccaacctactattattcaaattggtgtaagtcaaaaagatatcgcatcgatggaaaagcagggtggaagtctagtcatccatttaaaaaatggagaaacaattgtcttagaaaatttctttaatgaagcaacgaatacaacagagcattcactcgtttttccaactgagcaaggaaaatttgttgaagcataa

SEQ ID NO: 48687 - DNA, 768 bp, Acinetobacter baumannii
gtgaatattttaattgccaatgatgacggtgtctttgcaccaggtatacaagctttagctgacgcgttaaaaccactaggccgtgttgtggtggttgctccagaaagtgaaagaagcgggttttcgagtgccttaactttagatcgtcctttacgtcctattcaaattgctgaagatgtatgggctgttaatggaacaccagccgattgtgtttatttatccatgaatggattatttgatttcgaatttgatttggttgtcagtgggatcaatagtggcgcaaatttaggcgatgatgttttatattcgggaactgttggtgcagcctttgaaggtcgtttaatgaaacaacctgcaattgcggtttctttggctgggcctgatgtacgttcatacgaccataaagatgattatgcgcaagcagctaaatgggtacatgactttatcgcaaaaggactacctgcactgccaccgcgacatatttttaatattaatattccagatgtacctcagcttaaaggtacacaaattacttaccaaggccgccgtgcccaatctaaacctatcaccagccatgtagaccctagaggaagacaggtttactggattggtcttgctggtgaggcggtaactgatccacagcgtattgctagtcaaatacaatctgatttttttgcggtcgcgaatggttttgtgagcgtgacgccaattcagatggatgcaacaaactatgcggttttagaagatttgcaggccagtttggggtaa

SEQ ID NO: 48688 - DNA, 930 bp, Acinetobacter baumannii
atgttagatcagcttcgtgcgatgggtgtttttgcttgtgtggttgaaaaaagttcatttagtggtgcggcacgtgaattaggcattacaacaagtgctgtaagtcagcaaatccgttctcttgaaaatgaaatggatgtaattttattacatcgttctacgcgaaaacttagtttgactgaggcagggcaggcttttttctcaagttgccaagaaatgttggcagcagcagaaagaggcaaaatcaggatcaatgaattgcgagatgatttgattggtgacttgcgtattgcaactacccctgatttagcagttcagcacattattcctgctttatctcactggatgtctgcccatcgtggtctatctgttcattttgaagtggggcatcgatatatcgatttaatcgaagagcgaattgatattgcagtgcgcatgagttctacagcggtagaagagagtgactctgttattcctatggcttttgtcgatcagattttggtagcttctcccagctatctcaatcaaacaagcccgatcttgcatccaaatgatttaaacaaccatgagttgctttctattaatgcaatgaatgattcacgtagttttaattttcagcacgctaaaactggtgaaaaattaaatatcgagatggcaagccgtttgcaaagtaataatttacaagtggctaaagcgctatgccagcaagggcatggaattgccagaattttatatttagatgctcaaaaagaactaaagaatggttctttaattgaaatccttccagattggaaactcccagctttcactttatatgcagagattgcaaaacacgatcaacagccaatgaaaattcaacgttgtgtcgaagcgcttaagcaatacttcagtcagttggctggcggaagagcaatgcagattgttcgttaa

SEQ ID NO: 48689 - DNA, 4677 bp, Acinetobacter baumannii
ttggaaattgatgcttggggatgcacttcgcgcggacaagcgcagagagcaggtcactgggctttaaagtcagagcaacttgaaacacgcacagtgtctttcaaagttggtctagatggacacattcctttgccggggaaagtaattgaagttgctgatcctctatttgcaggtcgtgcaaatggtggtcgtgtatctgctatttcggcagatcgtaaaagtattactttggaccgagataatgtggttgcaaaagctggcgaccgactcgtaattaatggtgaaaatggcaaagcccaaacacgtattgttcagtcaatagcaggtagagttattacagtaaccacggcttttgatatgaattcgattgctgtgcaaaacatttgggttttagatgctcaagacttggcaacaatgaagtttcgggtcatctctattactcaagatgataaacatcaatttaacattactgctcttcaatacaatccttcaaagtttgatgcaatcgacactggagcacattttgaagaagcacctatttcaattgttaatcctactgttcaggatgcggttacaaacgtcaccattacaagtgaaagccgagtagatcaaggtattaatgttgccacaatgattgtgtcatgggcacaagcccgtggagcagttaagtatctggttgagtggcgtaaagatgacgggagctggattaaattaccactgacaggcaataactcggtagaggtaccaggtatttatgcgggtcaatatcaggcgcgtgtaacagcaatttcagcatttgaaatttcttctttaccggcatactcagttttgactgcattgactggtaagcaggggttaccaccaaaattagcttttatccgagcgattggcacaatgttcggaatgaaagtggaatgggaatttcctgcaactggcgcattagatactgcatatacggaaattgaatattctacgacttccaatggtgccaatattcagcctctgggttcttatgcttatccaacgacttcactacagcagcagggtttggctgctaatgtgacactctggtatcgggggcggttggttgaccggatcggtaataaaggggattggtctagttgggttagtggcacttcaactgcacaggcgaatgatattcttgatgcgcttgatggcttaatttctgcaacgcagttagatcaggacttaagagatacgatcaataagattgatacgattgaaggtcttgatggagatatcggaaatttaattgacaaagttactgctcttgagggtgaaattgattctgcgaatgcagcaatcgatgctgaaacccagcaaagagtaagtgatgtttctggattaaacgatagccttacacaagaaattagtgatcgaattgcagcagatgcagctgaagcacaagcccgtgcagatgcaattgcacaagaatctttggtacggcagggtgaagttaagcaagtttctgatgccgttgcgaaagaaaccaatgaccgcattgctgcagttaaaggtgtcagtgatggtttaactcaagagattcaggctagaactgatggtgaccagcagattcttaatgctgtcactacctataaagaaagcaccgacacatcaattgcagctgttcaagaatcggttgatattgttgcagatgacttacatgctacagcaacaaaactggacggtgtttacgcacaggtaacacctttaacggctgatcagaacaactggaccgcagataatggaagtaaccaagctgctgcttggacaattcagtcagcatttgctgaaggtgatttagccctaagtaaacgtatcgatgttgttaatgctcaggtgggaaataaccaagctgctattcagcaagaagccttagcaagagtcaatggtgacagcgcactaagccaaagaattgatacgttgagttcagattttggcaataacaatgcttctgttcagcaaaaacttattgctttggctgatgccgatggagcacaggttcaggcactgaataattacattgcttccaatgacttggctctggcttcggttatagacgatgtaacagcagttgttgatgacactagtgcaaatacacaggcaattgatggtttaagagccagtgtaaaggttgccacggatgatgctggcaaagcacttgaaaatagtgctactgccataagcaaggctgatacagcggtgtctcaagcaggttcagcttcatcaatggcacgggaagcaacagcaacagcacaatcggcaagttcaaaagcagatggtgctattaatacagccaataccgctagtagtgatgctgcaactgcaaaaaccaatgctgcaactgctatcagtaaagcgcaagctgctgctgatgcttctagtgctaatgcattatctattaatgaaatcaatgctgctttagaggacaaggcttcaactggtgcgcttgaagaagtcaaagcggatgtagaggatattgatggcgttgttaaagctcaaacgcagaagcttgatggtgtttatgcaaaagttactccattaactgctgaccaaaacaactggacagctgatagtggtagcaaccaagcaggggcgtggacaattcagtctgcttatgctgatggcgatttagctttaagtaagcgcattgatactgtttcagcttcagttggtgaaaacactgcactaattcaacaggaagctacagcaagagcgaatggtgatgctgctacggtacaagctttaaatgtttataaagcgagtaacgatgcagctttagcagcagtgagtcaacgagttgatattaatactgcagacaatgaagcaactgctttaaaggttgatgcgattgatgtcagggttaaaacaacagaggagaaaacagggcaggctctcgaaaatagtgctactgctgtaactaaatctgaagcagcagtttcggaagctgggtctgctgttactgtagcaaatcaggcaaaagcaacagctggcactgcaagtagtgatgctgcaacagctaaggcaaatgcagccacagcactatcacaagccaatgcagcagcagatgcatctagtgctgcaattgagcgtgttgagtctgtagaggctgagcttagtgacaaggcctcaacaggttatgtggatagtgtgaaagctaccgttgatgagcagggtgatttgatcaatgcaaatactgagcgattaagcggagtctatgcaaaagttaccccactaaccgcagatagtacttcactaactgcggacagctcatcaacagaggctggctcatggtcattacagtcagcagcagctgaaggtgacttggctctaagtaagcggattgatattactcaggctcagatagatgaaaataaggcaactattgcctctgaatctactgcgcgtgtaaatgctgatagcgcacttgggcaacgaatagatacagtgcaggtgcaatttttaagtaatttggcaactgtacagagtgaagttaaaacggtcagtgatgctcaaggggctacagcaggtaaagtcgatacgattcaatcaactgtcgatggacatactgcaagtattcgaactcagcaagatgctattgatgggataagtacacagtacactgtcaaactcgatacaggaggttatgttgctggatttggtttgatgaattctggcaagtcatctaactttattattcgtgctgatatgtttgcgattgccccacctgctgcaaatggtaatgcggccaaatatgcatttgtttatcaggcttcaccagtcacgttaccaaatggcactgtgattccagcaggtttaaagcttgatgatgcggtaatcggaacggttaatgcggataagctctgggtagagaaacttagctcaattagctctgatcttggtgcacttaaggctaaatctgccaacattgaagatggagcaattcaaacagcacatatcggcaatgctcaagtggatacgctgaaaatcaaagataatgctgtaacagttccagtttcagcatttgctgagatttcggtcgcagtaaatactgagtatgtcacgattcagactttggcagttccatctgatatggggcatacaactttaacttttggtgccgtatttagttttactggatacagccctaaacaacaggttttatgccgtgtacttaagaatgatcaagtcgtttttgaggatctggaagttcactttattgagcacagttctgttgctttaattactgatgcaaatggctcacataaccataatggctcaactgtgaatgtctcaggtaataccggacaagatggttcacatagtcatagctttaatgcgagtggtacaacaggttcaacaaatgcgggaggggattatcatagccattcattcaatgccaatggcagtacaaacagtaatggttcacatagtcatagtgttaatttaagtggcaatgtagtgatgtcagaaggtggtgcacatacgcacaatattactgtgcaaggcaattctcgtagtgctggaaccttgaatatttcaagacatgattcaactggcattgctggaacttttaaattacaacttaaagcagtgtcaggtggctcaatgaatgtgtcacagcgttatattcatgcaatgacgatgaggaagtaa

SEQ ID NO: 48690 - DNA, 180 bp, Acinetobacter baumannii
atggcatattttgcagtttatgaggttgaaactggtgaaatacaaaatttaattgagtgccctaagtttctagttgaaacaattcatcttgaagaggggcaacagtttttagaagtggatcatcaagtatcagcaaataagtatttagttaaaaatgatgagttagttttaagagattaa

SEQ ID NO: 48691 - DNA, 192 bp, Acinetobacter baumannii
atgtcagttcagctaattaaaattcgagatataacaagtgatcgaaatgtagacctattagctgatctcgacaaaaatggagaagtcatcaaaatttacgactacaacggcaacgaactaaaaattaatttcttgcgtgacgaagtttattataaaaagacttggtggaagttccagaagaagcaaaattag

SEQ ID NO: 48692 - DNA, 555 bp, Acinetobacter baumannii
atgacaactaaaccattctttgatgctgcccgagtaattgcaggcggcaagcttacacaggcgcaagtagacgatctaaataaagtggtcgaaaaacttgcaccaggtggaaaaactacaagtgatgatggtatagatttaataactagttttgaaggcacgcgattcaatgcttacgatgatggtgtaggggtttggaccattggtactggcaccacagtttatccaaatggcgtgaaggtcaagaagggcgatacttgcacagcagaacaagctaagacttactttaaacatgacttagctaaatttgaaaagactgtaaatgaatcggtcactgtgcctttaactcaaaatcagtttgatgctttggtatcactgacttacaacatcggctcaggtgcatttaagaattcgactttgttaaagaaactcaacaaaggtgattatcaaggcgctgctgaccaattccttgtctggaacaaagcaggcggtaaagttatgaaaggtctagttcgtcgacgagaagcagaacgagcactctttttaaagaagtaa

SEQ ID NO: 48693 - DNA, 219 bp, Acinetobacter baumannii
atgaatagtgaaaacacaagagcttatctagctttcgcattagtgggactgatgtttgttttagtgattgctttattttttgtggatatgccgcgagaaaacagcaatctgatcaatacggcattgggtttcattgcgggggctatgacaacagcatgcggcttttattttggtagttctgaattagagaaaaagaaaggtgaatccaatgacaactaa

SEQ ID NO: 48694 - DNA, 357 bp, Acinetobacter baumannii
atgactgaaaatgaatcatatgggttgagatttgaaaagaaaatcgactccattcagagtgatatccgcatgttgtcagatcatgttactcgactgactttcattaatgaagcgcacaaagagactagcgaacagaacaaaaaggatatcgatacattggatatcaaagtcgccaatttagaaaaccgcacagcagcgcaagatggtggaatttctgtgctgcgtgtattgctgggaatatttgcaggcatcgtattttcattgtgtgcgtgggttggatcttcaattattcaattaagccaagaccagtctttaattaaagagaaagtatcacgattggaggaagcaaaaagatga

SEQ ID NO: 48695 - DNA, 2556 bp, Acinetobacter baumannii
atggcagtaccagaacagacgccatttatagaatatacagcgaatggaactactacagtttatccgcttacgtttgactgtgataaatctgaatttttgattgtatctttagatgggaatgaagcgccagtagggtcttgggctttaacgaatggttcagttatttttaacactgcgcctgctaatggtgttttggtttcgattaaacgaaacacgccctttcaacgaacaacgaactatcaatcctatgacaattcattccgaccttcgccagtaaatagagactttgatttaatttggtggaagcttcaagagctgggctatcgtgatcaggttatatggcttgctttaattaaagagatctcagaccgtattgatggcgatgaaaatcttcaaaatcaaatcaatacaattgatgaatggcttagtaatttacaaggaaatgtagataaaaatacagctgatatttctcagttgatactcgatttatcgcaagaagttgctgaccgaatagcaaacgataaaattctaaaagatatgtttcttgcgatgatggatgaggcgattaatgaaggcactataaatgctttagccattactcatgttgactcacttgaagatcttgaggaaatttccaatgtttgggatgggagaaccgtctatgtaaagaatacagggaattatgcttttgatgctgcattaagcgaatggataaaatcttttcaagatgccgataatgtacgtgatggagaagaaacgcagaaagcaattaatgctcaatcacaatattctgtatcaacattctcagaattaagggcattaaaatataaatcaagcaaacataaaaaaggtgtttttgtctgtcaaagagctgatgattataagtttggtggcgggttatttgttcctgacctgactgatacaacaacagccgatgatgacggaacaattttagttggactaaacggtgtccgatggaagagaaaatggaatgcgcatgcggacccatgttggttcggagctgactataaaggtctggtagattgttcacctcaagttcaaaaagccattgatgtttcatatggccgtctttggttcgggaatgcagacagaaacttcaaaatgatgacccctgtaggcttacctacgaacagtatcgttggcgatatgctaatggaaatttgcggagctggggcgcgaatttgggtctattcagatactggaatttttacatcaaaaagatcgattggatttgagacctcaaatagtgatttatatactgcagttttagaaatcggtagaggcttgcgttttcagggggacggtacaagcccatctgtagtgattaatggagaccgtctttataatgtaaatatgaaaggggggcgctatctaagaaatacagctttagttaaagcaactattccgcgtcgttctgaaaacacaggttatttgcagtcagtaactatcgaaggcaatcacttagctctttgtagaaaaattattgattcaaagcgtggctttaacattaattttaatcgcaactttggagaatcttgttacggtggtttgtatatcgacggtgaaggtgcaccagctgtcaatgttgttagatgtgaaggtaatctgtgggaatctggcggtgtattcgccaaacttggtgctacatatgcgggtactttttttgggaactattttgaaggcaatagtgctgaagatgtcccaattttaaaatgcatgatcgaattgggtaagactggaacaactcagtattcaagtggtgttacttttattggaaatcaatttggtgcatcaacaatttataaaacagacccggaatattgtgatgttaaattttcatcagcactttcaggcactggtttagataacctaacccctcctatattcattggtaactggactaatggctatagaatgtggtcagagggtcaagttttaactcagtttggtaatacatttagtggtggcagtgcccgtagacatggcgctccaaaattacatacagaagcacgcgtaacatttgatctttcaagaaaggattatgtaagtgcaacatcattatcgggtggtgtgcatactatttgtgagttagaaacctctatgctagaagcgataactgctcaagcaaatagagcatgtagtgctgatttgaatatttttatgcaaatgaaaacttcaaataatattgtcctaggttctgcactcgcaaaagtaagtttgttagcacaaggtgctgaaggtattagtgtgggcgcagttaatagtgtttatgttggtgccactctaactggatttgttcaaatggatggtggcctaattgataatgttaataatatttcactgtttaagcattttacaaacccagtacttacacttcagagagtgggcaccaaataccagttaaagttatctggctatgcgccactaacaggaaccatctatggtgatactgttaagatctcttcgaatagtattatgacaatctattctctcaatagtggtggttcattagcaggtcagattgccttctcctaa

SEQ ID NO: 48696 - DNA, 1659 bp, Acinetobacter baumannii
atgaaagcatcttttgctgaattctatgttctttgggatgaatacttagggcgggaaacgcccttattccacattgaaacatgtgaatggatggaaaatctatctgatgaagttgataaccttctcatgcttccacgtgggcataataaatcagggatagtaactgtatttaatgcttggcgcttctatcgtgatgttgatgatttagtactacatcaaggagcaacaaatattgatgctcttaagtgtagtcgtgcagtagttcgtattcttgccaatcacccactttgtaaacttaataatgtaaagaaatctcatggtggtgttattaaatggtgggtagaaggctcgagtgatgaacagtatggttctatgtatgcgcgaggcattttatcaagcgtaactggacaacgtgccaaacatatccaaaacgatgacgtagaagtacagaagaacgtagcgacagaagaaaatcgagaaaaattaaaacatagccttacagaacagacccacattttagtacctggtggaacaagcttatttattggaactccacacagctatgaatctatctataaagaaatgattgaggcgggggcgaactgctttattagacggatgtttgaacatgaatatcgaatagaggggcgaagagaagcagttctaaacttctatcctgaatatgtttttagtggcattcataaatatagtaagtgcctagaagagaataagcactacacaatagaaaaacatggcaatggctataaagtaacacttcttgatgactattcatttgttgacttttatgccaaagcactatggcctgaacgcttcactaaacaggaaatgacaaaacgacgtaaaaagtgtcgaactatcaatgaatgggattcacaataccaactacatgctaagcctattggtgatgttcgtcttgatcctgacaagttgatcccatatgactgtgaaccaactttaaaatatgccaatggcgttgcattaatgatgttaggcaatgtcagaattgcttctgcttctctacgtgttgatccatctgaagggaagaaagattcagatatctcatctgttgcactaattcttcatgatgaacaaggccgaatgtactggcatagatctattagcctgaaaggagaagtgggtcctacggatgaatcaggccacaacattataggtggacaggtctatcaattagttcaactaattaaagagttttacattactagagtgacggttgaaacaaatggtgtaggtggatttttcccaagtgttctaaagagttgcctcaaacaacaaggtgttagatgtggtgtaactgaaataaaagaaactaagaataaaaacctaaggattttaggagctattgaaggcccattaaattcgggtgttctatgggctcatgtatcagttttatatgatccagataagccagaagatgatagttttgaagttcgtattatgcgctcatggaatccagcagttacgaaccagattgatgatccattagattcattagcaggtgcaatatctgatgaacctatacgcataggtaaattacacaacaaagatgagtataaagaaacgcctaattggagaacaaacggtggcgtacatgaagccgccttagatttcgaaaattag

SEQ ID NO: 48697 - DNA, 315 bp, Acinetobacter baumannii
atgcgtgatgatcaaatagcagaattagaaaaacttcaggagatgatgaccgatgatatgttgaaaatcgggttcgctgctgttgatttaggttttgagtcaaaagaggaccgaggcgataaggtttggctatataaggggtttaaccaatgtagctcagcagttgcaaagattagccaaataattggaatgaaacaggggactattccgcctgcaagtacagatgaagaaacacaaagaaaatatgaggaaaatttaaaaaataaagccaaagcgattattcaaagtgttaaagctaagtcaaattatagttaa

SEQ ID NO: 48698 - DNA, 201 bp, Acinetobacter baumannii
atgaaaagattttgggaaaaggtaggaaacttttacatttattctttatttgccggacctgttgccatggttttcttaatgagtggcgatcaagattatatagtaaataagattttaactttttattttatgggagtcttggctttaacaattgttctttggccaatcttagcttttataggtagaaagaaacgatcataa

SEQ ID NO: 48699 - DNA, 429 bp, Acinetobacter baumannii
atgaaaagactacttgggctaatgacatatctatgcagttctattgttatggccactccaattacacttcaacattctaagaccagctatgtgaactctgggatctgttccgcagtggtggatgtaacgatccatgattttcttggaacctatgacaaactgtatttagaccttgtggcaaaggataaagccggtagagtgcaggggacttctgagaatgtaataacctacggcgatatacaaaaccttcaaggtaaagcatttgggaatgtctttatcgaatcagagactatgtgcggagcgggtcgcacttggacagttcaagttaagcgcgccgtcctggtcgcagatggtaaaagagaagacctactgaaggctaaaaaagttcatattgatgacttccagccgatgaaatttaaagttaattga

SEQ ID NO: 48700 - DNA, 561 bp, Acinetobacter baumannii
gtgaaaatatacattggattattatcaataactttttgctccattgtgtattctggtgaagacataattagcccagatatacaaaaatatttaattcttaatgattctgtatttaccgattataaaaatactaaaaataaaattacttatgcttatattgggttacaggacaatctgttttggtacatggggtgctccaaaacaatcattaaaggtttgccaactgtagattgcttaatcctatccaaagataatcgttttgctatgcatgttgctccagaaggaacgatggttctttttgatagagaaaattttgttaagtctaataaatatttatttgaagtaaattatcgtatagatggaaagccaatgcagacattgcctagcaccattattacaccttcggctaaaacaaatagttttatagcgagcttattaaaagcaaatcgctttaactattcaatcaaatcagataataaatatgcatcatataagtatgatttgaaggggttagatttggtctatggattagcaaaagaaattgttgaattaaataattag

SEQ ID NO: 48701 - DNA, 2526 bp, Acinetobacter baumannii
atgagagctgaatgtagagaacaagttgcaaaagccttaggcaaaaaaagactcagtgcagctgatagtaatcgcatttcatcactgtatattcgagcacaaaatacgttggctagaactgatgcagattggattttcaaaagtcctgctgagcgcgcggaagccattgctcagaaaacagctacagatctcgccgtccagattgccaagaataatcaaaatattgccagagatgctgtcattaaggcgcaggtgcagaacgaaatctataaccatcctaaattaaatccggtccaagctttaatgcggaagattgcatacttctcggatcagagtggtatccagtctatagagaagcaatcccaagccttgcacagtcgctggatgtcattggttgctgatgtgtttaccaagacacaagagcgctttggtatgtcagtgaacaaggcaatgactgatgacattatccgggtcatgtttggtggcaagtctgataatccagaaattatggcgatggccaaggaagtaagcaccgtcctagaggagatgcgtttagccttcaatcgggctggagggaatatcaaaaagctcgataactttggctttatgacctcacatgatcagaagaaagtagccctaacagatcaatcagaatgggtgaacgatgccttaaacggtttagatcgcaatcagtatgtcaaagagactggtgagctgatggatgagctggaactgaggtccatgcttgaagatgtctataaaacaatttcaaccaacggcgccaacaaggacttattggtactgaataagcaggccaaagcaggagcatcaccggtgggcggtcgttctaagatggcaaatcgtcaccaggaatcacgtgctttgcatttcaaggatggtgacgcatggctggcgtatcagaagaaatatggaacttatgatgaagcagggtttcatgaaattctgaaaaaccatactcaccgcatgagtacagaagtggccatgatgcagaaccttgggtccaatcctcgtcatacgtttgaatctctattggatgaagccaagatcaaactgaaagcagatccacagaatggattgaaacatggcgaaattgataagcaggctcatcgagccatgtcgatgtacaacactttggatgccaatacccgagcaattgattcaactctggggaatgttatggggggacttcgtgccttaatggtttcatctaaattaggtagtaccacgctgacgacctttggcgaccatgccagtatgaagaaggtcgctaatatgctgggtctgtcttataccaaatccatcctccctgaatacatgaagcaactgaaacagggtgccacacgtgatgaagccctacgttttgggcttggtatcactgagatggtaggcggtatgtctcgctttggagatgctgatgtggtgagtagtgccactaaatcaggccgctttaatgcgcgtatgcaggcctttgctgcaatgactatgaaagtgtcaggattaaacgccgtgacagccagtgctaaacgagcgcttaatctggtgcatatgaataagctggctgaaatgactcgtaaaacggattggaaggatcttggtgcggatgatcttaagatcctacaggggaacggtattaccgaacgtgattggcaattatggcagcagctggagccaagtaaacgtgaagatgggacggcggtactttcgcagaatgatttttttaatgcaccagatgatgtgattaagcagtttttgccattggacaagcaggatagtgcgaacgccattgctgacttccgctataaggctgcaatgaagtatcagactcatatcttcaatgaggagtcagtcgctattattgaagcaggtgtacgtgaacgtagcatcattaacttgggcgaagctggtaccatccaaggggaattaggccgaaccttatttcagttcaaaggcttcccattggcttatatgttccgcattggacaccgagcctttgctcagggagatattaagagccgagtaacgttcctagcttcattactggcttatcaaactttagcaggtgcattgatcgttcagactcaaaacttggcaaatggcaaaaatccagagccagtattcaccatcgatttctttggcaaatctatgctcaaaggtggtgggctttccttcttgggcgatattatgtctgcgctttcagatcctactggtagaagtgcatccgactttatcagtggcccattattaggccagagcatgaagttgggtatgctgctgactggtatggggaataacatcattgaagggaaggaatctacccgtatgatggaggtagccaataccctaaaaagcaatattccattgcagaatctttggtacagtaagctggtcgtagatcgaatgctgtattccaaaatgcagaatatgattgatcctgattatttaccaagaacacagcagcgcctggagaacctaggtaatagttactggtgggatttatcggaataa

SEQ ID NO: 48702 - DNA, 2631 bp, Acinetobacter baumannii
atggattttttagcagatgatgaattaacgttaaatcaagaagatcctcgcttcaaacctaagagtgaacgtggtggatttagcgacggggctttgggtgttgtttctggtgttgccatgggtaccgttgaggctgccactgctccagatgccttaatacggggagataagaaagcagctgcattgagagcgcaaaaccttgagatttttaaacctgatgacttggggggagtcggtgagtttacttatgggcttactaaagactttacccgtattggatggaacgccgtcactactttggggactggcggtgtaccaggcttagttttgaactctgggctatttgggtaccagacctttgaagcggagaaatcagacttactgaataaaggggcagacataaaaactgctcaaactggtggagcgattaaaggggttacagatgctttgggttttgctattcctacccatggtgttgctaaatcggtagtagctgatgctgtggctactactgcgctggctactggagctggcgtagctggtgattatctggaaggttcatttcttgaaaacaatgaaaataaaaaggtcgctcaatacggtgaagcattaaaggaaaatgctttaagtccatccacattagcagcaaacggcgggatggcactcctactcaacttgtgggccaataaaggtcgattgagacctgagcaggtaaaagaacacggtaatgttgatacgatgaatgatgctgctcatgtacaagcgaaccttgagcatgcagaagggatgaatccttttaatccagaaaatgcaaaagaagccaattcacactttgatgcactggatagtgcaatggagagtgcattgaatgatgagctggtcagcttaaaagcaccagtgagcggaacacccaaagcagtcgtaaccagtacgccagtggcatcaataacaggtacaccgaaagctatcgtaagacccggcactatcaatacggatgaacatcaagcaccagtaatggcggagcttttgactaatcctgtatttgataaaaaaccttggacaaaaacgattgtccaggaagcctctaaacggggtatcaatccagtagatgccttaatcatttcccatttagaaactggtggcaccttcagtacttcaatccagccaaagggcagaaatggggagttgctttcatcggccaccggcttatttcagactttggatagcacctttgcccgtatggggggtaagaataagtttgatggtaatgatcaaattaaagcgggcctgaactactacgagcacaatgccaaggttttccgcagccactttaaccgagaccctaatggcctagaactttactacctgcatttctttggtgaaggtggtggaccagtctttttgaaagccaaggataatgagctttttgttgatgtggccacacgctggagtaaagggaacagtaaaaaaactgcacgtcaaatagcagaagaaattacatcctctcataagtttaatggcatgactgttggacaggtaaaggctaaatacgaaaagcgctggaatgaaattgcgagtctttatagtgatgttcgtgcagatacctcagcaagatctaccgaagttcgagggagcgaatcagagttcccacagtttgagtctgatatagcagcaccgcctacttacaagtcccagtctgatgctgaaattgaggccatgccttttgtactcagtgcagatgaacatagtgttaaatcacttcaagaggagtttgaagctttatcttctcctttgactaaagaggatttggaatatctgaaagctacggcgcattaccaatattcagatactaatgcttatcgagcgccgtatgtagaaccacgggtcgatctgtctggaacaagtaatagtgctaatcgtactttagacacactggaatctgacctttaccaacttgagccaaaacaacaaggagttgttgttgcagattctgagtcgaatatttcagatatcagtaccagaacatccgatccacatattctgcaaaactctatcgctgaaggcatagatagttggattcccaccaggtcacaaaattaccttaaacgagaacgctcagctgagggtgggggcatcattcaagaactacacaataagacctctaatacaacttttcagcggcaagtcaatcaggacggcactattagcccggtaaaggctacacgtaatggcgaagacctgtttgctcatcctgcaaatggtaaagcagatagtgctgaactaactgcagtacagcataaggctgctcaggcattagagcgggagttctggaagccaggtaaggtcaaagtcgatggtgcaccagacttaaccaagtccagtaaaggtgagtacggttcattcactgacacggcagatggtagggaagcggtttcaattctggaagcagatcccgacatggaagtaacttttactcgtctggatgaaaacgggaatgaagaaattgtgacgatgtcatcccgtgatttactggactatgtcaaagagcaagaagaaatcgcaaaagacgaaattcaggcagtgaaagcattggctagctgcgcattaagatttgggagtgaagcagcatga

SEQ ID NO: 48703 - DNA, 1992 bp, Acinetobacter baumannii
atgcgtattcctatttctcgtggtcgtgaagcaccacaagcgcaaatgcaatcgtttactcctaacactggcttagctgaaattggtcgttctattggaggggcactagaggctcgcagtgaaaaacttagagaagaacaggataaaacagaaaaagctgattttgcattacagtcatccaagattggtgctgatattagcgttgtagataatgatttactgctaaaaatgcagagtggggaattaacctacgataatgccgtaaagcaaagacaggaaagccttgagtcaatcaagacgcagtataaaaatgtggtgcctaagcagtttgagcaaaactttaataattactttgaacagcattcttatcagagtgcatcgaagtatctgcctattgcacaaaaatcagaacaacaacaggcaattgtccagctcaaaggcatgcgagaaaactatcttaaaaatcctaatgcttctgaaaaagaggtgtggaatggattgtctttgtatgcacagtccaaaggtttaccgttggctcatgttcaggacacttttaatgaatacaaaaataaccgtgccagcaatgatgtaacgactttctaccaggcgaataagtctgacaatgaaaagctgactgaactctcaactcctgaagctgttattgcaaaacatcctaatttaactcaagaacaggctgtttactggagtggtcgaacattaacccagattgaccagaataaccgggcagttgccttacagcaaaagcagttagaagatgacgccaaagacgctgttaatgagatgaaggcggatattgaaacaggcttgatcccaagtgaagacgtgattaaatcccgtttagcacgtgttaagggtacagggaaagaatctgagtttgttcagtacagcggagctttggttgaagtacagcagttcatgagactgggagcggatgagcgtgaagcttacctcagtaaaaagcgttcagaggctcaaaatacggcgcaagataatgctaaagacgtgagctggaagttaaaccttctgtctaaaacgcatgagaatatgttgggctatgagaaaaataattcagctctggcgtactcaatcaagactggtcaagatctaactgtagtacctactcatgcaattctcagtggcaaccctgaagctattgcagctctatccaagaacatcaaatctattcatgcgaacaatatattgaacgggactgtagggtctttaaatccattcactacccagcagcaagctgaactaaaacaattctgggaaaaagctagaccaggggataagttgagtttgctaaccagtctttacaaatccagtgcgggtaatgccaatgcatccagagatatgattagtagcattgctggcgaaagcggtgcatatcgattatctgcttcacttaataatcgtggcttgcaagatattgctgggcagattattactgggcaggatctattggataagaacttggtaaaagttgatgacaatgccctaagaacctataccgcaacctacttagctggcatcacttcaccaggtaaaccagactttcagatttatttggagtcagtcaaagctaactatgcttatttggttcaaaagtccgagaaagtagccgattcaaagggaagtatattaaataaaaccatagatgaggatttgttcaataaagcaattctaaatgtaactggtggcaagttcacttcagggggatttttcggaagtaaatcggtagtactgcggcctcataccgttagtgaaaaggcttttcgtgagcagctggaaagctttaactctcgtaatgccagaacctacggcggatctgataaagacttcttcttggatctgcctttagaacaagaccctaaaaatccatacgtctattacttcaagaatggtaccaagtacatcatggatgccaccgataagaagcgtcaaacacgtttaacatttaaagtgagatga

SEQ ID NO: 48704 - DNA, 900 bp, Acinetobacter baumannii
atggcgaatgaaaataaaattacggcagcgtttgtacaacagtttcatgacacgtacgaagttgcctcaatgcaaaatgagtcacgattacttaaaacaattgtgaaccgtggaaaaattgtcggtgaatcattcactgtaaatgatatgggtcaagtcgaaatgtcaccttctggtgcgcgttttggtaatactaattggactattccagacgctggcgtacgtacagcgcttatgtcagattgggatttatttattccgattgagaaccgtgatattccaaagttaaaggcgcatccaaatgacaagtacatgaagaacttggttagtgcccgcaatcgtacgacagatgacatcatttaccaatctctaattggtagtgttacacgcaccactgtagatgatgcaggttctaaaactgtttctcaggttgctttaccaaacactcagatcattctttcaagttttggaccactgaaaaagcaaatcattaaggcaaaaaccctattccgaaccaatgagtgtgacgaaaagaatggggaaaaattatatatgatctacgattcacatatgatggaaatcttccttaatgatactactctcaccaatgctgattacttgaaaattcagatgcttcaagaaggtcaagtaacgacaaattggcttggtgttgagtggatcccttacgaaaaactcaacaatggtgctggcggtgctacagagcgtcgtacagtgatgtatgcgggaactgctgcacactttggtgatgcagacattacaggttttgatatttctactcgtccagacaagaagaatatcaaacaggttggtggcgttcactcatttggcgcggctcgtgccaatgagaagaaagtggttgctatcgacttcttagtgtaa

SEQ ID NO: 48705 - DNA, 486 bp, Acinetobacter baumannii
atgattaatgccctttttgtagttgcagttctggcctttattgtggctgccgcatttgccctagcttacaaagttagtggtgaggaatgggaagaaaagtattgggcggagaaccgcttgtacttagataccaccattcaattggctaagtcacaagaggaattagagaaagccaattcacgcattcagcagcttgaagaaagcctccgcaacaaggaacagaagcccgaagaagttggaacttttgttcaacatagagcattgcgcccagcaacaccagagacatatcgggtcgtgtttgatcttgatctgaacgggcaacgcatccttgagcatctgacccaaaagtattgccgcaatgccttctcaaatacagaccgtgaaaccaattacaagcttggtcaacaaagcgttgtggctggaatcatcaatgaaatcaacaaagcaaatgacccaaattacagtgaggtagagaacgatgcttaa

SEQ ID NO: 48706 - DNA, 204 bp, Acinetobacter baumannii
atgaacattgaagagattaagaggaatgcgccagagggggctagcctttatcttcatggaggagatgggtacttagatcataaaattatctactatcgcttggatgtggaaggtaaacttacgtttcatgcagattcagaagatatatggctaccttgtcaaaatcctaaaatagttcctcagcttaaattattgttagattaa

SEQ ID NO: 48707 - DNA, 423 bp, Acinetobacter baumannii
atggataagtgcagagaagaatttgagaaacattttttaagtttgaaatttgccacagaaggagttgctcaaactgttcttgacgcttgcacctttgataaagatcaaaatgtatatcttcctaacatggaatggtttttacataacgatgatcaagaaggtgttgtgtattgcagtatgttaaacacttgctacatgtcgtttcagagccgccagaccgaggtagatgagctgcaaaacctatatacacaacaaggcataaatatgctgaagctgcaaaagcgggtggatgcggcacttaagttaatcgaatcatggaatgaaattgcttttgataaaaccactcattggacagaaggttatgaagaaggctgctaccactgtgcagcgcagttagagcaagcgctcaagggggaaggatga

SEQ ID NO: 48708 - DNA, 273 bp, Acinetobacter baumannii
atgagtgagtttaaagtcggggataaggttgttttgaaaaacagtagccaagacaaggtaatgactattcaagaatgctacaaggaattcattcgagcatattgggatgacaaacattattcatttgctcatgaagttaattttcgttttgccacccccgaagaaatcgcattaggccaccgcattgataaaccatcggactcgagggaattagaaaccctagacaaactagaaaaccacatcagcccgctgtgtaaatcaaaggatgtttga

SEQ ID NO: 48709 - DNA, 342 bp, Acinetobacter baumannii
atgaaaccagaacagtttattcgtgagtacggggtggagaaggcgagagaggttgttgaaggcatcccaagcaaatatatggagtgttactactcaacattatgctactgcaccaaagcaaaaaagtattcagatcgttttaatccaagaattgaacttgtgaacatggcggatctcaaacgcttggtggagtctattgatttagtcgaatcatggggtggcattgaggacttaaaactatatgacttgtctcattgcaaagataaacctgaatctgctggatacaagctgcttaaagcaattgctgattacgaatcaatatacggaggcggggatgaatag

SEQ ID NO: 48710 - DNA, 507 bp, Acinetobacter baumannii
atgagaataagcgaaaaagagtttgagtcaattcaaaacaagcggaataacgcacaaaaaggcacattacagcgcgataaaggcaaaagtgatgcgtatgtaccacttaaggcaaaaatagctgatacaagcgaaattagagcgttttacgaagatggcttaaaagtcattttggattgtgaaattaaaactgcaccaccttcagtaaatcactactgggtagcttctggaaaaagaagatttttaagcaataaagcacgtgattttcatgatttggttcgacaagttgtgccggctcataaatcaactgcacgactcaaattagaagtgacttttcatttccctacacgtcaatgccgagacatcgataactacctcaaagcgactatcgatagcttagtgaaatgcggtctgtgtgtggacgatgaacagttcgatgagcttctagtaaagcgtggaaatgtcatcaaaggcgggcttattaagctcaaggttagcgaggtttag

SEQ ID NO: 48711 - DNA, 1326 bp, Acinetobacter baumannii
atgagtacaaacattcaaaatatgacaattgagcagagtgtgctagtcgctttgatgacagtgagccattcccttgaggttgtcgcaaatgatcttaccgaagaacatttttacgctggtcgtcacaagattatctacaaggcgattgttgagcttgctaatgctgataagccatatgactcagtgtttgtctgcaagcatctacaagagcgaaaccttctcaatgatattggtggagaagagtatttaattgaacttaacagtgcggttggtagcgtacaccatttggaatattttgttgctgagttgaataaacttaagcagcatcgcgaagttgaagatattggtctctcgattgcggagtgcgctaaagatctgactatcactgatgtttacttagctgctgagaatttatttagttcatctagtaattctattgagcaaaagcaaacaggttttgattttaaccaggctttagaaaaaacacttgagcgatttgagaaaaagattgctcagaaagaacaaaagggcttcataggtgttcagttcaatattcctcatcttgataatcttttgggaacaattgaaaagggtcatttttgtgtaattggtggtcgtccgggcagtggtaaatcaactcttgctcagatgtgtgcaatgcaaactgctaagcgctacaacatgccagtcttgtttatctctgctgagatggatacgccgaccctaaccaaccgcatgatctcggcattaggtgcaatcccgtataacaatcttcacaacggtgaaatctatgacgggatgtttgagaagcttactgcaactattgctcaatttagaaacctgccaatttttattgaagaaaagcaaaagccaacgattgctgaaatccaaagttatgcgcgcaaagcgaagcgtaagtacaaggctttgggctgcatcattgttgattatatcggcttaatccgagacccatctaagaaggatcgcgttcaagaagttgcatcaatcagtcgtgacttaaaagctatggcaaaagagtttgattgcccagtaattgcattggctcaacttaaccgtggagcagaaggacacaagccagtagcaagtgatcttaaggattctggacagattgaacaggatgcagaccaaatcatcatggttcatccaatcctcgaaaaagagactaatgcgccaactggtgtaaccgagttaattattgccaaaaatcgtcacggtaagcgtggatctgtaaaggttcaggatcgcttagatatttgtcgtttcgtaggcatgtcattcccagtggaagagagaggtgcagcgtga

SEQ ID NO: 48712 - DNA, 744 bp, Acinetobacter baumannii
atgactagttttatttctaatgcattccagattcctaatgacctaatagataacggacatatggctaagatgaagggtgcagctttgccttgttatcttctcattgttcgtaaaacgcgtggctggaataaacaagcagatagcatcagcctatctcagtttgtaaaagctactggatacaacaaggatactgtacaaaaaggcctattaattttggaagagatgggtgtaattatccgccttgaaactgacaaacaaattaatgaatggtctctaactgaccagataattaccactgaaaaccatactaaaaattcgcctagcgaaaatttagctatgctaaaaaatagtacggaaccatacgaaaatttagtatcaaaccatactaaaaattcgccacacaataacaataataaaaacaaagaaaaacaaggggtgggttactcagaaaactttgagaagttctggtctgcatatccaacttgtaaacgtaaatcagacaagtctggcacttataaaactttcacaaagcatgaaggaagttttgcgattgaaacacttctttcagttcttgaaaaacaaaaatctgatgtctcttggacaaagcaggatggtgagttcattccatcacctagcgcttggttaaaccaaaaacaatgggaaaacgagtattggtttcaagtcaatagccctgtggtagctcctgatttctctaatgcccaattgcaatatggagactggtaa

SEQ ID NO: 48713 - DNA, 174 bp, Acinetobacter baumannii
atgaatcctacagctttgcggttcataagggagtatgagcatggagtttatgaaggtgcgaaatatgcacgccaatatggcgatcttcaaaggctttacgatgcttcaagtgatgaattcttcattgaagaaatcaacgatgcttatgaagagtttaagaggagcttggtatga

SEQ ID NO: 48714 - DNA, 183 bp, Acinetobacter baumannii
atgaactattcaatattagcagacattgaactaaatcggaagattagtttgtttcaaaaagcggttgaggcttatgcaacagaacgcagtttaaaaaactcggtcgctgtagctgaggctaaaagtaacttggagcgtcattactatgaatcctacagctttgcggttcataagggagtatga

SEQ ID NO: 48715 - DNA, 267 bp, Acinetobacter baumannii
atgagtcttgataaaaattctacgcatgtgcgtttgtctcccgaaaatcatcaacgagcaaaagtcttagcaaatttcaaaggtaagaacttggctcagtatctcgcttggcttcttgaaaaagaaatcgctggcgagtggcacattcttaatatagaggcaaaaaacatggagcgcttgggattaacaggtttgataagggagcttagtactgaagtcgaaatcgacgagggattagaagggattactgggaatcaagggcaataa

SEQ ID NO: 48716 - DNA, 1491 bp, Acinetobacter baumannii
atggtcggtaaagatcagctatttaaaattgatgatgggaacgttgaaaaagcgtctttttcagtttctttaagcgatcttaatttacaaggagctgggtctaacaataccgtattagaaggaggattaatttataaccatgaacaattaaccattcgaaattcacgtttgataaatggttatgcaacccgaggaggtgcaatttataatgcaggtaatttatccaatacaacaaatacagcaggtacagttagtcttgtcaataatttaatccaaaataataaagcggctcaaggtggaattttatatagtgaaatgccactttattttattactcaatcagttttacgtgataatgaagtcacaatagcagataatgctttattttatacacagactaagttttccgatgaaagtactggagggtatttaacttcacgggctatcggtataagtaatagtacaatttttcataataaaggcggttttattgcaaatgttcgggatgggatgtttgttaataacattactatgattaaaaatgataaaggattatttcttgatgcgcctcaaggtaatgcttcggtttcaaatagtatattagtaggaaatactattaactgtcaggtaagtacgactgataaagcaattatacaaagtaatttggttacagcagagtgtaatcgtaatgctacatcgaagctccctaatattctttatcctgctaatgaaaaattaattgccggtgatagcgatgaaggtacatgtgatattacctctcaaaccgggttgttgtgtccttacaatacgccaaaagatagttttctaggtttctttaggccacgcttacttgaaagttatcaatctttatctgactctttgattattaataaaggccgtctttatagtgatggttcttcaattggtttagcaagttgtgaaagatatgatcaacgcggtaaaaaccgtagtggatatgatgaactttgtgatttaggtgcgattgaatatattttggatagccaaattgctcctgttggccaagatattaaatatggtcaagttgcaaaatttagtattctgagttctctaagtgaagcagatctggtcactcctacaacctgtaagcgtttattcggtgaacgtcctgatggtaaagaatggcaacctggatgtcttaaagttacacaaagtactgatacaccaacttctaaaggtgttgttactttagatcagaatggaaatgtagtttatacgccaaatggaaattggcatggtgcggacatttttaggattcaagttgttacgagtgtatctcgttttaatgatggcatagagtttcaatatgtcactatccctgcaactgtagtccaagaacctgtatcgggtattgaagataaatctgtgagtacgggtggaggaggaagcgtcggtagtggattaattttaggattatttggattaattgcattacgccgtttcaagtcataa

SEQ ID NO: 48717 - DNA, 210 bp, Acinetobacter baumannii
atgggcgagaaaaagcaagagtatgcaattatcccaaagggtagttgtgtaagcattatggggtgtcgcatcaccttagcggaggatactaaggttgagggtaatcaagctaatattgattacatcctcaaagatcaagaaaattttaacagaggtattggtgttgttggtggggctttaagtaatcaattaaaagaaagtggtctttaa

SEQ ID NO: 48718 - DNA, 279 bp, Acinetobacter baumannii
atggcagcatactcaattacatacgatctacataagattaaaaactatactcgacttcaagagggtatcgatgctctgtcgggaacggtctgggttaaaccaaccttgtctcaatttattgtaaaaaccacttatacttcatcacagataagagattttttaaaatcttatgttgatcacgatgatacaatttttgttgctaaaattgatctaaatgattgggcttcttataatgttgagcaaaaattagttgatccattaaagaccactttcttttaa

SEQ ID NO: 48719 - DNA, 330 bp, Acinetobacter baumannii
atgtttggagaattagtaaaaaagattaagacttggtacaaaggagatccaggactaattgatagtaaccctgcaactggaattattacagtagtaagagaaccatatcgtcattgggcggctaaattattatcctaccatgttggctttttcatattcctgattaattcaataaaacgccacccgaatgcatttgtatctcaaaccttagcaattatcgccattcttgtatctttttattttcagttttatggaggcaataatgagtataagcgctgcgccataacacattccaacgaccatgaggttacagtaaattgcaggaagtga

SEQ ID NO: 48720 - DNA, 894 bp, Acinetobacter baumannii
atgagcttatacaccacaggtcatccggttgtagacaaaattgccagcctcaatattgaaggcaatgtcattcctgctaattggtttaatactttcaaattggaaaatggaaagcccgatacaaatgcggtcattttgctttcagaaattgtttattggcaccgtccgactattgtccgtgatgaagattctgggcatatcgtttcggtaaagaaaaaattcaaagctgatttattgcaacgctcatatcagagtctagcagatcaatttgggttctcaaggaagcaagttaaagaagcattagatcgtcttgaaaagttcggcgtgatcaagcgtcatttccgctctgtagatgtaaatggtcaaaaacttagcaatgttttgttcattgaattagttacccatgttctctttgaagtgaccaccctcctaacttctacggtaggaccctcctcacttgaaagtcatgacctcccaccctacagggaagaccctccccacctggagggtgacacatatacagagaatactacagagattactacagatagtaagttaagcacggctgagcttgaaaaaatcttgaaagggaagaaaccatgtgaagctcttgtcgctatcggtttagatcttgaggttgctaaacgattcaatgaataccgtaagacccttaaaaaaccattaactcttgatgctgtgatcaagcattaccacgaaagctgcaatgcagggatttcaactaatgatgcagctcgtattgttttgagtgaatcgtggattgggtttgctagtcgttacaactggaagccagcatttgaaactttgaatggttctgcacaacaacaaacaccagcagatatgaaaaatgctgatcttaattatggagattggtaa

SEQ ID NO: 48721 - DNA, 762 bp, Acinetobacter baumannii
gtgaaacataatcttatgttaggcgattgcctcgagcgcatgaaggaaattgaaacgggtactgtggatatgatcctttgcgatttgccatacggtaccacttgctgcagctgggatgccgttattccgtttgagccactttgggaacagtacgaacgagtaatcaaagagaatggcgcgattgtcttattcgctgcgcatccattcacggcagtacttgcaacatcaaacctaaagctattccgctatgagtggatatgggagaagccagcagctacaggattctttaatgctcaattccagccattacgtgcacatgaaaacattcttgtgttttacaaagctaaaccgacattcaacccgatgaaaacttttgggcatgaacgtaaaacagctaagcgtaaagacattgggtcagagcattacggcaagcaagtaaatatcaaatcttatgactcaacagagcggtacccacgttcagttcagttattcagtagtgataagcaaaaagctaatttccatccaacacagaagccagttgctctttgtgagtacttgattcgcacatacacaaacgaaggcgaaacagttctagacaacacaatgggaagcggtaccactggtgttgcttgtgtaaatacaggtcgttcattcattgggattgagcaagagcagaagtacttcgaaatagcacaagaacgtattgctcaagcaggtaccgagaaagacatgcagcctgacctatttggagaagcggtatga

SEQ ID NO: 48722 - DNA, 243 bp, Acinetobacter baumannii
atgaagcaacacagcacagtagaacaattcgaaaaaatggctttggttttaaagaactcaattgaaaaacgtggcaagacttctatctcggatattcaagaatggatcggctgtaattattcaaaatcaaaacgcttcgcattccaattaagagaagccggttatttgcaatctgataatgcacgaccaatgggactcaaaccaaccgacaaggcaaaacaactattttgggtggcgatatga

SEQ ID NO: 48723 - DNA, 306 bp, Acinetobacter baumannii
atgaaaccagaacattttattcgtgagtttggggtagagaaggcgcgagaggttgttgagggtgcgccagaagggtacaaaggatacaacgttgttattaaccaatacacaagaggggtttggtttagtagggatgtgatgctttcagacctcaagcgtctcgtggagtcggttgatttagtagatagcttaggtggattaaaagcagcacgttcagaagctcataaagattgttttgtatataaccagccattgctagctgctattgcagcatacgaatcaatatacggaggcggggatgagtaa

SEQ ID NO: 48724 - DNA, 150 bp, Acinetobacter baumannii
atgagtaaatatcaacaggaagttgcagtacttcttatcgccagtgcaattctttatgcgggatttaagacaacgtttatcggtgttgtttgtttgattgggtatctagcgtttgtgtggtcgatgtttaaaggagccagccatgagtga

SEQ ID NO: 48725 - DNA, 381 bp, Acinetobacter baumannii
atgagtgagtttaaagttggtcaaatacttgttaagcgaaatacttttaaccagcctagcaagtcaacttcattgtggaaagtcgtttacgtatatacagacgcagttgaggttgttccattaaaagatggcaaagaattaaaaatgctacagggtatttatggttcagcaatgttcaatccagcaaccactgaagaaatcgcagtaggccaccgcattgacatgccttctctgcctaagccaattgggagcttacaagagttacatccagagtttgcaaaagtcttgcacgagaactttctagagttgctaggcgacgacttccccatagaaaaccgcatcagcccgctttgtgaggtgaaagatcatgaggctaaataa

SEQ ID NO: 48726 - DNA, 366 bp, Acinetobacter baumannii
atgaggctaaataaaaaacaacgcgaagagttaaaacagaagtatgacggccattgtgcctattgtggtgagttgctcggtgacaagtggcatgcagatcatctagttgcagtagtccgtgacttaactacaggaaagcctgaaaaacctgaaaacgatacatacgaaaacttaatgccagcatgcactgcttgtaatcacaacaagcgttcattgtctttagagtcttggcgctctcttctagcgcactatcgtgatattcaagtgcctcgtgactgctctcagatacgccacttaatgcgctttggattggttgagttcatccagaagcctgtgaccttttactttgaatcaaaggatgtttga

SEQ ID NO: 48727 - DNA, 501 bp, Acinetobacter baumannii
atggataaatataaagttatcgctgaaaaaataacatattcgttagatggctatattgctgatcacaataatagaaattttggcgatgcagatgggtggttaagacatgtaagaaatggatgggaggaatttattgaagctcatccagacagccttaaccttcatgagtacttacagcaccatcaagcgaaagtggaggagctgcaacgcagaaatcagatgcttaacgacaacataaaagagcaaggtcaaaagctcgtttatcaaaacgaagtgattgaaacacaagctgaaaaactgcttggtttaagagatgagaaagcagagctgcaaaagcgggtgaaatggttagaagatcgcttaaaagctacggacacattaagcaaaatgcgtgctgccgtaatcggatcatttaaaacccaagattttaatgcatgtactagaagaaaaatgatgatcctgaaaagggcagagcaagcgctcaaggtaggggaaaattga

SEQ ID NO: 48728 - DNA, 309 bp, Acinetobacter baumannii
ttgattttttatgttgaggcaattggcggcccggataacggtgaattaattgcaactgaactggatgtctattttgctatgccgcctcaagaggaatgggattggtggtctcaaaaagaccccgttaatactatccttcctacaattaattattaccgtgaaagatgccgttaccatttctgcgggaagaactactatcgtgaatttttcatatgtggtgacgataaaagagtaaatggatgtagagctttaaaaatattggattcgtattttaacccagttttcttgagacctaaaaagggtggctaa

SEQ ID NO: 48729 - DNA, 159 bp, Acinetobacter baumannii
atgggaagaaaccaaactaattggttgttgattgtcttacttatcatgcttgtatttctaggtgtaggtttttcaatatttaacagtatagaagtatgcaaaacacatgatatttattgggttaatggtactcaatactcttgtgcatgggttaagtaa

SEQ ID NO: 48730 - DNA, 570 bp, Acinetobacter baumannii
atggataagtgtaaacatggttttgataaagcttgcctggtgtgtggttttggcgaatttaatgggcgtcgagtcttttatgagtggaaatatgaacaagtgtattcgagctttacaaacttacatcacgcacgaattactgcaccagaaagtttaattaaacttgctttagaggcgattaataatgaaatcggaatgtgtagacaaactgaatgtaacttgagctttggaatctcaaaacgtaaccaagcttttgtaatccgtgaaactttgcaaaatatcgaagccattttgaaaggtgaaacagtcgaacttataaaagacaattcagttcaagtaggcagtagggtattagttgatttttattcgtcaaatagagctgaaacggatggtactcatattcatggttatggtgtagtagatcagatagatcaagatggtaagtttgtaatagggcatttagagaaagggggatttttcggttgtccagcaactgatgtcaaacttgctatgagtttagtgcctgaagctatcttagaagctgaaagacaaagaagtttaaacaaatag

SEQ ID NO: 48731 - DNA, 429 bp, Acinetobacter baumannii
atgagtgaaatcattattggtattgatcctgatcttgaaaaatcaggtgttgcaattaaaagtgcaacacatttggaattaaaaaatctggcatttcatgaggtgattactttatttgatacgaatcgcgacttgataaagaaagtagtaattgaagctggttggttaaatacgaaatctaatttccgaaatattcaaagtcgtttagttgcagagcgcacggcaaagaatgttggtgagaatcatgctacgggtaaattactggttcagatggcggagtcaaagggtattcctgttttaatgattaaaccaactagaacgaaattagattcagaaagctttaaccgggtgacaggttggcaagggcgaacaaatcaagaacagcgagatgcttgtatgttgatttgggccatgaaaattaagaagtga

SEQ ID NO: 48732 - DNA, 561 bp, Acinetobacter baumannii
atgggcgtagaagtaactgttattaatcagttcacacaatttgaatggctagcaaaaggtttaactgcacaatcattggatttcatacgtgctgggcattctacaggttctaaaccgattgatttccaagacagattaggtgcaatagctaagatgaaaacacaactcgaaaagtcgattacagctttaattatctttaatggtaaatctgaaagtgattatgattatattcgtaattatcttgctcatattatgatgaatgaagctgagaaagataaaaaacgtgagccagaacatatagctatttatcacttgtcgtggttagttgccagaatggtaattgatttcactttaaatcctgaacttgaaaagaactttacatcaatggggcgattatattatgcgggtattcctgctaataaaatgtctgtagatgtgtatcgaatgacatggaaaacatacgagaaaatgatgcaggcagctttggaacaggctattcaggatgcagaagaaacaatacgacaataccgaaaggatacttacaaagagttacaatcataa

SEQ ID NO: 48733 - DNA, 243 bp, Acinetobacter baumannii
atggcttggctttcaaatcaacatgcacctactaaaccaaatcaactatgtatattggctattaaagtagatgatgaatctttcgactatctgccagccatttgggatgtatgtaacagtcaggataaacattttactttaactgtagatcgtcctgatcttggtgacgtaatcaaattaaatcaggttgatgcttatatgatttatcatcctcttactagtgaagatgtaaagtcattttaa

SEQ ID NO: 48734 - DNA, 771 bp, Acinetobacter baumannii
atgaaatcaaagccaataattccatggcaaggtggtaaaacccgtttagctaaggatttgttgagtaaattcccagagcattcatgttatgtggaattgttttgtggtggagctgctctatttttcttaagagaagaccaagcaaagacagaagttataaacgatctaaatggtgagctagtaaacctatatcgagttgttcaaaatcatttagaagagtttgtaaggcaattcaaatggtgcatatcaagccgtcaggtttttgaatgggaaaaactaaaagtaccagaaacactaacggatattcagcgagctgcaagattctattaccttcagcaacatgcgtttggtggtaaggtttctggtcaaacatttggatacgcaacaactggacgctctttaaatcttttacggattgaagaaagtttgagtgcagcacatttgcgtttgaatggcgtctacatagaaaatctgagttgggataattgctttgataagtatgaccgtgagcatacttttttctatgcagaccctccttatttagacacggcaggttacggcatagatttcccacttgatcaatacaaattacttgctgcgaaaatgaagagctgcaaaggcaaagtaatgttatcaattaatgaacatgaattgataagaacaatctttgcagactttaggattgaaaagacaagtattacttattcagtcggccgtgacttaaagagtaagagtaaaaagagtgatgagttgatcatcatgaattattaa

SEQ ID NO: 48735 - DNA, 177 bp, Acinetobacter baumannii
atgtcaatcagaggtttagcagcagcattcaaaggcttaacagcatcattaattgctgttgatgaacttgagcgtttattcccgcttacacctttgattaaaacaacccaaaagcctaataaagtcagccaaaagaagcgccgtttaaaagcacgtcgtcttggtaaatatagctga

SEQ ID NO: 48736 - DNA, 234 bp, Acinetobacter baumannii
atgagctcgaaagaatcgcaaaagcagcaagtatgcggctgcgaaaagttacttcctttaatggagaagttattagaacagacaacaattctgattcaacagaacgaacggaaagataatatcgttcttgctgcgattgaacagaataatgaattattaatgcaataccttgatgaagaagaggtagagaagacaggttctcattatcttgattctaagcctaaaacactatga

SEQ ID NO: 48737 - DNA, 336 bp, Acinetobacter baumannii
atggctaggttaaaacagcttaatcctttcaggttaaatactttaaagaccaatgaaagaactataaaacctcagaccaattcatggcgttctaataagtcatcaacgcaacgtggttatggctataaatggcaacaataccgtttagagtttttgaaattaaatccactttgtgtttattgtcaaaaggaaggtgtggttacggaggcaacagtggttgaccatatcgttcctcatcgaggagatgacaaattgttttgggatacaaagaatcatcaagctttatgcaaactttgtcatgacaaagtgaagcaaaaagaagagcaaacagggtaa

SEQ ID NO: 48738 - DNA, 480 bp, Acinetobacter baumannii
atggcattgaccgagaaaatgaaaaaatttgctcgcgccattgtcgagggcaagagtaataaagaagcagcaatattagcgggttacgctgaaaaatctgcttcacaacaggggtcaaaattaagaaatgatcctgaaattattatcttcattgaaaagttaaaagcagaaaaagaggggcgaactttaacttctgagaagaaaaaagttaaacctactgatagtggggaagactgtaatccattagatgaggagttcccctatacaaaagatgatccacttcaatttttaattgatgtaatgaacaacaaagacaatgaaatgtttttgaggttcaatgcggctaaagctgctttaccctatacacatggcaaagtggctgataaaggtaaaaaagaaactaaagctgaggcagcaaaaaatgctgcaaaagccggtggtaaatttgcgactctacaggctcaaatgaaacctagttaa

SEQ ID NO: 48739 - DNA, 219 bp, Acinetobacter baumannii
atggccatttttgataaagaaatacatagacgcgaaatagatgccactttaagtgatacggaacttaaggaagctatccttgattatgttttaaaaaagacaaatatcaaaggcgaagaatttacacatcgttgttgggtcagtagttcaatgacatccacaggttgtgaatatactggtcgctgtgaaattaaaattgatctaaagagtaaatcatga

SEQ ID NO: 48740 - DNA, 342 bp, Acinetobacter baumannii
atgaatttcttagaagcaattgaacaaggtcttcaaaaagcaaatgatgtggaacgtattagatcagaaataaccgaagtattaatgaagttaaattcatctttggcaaaatttactaattcagatgctgcagcatttgattttacaaaagactcaattcgtcaattatctccaataaaaatagattttaataatttttcgtatcccatgagattggagtgtggtaatcgaattttgcaagcagaaagctttcgtctttttgttgaaagtttatatatctgtattcaaacagcaacttttggtgactatgtacgagaacaaatgataataactaaattataa

SEQ ID NO: 48741 - DNA, 339 bp, Acinetobacter baumannii
atgaaaagccaagatcaatcagaagaaattattaagggtgattatgtcttggctacaaaatggcacgatggtcatagtcaagatcattggtttgtcggtttctttgttgaaaaggaaggtgaccgttatatagttgctgatagtgaaggaaaatcagcaagaggtggcggttttcgctgctgcaaaaaaatacatccagctgtcggaaagtatttgattgataatagccctactatatcgtcgattaaactaaatttgtgggaatatattgaaagtgatattcatgcacttgcaaaagaaaattacgactatgaacatggaaacatgacatatgattaa

SEQ ID NO: 48742 - DNA, 237 bp, Acinetobacter baumannii
atgattaataattacattaaaaaagagaatgtaactgaaagctctaaaatcattacccgttttggcggagcagataaaattgaagctgctcttatgaagtgtgcttgggatgatgtttactgttgggaaatggaaaagtggtattcagctaggtattggcaataccataaaatgtcagtgaaatacactggcataacgatgtgggagctttattggcttaaaaaacaggtaaattaa

SEQ ID NO: 48743 - DNA, 1743 bp, Acinetobacter baumannii
atgagtgcaatgcttccagattggacaacagcgtgtcccgactgggagaaaagaattgttagacgcgagtcgctcatcccttgtaaaccactatttcctgaagttgcagaccttgcattaaatacttttaaacaacttgcgttagtggacgttgttggcgattttgaagatgaagaagggaaccctcgaccgccattaatcagcgaagttactaaagaatgggtatatgagttcgttgcttcaatttttggagcatatgatcctgatcgaaaacgcagattaatacgtgaatttttcttattaatttctaagaaaaatacgaaatcaacaattgctgcagcaattatgctgacagcattaattttgaatgaccggccttctgctgagttaattattcttgctccgactaaagaagttgctgataactcctttgggccgattcgggacatgattaaggctgatccagaattagcctacatgatgcgtttgagtgagcacacacgtacagtgactcatgcaggtactggtgcaattcttaaggttgttgctgcagatagtgatgctactgcgggtaaaaaagcttcttggattcttgttgatgaactttgggtatttggcaagagggctaatgcggaatcaatgctgcgtgaagccacaggtggtttagcatcccgacctgaaggctgcattatttacttaacgactcaatctgatgagataccggcaggtgtatttaaacaaaaattagattatgcacgggctattagagatggaagaaaagttaataaacaatttcttccactaatttatgagttcccgctcagaatgttagataagcggaaacattacaatccagattggtggtatgtcacaaaccctaacttgggtgcttcagttgacatggatttcttacgaaatcaatgggaacaggtacaagaaaacggcgaagaatcaattagagattttttagccaaacatcttaatgttgaaattggcatgaatttacgtgccgaccgttgggccggtgcagatttttgggaaaaacaaggcaagaagtttgaacttgattttcttataaaaaaatcagactgcatcacaattggttttgatgggggtggtcttgatgatttatttggtatgaccgttcttggacgtgatgcaaaagacagatcaatttggtatctgtggaccaaagcttgggttcatccaatcgctttgcaacgaagaaaagaaattgcaccgcgattacgagattttgaaaagcaaggcgacttagtaattgttaagaatatcggtgaggatgtaaccgaggcgggcgaaattgcaaaaaaagtatttgatacaggtaagatgcccgaaaaagctttcggattagataagttaggtatgccagccttgcaagatggtttgattgatgcaggtataccatttgaaagtttatttgccattccgcaaggctacatgctgtctgggtatgcaactacagcggagcgtaaactggcggaaaaaaaactttttcatgctgatcaacctctaatgacttggtgtgttggtaatgcgaaggggaaacgatcaggcaatgcagttataatcacaaaacaggaatctggggtttgtaaaattgaccctgttatatctatgtttaatgcagttgccctgatgagcttaaaccaagaaccgaatggcggacgaatgactgatgagcagttcatggatgccattagtaaccccataattgtttag

SEQ ID NO: 48744 - DNA, 237 bp, Acinetobacter baumannii
atgttaaaaagtattcacgatagtttctttcaatacctccgtaatgttggaaaaccacctgagttattacatgtaaaacctgagctatataatgaacttttactcactaagagtggtggaaagtatggtttgggtcaacctctaacacgggaccaagcaatgactttctgtggaagagaagtggttcgttgtgaagaacttttaacagaatttgagtggttccctaagaaaaattag

SEQ ID NO: 48745 - DNA, 1242 bp, Acinetobacter baumannii
atgaaaacgctattacagactcttaatagtgcagttgtagcaccgcagaataattcgagacagcaaagtggtggattaactgacgtaaatttttggacttctttacttgggttttcttcatcaagtgggaaaagtgtcagtgttgaaaccgcattaaaacttgacgccgtatgggcatgtgttcgattaatctcagaaaccatctcaacacttccacttgttgtttatgagcggcaaccagatggaagtagaaagcccgcaattaatcatcctttgtatccaattttgcgtaatcagccaaatattcatatgacatcggttaattacacgcaatgttatgcggcatctttattgttgcgtggaaatggatactcgcaaattaagagaaattcaaaaaatgaaattacaagtttgaatttccttatgcctggtcggatgcaattaaaatttaatgatcgtgatgaccttatttattcgtatacagatagaaaaggtaagttatttatcattgatcaatccgaaattttacatactcctgcgttctcattagacggacgaattggtttgtcacctattcagtacggggcaaatgtgtttggcgctgctatgtcagcagatgatgctgcaaatagtacgtttaaaaatggtctattacctacggtcgcttttgaagtggatcgtacgatgaatgatgaacaaagaaaagtattcaaaaattatgtaaaagaagtatctggtgctttaaatgccggtaaatcgccagtattagaacaaggtgttacaactaaagcgatcggcataaatcctgcggacgctcaattgcttgagtcaagaaattttaacattgagtcgatttgccgttggttccgtgtacccggctatttaattggatatagcagtaaagggcagactaaatggggaagtggtatggaacaggaaatgcaaggttttctgacattcacattacgcccatggttagttcttattgaacaatctatgaacaagtcattacttacaccggcagaaagacttaaatattacgttgaattttctattgaaggcttgcttcgggcagatagcaatactcgagcagagttttattccaaaatggtcaataacggtatctacactcgagatgaagtccgtgaaaaagagaatttaccgaaacgcggcggtatcgcagatgagcttacaattcagtctcaaaatgtaccgattaatgatgctggtaaagataagtaa

SEQ ID NO: 48746 - DNA, 414 bp, Acinetobacter baumannii
atgaacaattctgaacacgaaactcaaggccatgcgtcagaaagtatagtttttggcacagacattcatgaagatcataatggcgttgtagtaacgcacaatgagcagattcaagttgagaattcagaaaaacgtcatgaattaagtcatggtcattattacgatattttgtctggtgagttagttacaccaattcaatttcaacatggtccagttaaggaacatggggtgaatggtataactagtgaagcgcttttagccattttgattcatcggactaaaattttgaacaataactttccatgtgaagaaaataagcgagcgataacttacatggaaaatgcactagcactttttgaacagcgtacacgtgatcgacaacaacgtggtgttgagggcttaaatcaagcctaa

SEQ ID NO: 48747 - DNA, 870 bp, Acinetobacter baumannii
atgccgatggcaccgaaggccctgaacaaaccaaatgttcggtttgatttgcctgaaactgtgctgagtaagtatcaaccaaatattaaggcttctaccgagactgaaaacactatctcaatttatgagcaaattggctacgactattgggatgggtcaggggttacagcgcaacgtatttcagcagctttgcgttacatcggtgatgaagaagatgtaattgtcaacattaactctcctggtggggatgtatttgaaggtttagcaatttacaaccttctcagaagtcacaagggcaatgtcactgtacgtgtacttggggttgctgcaagtgcagcttcagtaattgccatggcaggtgatgaaattcaaattgcccgcgcgggcttcatcatgattcacaactgttggtcatgggtggttggcaatcaacacgatatgcgtgatgccgctgattaccttgccgtttttgatgaatcagccaccgatatttaccaagcccgaacaggtttagacaaaaaagaaatcacgaaactacttgatgctgaatcttggctttcaggttctcaagctattgagaagggctttgctgacgattatttgccagcagaccaagtcattgaaacagaagaagaacctacacaagcagcaatccgcaaagtagatcaaatcctcgcaaaacaacacattccgcgcaatgagcgccgaaagctttttcaagccattaaagccggcacgcacaacgctgtcgcacctaagagtacgcctgacgctactccacaaaccacgcacgacgctggttcaagtcatacgtttgccgacggttcggcttcaaaactttcaaacgcattaaaggacatcctcccatga

SEQ ID NO: 48748 - DNA, 1179 bp, Acinetobacter baumannii
atgacagacaaaactatcgaaaaagagtatcaacaagttcaagctgacttgaaacaggtaactgatcaattaaagcagcatgcagaaaattatgaaaagcaagttaagcagtttggtgaagctaatactgaagctaaacaaaaggccgatgaagctttatccaagtacaatgatttgagcgctacgattaaagagttggagcaaaagcttgatcgtcctgcgggtggcggcggtgatgagccaactaagtcagttgggcagcaagttattgattctgatgcttatcaatcaatggataaaacatcacgtacatctatgcgtgtgaaaatgccacgtcaagcaattacaacggcgacgggccctaatgtaaccccagacaatcaagggattgttttacctcaaatgcgccgtatgactattcgtgatttgttggcaccgggccaaacaagtagcaatagtattgaatatacggtggaaactgggtttacaaataatgctgcaccagtagcagagaccaacccaaaaccatactctgaaatcacgtttgaaaataaaacagcgaatgtacggacaattgcgcatttatttaaagcttcgcgccagattttagaagatgcaccagcattgcaatcatacattgatgctcgtgctcgttatggcttgcagttggtggaagaacaacaattattgttcggtaatggaactggacaaaacttactgggtatcgttccacaggcttcaaccttcaatgaagatttgatcaaaattacgaacgcaactccaattgatcgtattcgttacgctttactacaggcggtactagctgaattcccatcaaccggtattgttcttaatcccattgattgggctgatattcagttaaccaaagataatgaaggtcgctacattattggtaatcctgtaaatggtaatgccaatactctttggaacttgcctactgttgaaacgcaagcgatggtatctggtcaatttttgacaggtgcattcagccttgccgctcaaatctttgatcgtatggatattgaagttcttttatctactgaaaatgataaagactttgaaaacaatatggtttcaattcgagccgaagagcgtttagcacttgcagtttatcgtccagaatcgttcgttactggatcgattcgtaaagcagtttaa

SEQ ID NO: 48749 - DNA, 309 bp, Acinetobacter baumannii
atgtcaaaagtaaaagtaaagctcttgaaaacatttatgcatgatcgacaagttcgtgtaactggtgaagttattgaggtttcaccaactaaggccgaagaattgtcgcgtctaaatcttgtaaaaattattgaaaaagatgagtcaccaaatggtgacacgtcggtcaccataaataaagaagagacacctgcaagtgatacctctggtgaagaacaaacttcagaagaaacacttgcacaagaagctggtgaagaagaagtaaaagcaaaatcaaaacgtactcgttctgctgctgcaaaggaataa

SEQ ID NO: 48750 - DNA, 459 bp, Acinetobacter baumannii
atgtctgtgctgactattagcgaagctaaatctcaccaaaaaattgatgacgatgatgattcagaaattttgagtaaattagaatctgctgaactaatggcagcacgattcatggggcgctacttctatgctaatgaagcagataaaaatgctggtttagaagaagtagccaatattttgaacgaagccaaaactaaagctaatcaatttgaagaaaatgcacggaatgcaaatgatcaagaagaacgcgaattctatatgaatcaggctaagcaaattctatatgagtcacgtactgaagcatctatgcgtattaatggtgttgtgattaatccagtgattcgagcaggtgttttattaacttttggctttctttacgagacgcgtgaggcgacagccgaattgccagtttctgcagaaaatactttatttccgttcagaataaatttaggggtctaa

SEQ ID NO: 48751 - DNA, 345 bp, Acinetobacter baumannii
gtgaaagcaggagaactgagacatagagttgttatacaacgacatcaacagaatggacggaatgaggatggtaattttttgccgggtcagtgggttgactataaaactctttggtcgaaagtaacacatgtttcaggcaaagatttaatcgctgctcaagcaaataacagcgaaatagtagccagaataaagttccgatatagaacagatattgatactacgatgcgagtaattcataaggggattatttatgcgatagacagtccagcattggatgatgctggaaaaggcaacgaatattgcacattcatgttaacgggtggaattgaacgattccctgattaa

SEQ ID NO: 48752 - DNA, 459 bp, Acinetobacter baumannii
atgtctgttgaagtaaagatagaaggcctgcctgatctcgaaaataagctaagacaattggctgatgaaaaaaaggtaaagaaaattactcgtcaagcagccagaaaggctatgaatattgttagaaatgctgcacgagagaatgcaaaaagagtcgataataaaaaaacaagtgaaaaaatttggaagaatatttcaactcaggcaggaaaaacacgtaattctagaacaataaaaatgcgtgtcggtgtaagaggcggtgcatcattttcagatccaaatccacctgaaacgagtggcggtgatactcggcactggcgttgggtagaatttggtagttctcatcaaccagctattccattcatgagaccagctttagcaaataaccttgagaaggtaactacaaaattttcagaaagttttagtgaagctttaaatttagagttggcaaatttatga

SEQ ID NO: 48753 - DNA, 369 bp, Acinetobacter baumannii
atgagtgatattcctatttttagaattttaaatgcaaattcaaaaattaaagcccttttaggggaggatttgaaagtttatgaggatgttgcaccatccggcattgaacctccatatgcagtgtggcaaatcataaccgcatcttcagaaaatcacttagattcacaagctaagcttgatcatgtgatgtaccaagtgattgtgtacgacacagatgtaataagagctacagctattcgagcggcaattcgttcagttcttggagatcatagttatattttgaattccatgattaacggaaaagagacacaaacaaaattattttctcgtgggtttgacgcgaattggtttgttaagcgcaagacttaa

SEQ ID NO: 48754 - DNA, 468 bp, Acinetobacter baumannii
atgggcgtattaacacaaggcacagaaacatgggtaaaacacgggtctcctgctgttttaaccaaaattgaatgtattaccgaattgtcagttggtgatgacagcgttacagaaatcgagaccacttgtatggaggaacgagaatcctccacatctgaatatggtttagttaaaccgggtgaaggcagtttgaaaattaatacagaccctgaaaatgaaacccatgtccttattttaaatttggctcagaacaaagccaaagttgaagtttttgtaggttggtctgatggtacagctgcccccacattgaatggcgatattgtaactgtgccacaaggacgttcatggacccagttccaagcacaattacggaaaggtccaccgatttttgataaagattcattagttaatcacacgatccctatgaaacggcagacaccagcatttgacacattgaaatctgcttaa

SEQ ID NO: 48755 - DNA, 462 bp, Acinetobacter baumannii
atgaaacagttaagtcctgaacaaattaaaaaaggtattttgattggaaaaccagagaaagtaacagttcaagttttagtaaatggtgaggagtctgaattttcaacctatattaagccatttaactatcaatcagctgtggctaatatgaaagcttacggcgaaaataaagaagctcttgcaggtattttagcaagttgtattaccgacaaagatggaacaccaacatttacagaggatgaagtccgcttacacttcagtcaggcattagttgatattatttggagtaagattgttgaaattaatgtcttgggaaagcagacattgaaatcgacgacagagaagagctcatcatcgaaatcgcaatcgttacaggtaggtcaatcgaagaagttgaaacgaccttctcgtacaaagaaatccaaaagtgggacgcctaccgaagaaaacgcggaagcttga

SEQ ID NO: 48756 - DNA, 510 bp, Acinetobacter baumannii
atgagaaaaattctttttttaactttattaattccatgtttatcttgggcagcacctaaaggaatcacaatcgaaaagagtggttttgatgggactacagaaataacaatgagatcatatgggacttcctcatgtgccaaatttggtggcgcttgtttgatgcttggagcaaattggaaaaacagcaatccagaagaagtagttttagaattaagtacgctaaactattttgctgcgatgagcaacctattgattaatattgatggggaaatagtaaaagccgatcgaatcaactttgcacatgactcaacactaactggtaattataaagaatcgtatcaacgatttaaaattgacaaacaaacccttactaaaattttaaatgctaaaaaggtttggcttaaagttagtatttctggtggaaattatcttgaaacgaatctaattgatgaaggcaaaaaaacattagcctttgacggtctagctcgatttgagagtcaattgaattaa

SEQ ID NO: 48757 - DNA, 3585 bp, Acinetobacter baumannii
atggctacgaacaatctaggaagcctaaccttagatttagtgactcgaataggtaattttattgagccattaaatcaggctgaacgtaaagccaaatcttcaggtgagagtatcgcttctagctttaatgtggcaagtattgcggcaaaagcttttggcgcagttttggcaggagcatctgttgcaggagtgacagcattcgtaacaaaagctattgacgctggaaatgaaattaaaaaattagcccaacttgcaaacgcaagcaccacagtttttcaatattatgcaaaaggtgcagaaacagccggaattagtatagataaatttgcggaccagatgaaagacatgcaagaccgtattggggagtatcaacaaacggcaggtgggcctttagctgacttctttaaaaatattgcgcccaaagtaggtgtgacaatttctcaatttcaaaaactatcaggtccagaagccttacagctttattataattccttagtaaaagcaaatgttagtcagaatgatatgaaattctacatggaagctattatttctgactcttctatgcttattcctttgttagaaaatgggggagctggatttaaaaaatatggagatgctgcgcaacgtgcaggatcaatcatggatgatgcaatgataaaaaaattatcagaggcaaaagaaaatctatggattatgaaccagcaatggcaaggtgttgaagcaaccttaattaatggaattgttccaatttttaatatggttgcatccaatatggataacatctcggctgctgctactgcattagcaacagctttaggtgtaaaactggcagttcaaggggcgattttaactaaagaatttacccttggtatgattgaaggcatccgctatcagatgacacttgctagaatggcaggggtaactttgcagactgcgagtgctatgggtgttttaagaggtgcaatggcatttctaggcggtccagcagggttggggctactagctattcaaggtctcgctgctggtgcagcttttttctttatgaagaataaaagtgatgaggctacagaatcccttaacaaacatggtacttctgtctcagaagtcataaaaaaatatcaggaattggatattgcatctcagcgtagacaagtccgtgcagaaaaaaaatctttagaagaaattacagaagaatataacaaagcaaatagcactttaattagcttagccattaatatcgggcgttttgacggttcaacttcggaggcctcaaaaaaagcaagtgaattggcgatggcatttaaaaaaggtgatttatcggcaggtcaattttcatctgcaataaataacttaacaggcgtgtctgaagaatcaaaagcaaagattgatgaacaggcagcaacttcaattagattaagtaatgaatatgtcgctcagaaaaaggtagtcaatgccttattagaaactaccgataaggcgactgataaacaatctgaatttaataaaaaattattagaagctgaggcagcatcaaaaagagctcaagctgcgtatgcagaatatatgaagacatttaatactgattatatggaaagtgcatataagctaaaaataagacaaaaatttggtaataaatatgatgaagatgaactggctgtctttgaggcgtgggcgaaaagacataattatgatagccagcagatgcagactccagcagctttaaatgatttagctaacgcaagacgtctttatgctgttaataaagagataaacgatttgcaagataaaaagactaaatcagaacaagcagctacggcagaggcaaaaaaacaagctgattatgcagagaaaaattacaaatattcatccttagaaattgatatgctcaaaaaagtatctgcactagcatctcaaaatgggttggacaaattagaagaaaaatatgggcttccaaaaaatttattggcggctctgatggcccaagagtccaaaggtgacaaaaatgcacggagccctacaggtgcaattgggtattatcaaacgacagcagattatagaaaagataataaaataagtgtagctgattcaaaaaatctacctgttatcgcagaagtcgtcgctaaaaatttagcaaaagcctatcaagaattaggaacttgggaagctgctatccgttctcacaatgctggtgtggctggggcacaacgttttaaagagactgggactgtaaaagggaaccctgctcgggtgcaggaagtaaagcaatttcctgatctagtaaataaatggttagttggcttaaatgggaaaactggcaaagactcaggttttatacatgatgatccaactgaaattttaaaagatattcaggattttgaggcggctagaaaagctactgaggaagcggcggcaaaagatcgaaagtcaatacaggaaaaatattattcagatttagagagaatggccgctgataatgctgaagctgtaaaattaattaatgagaaatttgcgaatgacccaactgaacgagatcgattactcgcacttcagaaaaaagcatatgagaaagatttagaaaattatattaaaactcaggatgagaaagttaaagctacacaacaagcggttcaaaatataaaagataaaattaataaattgaatcaaagtgcagctgaatcatgggcaagagcaacattaaaacccgatgagctggcccaatggaatttaaataatgaattggactcaaaacaggcatctttaaatggagattatcaggatgtaaaaacctctattaaggacaatgaaggattgtcagatacagaaaagtaccagatgttgcaagatgcatataaagcatatttagatgccaaattatatttggacacggaatatgcttctaaatctagagagttacaagatggtttaaatgcacaaactctatctggttattcttctttaatgggtgatatgtctggtattgcgaaagcatttggaggtgaacaatccagaacatacaaggtgttattcgctatgcaaaagggctttgctattgctagtacattgctatcaagtaaggaagcaattagtaaagcatgggcctcagctgctttcccttataacattcctgccgtagcgatggcagttgcacagacaggtgcattaactcaagctgtttcggcgatagcacccaaaggatttgcaacaggtgggcaaattagaggaccagggacagggactagcgacagtattcctatttgggcatcgaacgaagagttcatgatcaaagaatcttctgctaaaaaaattggtttggataatctaaattatatgaaccagacaggtgaattgcctaaatcaaacaccaatcaggtaatggttgctactttggcagagttgccacaaggaggagatgtaattagcgctccagtaacagtcactgttacagtaaaccctgacggctcaagtaatgttgattcagctgggcaagctaaggctcttggggatgctttgggtaatgctattagacaagtaatgttaaaagaactgagacagggcggagtactttataaagccattagaagttaa

SEQ ID NO: 48758 - DNA, 420 bp, Acinetobacter baumannii
atgcaatatccagctacttttactttaaacccaaaaacgggttgctactttgttgagtttagagatatacccgaagcattaacacaaggctactctatagaagaagcaactgaagaagcaaaagacgcacttataacggcgatggatttctattttgaaaataatagacatatacctatgcctagccctatacaagagggtgatcatgtaattgatctccctctaagtatttggtcaaaaattcttttgctaaatacgatgcttgaacagaatgttaatcaatctgaactcgcacgacgtttacatattcaacgacaagccgttcaacgacttgtcgacttaagctatacaactaagattgatgcagttatagatgcccttaaagttttgggtaaacatcctgttctatctatagcttaa

SEQ ID NO: 48759 - DNA, 345 bp, Acinetobacter baumannii
atgagcttactaaaatttacttgggcacaagatttagaaggtaactcgcagacaaataaatttaatgttttaaccacagcttttggagatggttacgaacaaagcacaagcgtaggtataaataatcgtgctggtgaatggtcgtatcaacgcacagcggaagaagctgaaattctggaaattaaggcattctttgatctacataagggtgctaaagctttcctatgggattcgcctcttgacggagaagtaaaggttaaaactggagaatatcagccagtttgccttggggcaggttactggcgaatttcgactacttttaaacaagtttttacccctgaataa

SEQ ID NO: 48760 - DNA, 357 bp, Acinetobacter baumannii
atgactgttaaaactttagacctagcagaatcatatttaattggtgaattacgtacgcaactagcagatgcacgtagttttggaaatgatctaactgcggggaaaattgagacattaacgatcaattacgataagtcttctaattcagtaaatattgctgtagcacccggtggtggagtgaatggaaatatgacattactcgatgcagacattacaaaatggacaatgcagacagttttaaattgtagctatctctacggcgttaatgtgaattcactgattttaaaatatgacttagccgccaaaaaaatcagtattgattacactccagttgctgaagccacagctcaggcttaa

SEQ ID NO: 48761 - DNA, 171 bp, Acinetobacter baumannii
atgtgtaacttttcagtaggtgaagtggttgaattttgggtggtaggtcgagcagtttcaggtaatgggatgcaagtacaaattctagaaatagacggagattgggctgtagtcactactggatgtggtcagtggccagaaaaactttctaacttgaggaaaatttcatga

SEQ ID NO: 48762 - DNA, 660 bp, Acinetobacter baumannii
atgttaaagaccattaaattatatggcgtgcttgggcaaaagttcggtcgtgaatttaaacttgacgttgcaaatactagagaggcgatgagagccttgtcggttcaaattaacggctttgaaaagtttatgttgcgggcacatgagcaagggttacagtttgctgtttttcttaaaagtaaaaattcaagcaataagcgcggaaagaaaagagcatcaatttacgaccatgaaactaagagattaatcactggggataacatcggtgaagaacagcttgatatgaacacccaagctgaagttattcacatagttcctagagttgtaggggcaggtggtaatggtgctctacaaactatccttggtgctgtgatggttgttgttggggttgtaatgctttatatcccgggcacccaagcatttgcaccatctgtaattgcagcaggtgttgggatgatggtaggcggcatcgcaatgatgctaatgcctaaaatcgataactctcaagatcaaaatcaggatggaaacaaagcgaataagggctttggcggagcagtaacaacagtagctcaaggtaatccagtaccagtgctttatggtcaacgtgaagtgggtggctttattgttagtgcaggccagtacccagaagatcagatgtaa

SEQ ID NO: 48763 - DNA, 390 bp, Acinetobacter baumannii
atggagccactttcaactagcagtattactgcatttttaaagttttatggtgtggcaattgctgtcaccttgtcaatttcattagttgctgctgtcgttttaatgacacgaatgccaaggtctccgcaagaatgggccgtgggtttgatttgcaccgttgtttccagtttatgtggcggttcattcattatcgtgaaatggggtttacatgagtgggttactgatatctggggaatgattgccataggggggtttttcttcgtttgtggtttgcccggttgggccattgtgcgatggacctttaatttcatcgacaaacaagaagggaaaacaatttttgaagttattaaggcttttaagaaagccaaagacgaaattaaaaacagttaa

SEQ ID NO: 48764 - DNA, 195 bp, Acinetobacter baumannii
atgcagttaatgattatggtcacagaagtcggaaagcttgagcgtatgtgtaatttgcttgcggagataaacaaaagcggtaaagtcttaaaagtttttgactataacggtaatcaattaccaatcaatcatgatggaacagtaacgtttaatgaacgtcgctgggaattaccaactaaagttgatctttactga

SEQ ID NO: 48765 - DNA, 987 bp, Acinetobacter baumannii
atggcttcatttagacaacgcaacgatacatggcgagccgagataagtgtaaacggaattcgcgaaagtgcaacctttgatacaaaagctcaggctagggcttgggcatctaaacgcgagactcagttacgcgaacaatcgcatggcaaattaccagatcactcttttttagaagctattgaacgctacttaaatgaagtgagtgttaaaaagaaaactcatgagaatgaagtcaagcgaatggctttctttaagcgtgagtataaaaagctatgtcaaaaacaattagccaaagtcacaactgacgatttagtgcaatggcgtgattctcgtttaaaagaagtgcagggcgctactgtcagacgtgaagcaaatattttagcttctttatttactgttgcccgaaaagaatggaagtggattaaagagtccccaatggccgacttgactttacccccaccatcaaagcaccgtgatagacgaattacccaagatgaaattgatagattatgtcttgcagcaaattgggataacaatgtcccggtaaattctactcagcaaattattattgctttcctttttgcaattgagactgcaatgcgtgctggagagattgtcggcttaacttgggatcgagtttacttaaaagatcgatatcttgttttgaacgaaacaaagaatggcacaaagcgaaatgtgccactatctaagcgtgcagttgagttgcttactttattaaaaggtcttgataaaaagcaggtctttacttgtaattcccaaagctttgatacgctttggcgtaaattaagagatagatgtcaaatcactgatttgcatttccatgatacacgccatgaggcttgtacacgccttgcaaggaaattagaagttttagacttggcccgtatgattgggcataaagacttaagaagcttgatggtctattacaatgctactgcaagtgaaattgcaacgaggctagattag

SEQ ID NO: 48766 - DNA, 270 bp, Acinetobacter baumannii
atgacagcaattgcaaatataggtagtaactttgtagtagcgttaccaccttcagatatttggctaaatgattctcaagctgctgagttcttgggatatcgagacgtacactttaaagcagcggtttgctgcctaccaaccttccctaaaccgcgctatgttattaagtgcggtcaaggaagacgatggaacttggcagagttgtcaaactggttgaatgaacaatcagatgatgagccaaagaaaggaagaccacgcaaacggggctaa

SEQ ID NO: 48767 - DNA, 270 bp, Acinetobacter baumannii
atgttattgactactgatgaagttgaactaatcaaaacatgtgatgaaagccctgaacaatatattgcagtttttcaaggtcaacagattggatatctccgcttaagacatggtgaatttagagttgattatcctgactgtggtgatgagacaatttactattcacaagaaatgcttggtgatgggaagtttgaagatagtgaacgtgagcacttcttattgaaagctaaagaggcaatcgttaagaagttcaatggtgcggaggtgtga

SEQ ID NO: 48768 - DNA, 378 bp, Acinetobacter baumannii
atgagtagaattcacgcattgttcgacaaggctttcaaagacggtggtctagatttacgcacgttaatggagtcatttgacgtgcgctttgaaaatctaagtcttgatgatgttcgctttatcgagtcggaatgccgagaggttcgtcaaaaatttgaagatgccgaaaaggtggattgttataaaaccagagagctgttttggctcggctttgatgatactgcttacttctcagtggatgaaattgagcaggtgaaaaagctagcaaatgaaatgattttaaagggtaatttcggttttgagattaaaaagattcgtatctctcaagctgttttagaaggtcatattaaagaccgcaaacaatgggagagagaataa

SEQ ID NO: 48769 - DNA, 1551 bp, Acinetobacter baumannii
atgtcagaacaagagaaagacctacaagccgatattgattattttttacaggaacaggcgaccaacgcattacttaaccaaacttcgtttatagaaaatctttccgtacagtcgaacctatttgaacaactaaaatcacagttttttaatgagatgttagatgatgcaacatctaacggtgtggcctctaaaaaaattgaacaatggctgagcattcgtactttggatgagttgaaacaattaaatgcggaggctaagcaacattttctctatcacggcattacatttaacgtatacggtgataaggaaggagtggagagaacgataccttttgatctcattccaagggttattgaaaaaaaacagtgggaaaaaatcgcagctggctgcgcacagcgagttaaagcgctcaattattttttagatgacatctatcatgggcaacatattttaaaagagcaattaattccggaaagtcagattatttgtcatgaggcttttcagccccatatgcttaaacacacgctcaaaggcaaaatttattctcaaattagcggaatagatattattcgtgacagtgaaggcgagttttttgtacttgaagataatttaagaacgccatctggcgtatcttatatgattgaatgcaggaatattagtcagcaactcatgcctgagctctgcgctgctaacaatctgcaaggtattgaacactatccaagcttattaaaagaaatacttcaagaaaactctgaggttgatcagccttttattgtggtcttaacgccaggacgttttaacagtgcttattatgaacacgcttttttagcacgtgaaatggatgtgccactggttaccaatcgagatttatttgtagaaaatgatcaagtatttgtaaaaacgattcgcggccgtcaaaaggttgatgtgatttatcgccgtttagatgatgattttttagacccacttgcatttagacctgatagtgctttaggtgtggcaggtttaatgtctgcttatttacagaaaaacgtagtgattgccaatgcacccggcactggagtagctgatgataaatcgatttatccatatgttgatcagatgatccaatattatttgggtgaaacaccaattttgaagaatgtacctacttaccagtgccgtgagaaagaacatctggactatgtactggctcatttagatcaattggtcattaaagaagctcaaggatcgggtggatatggcatgttaattggtcctaaagcaagctcatgtgaaattgatgaatttagacaaaaactgcttgctacaccgcatgaatatattgcccagccaacattggctttatcggttgcaccgactttaactacagcaggggtggctgagcgccacatcgacctacgcccgtttgtactcagttctccttatcggaccgaaattgtgcccggaggtttaacacgagtagccatgcaggcaggttctttagtcgttaactcctcacaaggaggaggtattaaagatacatgggtcgttgaaacgctacattcttaa

SEQ ID NO: 48770 - DNA, 858 bp, Acinetobacter baumannii
atgttgaaatatgtcatttatgctgacgaagcatggacacaaactaaaccactttatagatatcattgtttttttggtgggtttatttcaacaagtagtgaattcgataatttagaaaaagaagttaaaaaattaaagaaggaatataaatatacaaaagaaatcaaatgggcaaatatctctaatcaagatattgatttctacaatcaactcattgacttaatcttccagtttttacaaaaatctcaagatagtaaatatcgacagttttttatggatagagctaggccttatgttggtgagccctgttctaatattgaagcacaattcaaagtttactatcaatttataaaacatagctttggtttccaatttattgaggaaccagccgagattactattcgattagatagtcattctagccatgtacataaaaaaactttaatatcttttattaatgaattatctactcataatttaaaatttaaaatcgaattcataaatagtaaaaagtctatacctttacaattatgtgacttacttatgggttctgctggatattatggtaatcgaatcgattgggatttattacctggaaagactcgtagaagtaaaaaccaaataatgaaagcaacatttggaaaaaatgtttatagcatgcttagacaaattgataatatttataaatcatcacaggcttttaattggtttgagtcaactggaactgatggcaacacttctaacagatttcatcataaattaaggatttggaagtttataccacatgaacatatagaagataaaagatgggaaaatgacggatttaagaaaaatagagttagaaaattagaactataa

SEQ ID NO: 48771 - DNA, 372 bp, Acinetobacter baumannii
atgttaaagtttcaaccaaaggcaaatactatagttatgtgtgactttaaaggttttattgtgcctgaaatggtaaagaataggcctgctctagttattaaaaaaaataaccaaaatgctaaattagtaactattttgcctattagcacgactaaaccagaacctatgtcagaaatgcatattcctattgctgggccaattgatggtaaagaagcgtggattaaatgtgatatgttaactactgtttgtatagagcgtttagatagattaaaaattagaaaagataataaaaatgaatgggttgttaagagcttggaagatgagacgtttgaattagttaagaaaactattgctaaatactttaatttttag

SEQ ID NO: 48772 - DNA, 501 bp, Acinetobacter baumannii
atgaataatagccatcttgttgctttaagaaaaaatcaaatgcgtattagaaaatcttcaagactattagtcattaatgaaaatcatcaaatcctcttatttcaattcactcatacaaatgatgccttagctggacaatcacattgggcaaccataggtggaggtcttgaagaaggggaaaccttcgaacaagcagcttgccgagagctttatgaagagttaggtatagtaaggcaaaatgtaggtactcatgtggcaacacgcaattttgaaatgatgctacctagtgcagaagttgtgatttctgatgaaaggctttttattgtttttattaaaaatgaagaagtgaatacagcaaactggactgaacaagaaaagtttgtgattagtaaaagccgttggtggacgtttgatgagctaagccaaacagatgagattgtgtatccaaacaatattcctaatattcttgtagatagtttgcctgaaatttttaaatcctaa

SEQ ID NO: 48773 - DNA, 441 bp, Acinetobacter baumannii
atggataaaaaggattgcgatttaagttttgaaagttttaaaaatacaaataaaccaaatttctttggtgatattgagtatatttactcaatttttaaaattaaagaactccccgtagatttgctttttaagattctaaatttagtttttcctgatttccttataattgaaaatcatatttttttagcgagtgagtttgatcaagacaaatttaataatttgcgaaagatggaagagataaatagaacacagttttggatgaatctcatagaatttacaagcctacatgatgagatgacagtagagcaggctttattaatcgcgcaaaaaatcgttgattcttggaatgcaaaaattaaatatgaaggattaaatgcgcatggtagagctagagtttttgaagaggttgaatatggggagatatttataacaattgattag

SEQ ID NO: 48774 - DNA, 1359 bp, Acinetobacter baumannii
atggataatctgcaaacaaatattgctgtagtgactcagcaaagagccaagcatacaaaaactcgctattacattcttgcgatgatttttttggtcacggcttttaattacggtgatcgtgcaactctctcaatggcagcaacgccaatgtctcatgaactgggaattgactcagtcactatgggatatattttctcggcctttgcatgggcctatgtgattggtcaaattccaggtggctggctactcgataagtttggtgctcgccgtgtatatttctggagcctgtttttatggtctttgttcactgttttaatcggttttaccgacattttaggtgatactgcgaccatcattacttcactctttgtactcagatttttagtcggtttgtctgagtcgcctgcttttccgggtaacagtaaaattgctgctgcatggtttccaaccaaagaacgtggaactgccgctgccatttttaactcatcctcttatttctcaaccgtacttttcgctcccctcatgggttggcttgttgcaaccgtccactggcagtctattttctgggtcatgggtggtcttggaatcattctttcctttatctggctcaaggtcatttatagcccgaccaatcatccaacagtcaatcctgaagaagtaaaatacattgcttcagaaggtgctttactcgatatgggcgaaaacagccaaaacgctaaaaaagagaaaattacttggagtaaagttaaacaacttcttgcttcacgtatgatgctcggtatttttattggccaatattgtgtaaatacactgacctattttttcttgacttggttccctgtttaccttgtcaaagaaagacatctcagcattttagaagcgggttttgcggcggttgcaccagcactctgtggctttgtaggcggaattttaggtggcttaatttcagataagttaattcgaatgaattacagcttaagcttttcgagaaagctccctatcgtagtcggcttcttggtttcaacctcaattatcttatgtaattacgtagattctcaagcagcaattgtattctttatgtccttatcattcttcggtaaaggaatcggctctttaggttgggcagtgatgtctgacgttgcacccaaagaaatggttggtttatcaggtggaatgatgaatgcatttggtaatacagcaggaatcgtgaccccaattgtgatcggctatatcttggcaagtacaggctctttcaaccttgcattaacttatgtcggcatacatgccatcgcagctgtcatttgctataccgttattgtcggcaaaattcagcgtttcgaattaaaacctacttcttaa

SEQ ID NO: 48775 - DNA, 828 bp, Acinetobacter baumannii
atgggttcatgtgcagctccatcagcaaaaggggatgataagtttatcaccaccgactatttgcaacagtgccaacaaattgatgtattagccaacatttaccgtggtcctgtaaattcggctggacaagcactctatgcaacccaacctttcgacccgggtttagtcggtagtaactgggcaagctggaaatttgaatcttcggtgggaacagcgcgtgaccccgttgcagtcggcattctttttcaggttccaccagacccaactgtgactcaaaactctagacaatttgcctttaattttaacttcgataccgactatccaaaactctcggcaaccaatgatgtctataccgaaagttccatgtcattcatgatgccacccgatgaactcaatctagataaactccgtaatcacggtggaaaaatgattgtagtacaaggcacagcagatggcgttttctctgtagatgacacccaaaattggtacgatcaactgctacaacactataaaaatgatgcaaaaggcacagcacctgaatttgcacgtttctttagagttccaggcatgaaccatacccgtgatggcattgcgaccgaccaatttgatgcattgactgctttagttaattgggtggaatatgggcaagcacctgacaaaatcattgcgactgcacgcggcgcaggtaatccgagtggtcaagtgaatactgaacttccacaagactgggcaccagaccgcacccgtccactttgcccttacccgctgattgcccgttacaatggtcaaggtgatagcgaaaaagctgaaaactttagctgtaaatag

SEQ ID NO: 48776 - DNA, 1488 bp, Acinetobacter baumannii
atgtttaattcgtcgtctaattcaaataaaaatgtacgcatcgccattattggcactggctttggtggtctaggacttgccattcgtctcaaacaagcaggttttgaacaatttactctatttgaaaaagctgccgatgtaggtggtgtctggcgtgacaacacttacccgggcgctgcatgtgatgtgccgtcacatctttattctttttcttttgaacaggaacttggttggaaaaatcgctacgggacatctcaagagatttatcaatatttacgtcactgtgccgataaatatgaccttcgcccgcacatcaaatttaacactgaaatagccagcgccgaatttgatgcactgcaaggtgtatggcacattcaaagtacaactggtgaacagtttgaagctgaatttttagtgggtgcggtaggccaactcaaccgcccagcctatccaaaacttaaaggcattgaaaacttcaaaggtaaggcatttcactcagcgcgttgggaccatgactatgacttaactggtaaacgtgttgcagtcattggcacaggcgcaagcgcgattcagtttgtacctgaaattgcaaaacaagtggctcacctagacgtttatcaacgctcagcgccctatgttattccaaaactggatcgggtttaccaacctttagagaaaaaagctttccgtaaactgccgatcttacaaagtctagaccgtgccttgcaatatggtcatcatgaaattcgcctacttgcctttacaacttcactcaatgaaatgcctttggtggaatacatattccagcgccacattcgaaaagttgttaaagatgggaagttacgccatcgtttaatgccggactatccaattggttgtaaacgtattttaatctctaaccactggtatgaaacgctgacccaacctcatgttgatgtgattaataccggcattcaagaaattaccgaacatggcattttagacacggaaggaaagctgcgtgaagttgatgccattatttacggtacaggttttacggcgactgaatttatggcgccaatgcaaattactggacttgatgggcgtacattaaaagacacatggaaagatggtgctgaggcttatttaggcctaacagtaaacggattccctaacttctttatgttgtatggaccaaataccaaccttggtcacaactcaatcgtctatatgattgaaagtcaggtgaattatattttagatgcactgcgcactactttgaaaaataatctgctgttcaccaacattcgtgccgaaattcaacacgagtttaatcaaaatattcaggaaaaaatgaaaaaaacggtgtgggcacaaggctgtaccagttggtatcaaactgctgatggcaaaaataccaataactggccaggttttacccttgaatatcgccaacgcactcgtcgctttgacattgaaaactacactcaggtgtcggctatttcttaa

SEQ ID NO: 48777 - DNA, 192 bp, Acinetobacter baumannii
atgtttaaacgtaattcaataaaaatattaagcagtcttgccgttgctggggttttattaactgcatgtagtaaaacaccatcaactgaacaggcaagtaatgctcaagaagaccattctttagaacaagtcaaaaaaatggagttctacgcgttgctgtttttgctgatgatccgccgtttggttatgtag

SEQ ID NO: 48778 - DNA, 639 bp, Acinetobacter baumannii
gtggctctagcaaaacgggtgactaaagatttgcttggtgatgaaaagaaagttgagtttattgtgactgaagcttcaaatcgggtggagtttttaaaatcaaatcgtgccgatatggtgttcgcgacatttacagtaacccctgaacgtaaggaagttgtcgattttgccgagccttatttaaaaggggcttttgggattgtctcgcctaaagctaagccgattacagatattgcccaattagaaggtaaaactttaattgtaaataaaggcacaagttcagatacctactttaccaagcactatccgaaagtgaatttactcaagtttgaaagaaactcggatgccttcaaagctttaaccgacggtcgtggtgacgcaatttcacaagatagtacttatgctttggcgtgggccgcgaaaaacccaagttatgttgcaggtattcagtctattggtgatcaagagtttattgcaccggcagttaaaaagggcaatacccaactattgaattggctcaatactgaaatcaagcagctcagaacaagcggtgaaattaagaaaatttatgatgaaaccttgaaaccaatttacggtgactcggttaatccgaatgtgtttttagacgtaggccaataa

SEQ ID NO: 48779 - DNA, 540 bp, Acinetobacter baumannii
ttggctcaaccttcccttgatgaaagaagttattattcatggggaattttattaaataataaatcatttaagtatcgtgaaacaaactttgtagaagttatgattccttgttttaatagaaagtcttttgagtctttatatctcaccttcaaagaaaataagtcagggtggggattagataacttatggccaaaacaattaggagattcttctaaaattggtattattgatgaagtaaaagtctttcatactcgacctgtaggctctgctggtaatggagttggtaaacagagttttaaaaaatcgtcccttttttcaaaagcgaaattaactaccccactcgatgaactaaataccctactaaaaaaatacgatttgagtcaggaaacaatttgtaaaggtggcttagatcaacagaatatttatctaaatactgagaatgttgaatttataaaaaaaataattgctggatgtgatagtcgtttattaaacggaacatcaatttcttttggattagataaagttggactaagtaaatga

SEQ ID NO: 48780 - DNA, 1122 bp, Acinetobacter baumannii
atgaaatttttaatcgtaggatgtggatttacaggtgctgttattggaagggagcttgcagagaaaggacactctattgttattattgatcaacggcaccatgtaggtggaaactgctatacggaacgtgacagtcaaacaggaatcatggaacatgtttatgggccgcatattttccatacagatgatgagcaagtgtggaaatatgtcaattcacatggaaattttaaaccctttacgaatagggttaagtcaattgtaaataatgaagtttattcacttccagttaatttacacacaattaatcaattttttaagactagattttctcctgatgaagcaaaggaatttattaaaaaacagggaaatagtagtattgttgagccagaaaattttgaagagcaagctttaaaatttattggcaaagatctatatgaagcgttttttaaaggatatacaaaaaagcaatggggactagaacctaaattattgccagcaagtatcttgaaaagattacctgtccgatttaattatgatgataactatttttcacataagtatcagggaatgcctgaaaatggatatacctcaattattgagtctattttaaatcataataatatctcagtagagctaaataaaagtttttctaaagatttggtagctgaatatgatcatattgtttggaccggaaaattggatcaatggttcgattattccgaaggaaagttaaattatcgtactttaaaatttgaaaaaaattattcggagggtgattatcaaggaaatgctgtcatcaattatggtgatgaacatgtaccttatactagaatttctgaacataaacattttgctccttgggaaacacatgagcaaactatttatttcaaagaatatagtgcagattgtaccgatgatgatatcccttactatcctgtacgattagctgatgataaaacagttttagataaatatttggccttggcaaaggtagaaaagaaagtaacatttgctggtcgcttaggaacttatagttatatggatatggatgtgactatcagacaggctttagatatatcaaaagagcttattaataaagctcattcttttgatcattcctaa

SEQ ID NO: 48781 - DNA, 1833 bp, Acinetobacter baumannii
atgtctaagtcttttcaacctactcgtctggtaggggctatcgctattgcgatggggttttcacctgttatttttgctgaagatacaacgaatgtaactcagcttgatccaattgtagtgactgcttcaaaaagtgctgaaaaagcaagtgaagttccggcgcgtatcaacattattgaaccaaaagttctcgaacaatctcctatcgcttctttaccacaattattacaaaccgatgcttccatcaatatggtacaaagtggtggtatgggacaacttgcagaaatttatttacgaggtacagaatctgatcatactctcgtgctacgagatggaattcgattaaataatgcatcctcaggaacagcaagtcttgcatttattgacacaacagatattaaacaaattgaggtattgaaagggcctgcctctgttctctatggtactgacgccattggcggagtaattcagctcgtttcaaaaacacctgaaaagaatagagcttttatcacaggtgaaattggtgagaataaaacttataaatcagttattggtgctgatttatatgaagatggtttttatgcccaaattcgtggacaacgcttagagtctgatgcaactaaagtaactaaccaaaaaactaactcatcggatacagcatcatttgatcaaaaaggttttagtacaaagtttggtgttgagcagaaagattacggtatttctgtcgactatagccataatgaaggttcaagtctttatgatgcttatacatttaatggtgcattgcttaaacaagacttcgaaaatgagattatcaatttacgtagccgtttaaatgtaacagataacttagaattaaatactcgtttatcacaattcaaagatgaagttaatcaaaaagactctactgattttgttcatagcaaaactcaggaagtagagctatatagcaaatggaagtttttaccacagcaaacactcttagttggtgccacccaccgtacattggatggagatattctatcttatggagcaccatacaatgaaaacgtagactcgacagggtattatcttcaacatcaattcaatggtgatagattaaacactcaagctggtgttcgtatagaagataatgaaaaatatggctcacatactgttggtcagattgctgcacgttaccaacttttagataaaacaagtatctatactaatattggtactgcttttaaatcaccaacgcttaatgaacttttcaactcatggaatggcaacccagatttaaaaccagaagaaagtacatcttatgaaattggtatagatcaaactctaccagcaggttttaaaacaggtttatctgcttactatactgaagttgaagatcttatcggttcagtgaattttggtaaattaactaatattaataaagcaacttaccaaggtggtgaattttatgttggttggcagaaagatgatctatttgcaaaagcaacttatagctatgtcaaacctgagaatgaagagactcatcaggacttaaaccgccgccctcgtcaaggattaaccttaacaacaggtctgcaaaatgaagtgtatggcattagtgcttcgcttgttgcaaaatcaaagtcgaaagactgggatagtaattacaagaatccaggttacgcaactgtagatattaatgcttattggaatatgaatccgcatattaaattgtttactaatatccaaaatattggagacgtggattataaaacagcttatcaagaccaaggatactactatgtaaatggtggccgccttgcgtcagctggtgtgaccttaagctactaa

SEQ ID NO: 48782 - DNA, 171 bp, Acinetobacter baumannii
atgaagaagcctggtcgttttttagcacctgttgtaattgctgggattaccgtaggttttttagcaagtgcttataaatttgtatttagcaaatctgattcatcaaaacaggcaacaacacatacacgtgatgctgacaaatcatcaagtgatgcgaaagcagcaaattag

SEQ ID NO: 48783 - DNA, 882 bp, Acinetobacter baumannii
atgtttgatcacattgcccaacctatttcttaccagcacattgaactcccatcatctgttcatctcgacattaaacgtttagatctcatccaccctcaaatttcgggcaataagtttttcaaattaaaatacaatttacttgccgcaaaacaacaaggactatcaaatattttgacttttggtggcgcttactcaaatcatattgctgcaacagcttatgcagctcatatttttggcttaaacagtattggaattattcgtggtgaagagttagcgaataagccgcttaaccccactttggaaaaagcacaaagtttaggaatgcagctacattttgtctcacgcaatgaatatcgtttgagagatgatgaaaactttcttcaacagttaattcaacagtttcctgaaacatacataatccctgaaggcggcaccaataagttagcagttcaaggttgtcaggaaattcttagtcagagtgatttagagaaatatgatgtgatttgctgtgcggtaggaactggcggaacaatttcaggtcttattgaaaaaagttcaacacatcaaaaagtcttaggattttcagctttaaaaggcgactttttacaacaagagattcgtcggtggactaaaaaacaaaattggtcgctaacagatgcttattgctgcggtggttatgccaaaacgtcacctgaactatttgcatttattaaaggttttgaagcgcaatatgctgtgcctcttgaaccaatctatacgggaaaaatgatgttcggtttatccgaccttataaaaaataattacttttccgaaggaactcgtattctcgctattcattctggtggtttacaggcagatataagaaataaaacggaccaataa

SEQ ID NO: 48784 - DNA, 2214 bp, Acinetobacter baumannii
atggttaaactttatcaggaaaaaattaataatacagaacctacatttcttcctattccgaatactatattaaaagatatacatcttaaggatcgtcaatggttcactaagttagttcatcttgaggaagtttatccatatctagaaattatttggaaaaatctagattttttattttcaaaagagattagaactacgcataacaatctattatgtgctatttctgaaaatcagtttactaatgataaagatttactaagaaaaccaagtgaatatataaatttattaaaaaataaagcttattatcaatttttttatactcaatttagccctttatttaagacaattggtagttggcttacaggtatctcctccatcaattatgcatggaaagaagaaggtggagtattgcttaaaattcatgcagatatggttgggagtggaaatatttctcatggtttgtctcatcaatttgagttagatgccagtacggtagacttaattttccctgatgtatttaataatacttttacacaaaatcttaacattcaggagtatgcatttaatctaccagtattcctactcagtattgctcaatttcctgaaaaattatatccagagtctttaggcgttaatttagcaatggcccaatatttagataaattaagcttaattaaccaatatgaaaaaagtatttttagcaatttaaaacatagaaattttactaaaatttccattttagcaattaatcaatatattaaatataataacacattagacaagattaataatggctacaatacaaccattaatattattagaaaatttgaagattctctattttcagatttagtagattctaaaaaatttagcaataatacagccatgttatctttaatacagaagctaggaaaatatggtcatggataccataagcgtggcaagatatctgataaaccaattgacgattggcttatttcagataacttttctccaaaccatcttcttaatgctttagcttcttccagatatatatcacctggacaacctgataaaagtacttttgtaaaacttatcaaaaatcctaaaggtgcaatgtttggtgtattttcagaacaagatattgagatagtagaaacatggattaaagatttagctaatcaagatattacacaaactaattttcttgttagtaatagtaataacaagattaattcggtacctattaaagatttggatgaaaaaataatagctcaagctaatcttaaagctttagataaatacagtaattttactctccaagaattgtatccactatttttacatgctggatgttatcccgatatattacctacagcaaaaaattttgctcaaaattggcttgcagcacataaacaagctttaaaacaagagggactaccattttatccatatagtcatgaacgattagataaatggctagatgttcaacatctacatcaagtgaatagttatattcccttagaaggaataccaaaagaaagccgagaggatattattaatgatgctatagccttagcaccattaaccctaattgatggggcatggctgcgtaatgcctcaactcctgcaagggtcagtacgtatattggaggattacaatatcggacacttcttgatgaactcggaggtggagatataaatctccaccatggaaatatctataaacaactattagaaagtatgggaatagatattgggaaatttactgataaaaaatttgccacttctatcttatttgatgaagacgatttcaaagttccaactttctggctagccatatctttatttccacattcctttttacctgagactcttggattgaatctggcaatggagctttctggtgtaggtggagaatatcgtcgatctggagacattttaagttattacggttttagctcacttttcaccagtcttcacaatactatcgataatgtagtcacaggacattcagcttgggctatagatgctattaagcatcacctcgacaatatttttcaacaaggtggtgaacaagcgagagaacaacactgggaacgtatatggacaggttatcgttcgcttaaccatccaccgaaagaaaattggttccgaagcggtatgaaccatcttctacatcgtactttcaaaaaagcatttaatggaaaagcacttaatgaaaaggttaagtaa

SEQ ID NO: 48785 - DNA, 1833 bp, Acinetobacter baumannii
atgagttacattctaggcatttccgctttttatcatgatagcgctattaccttacttaaaaatggcgagattatatgtgcattacaagaagaacgtttttctcgcattaagcaagacaatcgctttccccgtcaagcattacttgcttgttttaagcaagctggaattactcttaaagatatttcttatattgcctattatgaagatccagaaattaaatttgaacgtatatacacgacttataaaaagaactttccaaaaggtgcattaaattttgcaaaacaatataagcgttttgttgcaagaaaaaatattatttctcttataaaaaaagaacttacagacatttttcaagaacaagttttacctccgttctatatatgtcaacaccatcagagtcatgctgcatcggcattttatccctccccttatactaatgctgctgtgctgtgtgtcgatggggttggagaatggtcaacaactacagcttggcatggttgtggtacagagttacgctctttatttgatattcgtttcccacattctttaggactactatattctgcgtttacctattactgcggtttcaaagtagattcaggtgaatataaattgatgggactcgccccttatggcaccccacgctatgtcgatattattttaaaaaatctaataacaatcaatcaggatggcagtttttacctaaatcgtgattattttgactatgaagtcgggaatcggatgatcaccgataaattcgaagtattgtttggaggagctgcccgagagcctgaaagtattattacaaataaggagatggatctcgctgcgtcaatacaagttgttactgaagaaattatgttgatgctggcaaagaaaattaagtctcttactcaagctgaaaatctttgtctggctggcggtgttgcgcttaactgtgtagcgaatggcaagttgctacgttctggtttatttaagaatatttttgttcaacctgcatctggagactcgggtggatcacttggagcagcatatctatgctactacaagcaaatgcaaggaactaggaaagttgatgagttcagtgaccaaatgcagggcgcctatcttggtaatgcatataaaaattctgagattcaagaagccctaaatcaatggggcgccaactatcaatatcttgaagagaatacattactacaaaaaacagcagaactattggcaaataataaagtaattggttggtttcaagggagaatggagtttggtcctcgtgcattaggaggacgttcaatattaggaaatcctcaatctgaaacaatgcaaagtgttatgaacttaaagattaagaatcgtgaatcattccgtccatttgctcctgctgtactagcagaggatgcagcccaatggtttgatctcaatagttcttcaccttatatgctaatagttgctccaatacatgctaataggcgtaagacagttaacaatgaacataattactcaggtatagaaaaattaaaactcacccgttctgagatccctgctgtaactcatgttgatttttcagcaagaattcaaacagtagatggaaaacataatatgcgctttaaaaaattgataagtaagttttctacgattacaggttgcccaatattaatcaatacttcttttaatgtccgaggggagcctattgtcgaaagcccaacggatgcatatcgttgctttatgagaacagaaatggatggcttggttattggcaactttcttttaataaaatctgaacaacctgaatggcaagaaaaaaccgattggagaaaagaatatgcgcttgactaa

SEQ ID NO: 48786 - DNA, 1086 bp, Acinetobacter baumannii
atgcgcttgactaataaacctatacttgaccacaagcaagccattcaagaagtctatcgttggactccacaaattcgtgattatgataattttatgcatgtaggagccagatgggtaccttatacaatgtatttccatgaaaaaaattttcgttctgagacagttaatactgattcattaggatttcgctatagccttctaaatggaaagcgtttttctgttggtgagcgtccctcaaatggccgagtaaatttattagtcggtgggtctaccgctttaggagttggcgctacttgtgatgaaaataccgttgcctcacgtttaagtgaaattactggcgaacgatggttaacttttgcaggacgcggctacaatgcaacccaagaactactcttatacttaatgaatcaagagcgagttggagagattggtcatgtcgtagtcttcagtggcatgaatacactagctctagaaggtatcccagatgaatttgcaagtgaatacggacgttattattattcttttgaattccaacattatatgaacaaatttaatgaggatatgaaacgtaaaaaagattcttttgatacagcaaatagagattcattttttcaacgtttcaaaaaagtattttcaagaaataatccagcggatgagattatcacagacgcaggcatttccttagatgaaagattaatccgcgcggcagatgcaataacagttgccctacaacaatggaaactattattagctgctcatggagcatctctaacatttattctccagcccttatcacattggtgtagagagtttcttacccaagaagaagatgctgtattccatgctatagaaagttgtccaaataatttctatcgattattcagtggagtattagggaaagaagttcatatcccattctttaatcatatccaaaatagagctaatggcatcccttgttttgacatgaatgaacttttaaaagattctccagcatttaaagacacaatttttgttgaccgagtacattttaatgacctcggtaatgaccaattagcacaaattatttcaacaaaaatatataaatga

SEQ ID NO: 48787 - DNA, 972 bp, Acinetobacter baumannii
atgaagaccaaaattacagaactatttgaaattgagcatccaattattcaaggcggtatgcattatgttggttttgcagagcttgctgctgcggtttcgaacgcgggcgggttaggtattatcactggcctgactcagcgtacacctgaaaatctggcaaaagaaattgcacgttgccgagaaatgaccgataaaccttttggggtaaatttaacctttttacctaccgtaaatactcctgattatccgggttttgtagaggcaattattaaaggtggcgtaaagattgtagaaacagcagggcgtaatcctgaacaggtgatgccatatttaaaggctgctggtattaaagtaattcacaaatgtacttcggttcgacatagcttaaaagctcagcaaattggatgtgatgcggtttctgtagatggttttgagtgtggtgggcatcctggtgaagatgacgtgccaaatatgattttattgcccttagcagccgatgcattagacatcccgtttgttgcctcaggtggtatggcagatgggcgctcactcgcggctgctttagcgatgggagctgatggaattaatatgggcacgcgttttattgcgactcaggaagctcccgtacatgaaaatgtgaaacaggcgattttaaatgcaaccgaacgagatacgcgtttaattatgcgtgctttgcgaaatactgaacgtgtcatgaataatgcggccgtagaaaaaatcgtggcaaaagaaaaagcactcggcgataacattaaatttgaagatattattgaagaagttgcaggggtttatccaaaagtcatgattaatggtgatgttaatgcaggtgcatggtcatgcggtttagtcgcaagcttaatccatgatattccgacatgcgatgaactggttagccggattgtcaaagaggcagaagatattattcgtggtcggttattagggcttttatag

SEQ ID NO: 48788 - DNA, 810 bp, Acinetobacter baumannii
atgcagcagaacaacaaaacccaaagcgagcttaaaacaggcacaattcataagtattttgatagaaatatactaacgctcaccatgagtaatgccactaaaaagaatgcaattaattatgaaatgtatgcagctttaagtcaggcattagatcaagctgcaaccaatcaagacattcatgtggttgtgcttactggtgaagactccgcatttaccagcggcaatgatgtaaacgcatttgaaaaacgagataccaccacttcagaaccacccgcttcgattgttttcttaaaaagcttagcaacttttccaaaaccgattattgctaaagtaaatggtgtggcaattggcattggcagcactatgcttctacattgcgaccttgtgtatgcaagccaaaactctatttttcagttcccctttgtgaatttggggcttgtacctgaagcgggttcaagttacatcttgccaagattattgggctttgctcgagcttcggaaattattttactcggtgaaaagttttcggcggaacaagcaaaaaattatggtctggtaaatgaaatatttgaagccaatgagctggatcaagtggttgaagatgtggcaattaaacttgctcacaaaccaagccaagccttacagctcagtaaaaagttactaagagatatgccaattgatgatctactcaatcgtattgaccatgagtcgactattttctcgcgttgtttacaaggttccgagtttaaagaagcattaagtgctttcaaagaaaaacggaaaccgaactttcacaaccaaacagcctaa

SEQ ID NO: 48789 - DNA, 1218 bp, Acinetobacter baumannii
atgggtgctttaaatggaattcgggtgcttgacttaagtcgggtattggctggaccttggtgtggacagattcttgccgatttaggcgcagaagtaatcaagattgaaagaccgaaagtcggtgacgatacccgttcttgggggccaccttggatgaaagatgattctggccaagacactcaagaagctgcatattatcagtctaccaaccgtaataaattatcggttgccatcgacattgccagttctgaaggccaagaattgattaaagccctcattcaagacaccgatgtcgtgattgaaaactacaaagcgggttctttaaaaaaatacggcttagactacgagtctttatctgcgattaatcctaaactggtgtattgctcaattacaggctttggtcaaactggtccaagagcagaggagcccggttacgactttattattcagggtatgggcgggctcatgtcggtcacaggtgagcgtgatgatttgcctggtggtggaccacaaaaagtaggggtcgcattttccgatttaaccacaggtctttactctacgattgccatacaggctgctttactcaaccgtcatgtgacgggtttaggccaatacattgatatggctttgcttgatgttcaaattgccacaatggcaaatcagggaatgaactatctttcatcgggtaatatccctaaacgttatggcaatgcacacgccaatattgtcccttatcaagtgttcaaagcttctgaccgtgattttattattgcatgtggaaatgacactcagtttattcaactctgtcgtagtattggtttacccgatttaccaaatgatccgcgttttgcccgaaatgcagaccgcattaagcatcgtgatgaaattatcggaattttacaaactcactttttaacaaaaacagcagatgaatgggtagatgcaatctatgctgctaaagttcccgttggtgtgattaataacttggaacaagcttttgaagagccacaagtgattgccagagaaatgctggtcgagatgaatcaccctcaacgtgagaaactgaaggtaattgggtcaccaatcaaactttcgagaacacccgtagagtacaaaacagcacctccgctgctaggtgaacatacgcaggccgttttggggcgaatagtttcttcagaaaaactagcagagcttaaagaaaagggcgtaattgggtag

SEQ ID NO: 48790 - DNA, 225 bp, Acinetobacter baumannii
atgagtgaatttgatatggcttattttgacgtaaagctctttatctccaagcggactactgggttcatttacaaaggcttatttatcgaaatagatgagagtaacgtcttcgcatatacagtctttgaaaatgaaaattgtagtgaagagttatgcggctttctcagcatgaaagatgcaattgaatatgtagatgaagttaaagcggaaagtaaggaggggtaa

SEQ ID NO: 48791 - DNA, 177 bp, Acinetobacter baumannii
atgttattcactgttaatcaaacaatgcaaattaccgacttatctaaggccactatttatagaatgtttaatagtggcgagttaaaaaaagttaagttaggtggatcaacaagagttgagttcccagaatcacttttggaaaaatataaggataaaattcaggccttaataaaataa

SEQ ID NO: 48792 - DNA, 1251 bp, Acinetobacter baumannii
atgcctaaaattgtacctgcacttacagactctaaaataaagtctgaaatctcaaaacataggaaagatgttgagaagaaaattctcaagctatccgatggtggtggattataccttttaattgataagaagggtggcacatcatggagatttgactatactagaccaattcttaagaagcgtaacactatttcaattggcccatatccagaaattacgttagcaattgctcgtcaatatcgtgaagagtttagaagtcaaatagcacaaaatattgatccggttgaacagcgaaaacgtgaggctcaagttaaaagaagaaatttaatttctactttttccgccgttgcggatgagttccgattaaccgaagaaattactgaaagaacaaaacaacgtaacaaggctatttgggaaaaactttatttaagtattggctcaatccctatttctgaaattacagcattacaagtcctagatgcctgtagattgtatgaaaaccaaggaaaatatgactcggcaaaacggatgcgttcaaaagccagtcaggtctttaaatatgcaattgtactggggctttgccaatataatgtagctgaccagatatcagggattttaaaatctggtactgttaatcactacgcagctattactgatgaaaaaagactgggtcaactacttttagatttatcagaaccaaatttaaatggttctattatagtctattatgcaactttaatattgccatatgtttttgttagacctggtgaattacgctgggcagaatgggatcaaattgatttagataaaggtctttgggcttatacaccaccaaaaacccaaaataaaacccacttagaacatgtagttcctttggcaacacaagtcgttgcacatcttagggagctttataaattaacaggtagtcaaaggtatgtctttgcttctatgactaaaggtaaacctgttattagtgagtcaactattaataaaaggcttaagtcatttggatttgcgaatggtgaaacaactgggcacggtttacgtgcaacggctcgtactttattagatgaagtacttaattatccaattgaacgtattgaaatgcagcttgcacaccaagtaaaagatatgcacggaagagcctacaaccggacgaaatatttaaaagaacgtaccgaaatgatgcaggcttgggcagattatctagataaattaagagaagaagcaagagttgtagcaacacaataa

SEQ ID NO: 48793 - DNA, 426 bp, Acinetobacter baumannii
atgaaacccatccgtccatctttaacattagcgctattggaagctcgtgaagcaatcatgtctcattttcgtccagcactcaatgaggtaggattgactgaacaacaatggcgtattatccgaattttatatcaatatgaagaactagagagtaatcaattagcagaactggcgtgtattttaaaaccaagcttaaccggaattttaaaccggatggttgagcaaaaactgattcaaaagcgtaaagattatgatgaccaaagaattagtttaattagtcttactgaaagtggccttgaatgttttaaaactcaagcagtgaaaatggaagcttcttatcaaaaaatccaagaacaatatggtgaagagaagatgaaacatttattggaactattaaaggatctttcaaaaattaagttgaattaa

SEQ ID NO: 48794 - DNA, 948 bp, Acinetobacter baumannii
atgaatcaattaaatacagctattgtagaaaaagaagtgattgaccctatggcgtttcgccgtgctttaggtaatttcgcaacaggtgttaccattatgactgctcaaacttcatcgggtgagcgtgtaggtgtaacagcaaatagttttaattcggtttcactagatccagctttagttttatggagtattgataaaaaatcttctagttatcggattttcgaagaagccacccattttggtgtgaatattttatctgctgctcaaattgaattatctaatcgatttgcacgccgaagcgaagataaatttgcaaatattgattttgacttaggtgtgggcaacataccacttttcaaaaactgttctgcagcttttgaatgtgagcggtataatattgtcgaaggcggtgaccattggattattattggtcgtgtagtgaagttccatgatcatggacgttctccacttttatatcaccaaggtgcatattcggcagtattacctcatccaagcctgaatatgaagtctgaaacggctgaaggtgtattcccaggacgtttatatgacaatatgtactatttgctaactcaggctgtacgtgcttatcaaaacgattatcaacctaaacaattagcaagtggttttcgtacaagtgaagcacgtttattactagttttagaaagcaaaacagcttctagtaagtgcgatttgcaacgtgaagtagcaatgccaattcgtgaaattgaagaagcgactaaaattttatctgaaaaaggtttattaattgataacggtcaacactatgagttaactgaacaaggtaatgcatgtgcgcatatgctgtataaaattgcagaaagccaccaagaagaagtctttgcaaaatatacggttgatgagcgcaagctgtttaaaaatatgctcaaggatctgattggtatttaa

SEQ ID NO: 48795 - DNA, 1269 bp, Acinetobacter baumannii
atggaaaatacagttttaaatctggattctgatgtgattcatgcttgcgaagcaatctttcagccaatacgacttgtatacactcacgctcaaacgccagatgtttctggagtttcaatgcttgagaaaattcaacaaattttacctcaaattgcaaaaaatgcagaaagtgccgagcaattacgccgtgtacctgatgaaaatataaaacttcttaaagaaattggactacaccgagcgttccaaccaaaggtttatggcggtctagaaatgagcttgccgggttttgccaactgtattgtgactttagcaggcgcatgtgcgggaacggcttgggcatttagtcttctttgtactcatagccatcaaattgcgatgtttagtaaacagttgcaagatgaaatctggttaaaagatccggatgcaaccgcaagtagttctattgctccttttggtaaggtagaagaagttgacggtggaattattttaaacggtgattatggctggagtagcggttgtgatcatgctgaatatgccattgtcggttttaaccgttttgatgctgatggcaataagatttatagttttggtgtgattccgcgtagtgactacgaaattgtagataactggtatgcacaagcgattaaaagtagtggctcaaaaatgctaaagcttgtgaatgtatttatccctgaataccgcatttccaaagctaaagatatgatggaaggaaagtcggctggttttggtttatatcctgattcaaaaattttttacacaccataccgtccttacttcgcaagtggtttttctgcagtgagtttaggtatcgcagaacgtatgatcgaagcctttaaagaaaaacaacgaaatcgtgttcgtgcttatacaggtgctaatgtaggtttggctacacctgcattaatgcgtattgcagaatcgacacatcaagttgctgctgcacgcgcattacttgaaaaaacatgggaagaccatcgtattcacggattaaatcatcaatatccaaataaggaaacactggctttttggcgaacaaatcaggcgtatgctgtcaaaatgtgtattgaagctgttgatcgtttaatggctgctgctggtgcaacaagttttatggacaacagtgaactacaacgtctcttccgtgatgctcatatgactggtgctcatgcatacacagattatgacgtatgtgcacaaattctggggcgtgaattaatgggtatggaaccagacccaaccatggtttaa

SEQ ID NO: 48796 - DNA, 1374 bp, Acinetobacter baumannii
atgaatgacacgataacggctattgaaaaggaaaatttaagtgcggaagaaagaaaagttgctttcgctacaattatcggcacaacagtcgaatggtatgattttttcatttatgcggcagccgctggattaatttttaaagatcttttctttacacctgctggtagctctttagggaccatacttacctttgcaacagttggattaagttttctgtttcgtccattaggcgcttttttagcaggctatttgggggatcgttatggccgtcgttttgtgcttgtgatgacgttagttctgatgggactagcaaccacaagtattggtttgctgccaacttatgagtctatcggtatttgggcgcccattttattactcattttaaggatattacaggggctagccgcaggtggtgagtggggtggagctgtattaatggcggtagaacatgcaccttcacataaaagaggacgttttggagcatttccccaaataggtgtacctttgggccttattttagcctcagttatgtttgcgctaatgacaggggttatctctcctggagatgcatttatagaatggggttggcgaattccttttttatttagtatcgttttattatttgtagggcattggatacgacgtacggttgaagaaagcccagttttcgaagaaataaaacaacgtaaaagtacctcggctacccctattcgtgatctatttaaaaatcatgctcttctcgttattttagctgctcttgtttttgcaggtaatagtgcgtgtggttacatgactactggcggctttattcaaaattatgcaacaaatcccgaaggacctctagctttatcaagaacccctattttaatcagtgtaaccttggcatctgtcgtgtggttaatttcaacatggttttcaggctttttgtctgacagtattggccgaaagaaaacatatattgtgggatggggtgttcaattcattgctgttctaactttatttccattagttaatacagcttcaatcccattaatcgctctagctttatgttttcttgcattgggaattggcctgacttacggtgtgcagtctgctttttattctgaacttttccctgcttctatccggttttcaggaatttcaatttcatatgcacttggtgcaattttaggaggcgcatttgccccgatgattggagcttggcttattgatatcactggatcaacattagccgttacggcttatttatcattaatgacttgtattgcttttctttcaaccgtctctttaaaagaccgaacaggtatacctttaggaccggattatgaaaaggaacaatcaaaatctcctgtgatatggcatcacgataaataa

SEQ ID NO: 48797 - DNA, 1449 bp, Acinetobacter baumannii
atgcaattaaaagatacatcattattaaaacaacaggtttttattaatggtgaatggctggcggctgcagatcaacaaacatttactgttacaaaccctgccactggtgaaactattgccaatgttgcttccgcaacagaacagcaggtagaacatgcagtcaaagcagctgaacaggctttggttacatggaagctgactacagcaaaagagcgatcacttttgttaaaaaaatggtatcagttgattattgaaaatcaggaagatcttgcaatattacttagccttgaacaaggtaaaccattgactgaaagccgtggggaaattctctatggtgcaagttttattgagtggttcgctgaagaagccaaacgtgcatatggcgatatcattccccatgataagcaaggtcggcgtttagttgttatccgccaacctgtaggtgttgtagcagccattaccccttggaatttccccaatgccatgattactcgtaaggttggtccagctttagctgctggttgtacggtaattataaagccggcatcggaaacgccactatcagcatttgccctagctgtattggctgagcgtgcaggtattcctaaaggtgttattaatgtggtgactggtagtgcacgaatgattggtgcagtactgactaaacacccatcagtacggaaagtatcttttactggttctactcaaattggcaagttgttgatggaacaatgctcttcaacaatgaaaaaagtcagtatggaacttggtggtaatgcaccatttattgtgtttgaagatgctgatcttgatcgtacagtggaaggtgcgattgcatctaaattccgcaatagtggacaaacatgtgtatgcaccaaccgcttattagttcaggcttctgtttacgacgtatttattgaaaaattaagcattgcagttgcaaaactcaaagtggcaccagctttcgaaaatggagcagaacaggggcctctcatcaatgaaaaggcggttgaaaaaattcaagaacatattttagatgccacttcgaaaggtgcaaaaattatttatggtgggcatcgacacgctttaggccagactttttttgaaccgacagttttagccaatgtaactactgacatgctagttgctaatgatgaaacctttgggcctttagcaccagtatttaaatttgaaacagaagagcaagccattgctatggccaatgatactgagtttggattagcttcctatatttatacacaaaatctaagccgagcttggcgagtgggcgaggcattggaatatggtatggttggagttaatgaaggtattatctcaactgaagttgctccttttggtggtatcaaagagtctagtacgggtcgagaagggtcaaaatatggtttagaagactatcaagaactcaaatatatgtgtatgggaatttaa

SEQ ID NO: 48798 - DNA, 801 bp, Acinetobacter baumannii
atggtgaatacggtcaattactttaaacaaaagcttaaaaccgagcaacagataggcatgtgggtgggcttagctgatggttactgtgcagaaattgcggcaaatgctggctatgactggttgctcattgacggagagcatgctccgaatgatgtgcgcagtattttagcccaactacaaagtatcgcagcttatccaagccaagcggtcgtgcggccggtttcaggtgatgtaccgcttattaagcaattactagatattggtgcacaaactctacttattccaatggttgaatctgctgaacaggctgaattgatggtgaaagcaacccgttatccaccagaagggatccgaggagttggagctgcgcttgctagagcttcacgttggaataatatttcagactatttacaaactgcggatgaacaaatctgtcttttggttcaagttgaatctaaaaaaggcttagataatcttgatgaaatattaaatgttgatggtgttgatggcatctttattggccccgcggacttgtcggcagcgcttggctatcgaggtaatccgggtcatgaatttgtccaaaatattattgtacagaccattcagaaaatccgagcagcaggcaaggcggctggcattttatctgctgatgaaaaactggcaaaacaatatcttgaacttgggactgaatttgttgctgttggagtagacaccagcttactcatgaaatcgatgaagcaactgctctcaaaattcaaaaatgttgatggaccagtatcgacatcaccaagtgtctattaa

SEQ ID NO: 48799 - DNA, 804 bp, Acinetobacter baumannii
atgttagataaagccaaaattcaagagttagcaattcaactcgatgaagctgaaaaaactggtcagcaaatacgccagttttcactgcaatatcctgagattaccattgatgatgcatatgccattcaaaaagcatgggtagagcataaaattgctgaagggcgaaaattagttggtcataaaattgggctcacttcacgtgccatgcaggtttcttcaaatattacagaacctgattatggggcattgctagatgatatggtatttgaagaaggctcagatattccaatgtcacgttttattgtgcctcgtgttgaagttgaattagcctttattttagacaaaccgttatctggaccaaactgcactattttcgatgtactggatgcgactcgttacgtgatcccgacgattgaaatcattgatgcacgtttacacaatgttgatccggaaactcaaatcacccgtaaagtttttgacaccatttcagataatgctgccaatgctggcattgttatgggtggacgaccaatcaaaccgaatgatctcgacttacgccgggtttcagcagttttataccgtaatggcgtcattgaagagtccggtgttgcagcggccgtacttaatcatccggcaaaaggtgttgcttggcttgccaataaactgcatccacatggtgttacattgcagccaggacaaattattttgggtggctcatttacccgtcctgtagcagctcgtgcaggtgatacattccatattgattatgatcaacttggttcaattgcttttcgctttgtataa

SEQ ID NO: 48800 - DNA, 390 bp, Acinetobacter baumannii
atgccacactttattgctgagtacagtgccaaccttgaaaactctgtagattttcaggacttgtttaaaaccgtaaatgactttttaggaaatacaggtgtctttcctttaggtggaatacgcagccgtgctattcgtctagagaaatatcgtgtagcagatggccagcatgactatgcatttgtacacatgagtttaaaagtaggagcagggcgtgatttagaaaccagacaaaaagttgctattgaactctttggcctgattgaacaatttttccaacctttgaaagagcagcgacttttggcaatttcatttgaaatgacagaacttgatcccgttcttaattttaaatcgaacaatatccatcagtttttaaaaaatcaggcttga

SEQ ID NO: 48801 - DNA, 858 bp, Acinetobacter baumannii
atgggtaagttagtgcttgcagcaaaaattacacatgttccatctatgtatttgtctgaactacctggtcctcaccaaggttgccgccaagcagctattgatgggcataaggaaattgggcagcgttgtcgtgatttggatgtagatactattgttgtgttcgatagccactggttagtgaatagtgcgtttcacattaactgtggtgaacatttcaaaggaatttacaccagtaatgaacttccacattttattaaagatatggaatttgaatatgatggcaacccggttttaggccagttgatgcaagaggaaattgcaaaaacaggcgtccgtgttcaggcgcataacattaaaagtctcgagctggaatatggcactttagtcccgatgcgttatatgaatcaagaccgtcgttttaaagtggtttcagtctcagctttctgtacatctcattcattacaagatagccgtaaattcggtgaaggtcttatcaaagcaattgaacgttacgatggcaatgttgcaattttcgccagtggctcactatcacatcgcttcatttgggattgggaagcgcaacgtggaatggatacctatacacgtgaatgggatcgtcaagtcgataaacatgtcgtgaaaatgtgggaaaacgctgaatgggcagagttttgcgcaatgttgccagaatatgccgagtattgtttcggtgagggtggtatgcatgatacagcaatgcttttaggcgctttaggctgggataaatataaccaacctgctgaaattattacaccagcttttcctagttcaggaacagggcaaattaatgcaatttttccattaatgcccaatacataa

SEQ ID NO: 48802 - DNA, 1461 bp, Acinetobacter baumannii
atgattaagcattggattgatggtaaagaagtcgctagtgacgagacatttacaaactataacccagctactaaccaagccattggtgaagtagcaagtggcagccaaagagaaattgatttagcagttgctgctgcgaaaaaagcatttccaaagtggtccaaaacaccagcaaaagaacgtgcacgactaatgcgtcgtttaggcgaactcatcgatcaaaatgtcggaaaaatcgcagagctagaaactttagatacaggcctgccgatacatcagacgaaaaatgttttaattccacgtgcatcacacaacttcaatttctttgctgaagtgtgtacccgcatggatggccatacatatccggttgatgaccaaatgctgaactatacgttacaccaacccgtaggtgtatgtgcactagtttcaccttggaatgtaccgtttatgacggcgacatggaaaacagcaccatgtctagctttgggtaatactgcggtattaaaaatgtcggagttatcacctctaaccgcgaatgaacttgggcgtttagctttagaagctggtattccagaaggtgtgttcaacgtagttcagggttatggagcaaatgctggggatgcactggtaaaacatcctgacattcgtgcaatttcatttaccggtggtactgctactggtcgtaaaatcatggccaatgcaggtttgaaaaaatattcaatggaacttggtggcaaatctccagttgttatttttgctgacgccgatttagaacgtgctttagatgcagcattgtttacgatcttctcgttaaatggtgaacgttgcactgcaggtagtcgtatctttattcaagaatctgtatacgatgaatttgtagctgagtttgcacgccgtgcaaaaaatatcattgttggagatcctcaagatccaaatacccaagtcggctcaatgattacccaagcgcattacaacaaagtcacgggctacatcaaaatcgggattgaagaaggtgcaaatctagttgcaggtggtttagagcgcccagcaaacttacctgagcatttaaaaaatggtcaattcattcagccaacagtatttgccgatgttgataaccgtatgcgtattgcccaagaagaaatctttgggccagtggtgtgcttgttaaaattcaaagatgaagcagaagcattacgtcttgcaaatgatgttgaatatggattggcttcatatatctggactcaagatattggtaaggcacatcgccttgcggcaggtattgagtctggcatggtctttattaatagccaaaacgtacgtgatttacgtcagccatttggtggcgtgaaggcatccggtacaggccgtgaaggtggcgaatacagttttgaagtatttacagaagttaaaaatgtttgtatttcaatgggttcacatcatattccgcgttggggcgtgtaa

SEQ ID NO: 48803 - DNA, 765 bp, Acinetobacter baumannii
atgaagacagctaaaattaaatatgaaggacaaatttttgatgttcaggtaaatgatgacttaagcgttaagttaccttctggccaaactcttaaggaagagcaagttgaatggttaccacctgcaaatggcaccatgtttgcacttggtttgaactatgcagatcacgcacgtgaactggcttttgagccaccaaaagaaccgttgatttttattaaagccaataatacttatatagggcataacaaacaaacctggcgtccagaccatgttgaatatatgcattatgagtgtgagcttgttgctgtaattggtaagactgccaaaaatgtaaaacgtgaaaatgccttggaatatgtacaaggctataccttatgcaatgactacgcgattcgagattatctggaaaattattaccgtccaaacttacgcgttaaaaaccgtcaggcaaccacacctgttggaccatacattatcgaccgtgcacaagttcctgagccaaataaccttgtattgaaaacatgggttaatggagaacttcgtcaagaaggcactacagcagacatgatttttaatgtgccattcctcattgagtacatctcatcatttatgaccttacaaccaggtgacatgatcgcaactggaacaccagaaggcttatctgatgtggttccgggagatgaagttgtcgttgaaattgaaggtataggcaagctacggaactatatcgtttcagaaactgaattttttaatactgtgaaataa

SEQ ID NO: 48804 - DNA, 660 bp, Acinetobacter baumannii
atggatcactcaaaagagatcaaattggatggtaatatttttggtattgctttgaattataagtgtttatatcaaacactccaaaaaagttttaatgaaaaaccctatgtaaaagagccggttaaacctgttttatttattaaaacgccaaatactcgaaatagtaatggtggggtggttgtaaaaccgcagcatgaaactttacaagctggtcctgcgctaggtgtggttattgggaaaagtaccagtcgagtaaaggaaagtgaagctgctgactatattgcgggttatgtcgttatcaatgaatttagccttcctgaagatagttattatcgaccagcaatcaaagcgaaatgccgtgacggtttttgcgctataggtcctgtcgtagcgaaagatcaagtacaaaatgtcaatgcattaaccctgcgcgtgtatgtgaacaatgaagttgtacaggaagggacaactgcaaattgggttcgcacaccggaacagcttattcaggaaattagtgaatatatgacgctcaatgaaggggatattcttttgacaggtaccccactgggccgagctgatcttcatgatggagataccgttactgttgaaattgaacaaatcggcaaagtcacaaacactgttcaggaacagggagcatag

SEQ ID NO: 48805 - DNA, 888 bp, Acinetobacter baumannii
atgaaaaatggaatgattcctaatttaaagatgggtgaggtctatgaccaacgctatgcggatgctgaaattcattatgaagcactaagcaagcttgctctgttttttggaatgcaaatgccagcacatcggcatgaccgtttttttcaaatacattttttaactaaaggcactgtccgaatttttctagatgacgtgaaatatgtatgtcaggcacctgttttcttttttaccccaccttctgttgctcattcatttattaccgatcctaactgcgaaggccatgtactcacggtacagcaaaatattatttggtcgctcttagaagatggttttcaaatacaaaattttatcccaatttgtttacaaagaaataatttagaacccatgctccagcaaagtatggaccaaattgaaagatatttatatcagctcaaactggaattcgaggcaaatcgggatggtaaggacttagctctaaaaagcttgatcaatctaatttttctcaatgtattacggctcagcaatgctgctccactgcgtgtgaaaaactgtaagaatgaattatctatttttagaaaatttaatgaattgattgaagaccattttatggaacattggtcattagcccagtacgcaagccacttggcaattacagaagctagactgaatgaaatttgcaaacgtttagctgatatttcttctaaaaaacttatctttgatcgtcaaatgcaagaagctaaaaggctattaattttcacagatgactcaatcaacgaaatttgttatcagcttggttttaaagatccagcatattttagtcgtttcttccaaagacatgcaggaattcgtccatcagattttcgtaatcagcatattcaacagtaa

SEQ ID NO: 48806 - DNA, 1176 bp, Acinetobacter baumannii
atgaaatcgaaaaattatgcattaatcggactgttgggagctttagttgcattcggtcccctatcaattgacatgtatctctcaagccttccccaaatgtctgtagatttagcgagttctgcccagcagattcaaaaaaccattacggtgtttttggttggttttagtattggcatgctattttatgggcctttatcggatatatatggtcgaaagaaaatactaattataggtatttcgatttatatctttgcctccataggctgtaccttatctgaatcggttgagcaattgactcttttccgttttttacaggctcttggcggggctagcgcctctgtcatttcgagggctttggtcaaagatttatttgaacagaatcatatccccaaagtcttgtctttaatgcatatcattaccatgattgccactcttattgccccaactctaggtggtctgttaacacaatattttggttggaatgcgatttttaaacttttatccctgttttcggcaagtattttattaggtgtttttcttagtattccaaatgaattcccaaaaaatagcagacctcattttataaaaaattatattgcagtaattaaagatagcagagcatggagttttatttttgctttaagcggaacatttgccggaatgtttgcatatatcacagcatcttcatttatatttgtagatcaaataggctttagccaattacagtatgcatttttattcggatttaatattactggaattattatattcacgattttaaacacttattttttaagaaaatactcatcttacaaacttcttaaggcatttacgttagtcgcctgtatttcaggtttttatttattactaattagcttattaaattttcaccatcccttttatctcatcattggattactcatgtttgtaggagtaacaggagctattggagcaaatgcaatcgcaaatttattaaatattttttctcaagcagcaggtacagtttccggactcgcggtatctttccaatttggcttcggtgccttagccagttattttacagtattactttatcgcccagactcttcactagccatgacactcattatggcaatttgtggatttataagtttcttaagtttgagaataaataagcagctcaaaaattatttatag

SEQ ID NO: 48807 - DNA, 1215 bp, Acinetobacter baumannii
atgatgaatttcttggctcctgaagaacaacttacactcatacagcgtggtacacatgagatcatttcaaaggatgatcttctaaaaaagttaagagaaaatcgcccgttaagaattaaggccggatttgatccgaccgctccagatttgcattttggtcatacggttcttcttaataaacttaaggtattccaagatttaggtcatcaggtattttttcttattggcgattataccgctagaattggagacccttctggtaaaaacacaacacgacctccattatcacgtgaacaggttctcgaaaatgcaaagacttatcaagaacaggtttttaaaattcttgatccgtcaaaaaccaaaattgtttttaattccgagtggttttctcaaaaaacggctgctgatcttattcaattggcttcacaacacactgttgcacgtatgatagaacgtgatgatttcaataaacgttataaacaacaccagcctatcgcaattcatgaatttttatatccattaattcaaggttatgactcgattgcgcttgaggctgatgttgagatgggcgggactgatcagaccttcaatttgttaatgggacgtacattacaggaacgttatcagcaaacaccacaagtgtgcattactgttcctcttttagaaggtttagatggggtgaataaaatgtctaaatctttaggaaattatattggggtatttgacacaccgggtacaatgtaccaaaaaattctttcacttcccgatttattaattgaacgctattttgatttgcttagttttaaaacaatagatgaaattaaagtcatacttcaagagatgtctgaaggccgtaatccgcaagaagttaaacgtattcttgccttggaattggtagagcgttttcatggtcccgaagctgctgcaactgcaaataaaagcacaggtaatattattactcatggagaaatcccggcagatatttcagaagtcttcatctcacgtagcgaatttggaggtgaagtatttattacttctattttacgtaaagctcgtttaactacaaatgcagctcaagctaaagatgctttgagtagcggtgctgtaaaagttgactgggaaaaagtagattccacatattctgtaaaaaagaatgggactttcattatacaaagtagtaaaaaggcaattgcaaaggttacttttgtagattaa

SEQ ID NO: 48808 - DNA, 534 bp, Acinetobacter baumannii
ttgtcgtgtacagagatagaaaatacactttttggttttgaatatgcggttcaagacaaacgcgatgccaatactgaaaatgcttggtatataaaaactggctataccttcaataccgcttggaagccttcttttacgctgagatatagccgtttttcagaaaaatgggacaacttgttcgttggtgcgttggaatatggaaaatggtttcagggagaagtggcatataactattcaggaccatttaatgccaatacacaaatttcaaatttcggttttagtgtcagtcctcatgaaaaagtaacattaggattgcaagcctatgattttgatactttaaagaaagaaaataatactgatttatcgggccaagagcttgatttatatgctttatggtttgtgaaacccaacctcacagtatctccattattgggaatttataaaccgaaatatgatttggcacataacggtttacaaaatggagatgataaaaccaatctttatgcacaactggttttaaatctctcattttaa

SEQ ID NO: 48809 - DNA, 1071 bp, Acinetobacter baumannii
gtgcggcaggttagcccatcgattaaccccaataacccagtttctacatttcaagttggcttgggaatgactgcttatgagctagatttttggggccgtgttcaaaatttaaaagatgctgcattaaataactatcttgcaactcaaagcgcgaaagaggctgtgcaaattagtttaatcagtaacatcacacaagtctggttaaattatgcttttgcacaagccaatttaaaccttgccgagcaaaccttaaaagcacaagtcgatgcttataatctaaataagaagcgctttgatgtcggtatcgacagtgaagtgccattaaaacaagcacaaatttcggtagagactgctagaaatgatgttgcaaattataaaactcagatcttacaagcaaaaaatttactagatttattggcaggttctcctattcctcaaaacttacttccaaatgatgcaattaaaaacattacccttgagaagaattttgcagccggtttaccaagtgatttattaaatcatcgtccagaccttaaagctgccgaatatgagttacgtgttgcaggagcaaatattggtgctgctaaagcacggatgttcccaaccataagcctgacaggctcgacgggttatgcatcgtctgaactgaaagatttatttaaaacaggcaattttgcatggtcgattggacctaatatcgatctaccaatttttgattggggaacaagaaaaactaatattaaaattgcagaaactgaccagaaaattgctttagctaaatatgaaaaagccattcaatcagcttttcgtgaagttaatgatgcgcttgctacacatgcgcatattggtgaacgattagacgctcagcgtcgcttagtctctgcgactgctgcaacctataaactatctatggcgcgctacagagcgggcgtggatagctattttacggttttagatgcccaacgttctgcttacgcagcacagcaaggcttgcttgcgcttgagcaaatgcaattaaataaccagattgaactctataaagttttaggaggaggaacatcaaaagtctaa

SEQ ID NO: 48810 - DNA, 1542 bp, Acinetobacter baumannii
atgaatagaaaaacggattttactcaatctttggatgcagaagttcttattattggcgctgggattgctggtatcagcgcagcctaccatttaaagaaatatagacccaattcaacctttattattcttgaaggtcgtgatgatattggcgggacttggagtctatttcgctatccagggattcgctcagattcagatatgcagtcttttgcctttggctttaagccatggacgcaaaaaaagactttcggtagcgcacaaatgatctgtgattatttgcatgaaactgttacagaaaatggtattgaccagtatattcaatttggcagctatgtaaccagtgcagaattctcatcgaatgaaggaatctggaccgttaaagtcaaacagaaagatcaaaaaagtttagttaccttacgttctcgcttcttactcatgggtacaggttattatgactataacaatggatatacccctgactttaagggcacagaagaattcaaaggacaaattgtccacccacaacattggccggaaaatctagattattcaggtaaaaaagtagtcgtcattggtagtggtgctacagcagtgacattaatcccagctatggcaaaagacgttgagcatattactatgcttcaaagatcacctggctatgtcgttgctatgccgagtgtcgatcctattgcagttgctttaaatacagttttatcaccgcaacgagcgtatgaaattatacgacgtaaaaatattgccattagccgcgggatttacaaactatgccaccgctttccaaaggtaatgcgtcatctactcattgcagatgtacggcgcagattacctaaagattttgatgtatcaacgcatttctcacccaaatataatccttgggatgagcgtttgtgtgtggtaccagatggagatatgtttaaagcgatttcatctggtaaagcatcagtagtgactgatcatattgaccgttttatcaaagaaggcatattgctgaagtcaggaaaagtactagaagcagatattattattaccgcaaccggcttaaacatgctggcatttagtaagattcaactcaccgttgacggtaagaaaattaattatccagacacgacaatatttaaatctatgatgctgtcagatatacctaattttgcctttgcatttggttataccaatattgcatggaccttaaaagtagatctggtatggcaacatttctgtcgtctccttgactatatggatgagaataaatacggaacatttataccggttattcataataaaaccatgaaacgggttccttttgttgatttgagcccaggttatgttcaacgtggtttggcacaattcccaatggcagggaccgaaggtccttggacactacaacatgattataaggttgactttgagcggctcaataaagggcctgtgtgtgataaggaattaaagttcactgcattggttcccaagaaaaagttagctgtcgttacgaaaccatcttcagaagaattgatggtcaacgcttaa

SEQ ID NO: 48811 - DNA, 612 bp, Acinetobacter baumannii
atgtctttaattcagccataccaaaatgagagacgaaaattaactgaagaaattatagaaaatgtatccttaaaagatggaaaggttattatcgaaaaaggtttggaaattgataaagttgcctcatttcaaaataaaatgagtgacatcgaagagcagattaatttttttagaaaacctttaaaacgattccatgattcaatgaaatttttcctgcataattatgaatttcatttcagtaaaaatgtacaatttactgatgatagattaaatgatgaaagaagagaccctaccaactttgaaaaatttttgggtattgatttaagacaaaaatttcaagatttaaatgttttatcttcgggtgaaaaacaaattttaacactgattagttacaattctttttttgacaatacaatattttttatagatgaacccgaaattagtttacacgcagattggcaacgtattctttttagaattttgatgaaacagaacccaacaaatcaatttatcattagtactcattcaccttttatttatagtaaatatcctgataaagaactttgcattgatccaaaatctgaccgtggaaatgaggatggttctttataa

SEQ ID NO: 48812 - DNA, 756 bp, Acinetobacter baumannii
atgagtgaagcggttaaggaacaagaggcaattgatacatatgtagctcaaatcgagcgctcaaatctttttactattgtgattgaaggtaaagatgatcttcttgtctatagagaatttgaagcaatttatgatgagttaaattgctttgtaagtgtgctacctgtaggaggacgaaatactgcacttggtatttttaaaaaattaaaaaacacttcccatatcaaccgtacaatttttattgtcgatcaggatgaatggataataaaaggtaaagaccctgtttataatcatgatcgtattatttgtacgcatggttattcatttgagaatgatatttttattgatggaaatcttgaaaatgacatgcaaacaaaaaatcctatagtttttaataatgaattaccaatagttttacaatggtacgcacttgaaatgagccgtattttaagtagtaaaccaactgcaaatctaaaaatgcatattgataatttatttaatcaagcatctatttatactgttccacaaagtggggaaattttcccaacaccattattttctcgtttgcagtcagaataccctcacttattaagaggtaagacattattgcaattttatataagagtaatgaacaaccgaccgggttttaaaaatgctcatagtgttatctctactgtagaaaatgttactaaacataaaggttcttgtttgaaccgtatctttcaggaagttgataatttagttaaaacatcctaa

SEQ ID NO: 48813 - DNA, 192 bp, Acinetobacter baumannii
atgagtgaatttaactttgagcaactttatctaatggctctcatgaatagtaaaaagccaaagtacgttttgaattgggttcatgtatccagacatgggccaggtgcgacaaaagctacagaaatttgtgaatattttgggatagatccagaaggcactgattttagaaaagcggaaagtaaggaggggtaa

SEQ ID NO: 48814 - DNA, 441 bp, Acinetobacter baumannii
atgacagatttgaataaggaaagagaggcttttctgaataccttccaatattacaaaggaagaagagacattatttttagtaatgagcatgaactgtttatgactagatcaaacaatccttctgaaattgctcagaaagaaataagcaacatgaatagacgttgggatgcttggcttagatgtgcaaagcatcgtgatgcagagctagaaaaagccaaagctcaggcggtgccagagaaaaagatttacttaacctgtgagcaattatatgcagcagcaaactttggtgcaccaaacaaagatccagaacttttagaaactgaattaacaattgcttggtttgatgaagctcatagcggcagtggttactacgtttatataagtgagtatccagaagaaggtgcaatgaagctggaaaccgaatcaggagctgagggatga

SEQ ID NO: 48815 - DNA, 759 bp, Acinetobacter baumannii
atgagtaatattgttttgtcgcaagttagcaagattgcatcagcttttaatatgcaagatgttgatcctgctgagttagcaaatactcttgttaatacagtatttaagaaagcaacaaatgatgaatttctctctctattaattgttgcaaaccagtacaagctaaacccttttacaaaagaaatttatgcattccctgccaaaggtggcggcatcacacctgttgttggtattgatggatgggcgcgcattattaatgacaatcctgtatgtgatggcatccagtttgaacaagatgatgaatcatgcacatgcaagattttccgtaaagaccgcaaccaccctactgttgtgactgagtatttatccgagtgtcagggtaattcagaaccttggaaaaaatacccaaaacggatgctacgtcataaggctttaattcaatgtgcccgtgttgcttttggattctcaggtatttatgacgaagacgaagctcgtcgtattgatgattgtcatatccctaccgttcagaccgttagttcagatcttcctcaaggttatgaagcttatgagcagcaacatttagacaacatgcgcgctttggccatggaaggtacagaagctttgcaaactggctacgctgaattaccgcaaggtgactgcaaaaaatacttctggactaaacatagtgcgtcattgaaagaagcagcacaacatgctgatcaaccacaagggcaagtgtatgaacattctccagcgtag

SEQ ID NO: 48816 - DNA, 1062 bp, Acinetobacter baumannii
atgaatgcgccagtaaatacacaagttaatgaattacaagtattagaacaaaacgtaattgtagcggctttcgctaaacgtggtggtactgatgaattgtatgaacgtattgctcaagaagttcgttctcatgtgccagatgtaagtactaagaaaggccgtgatgcgattggttcgcttgctttgaaaatcagtaagtcaaaaactcttattgagaaatgtggaagagaattagtagctgaacaaaaagctcaaatcaaagtgattgatgatgatcgaatctcaattgttaagaagtttgattctttgcgcgatgagattttggcaccacgtgatgcttgggagcaggcagagaaggaccgcgtagcgaagcatgaagaaagtattctttctatcaatttctacaaaactgccgttattgcagataaagatagtgtttggctaaagggtgtgattcgaaatgttgaagaaattgtcattgattcatctttcgaggaattcgaggaacaggcaaaaattgccaaatacgaaactctggagtttctacgcaccaccctagctgctcgtgaaaaatatgaagctgaacaggctgaattagagcgtcttcgcaaatctgaacaagaacgtttacaacgtgaacacgaagaacgtattgcacatgaagcagctgaaagagtccgtctagaagcggagcgtaaagctaaagaagaagccgaacgtgtagaacgtgaaaagcaagaagctattgctaaagcagaacgtgaaaaggctgaggcagaacaacgcgaagctcgattaaaggctgaaaaagaagctgctgaattacgcgcacaacatgcagcagaggcagaacgcaaacgtattgaagctgagcaagcagcaaagctagaggctgaacgccaagcagatgaggcgcgccaagcaaaccaagctcaccgtaaaaagatctgtaatgaagcacttaaaggtttattggctttgggtattgatgaagcaaaaagcaaagagattttgcaagcaatcaataaaggcttagttccacacgtatctattaaattttga

SEQ ID NO: 48817 - DNA, 348 bp, Acinetobacter baumannii
atgtctattcaagttggcattaaaacaccaggcgtttatacggatgtcaatatcaatactttacgtactggtctacctacaaatgttcataaagttctttttgtgacgctagatgttttgtccggacaatttacaccagttgatgtttatgacacagctggagccgatgctaagttcggcgctaattcgcaagctggtcgcatgattaaagctgcggttaaaacttatcgtcttgttaatgctcaggctgtggcattggcggtagaaggtgtacaaacacaggcagctcttcagactgaaagtggaagcgcacttttaactgaaggtggtgctttgattgaaccttga

SEQ ID NO: 48818 - DNA, 591 bp, Acinetobacter baumannii
gtgataaatctaagtgtcattgagcaaggcatcaaagatttgatggcaaatcagtcttggccgtggatccgcgaaatcaaaacttatggtggcgaatttgatgacgatattacaacggtaattaggagttttcctgcaatttgggtggtgttcgatggctcaggtacacctaaaaaaaatggttataacaaaactgaatatccattgagatttgctgtgctagtaggtgcacgctctgtacgtaatgaagagtcacgtcgccaaggtgcaggaagcagcattggtacttatgaaatgttagaacacgttcaacggttattgattggtaatgatctttcatccgtgggcgtaaaagggcttgcacctcttgagttaggccgaactaaaccagtttttaatacaacaacacgaggacaatcaattagtgtcctcgctcaagaatttactactcaatacacaattattgcttcagatcgtgaccgtgaagaagctgaagtcggtgaaattcatcgagtcaatgtcgattactacttccaacctagcgatggcgtcgaggacgcagctgacttggttgaaatgaaggaaaattaa

SEQ ID NO: 48819 - DNA, 435 bp, Acinetobacter baumannii
atgagctatgcaacggcagaagcaatgatcaaaaagtttggtgagcatgagttaattcaactcactgataatgaagaggctgaatatacagatgctatcaattacgacaagttaaatgcagcactgcaagaagctaattctgaaattgatggttacctcattggtcgctataagctgccgttgcaacctgttcccccatttttagaaagtatcgcttgccacattgcacgttatcacgcttgcactggagcaatgtctgaaaatgatccaatcaaaactcgctacgacaatgcaattaagactttgaaagaaatcgctaaaggcattattagtttgggcaatgccccagctggggaagctgaacctgtaaaaacctcatcaaataatgtgctgtttcaagtaggccgtaatgattttggaggtaaaggctggtga

SEQ ID NO: 48820 - DNA, 933 bp, Acinetobacter baumannii
atgatttttaacgaacaaaatgcacaacgtgtaattgatacactttcaaccaatcttaaaaaagtttttgacaaagcattcgaagcggctgaaagcacatgggaacaagttgctatgagtgttccaagtaatggcgcttcaaatacttatgcttggattgagaactttccaaagatgcgtaagtgggttggtgataaagctgttaaacaacttaaaggtcatgcttatacgcttgtaaatgatgattttgaagcaactgtcgaaattgaccgcaatcatattgaagatgaccaactaggtatctataaaccacaggctgaaatggctggtgagtcatcaaaacaatggcctgatgaaatggtatacaccgttttaactagtggttttaccgaactgtgttatgacggcaagcctttttatgcaactaatcaccaagttggtgagggtaaaactgccaaggtcgtctctaataagcttgaggttccacttaaagcagatacttttgccaatgctcaagcttcctatggtaaagcccgtaccatgttgaaaagtgttaaagacgaagaaggtcgtcctttaaatcttaaaccaacattactcattgtaccgccagcacttgaagacacagccaatgcgcttatgaacaatgagcgttttgaagatggtaagcctaacccgtacaaaggaactgcgaaagtactggtggttggttggttgaaaactgatagggaatggcatcttcaggatgccagtaaacccgtcaaagctattattttccagcctcgtaaaatgcctgtatttgttaaacaaactgatacttcaagcgattctgtatttatgcgtaaaaagtttaagtttggttctgaagcacgtggtgctgctggatatggcctctggcaaatggctgtcgggtcaacaggtactggagcctaa

SEQ ID NO: 48821 - DNA, 426 bp, Acinetobacter baumannii
atgaccgctactcaaattgcaatagtgacagaaatgcgtgatggagagttaatccctattcccttaaaagctaatgccattgtattgcaaggtacgtttgctctggtggatgcaacaggttttgcaattagctcaacaacagcagttgcaggcactcaaaaatgcttaggtgtttgggataacagcgctgataacactggtggtgcagatgcagatcgtgtggcctgcgtccgtcgtaataaacaatttttatttgccaatctttcaacagatgcacttacacaagctgatctcggcgcgactgtttacgtcgctgataatcaaacggttgccaagtcgagcaacacaaatgcgcgccctgtggcaggtaaatttatgggttttgatgcccaataccctgaatatgtttgggtggagattcaataa

SEQ ID NO: 48822 - DNA, 1062 bp, Acinetobacter baumannii
atgaaaaagactttattaatagctgcgtgctcattcgctctcgatgcgacatctacttaccttgtattgattcctgaaggaatcttccgtggtgtggatggacgtccatatgatgctcctcactggcaactaactccagaacgaggccatcaaattgcaaccttattaaatcaacgatccattgatttggttgtggactatgaacatgcaactttaaaaactcaagagtctggtgaacctgcgccagcagctggttggttaaaaccttctggtttccaatatatagaaggagtcggattatgtagtgctcaatttgaatggactagtaaagcaactagtttcattgaatctaaagaatataaatatatttcacctgtccttttctataacaaagctggtgaggtcttgggccttcacagcgttgctctaacaaatacaccaaatttagatcaattacccgaagcacgtcttgctgctgcggctcaggactttttgtctctacattccgatgaggactcgacaatgaaagagtttttagaactcatgcgtaaacgtctggggctacctgaaacagccacagaagaagaattattaactgctgcaaacagtgcatttgcacaaattgatggcacttatggaacaactttagttgctggccaatcatttactgatgcatttgtaaaagctattgaagctaaaagtgcagcaaataattcacaaacacctgacccaacaaagtacgtccctattgaggtttatcaagaagcaattgcaaatgcaagttcagttgcaagtaaatcaattgcaaaagaaatcgatgacttaattgttgcagcttgtagtgatggtcgtttgacaggaaaagcaaccattgactgggtaaaagaacaagctaagaccaatcctgagtttgttaaaacccatcttgaaagtttgccaaaaatcgcagctttgtctcaaaaacagaccacaactattgatttgaatgcggcaaatcaacaacaacaccatcagccaaatgatgacattgaaaaacaaattgcagcccaattaggcatgtaa

SEQ ID NO: 48823 - DNA, 477 bp, Acinetobacter baumannii
atgagcaatatattcatcaacgataatgcaatggttcagaagttacagactgttgctgaaaaattagcacgtcctgaagaacttggtcattcaattgcaaatagctttttaactattgtagaagataactttgattttgaaggaagaccttcgtgggctggtttaagtcctttaacaatggcaagaagaaaaccgggaaaaatattatatcaatcaggtcagctccgacgcagtatcgtgacacaagtaaaaccggacagtgtcacaatcggaagtaatgacccgaaggcacctacccatcattatggtgttaagcaaggcggttatggaaaaagccgtcgaggtggccctattccttggggagatattccagcacgtccaatactgcctatggatgaaaataatgttcttcagcccgaagctgagtcagcaatttttgatgatgttgattatttttatagaaagatatttgaataa

SEQ ID NO: 48824 - DNA, 1314 bp, Acinetobacter baumannii
atgcctacacctcaacgccctgaactcaatgctctttttaagctacctccgcaagatgctattgattatttaaagaaaaaaggatttaaaattggctgggactggcatgaaacgttagacaatgcacacagtcgagcatttactgtagcaaaagttgcacgcatagatatcttacaagatataagaaagtcccttatagtcgcgttagaaagcggtcagagctttgaaaaatggaaagctgatataacaccagtcttgcaggaaaaaggctggtgggggcaaaaaacagttattaatcctgaaggtaaagaacaagaagttcagcttggcagtcctcgccgcttacgcacaatttatgaaactaatatgcagagtgctttctcagctggtcgttataaggctatgttacttggagcagaaacacgcccttattgggagtggcgtcatgtatctatcactaatccacgtaagcagcatgtagcattaaatggaaaaatctttaaatttgatgatccattttggggtgtggcgtttcccccatccgagtggggttgtaaatgccgagtgattgctagatcggcccgtgaagtcggtgaaaaagagattctctctggagaaggtttctcaaccgaaattaacgaaaaaattggtgttgatcgaaacactggagctgaagtctttgcaaaacgtactcagtttaaaatccctacaaaagatggaacattaacttttgcaccagctgcgggatttaacgggtcaccagctacaagtcatttaattgataaagttcttaccgatcgtgcaaccaaagcatttggcgatacatctggtctcaagcaagtggaacaaattctaacgaccccaactcgaatgaaagctcatgaagcttttgtgaacaatgctcaaagctttggtagaacacaatatcaaacgagcactgttggagtgttgaaggttcctgatttagattttcttaaaagcaaagatgtgaaaattgatagtccaattatggttattagtgatcacttattgctaggtaagaaagctaaacgacatgctgatgctggtaacgcccctacacttcaggaatggcttgagttaccaaaattaatgcttaagttgcagcgtgtactttgggatgtaaaaaatgagagtgttttatttatattgccgacacttacggaaggttcagaaattttaaaattatctgttcgttcaaaagatggggtcatggaaattgtgagtatttttaagattaacccgcaggctttagaagatggcttaaaagcaaaacaatatgaatctattcgatga

SEQ ID NO: 48825 - DNA, 1593 bp, Acinetobacter baumannii
ttgtgcttaatttttgatatggctaaaaatcctaagaactctaaagaatctcgtccagcgttagaaactacacaaactgctgaaattgcttggctaactaatgaatggcaagaacaccctgttgtcggactcacccctatcaaattacaccgtcttttggttgagtctgagcaaggtaatttgcaagcacaagcagatttgttcagcgacattatagagcgtgatggacatatttttagtgaaatggataaacggatcaagggtgtaaatagcttgtcttggggggtacgtgcgccaaaaaatgctaatgatactgaacgtaaaattgctgaagaagtgcgcgaatggattgatgaaattgaaaattttgagatgtttcttctagatgctctagatgcagttggacacggctatagctgtcaagaaattgaatggcatcgtttaggcaatatttggcttccaaaagcctttggttatattctccctcgaaattttatgactccgcaagaaaaaccaaatgaacttaaaatcaatgacggttctattagtggcttagatttttgggattttggttggttcattcaccgtcataaagcgaaatcaggttacatagcaaaatccggattgctccgtgttttaagttggccttttttattcaagaactatggcatccgcgatgttatggagttcttagaaacgtatggtttaccaaataaaattggacagtatccaccgggagctacagctgaagaaaaaaacacattgctccgtgctgtaatgatgcttggaagaaatgcaggtggcattattcccaatggtatgtctattgactttaaacaagctacgaatggtgatactaagaaccattttgacttagttagttggtgtgaaaaaactgaatcaaaaatcattgttggtggaactttattaagccaagccgacggaaagacaagtacaaatgctcaaagcaaaacacatgaaattcaattcgaagctattattaaatcggattctctacaacttgcacgttctattaatgattgtttagttagctatttaatgcgtctgaattatccgaatattacccccgatcgatatccaaaattttattttgatactactgatacagaagacttagaaacttttagtaatgctttaccaaacctcgttaatattggtatgaaaatacctgtttcatgggcgcatgaaaaattaggtattcctgagcctgaggataacaaaacgccaattttacaaagtgctcaaacagcacccaatcttgctgcaaatacttatcaaccacaacttttaaatcaatttttagctgcaaaccaagctcaaataccactggaggatcaggcacttcaacttttattgaacgaacaaactcaacagagtcaaagtgtctctgaacaatggttaaaacctcttattcaaaaaattcagaaatctcagaatgaagatgagcttttactattactgtcagatttatatccagaggatgatgaaccagcactacaagagaaacttactaagttaatttttgctagtgaaatgctaggtcggcttagtgtcgaggaggagcaaaattaa

SEQ ID NO: 48826 - DNA, 768 bp, Acinetobacter baumannii
atgaaaactagcccgattgttccgtggcttggcggcaaacgtcgacttgtgtcgcaacttattaaaaaaataccagaacatcaatgttatgtagagctttttgcaggtggtgctgcactattttttatgcgggaagaaggttcaaaagttgaagtcattaacgatattaatggtgatctcgtcaatttatatcgtgttgttcaaaaccatttagaagagtttatccgacaattcaaatgggcgcttgttagccgacaaatgtttgaatggctaaagaatgctagcacggatttgatgacggatattcaaagagcagcccgtttctactatttacaacaattagcatttggagctaagacatcaggccagagttttggaacagcaacaacatccagaccaattaatcttttaagaattgaagaacagcttagtgaagcacatttgcgattatcaggtgtgacagttgaacatttgtcatgggataagtgcttaatcaaatatgatcgtcctcatacatttttctacgcagatccaccctattggcaactttctggatatggtatggattttggaatcgaacaatatgaacggttggctgaactcatgaaaaactgtcagggtaaaatcatgctttcaattaatgatcatccagacatacgagcaatttataaagacttcaatattaatgagactaaaatttcttacactgtagggcgtaaatcacaaagccggggagaaaaacaggaactgatagttactaactattag

SEQ ID NO: 48827 - DNA, 768 bp, Acinetobacter baumannii
atgattcaacctaacccaaataaatccattaatagttttgtttttgattgtcctgtttgcaatgttaaacatactacttttgatgttaaaggctgggggaatcctgttaaaggtccaaatgaagagctactatttcagctattttcagtatgccgtgcttgtaaaatggctacttgtataactgccactgtaaatgaagcgtatgtaaaatcattttcactaaacttagggatgcgtagtaatgaagaaaatcccgttatacctataatgcaaaaaattcttactgaacaagagcgtgatcttagaatgtttttcagtgagtttagatttattccagtgattcctaacaaagctctggcacctgaacatttaccatcggatttagaaaagattttcaatgaggcttctaagtgtcttgcaattggttgttttaatgcttctgcagcaatgtttcgattatgccttgatattattactaagcatatagtaaaggaaaatgaaagtttgcaacctacaagagatgataagaaatctatccataatcgtttaacttggatatttaataataaatttttaaatgcagggttggaagagttatcacgctgtattaaagatgatggtaatgatggtgcccatgatgggaatataggaaaagaagaagcagatgatttatttgatttcacttatgaacttttagagcaagtttatacccaacctgaaagaattcgattagcaactacaagaagattagaaagacgtaaatcgtaa

SEQ ID NO: 48828 - DNA, 336 bp, Acinetobacter baumannii
atgaaaagaaatagaacttgcttgaaaatattgcgttatagaaaagatcacccatttgttttttatttcttgcttgcttatctaggtgggatatttatttatatattaatctttcatgtttggttcgctgattatagtaagccaatgccattaaatgaagttggagacttccttgctggtgttttttctccgcttgcttttctatttttatatattggttataaacagaatagcgagtcaatcaggcttcaaaatgaagagttaaaagcaagtaccaaagcgttggaacttcaagttaaagaaatgcaagaatcagttgaacaacaaaaaaactag

SEQ ID NO: 48829 - DNA, 432 bp, Acinetobacter baumannii
ttgggaaaacatatttctgttcaaccttattttaatttgtttataggaccttttgagacatatccttatagtaatgcactctacgatgcaaacggcaactttaaggaggttgtggcttttaccaaaggaagattaagtatagacatgcaaaataatggagaagtagcgagacatataagattaattcacgcaggtaaaaaccaagttattttccgcagaattgaaattataaaagggcaaaaagatggtgtcctttttgatattgagaatgatgaatttgaaaaactcaaaaatgagggatttatagaggtactttatagacttgagtattctgatatttacggtaaaccctataaagaatctatcaaagcaggtatatcaaaaagccacaaagataaatattttattaattatcagattattactgcttaa

SEQ ID NO: 48830 - DNA, 1560 bp, Acinetobacter baumannii
atgaccacagttgaagcttccccaatagaactattacaacctgattttgacagtgatattcctgcagtcctcttgccataccagcaagaatggattgcagataaaagtccgttgaaaattggtgagaaatcgcgacgtattggtttaacttgggctgaagctgcggacgctgcattagagtgtgcaagtgaccgttcagcaggtggtcagaactgttattaccttggttataacaaggatatgactgttgaattcattcaagcctgtgctatgtgggcacgtgcctatggactcgctgctgaagaagttgaagaaggtatttgggaggatggagataaacacattcagacatatatcattcgctttccgaagtctgggtttcgtattgaagcactgacaagtcgaccatcaaatttacgtggacgtcaaggacgagtgattctggatgaagctgcattccatgaatcgttagatgagcttctaaaggctgctcttgctcttttgatctggggtggttgtgtacgagtgattagtacacatgatggtgaagataatccatttaatgaactaattaatgaaatccgtgctggtaaacgtaaagggactattcatcgaactacattccgagatgctgttgatcaaggcttatataaacgtgtatgtatgcgtgaaggcattgcctataatgagactgaggaagccttatgggtacaggaagtttatgatttctatggcagtgcagcagatgaggagttggatgcgatcccctctaaaggtggtggtcgttggctgccgcattcactacttgaaagtaaaaaagacagcactgtaccagtcattcgttttgaggcacccaagggttgggatgactttagtaatgtgagtgaagaagcccgaaatgctgaggtgcaagagttctttaatgagcacttaaagccattgattgaagcattacctaagaaactgaaaagttactatggactggatttcgcgcgtaaacgaaatgcatgttcgttctggcctcttgttgaacagcaaaataccagaaaacgtattccattcttatttgaaatgttcaaagtcccgtacaaacaacaagaagagtttctgaaacttattgttgggttattacctaattttagcaaaggcgcacacgatgctggtggtaatggtggttatttagctgaagcaatgcaggtcaaatatggcgagcgaattgaagctgtcatgctgacagaagcatggtatcgagaaaatacaccccactttaaatcatcactggaagatggtgatattgagaacatgccagccgatcaggatgtcttggaggatcaccgggcatttgtaatgatcaatggtgtggcacgcattccagcaatggggaaaacaaactcaaataataaagatcgacatggggacagtgctattgctcatttgctggctgactttgcaagtaatcatccatcagcacctattgagttcaccccccttccatccagagaagatatagaggtgaaccctgatgactatgattggtataaggagacgggatgtttttaa

SEQ ID NO: 48831 - DNA, 549 bp, Acinetobacter baumannii
atggcgcgtgaatcctcaatagatcagttaagtaacgatgataaagcatggcttgataagcggtttatggatcaaggcttttgtggttatgaagaaatcgcgaagattctacaagagcgtggttatgacatcagtaaatctagtgtccatcgttacgggcaaaaagtagaacaaaaacttgccgcagttcaggctagcacacaagctgcaatgatgattgcagatgcagctccatatgatagcgatatgcgtagctctgctgttttgtcgcttgtacagactgaattatttaatgcactcattgcattgcaagaatcagaaaatccggaagcagatccagcagatcgaattatgcttatggcaaaggctggtaaaggaattgcagaaatagccaaagcttctgtaaatcagaaaaaatgggaatcagaagttaaagagcgtgttcaagctgctgcaaaagccgtcgataaaattgctaaaaaaggtggtttatctgctgaaactgctgctgaaattcgtaaacaaattttaggtattgtagaaaaatga

SEQ ID NO: 48832 - DNA, 312 bp, Acinetobacter baumannii
atgtcttttgatatgcaaaaaattcgtcgtgaaggcatgcgctggcatttgctcaatgccttagataaagcacgccctttaggtgcattagatactttattgcttgatgttatgcgcgccttatatcacgatacgaccccacaagaattacatgttcaattggactatttggaagagcgtaagctggttgaaattaaaaagaatccagatggtcattggcatgcaaagcttgaccgtttaggcattgatattgttgagtacacaattgattgccaagcgggtattgcccgtccagagaaatactggaactga

SEQ ID NO: 48833 - DNA, 342 bp, Acinetobacter baumannii
atgaccatacaacttgaaccctatcaaatatttatcattctctcgactgttattagtacagtctggggaatgtttaaactattaggtaatcaaattagtaatagtattcagcagaattttgaatcaacaaatcaaaaaatcgaagaagtctctcgccaacacttgaagggacaagaagacttacgaaagcttgagcgtgaatttcttcagtttcaagctgatatgccatttcgctacattgcccgtgatgactatattcgcggtcagaccattattgaagcaaagctggatgctgtagcacaaaaacttgaaaaagtacaaattaaacaggggttagaataa

SEQ ID NO: 48834 - DNA, 360 bp, Acinetobacter baumannii
atgagtcaatggaagcgaaattttcgacgtcaaatcgcccaaaaacaaaataatttggtaaatcaaaataagccagttgaaacacaaactgttcatggttctactatgcagttcggagtcttagtccacaattggcgtacaggttggaaatggtttagtaacgttgcctttgctggcattgtggcagttcaaactttttatgacacattgccacctgaattaattgcaacattaccaacagacgcacaatccaaaataactttaggtttggctgttttgggacttattggtcgttttattaatcaaactaaaccgaagcctttgccacctgcatccgaaacgattaaggaggatgcatga

SEQ ID NO: 48835 - DNA, 501 bp, Acinetobacter baumannii
atgcaaatcacttttgatgaagtgtttgagcgcaccattggtcacgaaggtggctatgtaaataatccgaaagacccgggcggagaaaccaattggggaattactattgcaacagcacgagaaaatggctttacgaactccatgaaaagtatgactcgtgcacaggcaaaagaaatttaccgtgttgcattttggaagcgtgcaaaatgcgaccaatttactggtgctatcagctatcaaatttttgatgctgcggttaatcatggcattggtaatgcaatccgtatgttacagcgggctgtaggtgttttagatgatggtaaagttggtgataaaacattaggtgctattaaaaaaatgtcacttgatgatgttttagttctatttattgctgagcgtcttgagttctataccaaactttccacctttaatagtttcggacgtggttgggcgcgtcgagtggttggcaatctccgttatgctgctggagatacgccatga

SEQ ID NO: 48836 - DNA, 435 bp, Acinetobacter baumannii
atgaaacaggacgaatatctacacaagctaccagaaaaccttagagttattattcaacttacagactaccgaactgcgatgattttaattgagcagtttggtggatctgattataaattccctcccctcaaaaccataactgaaagccatgaattggctgaattacttggtttcaataatttgaaaaaattatgtcagtattggaatggtgatctcgtatatatacccaaatctgaccgttatcttggtgttttacggaataaacggattgagcaggatctggaagaaattggggctaatactgaagcacagaagtcattagctaagaaatacaatgtaacttcacgttggattcgtcaagtccgacataatatgttgaataagaaaaatgactcatttgagggtccaagcaatcagctagatatgttcgcctaa

SEQ ID NO: 48837 - DNA, 441 bp, Acinetobacter baumannii
gtgaaacagccctcgcgtaatcaacgtctggctgcaattcacatgggtaaaaccaaacttggccttgacgatgatacttatcgagacatgcttgagcagatcgccggaaagcgatctgcaaaagacctaaatgatgatgagttagttaaggttttgcagcatcttgaatcccttggatttacaaaacgtgaatttggtaaaaaaccaaaggttaaactaagtaaagaagccttaatttcaaaaatagaagctcttttaacagaaagtaatttacattggaattatgctgtaggtattgctaaacgtatgtttcagaaagaagcgttagaattttgtacggaaaatgagctatggcgtatagttgcttcattagagtacagaaagaagcgagttacccatgaaacaggacgaatatctacacaagctaccagaaaaccttag

SEQ ID NO: 48838 - DNA, 432 bp, Acinetobacter baumannii
atggctctaaccaaagaagaaaaagacttcatccttaaaagattaaacagccagtggtatccagtcgaattggaatgtgatggctatattgttcatcttaaactcgaacgagttcaagatttaaaacttgctgtagaggtttttgttaatagttttgttaaaggtgaatggctggtttatcccgacaagcatgttgaaagtaaattttttccaagccgctttgtttatgtaattagtcctgctaagaaaaaacaagctattaaaaggctcggtaagaaacgcgcttatgaattttatccggatttggataaaaaaattgagtacaaaggaacacatttttcttcaggtaaaactgcattaaatcaccttattaaagttagtgactcaataaaacttattacggagatggaaagtgaaacagccctcgcgtaa

SEQ ID NO: 48839 - DNA, 204 bp, Acinetobacter baumannii
atgatgattatccccttttatcttgtttttataattgggctttacagttgttgtaaaacttcaaaacaggcatggcttgctagcaaagaattagctttaccgccttttgatcaagtgattttgaaagtaaaagcagctgtacctctattactgtcattttgtgccctatgcggcttgttacaagctgctttggaggtactgtaa

SEQ ID NO: 48840 - DNA, 150 bp, Acinetobacter baumannii
atgaaaaaatgcactttaggcgatcggcataaatggaaacacattaaaaacgtacaacgtcaatcaattaatggtcgtagtgtgcgtattagccttcaaggtctgtatcaatgtgaatgtggagcaaaaaaatatggtgagcatcaatga

SEQ ID NO: 48841 - DNA, 309 bp, Acinetobacter baumannii
atgaataaatctgacttaatcgcaaacattgcaattgatgctgaattaacaaaaacacaagcagcagctgcactacaagctgtagaagatgcaatcactgctgctttagctgaaggaggtagtgtttcttgggttggcttcggaactttttctgtaaaagaacgcgctgcgcgtacaggtcgcaatcctaaaactggggaacaaatacaaattgcagcgtcaaaagtgccttcattcaaggcaggtaaagctcttagagaggctgttaacaatattgatgaagatgatgatttagatatgcctttctaa

SEQ ID NO: 48842 - DNA, 504 bp, Acinetobacter baumannii
atggcacgtaaatcacttaaagagccacaacttcaaagctgggaagccgtagatcagacgcttgcccaaatggcagaccttaaccgcgacatcgcacttgaggaagctgcatgtaatgagaaggtagacaaaattaaagaggcaacaaaagagcgcctcaaaccactacttgaacgagttaaagcccatgagcttcagcttaaggaattttgtgatcaccgtaaaacagagttttcacaggtaaaaagtaaaaaactgacacatggctcagttggctaccgtttatcaacaagcgtgtctattccagacccagtttttacatgtcaggtgcttaagcaattacagcttgatcactgcattcgtactaagactgaacccgacaaggaggctatcaaacaacttaccccagaactaatcgctgaaattggtgcaagtgttaaatcacgcaacaactttggctacgaaattgaaactgttgacccagctgctacagctactcactga

SEQ ID NO: 48843 - DNA, 231 bp, Acinetobacter baumannii
gtgaataacgaaactaaacgtcaaaagtttgcaaaagatttagacaaattaatgagtggtgattatgtgcttgtacctcgtgagcctacagacgcaatggttaaagctggcaatgttgccatgaacccacatcgtgctcaatgggtgcatcctgtgacatgtacaaatcgtaaaaaagtatacaaggcaatgatccaagcctatgaaaaagaacaaggagtaaatatttaa

SEQ ID NO: 48844 - DNA, 213 bp, Acinetobacter baumannii
atggctgacttagtagatgttgcttctgaaatcattgaagcaaatgtggcttataccctaagccatacaaagcgctttgaaaatcaaagcaatcatgagtgtgaagaatgttgtgctgtgattcctgaacagcgacgaaagcttggtggcgttacccgttgtattagttgtcaaaccgaatatgaagcaaagcagaaacatataaggggctaa

SEQ ID NO: 48845 - DNA, 363 bp, Acinetobacter baumannii
atgccaacttcatcaaagaagctgcctgtatctgaaatggaaccgtggaagcagcttgtgtatgcccgtattgatgagttgggcagtatcaaaaaagttgctgatgagctgggttatgcacgcccaagtctttcactcgctttacgagataaatatgtcggaagtacagagaaattaatcaaatgtgtgatgcgtgtacttgggcaagtgcaatgtccctacctccgaaaaagcatcagcccgagtgagtgcagtgcctatcgtgaacgagaggcaccgacacaaaacccagcagaaatgcgccattggagagcatgtcaaacctgttcaattggtggcgtaaacagaaaacgaattacgtag

SEQ ID NO: 48846 - DNA, 246 bp, Acinetobacter baumannii
atgaataaacagatgcaatcaacaactgttctaaatggtcaaaaagagcaatttgttcaaggagatcgtgctcgccttttatctgaacttgtatatcaacgtgattgtacaaaacaagcagaacttgagctggtgtacagcaagaaattttaccgaaatcttgtcgctgctttagttgtcttaatcgtaattatgtccggggggctatggtatgccaacttcatcaaagaagctgcctgtatctga

SEQ ID NO: 48847 - DNA, 675 bp, Acinetobacter baumannii
atggacagcgcgttttttacacccaattctaaatcaatggttatgggcaaaaattcaaaagtaaatacatacgaacctccacatcaacgtgtgtggaatgaaatacgtcagcgctcagaagggttcacccttcttgaggtggctgaagctggctcgatgcggattaactctgcacgagcatttattgacggtcttaaagccgctggattcttgagcgtcatttcagaaaagcctactcgttaccgacttgaacgggatagtggctatacacctcctgaaatccgaagagatggttcattcgtaaaaccgaaaaactctgaacttatagagaaggcaatgtggaatacattgcgaatcacacgagcagctgtaaatgcccatgagcttgctgctctttcaagtaatgatgaactaaccgttcccacccatgtatcggaagaatacttggtgatgttgtggtgtgcgggttatgtctcaaagcttggaactaaaacagacaaaaaaacaaagtatcaacttttaccagacatgaacaccggctcaaaaccaccgactattcgtagtatccgtcaagttgttgatcagaacacaaatgaattgatgttccaaggatcacatgtttttgaacaggaattaaagcacggttctctattaaagcaaggattaaaaaaatga

SEQ ID NO: 48848 - DNA, 756 bp, Acinetobacter baumannii
atgacatcaaatgtcaatccttcaaattctactagcggtatcgctcatattcgcaatattgctcagtgttatgaagcagttagtcgtactttacagcgcaatcctttattgccgggcatttctgcattctatggcccaagtgggtttggtaaatcaactggagctaactttgttgcaactaaaaccaatgcattctatgtgcaagtgaaatccacatatacaaagaaagcatttgttcaagccttactccgcgaaatgagcattccacctcaagcaactttaagcgacatgatggaactcgctagtgcagaacttgctaaaacaggtcgcccattgattatcgatgagtttgaccacctcattcaaggcaataaagttgaaattgttcgtgatctttatgaatcaagccaaggtactttcttaattattggtgaagaacttttaccaagaaaattagagaaatgggagcgttttcatggtcgtgttttgaactgggtgccagccttaccttcagatatcaatgacgctttgttattgagccgtgtttatgcacctcatatcgaaatagacattccagttctagaacaactcattgtagcagtacgtggttctactcgacgggtttcaacgaatcttgaaatgctacatgagcagtgccttgagcaaggtatcaaccgagtttcaccacaagagttgaaagtcattttacctcatggatttgtaactggcgaaagccctaaaccacggagtttctga

SEQ ID NO: 48849 - DNA, 2151 bp, Acinetobacter baumannii
atgaaaacacattacagtattgctgatttattagatttgaacttatccgggttcccaaccacaagacgaggatgggaaaaatatgttcaaacaaacaatctgaagtatagagaagttccaagtcgtggaaaagggggagttcgaaaagaatacgaactttctaacgaattaaaagagcaattagttcttaaaagcattcaagagaatgttaatgaagtggctcattccacctcattgaaagttgattctaatactacgaaagttaatgcagcagaattgatgaactggcaacgtgaagtcgctgaaaatcgtttgtttattgttcgctatattcagcagcaaatgaaacaaggcgtattgaaaacccctgccattgaacagtttgttgagaaggcatctttaggatcattaccaaatgaaattttagaggctattgcgaaaggaaatgctaaagcaggtgaacatcgggctgttagccgtcgatcagtctttgactggattaaagcagtagaggaagcagaaaaacgcgatatccctgttattgccgttcttgctccaaaacaacgacagatgactatcccgaaatgggcaggtgctttacttaaactttggggccaacctcaaaagcctacattgacagttgtattggaacaacttcctcaatatttggatgccagcattccctgccctacttatgcgcaggcataccgttttcttaatgagaaaatgggaaatgttgacgtgcaaaaaggtcggatgggtaaacgcgaattaaagaatattcagccctttattcgtcgagatacaactgcgcttttaccgacggatatctatacagctgatggacactgttttgatgcagaagttgctcatccgcaacatgggaaacctttcagacccgaactcacatcaattattgatgtggcaacacgtcgccttgttgggtggtcaatagctttatcagaaagttcttgggctgttttggatgcaattcgtatgagtgctactgaatgtggaattccagcaattttctatgttgacaatggttctggttataaaaatgacttactgaaagcacaagggcgaggtgtcttggctcgacttaataccgaagtaagccatgccctcccttacaactcgcaggcaaaaggcctaattgaacgcagtcaccaaactatttgggttaaagctgccaaaaatttaccaacttatattggtaaagatatggatagtgaagccagtaatgctgtgttcaagcttacacgtaacgaaattaagcgttatggcgaaactaaagcaatgattagctggttagattttgtggattatgtagctcaagtagttgagcaatataacaacaaacctcatagcggcctaaagcgaattactgacccagtcactttaaaaaaacgctatcaaacgccgttagaagcttggaatgaagcgttagaacaaggcgctccaattgatcgcgtcgaggattgggatgcagaagatctgtttcgtccttatgaagaacgtaaggttcgtcgaggtgaaatcgatcttttcgggaaccgatatttcagtgcagatctggaacagtatcacggtgaaagcgtccttgttggatatgacattcatgacgcaaatcgaattgtagtacgtgatgagaatggtcgtctaatttgctatgcattttggaatgccaataaacgtaactacttcccagtttcgaaagttgaacaagctagagctgcacgtgcagatggccgtatgcgtcgtttagctgcaaaacaatcagaagtattggaagaaatgagtccaaaagcagttattgaacatgttgaaaatcaaacgattattccatttagcatggataaacgcgaacaaatcatggctgagttggaagcacttccagtgcaaaagaaagatcaagaaatcatttatttcaaagatgctcgtttacctgaagaacctcagcaagagcaaacaacttcactttctccagtacaacgctggatagctatagataaccaaatcttaaatggtaaggaggtcacagaacaagacagaacattctgggaaatgttccaagtttctaagaaatttaaacaaagcagcttagatgacgaaacgctcaaaacgcatttagagcgccgtcaagcgtga

SEQ ID NO: 48850 - DNA, 276 bp, Acinetobacter baumannii
atgggattcgagcaaaaacccacagaacattgggataaatacagcattaaagctgaaattgagcgtagaggtaaatccctaactcaattagcaaaggacaataacttgcctgcacaaacagttcgtaatgctctttgccatcccagtaaaagtggagagcttgttatctctcaatttctaggaaagcctttgcatgtacttttcccagaacgttggactaaagataacaagcgtttatatccacgctacagcaacagcaagaaggaatgtgcttaa

SEQ ID NO: 48851 - DNA, 744 bp, Acinetobacter baumannii
gtgtctgatattgaagataataaatttgttcgcttttctgattttgatattgcacaaggttcgcaatttaaggaatttaattacgaacaagaaaaaactcctatacagaagcgtttgtattttttaatgcttaatggaaagcagccaagaggcgataaagaatcactttatggatggtgtgcaagaataggtttatctaaatcaacagcttttggaattttttccaaaggtaatcaaaatatgcatctttcagttgctcagactatctcagatgccacaggagcagacgtagattggattaagaatggtactggtgtacctttcccaatttattcaatggacgagattattaataaacaaatagaagaagctatagaagaccagattcttgagactagtataaatcctgagtttgatgggcttgatactcaacttttacaacaggcttttgatacccttgataaggctttaaaagttacaaaacggagtatgtcacctaaggctaaagctaagtttgtagcgagcctatatgacaatctttctgaacccggaaatgcaaaaattgaattattacaggaatgtatagagacggttgagcaagcactactcgacacacgacgtataatgtcgtcctctgctaaatctgaattgattttaattatctacgatttgtactatggcaacacagcttataaagaagcgatgaagacgacattagacgagttaataaggagtacaagctga

SEQ ID NO: 48852 - DNA, 285 bp, Acinetobacter baumannii
atgccagaaaccactacaccaagcctagatgttcaaacactgaaaaatgctgggcttaaattaccaaagaaagctttagatatatttctaaatgaatcagaacttcaaactataactttagaattaaaaattgctggaagtgaattatttaaactggagtttgtcctagatgatcttcaattgccgaataaaacaattactaagacagtaggggcgactgtcgaaagtttattaaatcaaatacccgctattcagcgagtgcaaaataaaatacaaatttcttaa

SEQ ID NO: 48853 - DNA, 741 bp, Acinetobacter baumannii
atgcaacaaaagcaccccggtagaacactcgtcttatggattatcgcagctcatctatttatgggaatggttgcatacgagtggctacctgtgagttttagaggaagttggatttttattcttattcttttaatttcaggtgcttttttagaagtcggtttgtctttaattgtaggtttagtcgcttttattgggggtgccgtatactttttactcgacttaggcgcacaaacacatattgaacgtcagttacttttattattcattattcccctaataccgctctttctaagtgctgtacgccacaatattgaaattaatgtacagaaataccgtgatattcaaagctatgaccgaaattatcgccgcgatattttcccgctaagtgctttaaaatactttcagcgtagtttttttaaattacttgatcaccacaatgtacaagattatgaagtattcgaaattcgaattcttaatcgcagtctgattaaagaaatgttaggcgatgatgtctggaaaacaactcaaaatgaaatgattaaaattttgagccaacatgaacccaacgaaattgttttccagtttgcagatgatgatctggaaaatatttacagtattatgattcgccagcagaaaacagaagaagaccctgtattcttaaaaaaattaaaagaaattacgactttgcgtcttgaggtggaatacaaaattgttcctcttccacctgaggagatgagctaa

SEQ ID NO: 48854 - DNA, 981 bp, Acinetobacter baumannii
atgaatataaaaccctttttatcctgcgttgttccagcctacaacgaagcagaaaatttaaaaacatttattcctgctttggcaaatagtctaaaacagcaaaatcttagctatgaaattattgtggtagatgatggaagtaaagacgataccattccaattttacaaacaatgattgaggattatcctttagttgtgctggagctttcacggaactttggcaaagaagcagctttaagtgctggtttagaccatgtgactggtgaagttgctctactgattgatgctgattttcaacatccatttgaagcaattccaaccatgattaatctttggaaaaatggttatgacatggtctatggtattcgtaatcgtacaaccgaatcatggcttaaacgtgttttaacccaagcttattaccgtattttaaacttaagttcacctattgatattccagaaagtgctggagacttccggctactcgatgcaaaagttgttgaagcaatcaaacagttaccagaaaaaaatcgttatatgaaaggtctatatgcttgggttggctttaaaagtataggcattaatttttctgagcaagaacgtcaacatggccgttctagcttcaacttaaaatctctttttaacttggccatgtcaggtttaacgggtttttctgatttacctttacgcgtatgtatttacttaggtgcaattctggccttaggtgcgatgagctacggagtgtggattatcattaaaactttgattgagggaatttccattccgggctgggcaacacttgcggcaggtatgacgctattaggtggcattcaattattattcattggaattttaggtgaatacattggccgcatttatgctgaagttaaaaaccgcccaaaatatattatttctaccgaacattctcgtactaagcaggaacattcaatcacccaccaagaaaatacgttctctagtttctaa

SEQ ID NO: 48855 - DNA, 2715 bp, Acinetobacter baumannii
atgagcgtatcggaaatccgaccgattgccattgaggacgaactcaagcattcatatttagattacgcgatgagtgtaattgtatctcgtgcattgccggatgtgagagacggtcttaaacctgttcaccgtcgtgtgctttatgccatgcacgaattgggcaatgactataacaaagcctacaagaaatctgctcgtgtcgttggggacgtaatcggtaaatatcacccgcatggtgacttagctgtttatgaaaccattgttcgtatggctcaagactttagcttacgttatttattggttgatggtcagggtaacttcggttcgatcgatggtgatagcgctgcggcaatgcgttataccgaagtccgtatgactaagctggcacatgagcttcttgcagatttagaaaaagacacagttgactgggaagataactacgacggttcggaacgtatccctgaagtacttccgacacgtgttccaaacttgttaattaacggtgctgctggtattgctgtaggtatggcaactaacatggcaccacacaacatgacagaagttgtgaatgcttgtttggcttatgctgacaatccgaatatctcgattgaaggattgatggaatacattactggtcctgacttccctacaggcggtattatttacggtaaatcaggtattgttgatgcctaccgtaccggtaaaggtcgtttacacattcgtggtaaataccatttcgaagaagatgaaaagacaggtcgtacaaccatcgtctttactgaaattccatatcaagtaaacaaagcaagagttattgaacgtattgccgagttagtaaaagagaaaaagcttgaaggtatttcagaacttcgtgatgagtctgataaagaaggtatgcgtattgcaattgacttgaaacgcggtgaaaacgcagaagtcgttgtaaataacttattcttaaatacccagcttgaaaactcattcagcatcaacatggtttgtctagacaatggacaaccaaaattgatgaatctaaaagatattattgcggcatttattcgtcaccgccaagaagttgtgacacgccgtaccatgttcgaattacgtaaagcacgtgaacgtggtcatatcttggaaggcttgacagttgccttagccaatattgatgaaattattgaaaccatcaaaacttctgcaaaccctgctgaagcgcgtgagcgtttacttgcgggtgagtgggcaggtggtggcgttgttgcactacttgaaaaagctggtgcaatttctgttcgcccagatgaaattgaaggtgaagatccaaatcgtccatttggtttaagtgattcaatttatcgtctgtcaccaacacaagtaggcgcaattttagaattacgtttacaccgtttaactggtcttgaacaagacaagttacatgcggaatatactgaaattttaggtcaaattgctgaacttactgcaattttaaatgacttcaacttgttaatgggtgttattcgcgaagagttggcacaagttttacaacaatatggcgatgcacgtcgtaccgaaattgttgaatctcgtgttgatttctgccgtgaagatttaattccagaagaacaagtggtattaacggtttcgcaaacgggctatgcaaaaactcaaccactttcagactatcaggcacagcgccgtggtggacgtggtaagtctgcaacctctatgaaagatgatgactttattcaacatctgattgtggcatcgaaccacgcgaccgtactttgctttaccaacgtgggtaaagtgtaccgtttgaaagtatttgaggttcctcaagcatcacgtggggcaaaaggccgtccaatcgtgaacttgttacctctagatgcaacagaaaccgtaactgcaatcttgccattaaccgagttcccggaaaaccactatgtgtttatggcgacagcttctggtacggttaagcgtgttgagttagaacaatttgcaaacattcgttcaaatggtctacgtgctattgaacttaatgaagaagataccttaattggtgttgcgattactgatggtaatcagcaaatcatgttgttctctaacgaaggtaaagcaattcgttttgctgaaactgacgtacgtgcaatgggtcgtacagcgaaaggtgtacgtggtatgcgtgtaagctttgcaagcagcaccttaagtgaagaagatgcagatgtagaaaatgatgattcagatgataatgatgattcagcagattcaagtctagtaagtcgcatcgtatcgcttgttgttgtgcctgagacaggtgaagtactgtgtgcgagtgccaacggctatggtaaacgtactccagtaaatgacttcccgaccaagaaacgtggtggtaagggtgttattgcgatcaagacaagtgaacgtaacggtgagctagttggtgcagtttctattgatgaaaccaaagagttattattaatttctgatggtggtacgcttgttcgtacgcgtgctgcagaagttgcaatgacaggccgtaatgctcaaggtgttcgtctgatccgtttaagcgaagaagaaacgcttgttggcgtagtttcaattgaagctgtagaagacgaagaagaacttcttgaaggtgaagtagatacgactgaaactgatagcgaagaagctgtatctaataatgaagatacttctgaagagtaa

SEQ ID NO: 48856 - DNA, 1635 bp, Acinetobacter baumannii
atgacgaatggattaatgatgcattgtaatttaaatattacttcaatagtgcagcatgctttgacagtttacgcagatcaagaaattgtgactttgaaagcagatgggataagtaaacaccgatatacatataaagatgctttcgaacgtgtagctcagtttgccaatgcgctagaccgattaaatataagttctgatgctaaagtcggaacgatggcatggaactcatatcagcattttgaattgcactatgccattccatgtacgggaagaatttaccatacaattaaccctaaattggcacctgaacaactcattcaaattatcaattctgctcaagatgaagtgctcattattgaaccagattgtttggcattagttgattctatttatgacaatataaagccagtcataaaacattttattgtgctcggggaccccaataaaaacctaaaagcacaatttgactttgtcttttatgaagaactcattgctccagagcagtcttattatgattggccagatatccctgaagaacgtgcaagtggcctttgctatacctcgggcacaacaggtgatcctaaaggtgttctttattcacatcgtagtactgtattgcatgcattaatactcgctatgccaaatgcgattggcttaacgcatgatagctgtattatgcctttagttcctctttatcatattagtgcatggggaatgccatttaatgcggttttatcgggggcgaaaatcgtttggcctcactcatttgctggacaaaccgataaaatttttaatctgattcaatcggaacacgtagatatttctatggctgttcctaccatctggaattcttttaaaaattatcttgaagaacaccatatttcatcagtcagtttaaaacgtgcaatatctggtggttcagctgcgccatattcgcttattgagtctttgagccattatggaatttctgttgaaaatgcttggggaatgactgaaaccagttcaatggcagcgtgtaaccgagtagaccaaattaaaaataatatcgaaacccaatcgattaaatgcggtaaacctatcttcggtattcaaatgagactgcgtgatgagaatcatcaattacttcctcatgatggtgtgcatgaaggcattttagaagtacgtggtcatacaattgctaaacaatatattaatcaaccaaaagcaagagaagaagagggcaaatggttcgatacgggagatatcgcctgcatagatgaatatggatatatgcatattacggaccgtgccaaagatatgattaagtcgggaggagagtgggtcagtagtgttgaagttgaaaatgcagcgatgggatatgaaaaagttgcagaagctgctgttattgctgccaatcatcctaaatggggagaacgcccacttttaatattggtgccaaagtctccacaagaaaaaattgaacattcagaaattgtcatttttctatcatccaaattacataaatgggccattccgtcagcaaccatattggttgaagaaataccgcatacgcccactggaaaaatcagtaaaaaaatattgagagaacgttatcacgactatttcaccaatagtgcttttgctgaatgtaaataa

SEQ ID NO: 48857 - DNA, 999 bp, Acinetobacter baumannii
atgcaaattattcaatttgaaaatcgtgcaaatcaacgtgccgtcgcgaaagtagaaggcaacatggcatatccggttaaagatattcaatcggttcgtgatttagcacttttagcaatccgcaataaagtttcactggaacaacaagttgaggcgttagggtttgagtccgaaacttatgattattcatctttattagcagatttaaaggtactgccgcctttagaccatccagatccaacgcattgtttaatttccggtacaggtttaacccatttaggttctgcatctgcacgcgacaaaatgcatcaacaaaatttaagtgatgacaactcggtgaccgacactatgcgaatatttcaatgggggctacaaaaggggcgtccagcagaaggtcagatcggtgcgcaaccggaatggttttataaaggcgatggttcaattgtggtaagaccgggagcagagctgcctttacccccatttgccgaagatggcggcgaagaacctgaaatcgcaggcctctatgttattggcgaagacctaaagccttaccgaatcgggtttgcgctaggcaatgaatattctgatcacgtgatggagcgtcgtaattatttatatctggcgcattcaaaattacgtttttgtagttttggtccggctttacggacaggtgaactaccaaaacatttagtcggaaccagccgcttgcgccgtaatggacaaatcatttgggaaaaagagtttttgtcgggtgaagacaatatgtgtcatagcttggcaaatctggaatatcaccactttaagtatcaacaattcttaaaagcaggggatgtacatatccattatttcggtacagcgactctatcttttgccgatggtattcaagcacaagttaatgatgagtttgaaattgaaatgaaagagttcggtcatccactcaaaaacaaacttgctcatatgcaacccgaattaccgatcggttcagttattactctctaa

SEQ ID NO: 48858 - DNA, 378 bp, Acinetobacter baumannii
atgacgggtttctttgccttcagccaaaagtgttccaaagcctgttggggtaaacaccgccccaaggcccatacctgctgcctgaatacggcacgccagattgccttgcggtaccagttcaagttcaacctttccggcacggtacagttcatcaaatacataagagtccgactgacgtgggaaagagcaaatcacttttttaatagaaccggctttgagcagtttcgccagaccataatccccattaccggcattgttgctcacaatggtcaggtccttaacgccaagatcaatcagaccatcaatgagttcagcgggttgtcctgcggtaccgaaaccaccaatcagaatggttgcaccatctttaatctgcgataa

SEQ ID NO: 48859 - DNA, 867 bp, Acinetobacter baumannii
atgagtgacagcagcaatcaattgatgcccctgtcattgtctgcgcctggtgtaaaccttggtgcatatatcagtactgtcaatcagattcctattttaacggctgagcaagaaaaagagcttgctgagcgttattattatgaccaagatcttgatgccgcaaaaatgctggtaatgtcgcatttacgcttcgtcgttcacattgcgcgcagctatgcaggttatggcctacctcaaggtgaccttattcaagaaggtaacttaggcttaatgaaagccgtaaaacgttttgacccaaatatgggcgtacgtcttgtatcttttgccgtccactggattaaggcagaaatccacgaatatgttattcgtaactggcgtattgtaaaaattgcaacaaccaaagctcagcgtaaacttttcttcaatttacgcagcttaaaaaaatcgagtaaaaagctcacattagaagaagcgcagtctattgcaaacgacttaaatgttactccagaacaagttttggaaatggaaggtcgtttaacagcatatgatgctgcttttgaagctcaaggcgatgacgatgatgacactccgcacactgcgcctgtgttatatcttgaagataatcgttatgaccctgctcgtttagtagaaaatgaggattgggaagaacaaagtacatctgctttgcatgacgcaatgaaccagctagatgaccgttcacgtaatattttgcagcgccgttggttagatgacgataaatctaccctccatgagcttgctgctgaatataatgtttctgccgaacgtattcgtcagcttgaaaagaatgcgatggaaaaaattaaagtcgcaatgtctgcaagctaa

SEQ ID NO: 48860 - DNA, 144 bp, Acinetobacter baumannii
atgaaatctcttagaaagcaaaaacgtcgatttactttgaaagaacaccaaaaatcagaaatgactttagctgcgcaaattggtgaagctgtaaagaaaataattctgaaagataaacgacaaggaggcttactttctaaatga

SEQ ID NO: 48861 - DNA, 537 bp, Acinetobacter baumannii
atgccgattaataagcccacgcaagatacctataaaatttggccgtttaaagcagatttagaagatggtcgcactaatattggagctattgatttaaccaaggagcctgagcgcattgatgaaatacatgagcttcaatttacaccaagattaaagacagctatttaccacttgaataaagaaaacacagcttttatgacacttggatgtttaatcgagaaagacccagaaaaagaaaactgctggtgggcatatatcgagttctgttttagaccgaatattaatgtgtcaagtgtagatgtggatactctagacgaacaattcttaaattatctagccaccaaatattctagtgagttttcagaagctttaagacatcatctgatatgggaggcattccatgcatcaatttacgacaatactccaagtcgtgtgtattctgtgttcctaaatgctcaagctcctgaaaactacgatcaagcatacactcttttgattgaatggctccattctgaatttcttcatcttgcacaataa

SEQ ID NO: 48862 - DNA, 2565 bp, Acinetobacter baumannii
atggcaacaagttcacttggaagattaaccctagaccttttagtgaaattggggtcatttgaaagtggtatgagtcaggcagagcgaaaagccaaagatactgctaaaaacatgtccaatgcatttaagggttttagtgatcagttaaatcaaagcattggtggcactcaacttggttcattcattgaaaacttttccactaagttaggtgcaatgcgtggtggaatccttatggctacagcagctttatctggtatggctgttggtggcgcagcagttgctgcaggtggtcttgctgttctatccattcaagtagccaaaaataatgttgagttagctagatttgcagctttggccaatacatcagttgagacattccaaggcttagccggtgctgctgctacttatggaattactcaagagcaactatcagaccagttaaaagactttaacgagaagattggtgagtttgcatcagttggcggtggtgaaggtaaagacttctttgagcaaatcgcagttaaaactgagaagggagcagaaggagcaaaaaaactagctgaagaaatgtctaaaatggacggtgtttcagcactccaactctatgttgataagcttcaagaagctggtttaaatcaacaacaaatgtctttctaccttgaaaacatgggtaatgattttactaaattggctcctttgctcattaatggtggtgcgctttggaaagactaccaaaaggctatggaagaggcagggattatcaccggccaagaggctattgaaaaatctattgctttggcatctcaaactgaatcattgcaaatgcaattctcagctttaaagaataaccttgctcaagctgtaatgcctgctttaagttcacttattggttactttcttgaaggctctggaaagggtggccaattctcggggattgttgaagctgttggtatagcggcaaaaggtgcttctgtatttattattgctctttcagcaggtgttaaatccttagtccaaattattggcggggcgttaagtgttttaaataactttggaagaactgcaattaactttgtgacagcttcaacttttagagagaaggggcaggcacttgtagatggatttaacaataatggaaaaatccttgttgatactaccaagagtgtagttgagaacagtaaacaggcttttggttcaatttcaaatattgtcactaatcaagcaggcaattacgacaaattgactcaatcaattattaataaccgaaaagcccaattagagtggactaagggtgtgaagggtggtgttactgccggtatcgcccaaaacaaagcactaaaccctactgccaaaaaagaaacagccaaaaagacaaaagatgataagtctgctttggaaaaagccaagcgtgagcaagagcgtatagagaacgctcagcaatctatcatcatgcaatatgccgacaaagagcttcaaattaaattgaagtatgaggaagataagaaaaagattgcagaggcctttgctaaagacccagttaaacgtgatctttatttatcaaaggcagaagagacgtataagcgtgatgttgctgcattcaagcaagcacagcgtgaaaaatatgaatcttataaaaatgatcttttagcccagatggcagatgcagaagatgctattgcgctctcctcaatttctcgcagatttggacaaggtcacgaatataatattgccagcatgaatgtagcatcacgtaaggccaaagatgctgaacttgatgcatatgcaaacaacgtaaaccaaattaaccgtgattatgatgatccggctgaggctcaaaagcgatatgaattgctagagcaggcgaaagctacgcatatcgcaaaaatgaaggctctagatgttgattatcacgacaatgctcgcaagttaattgatgatcaacataacgccaccttaagcatgtatggagcattactctcccaaagttcttcagtttggggggatatgacccagatgattaaagacagagctggggagcaatctgctacgtataaagctatgttcttgatgcaacaagcaatggcaattgcttcggctttggtttctacacatttggctgccgcacaagtcatggctgatccttctgcattaacacttgctcaaaaaacaagttatgcagcaatgattacaggtttgggctatgcgaatgttggcctaattgcagcacagaccatcgctggtttctcatctggcggctacacaggcaacatgggccgaggtgatgtagctggtgtggttcatggtcaggaatatgtattgaatgccgcagctactaagcgagtcggtgttgatacattgaacgccatcaactctggtgggagtttggagagaacagtttcatcttctggacagcctgtcactattcaagtctatgtaactgattcaggtgtaaataccaatggtgctaatactcaggaccagaagcagcttgggcaaatgatcggcaatgcagttagatcaatcatccggcaagagcagcgacaaggcggtttattatcaaagtaa

SEQ ID NO: 48863 - DNA, 402 bp, Acinetobacter baumannii
atgaagaaactgtttttaattctgccatttttagctataggtggctgtgtaacacctgcgactcaattgttgaataataactttagtgaagttcagccgaaagctccaagtgccactggtatttggacagtttcaattggcccgggtatttctaccattaaactagatggcgatggaactggtgtgctatgtgaagacacaagcggtcatgttgttctaaataagatcaaatattctgacaatatgatctacgtacagaatggtatgacattaaaagttgccgctttgagtaaggaccgccttgaagcaaaaactacactaagtgcttttaatcagaatatgatttataaggcagataatgatttaaaaagcgcttcatctaaatgcgctaaagaactataa

SEQ ID NO: 48864 - DNA, 282 bp, Acinetobacter baumannii
atgaatggaattggggggaactcaatcgaatctgtaaaaatgaaccttactctttctgaaatacgtctttgggctgaatatgttaggatgcgtggaagtttaaatactgggcgcagggtagagcaggttataggctcatttatggccctttataggaatacgaacagaggcaaaggcagcaaagcagcagatcctagagattttatgcctcatgaaagcaaacctgagccacaggatctagaaagtttcttgaaggcaagtacaaaggtaggtaaggtgtaa

SEQ ID NO: 48865 - DNA, 363 bp, Acinetobacter baumannii
atggtgaaaagaaaaatggctaagaaaaatacagcattaagtttaaaagatattgcacaaggtgcattgatcggtgaaatccgtgaagcagtagtagagtttctgcacaatggcaaaacagaaacagtggatgtccgacttaaacagctaccatttgcagtgactgagccactgtatacacgcctgcaaaaaggtgaaaacgtatttgctgaatgggtttcattatgtcttgttgacgaaaatggcgatacttacttgactaaaaagcaggttgaagagaactttactcagcctctagcaaatgctttgttcccagtgattattggtcttgatgagattaagaaaaatagcgagggaaagtag

SEQ ID NO: 48866 - DNA, 462 bp, Acinetobacter baumannii
atggcagttttacgtacacaaggtactaacgtttttatctctgatggcacggccattactaaagcaatctgtattactgcaatcgatttaggcagtgatagtacttctaagcttgaaaatacatgtttagaagaaacaagttcaaagtcttacttaacaggtttgaatgatccaggtgacggttcaattacttttaacctagatccagaaaacgacacacatgttcaacttcttaaatgggcagatgcgcacaaagaattaactttctacattggtgcaagtgacggcacagcagagccgacaatcgcgacaggcacagtgacagttccaacgactcgtacattctggacttataaagcttcactagctccttcaactccaacatttgaagctgactcactcgtaagctaccaagtcacgatgcagcgtagcactggtgttcagattattcctaaagcttaa

SEQ ID NO: 48867 - DNA, 264 bp, Acinetobacter baumannii
atgacaaataatgttcctgcttacattgtggtggagtgcagaccaagcacagaagaagatggttatgccgatattgttattcataacgacacctacatttttgaaagtgtagagccgacagaaaacctgcgcgcagcaatgctaatagctattgatattgagcgaaccaagccaaaccatcgacacattacactgcatgccgaaagcatcctgaaactatgcaaaggcatacagggtgaaaccatagattccaacaaacattaa

SEQ ID NO: 48868 - DNA, 363 bp, Acinetobacter baumannii
atgagctttcttccaatttatcgaactctcaatgcagatgctgcggttaaggctattttgggcaatgatttgcgtgtttatgaggatttagcgcctttagatacgcctactccttatgcagtttggcaagaggtaggtggaagtgctgaaaatagccttgattgccccgctaagactgatcatgtcatgtatcaggtgattgtgtacgacactaaccaaaagcgtgcctatgaggcgcgtgaagcaattagaaaggctttggaaacacaaagctatatcttaaatccgcgaataagcaactacgaaacagacacaaagctttttgctcgtggatttgacgcaaattggtttttagaccgctaa

SEQ ID NO: 48869 - DNA, 495 bp, Acinetobacter baumannii
atggctggtgttgaggttaagtttgatggtattgaagagttatcgagaagaatgaagctgatagctgattccaaaacagcaaagcgaatagcgcgtaaagcagctcggcaggccatgaatattgtccgtgatgcagcgagaaatgccgcaaaatcaattgatgatcctgaaacgccagagaagatttttaaggaaattgtagttcagggcggaaaaacgcgtgatcgtaattcaattgtgattcgggttggtattcgcggtggtgcaaaaataccctataccaacaatgcacaaaacagaagatcgggaagggttggaaaaacctatcaaacagatggcagagtgttttattggcgattccttgagtttggcaccagtcgacaaccagcaaccccatttatgcgaccagcactagcaaacaatgttcaaaaggtcacagatactttcagtcagtctttcagtgccgaactagacaaggaaatagcaaaactatga

SEQ ID NO: 48870 - DNA, 348 bp, Acinetobacter baumannii
atgtcagatttagcacccgaacttagaaatagagtaattattcaagcatacacagagccgggccgtgatgaagatggcttcccaatagaaggcggttggtctgaatataaaaagctttgggctaaggtcacgccactttctgctaaagatttaattgcagcacaagccgaccaatccgaagtagttgcacgaatgaaaatccgttatcgggaagacatcacgacaaagatgcaagttctttggaaaggtcgaattttttcaattaaaagccaagctttagatgacagtgaagactcatacacttactgtactttcttgcttggccaaggggtagaaagatccaagtga

SEQ ID NO: 48871 - DNA, 288 bp, Acinetobacter baumannii
atgattactttagatcaggcaaaattacactgtcgcattgacgaagatgaagaagattcgttgattttaaaatggattgcagatgctgaagaggtaattcaaaacgatttagatcgtaaagtgattgtgagtgagtctgatcgagtagatgaaaccgatattttagataatgattggctagattcagcaagattaatttacgttcaatatcgatatagcagaagcacagaaggcaagcctagagcttactgggatttattacaaaaattcagaattatgggggtttaa

SEQ ID NO: 48872 - DNA, 171 bp, Acinetobacter baumannii
atgaagtacgaagttaaacgtgaacattttggcgatcagttttataaaactggtgacactcgggaagctgatccagcaacagtaaaacatttggtagacaaaggcgttctggcagaaccacaagaagaaaagaagccagttaaaagcacaaaacaggtgaaatcagaatga

SEQ ID NO: 48873 - DNA, 1200 bp, Acinetobacter baumannii
atgtctgaacaaaatctagaacaactcgctcaagagtttaagaaacacgtagataccgttaagggtattgccgaagagtttaaaggcaagcgtgaacatggcgacaaaatttcagaagatgcaaaaaacaaagcagatgaagccattaccaaatgtaatgagactaaagctcgtttagatgagctagagcaaaaaatggcgcgtcgaccaaatgaccagcctactgagcaaaaatctttaggacgtcaatttgttgaatctgagcaatttaaatccctcgttggatcagcaggtcaacgtggtaaagctaacttagaaattaaagccaccattacctctgcaaccacggatacggcaggggcagcaggtgacttggtccaaactacacgaattccgggcattattgctccacctgaccgaaagctaacaattcgcgaccttctaatgcagggccgtatggatggaaatgcacttgaatacgtgcgtgagactggcttcacaaatggcgctggtatggtagctgaaggaactaaaaagcctgagtctgaccttaagtttgaccttgtaagtacaactgccaaagttatcgcgcattacatgaaagcttcgcgacagatccttgatgatgcttcacaattgcagtcatacattgatggccgtttacgttatggtttggctttcaaggaagagcagcagatccttaacggtgatggtacaggtcaaaaccttttggggattattcctcaagcgactgcctatgttcgcccaactggtgtaacaccatcacaggaaacgatcattgatactttgcgctacgcaatgcttcaagcgattcttgctgaatatcctgcaagtggtcatgtacttaacccgattgactgggcaagcattgaaacactgaaagacacaactggccaatacattattggtaatccacaaggcactttaaacccgactttatggggccttccagttgttgaaacgcaagcgatcacagcaggtaagttcttgactggtgccttctcaatgggtgctcagatctttgaccgttggttatctcgtgttgaggtggcaacagagaacgaagacgatttcgttaagaacttggtgacaattcttgctgaagaacgtctagctttagcggtttatcgtccagaagcatttgtttacggtaatttggcaccggccgtaacgccttaa

SEQ ID NO: 48874 - DNA, 660 bp, Acinetobacter baumannii
atgactagaaaaagttttaatttagagatcaaagccgtccaagaggacggttttttttcgggctatggtgccgtatttggaaatattgattggtataacgacgtaattttgccgggtgcatttacagcatccatcgccaaatggcgcgccaaaaataagatgccgcctgttctttggaaccataacgatagtgaacctattggtgtctacacaaacatctatgaagacgaaaaaggcctttatgttgaaggcaagttacttatagatgacgtcccaagagccaagtctactcatgcacttttaaaggctggcgctatagacggcctaagcattggctactcaaccaaaaaggctaatcaacagacaaatggcgttcgcgaattggttgaagttgaccttagcgaaatctcgattgtcactcagcctgcaaatgagcgcagccttatcacgtccgtgaaatctaaattagatgatggcgaactgccaacattaccagaatttgaaaaattcttgagagagtcaggattttcaaaaaaccaagctactgcaatcgctagcaaaggcttgcgttctcttctgagcgagtcagaggaagaaatcaaagaagcgaaatcaatttctaatgctttaaatattttacaaggagtcagcaatgtctga

SEQ ID NO: 48875 - DNA, 1233 bp, Acinetobacter baumannii
atgagcgatttacaagacacgggtttttggactcgtttctggtcacgattgactggaagaactcaattaaaaaaaggggatacttcatatccttttgatagttatatttcgtcaggtggtgcagttgtaacgcctgagactgctttaaaactgtcagcggtttgggcgtgtgtgaaattacgtgctgaaactatctcaacactgcctcttcaactttatgatagtgaaaagcgtatagctgttgaccattatctttatcgtattttgcatgattcgccgaatgctgacatgtgtgctagtgagttttggcaggtacaaagcgcttgtttagacttgtgggggaactcattcaacctaatcacaaagcggtcaaatggcgaagtgatagccctagagccactttttccaagtgaaatgattgtaaagcgcaataaatcaggttcaattgagtttcattacactgagaacggcaagaccacaatttattctgaagacaagatcctccactttaaaggattcactttagatgggcttgttggattatctgctatccaattctttgcacaaaccattggtatgcaatttgatgctaataaccaagcacaagattggttcaaaaatggcttaaaagttggtggattccttgaaacaggtgagcaaacactaactaaagaacaacgtcaaagaatgcgaaacaacttagctgagtttagccgccctgaaaatgcaggaaagtacatggtacttgaggctggcatgaaggtgtcaggtgcaagcagtatccgtattaatcctgttgatgctcagttattggagtcacgatactttggtattgaagaaatctgccgtgcttttggggttccacctcagttaattgggcacactaataaggctagttcatgggcgtcaagtctagaacaaaccaatcagggctttttgacttatgcacttaaccctcaattagtgcgctatgagcaaacaatcgctcgtaagctacttttgcctcaagacaaatacaaataccgtcctaaattctcggtagatggtttgctgcgctctgacgtagctaagcgtggtgatttctacgtaaaaatgacgcagaacggtttaatgacgagaaatgaagcgcgagagttggaggatttgccagcatccacagatccagcggccgataaactcacggtacaaatgcagatggtgccacttggagaaaatcaggggaatcctcaatga

SEQ ID NO: 48876 - DNA, 1692 bp, Acinetobacter baumannii
atgacttcaatgtcaccagtctggactacagcttgcccagattgggcgacacgtattgttgttaagcagtcattaatgccatgtgagccactattcccaaaagtggcagacgttgcggagcgtatatttaaagagcttattcttgtagatgtgatgggtagcccaaagatgggcgatgtcacattggaatgggtgattgagtttgtacgagcgatctttggtgcatacgatccaaacactaagcgaagactaatccgtgaatttttccttctgatctccaagaagaatactaagtctacgattgcagcaggaattatgcttactgcattaattcttaatgatcgacaatctgccgaacttattattctggcgcctacaaaagaagttgctgataactcatttaatccaatccgagattttatacgcgcagatgaagaactaagtgaaagatttaatgtgtctgagcacacaaagactgtaacccatttgggtacaggtgcgacgcttaaagttattgcagcagaatcaaatgcagcggcaggtaagaaggcttcaatcatcttgatcgatgaggtctggctatttggtaaacgtgctaatgctgaatcaatgtttcgtgaagcaaagggtggtttagcatcacgtccagaaggctgtgtgatttatctttctaccatgtcagatgaagtgccgtgtggtgtatttaagcagcttttagactatgcccgtgatgtgcgtgatggaattaaagaagataaaagctttttgcctcttatctatgagttcccaaagtatttagttgaagcaggcgaacacttaaaacctgaaaacttttacatcacaaacccaaatttaggtgcatcggttgaccttgaatatctcatttcagagtttaaaaaggttcaagatgctggcgaagaatcacttcgagatttcttggccaaacacttaaacatcgaaatcggcatgaacttacgtgctaaccgatgggctggtgcagagttctggaatcaacaaaaacatgttttcggcttagaccaactaattgaacagtcagatgtcattacgattggcattgatggcggtgggttagatgatttgcttggatccgcggttttagggcgtcttaaaaaagatcctcgcatttggtggctttggaaccatgcatgggcaaataagattgctttagaacgtcgtaaagagaatgtccctaaatatgaggacttcaaatctgagggttctctcacagtagttgaccgcatcggtgatgacatcgaccaactagctgcaattgccaagaaagtctatgacagtggcaagctcaataagatcggactagatccattgggcttaggtggccttttagatggcttgcttgaggcaggcattccagaggaaagcatgtttgctgtgccacagggatacaagctcatgtcttacatcctcaccactgagcgcaagctagcagaaggaaatctcttccatgctggacaacagctaatgacttgggcagcaggtaatgcccgtgtcgtgatggttggtaatggtatgcgaatcactaaacaggaatctggtgtagggaagattgacccattaattgccacatttaacgcagttgctttaatgagccttaatccagttgccaagaatttagacattgatgattatttagaggacgtcgtgatagcatga

SEQ ID NO: 48877 - DNA, 156 bp, Acinetobacter baumannii
atgaacaatgaagaactactagagcaacttgaatcagttgctaactttatgcgtggcatgcagtttgatccacgtatcccacaagaagccaaagaagctttgagttaccgcgctcagaagattgatgaacttgtagagaaatatctagaaaattaa

SEQ ID NO: 48878 - DNA, 279 bp, Acinetobacter baumannii
atgaaactacaaacactcaagccgagattgcaaatacaacgtgcctcaagtaagaacaattggggttcaggtcgtggaggtcgtccttggcgtagactcaaggcaaagatacacctaagagataagtacacatgccaatgctgtggtgtagtcaccatggagcttgagttagatcacatcgttaatattgcacaaggtggcaatgatgatgaatcaaacctacagagcttgtgtgtaccatgccataaagagaagacattgaaggagagtagacaatga

SEQ ID NO: 48879 - DNA, 234 bp, Acinetobacter baumannii
atggtcaagcaattaagtgttgcgaatattgaatatgcaggtggtaaatctgcaaaaggaacaaaggtaaagctaagtgatggtagttacttggcaggtgttagctttgttgagactacagtaggtgttgatcaggtggcagaagttcttatccgattgactccagactttgagaatccaaatgaaactacaaacactcaagccgagattgcaaatacaacgtgcctcaagtaa

SEQ ID NO: 48880 - DNA, 207 bp, Acinetobacter baumannii
atgggtgtcgttatggcctgtaaaggatgcgaggaacgtcgtgactggatcaaacaacaattcgaactgtttaaagaaagattgcagttgcggaaacaaagaagtactacatctgctcactcagatagtggagcaaaacacaacactgattcagcaggtagcacagaaggatcaagtgatactggcagcactggaacagaacaatga

SEQ ID NO: 48881 - DNA, 411 bp, Acinetobacter baumannii
atgctaacgttagaaaacacagtggcaagcctgtctaaagatgaagctcaagatattatccatagtgcaaaagaccttacagaatcagaaaagataaaacttgtggatatgggttggtatcgtgactcaaaaggaggtatgtggccgccaactaaaggggatataatcagtttccctattaaaagaagtgacctcatgccaaaagaaaatccaataaaccaaaccaatcttgctattgctgctttatctgcaagctttgctaatgcaatgaataaaattgaccctcagttttcaactctattcttagaggaaatagagaatagataccatgaactacgtgagatggagttggtgcacgttgaggcaatggagaccttaacttggacccgagaatttattcagaataagtaa

SEQ ID NO: 48882 - DNA, 486 bp, Acinetobacter baumannii
atggaacctagattcgtcatcaaaaaccattctgacatcaactatgtaattggctatctcaatactaatcatgcaaaggcagcgagtgaagggaagcctttagttgttacgattacttgtaagcaagaaagcctttcagcagcacaacgaagattatattggctctggatgactgaatacggaaactatagaggtctggataaagaagaggcctcatcattctttaaatacaaatatctttcagtaatttataaccgtgacaatgttggtgaatatcctgaaaccttcaggactatgaaggaactcaaaaagactggtgcaagccaatatgaagctttgcggcagtttgttgctaataggatcagcatcacagaagcaacaacaaaacagatgaaagagttcttaaatgatatcgaaatcttttgtctaaaggatggtgtgaagctcacatgtccagatgatcttaaatatgtgatggagcattaa

SEQ ID NO: 48883 - DNA, 270 bp, Acinetobacter baumannii
atgttaattaaaatgaatacagaacacttgcgaatgacagtgctaaagcagatcgtcgataatgctactaaagcaatggttattgatagaaaaagaactctacttgattggatatttccatttacaccaaaaaatatacaactcaaaaaaatgcggaagcgtggtgacaagctagaacaatttgaagtagcgctaagcaaaaatgaagatgagttttcctatattgaatttcacgatgtagattttatttataagggtttgcattggtaa

SEQ ID NO: 48884 - DNA, 276 bp, Acinetobacter baumannii
atgcgtgatgcaaagcgacttgctgcaataaggaagttgccatgcgttagatgcggctatccttactcacaagcggctcattctaattctggtaagcacggcaagggtaagggaataaaagcctcagatgcgtttacagtgcctctctgccataagtgccatttcttatttgacacttaccaactaggcacaagacaagagtcggaagctctatttgatggttggttagaaaaaacagagcggatgcttaatcttaaagatggtgaggtgttttaa

SEQ ID NO: 48885 - DNA, 171 bp, Acinetobacter baumannii
atggatctaatcgaagcgaagaagaatttaaatgctttgtgcaatgaaatagaaaagcttcaaaatctttcacgcggtttgatgacggcaaaagaaatggtcgaaattgacgcgaagattaaaagacacaaagaccaagtgaagaatattagaagtaaccttcatgcgtga

SEQ ID NO: 48886 - DNA, 189 bp, Acinetobacter baumannii
atgctggaatttttattaatgattttggctgtaattgttggcatacctgtgtttttcttcatagtcttattatcttgcatagttacaggctctagtgttgatcccgatgataatgggttgcttaaaactaaaaagcaaaaagaagaatggcgcaaagagaaactagctaaacataatatagagttgtag

SEQ ID NO: 48887 - DNA, 516 bp, Acinetobacter baumannii
atgaatgcggcagtaaatcacattatgcaaacaacggactggaccaaatacagtctagaagaatggctttatcaatttggggcttggatgtactcaaattctggaacttgtggaaagagcataaacccgattgctgtcgctatggatcaggctgccaaaaagcgcaagcaagaagtgaaaggcaaagagcagatcatggcagattggctttgttctgatgatccagttatccctaaaggtcgtgggcgtataacatgtgaaatcacagacaatgaagcgcgtgcagttcaacgcctcatcttagatatgcaagggcaatcagaagtgttggacgaatggcttgatgctgtaatcaaaagatacttctataacaactcttggtcagaaatggttgtaactcaaatgaatccagttggagatatggttgttgtctattcccaaaatgatgctagagcagatgttaaatgtggtttagctgcaattcactgccgttatagttttattaaatacaaatag

SEQ ID NO: 48888 - DNA, 249 bp, Acinetobacter baumannii
atgagtgagtttaaaggtgtttgcatcgattgtggctctccagagctttattcaaatagcgaaataagacagccaagaatgtgtgttgattgctatgcggcaatgattggttttgcgcgggttgggggttcttttgtggattcggacacattaggcgacgacttccccatagaaaaccacatttcgccgaattgcaaagtaactgaagttcacattaacgaagcttacaagcttaatcgattggggtga

SEQ ID NO: 48889 - DNA, 279 bp, Acinetobacter baumannii; identical to SEQ ID NO: 47874

SEQ ID NO: 48890 - DNA, 345 bp, Acinetobacter baumannii
atgaaaccagaacattttattcgtgagcaaggattggataaggcgcgagaggttgttgaaggcatcccaagcaaatatatggagtgttactactcaacattatgctactgcaccaaagcaaaaaagtattcagatcgttttaatccaagaattgaacttgtgaacatggcggatctcaaacgcttggtggagtcgattgatctgatcaagtggcatggtggcactaagtttgccaaagactacctagcgcggaataaagcaaagcatccaaatgtaagcggctgggatgaattggagcaggcaatcaaagaccacgaatcaatatatggaggcggggatgagtaa

SEQ ID NO: 48891 - DNA, 177 bp, Acinetobacter baumannii
atgatcgaatttgtagattacaacgcaatgatgaagctgcgtagagcgtacaacctcggtactcgtaatgaagaaacaagagcagcagcgaacctctacgagaaattaagaaagctgaaaatgctagaccagctcaagcaggaagccatgactagacgttacaaggaggcggtatga

SEQ ID NO: 48892 - DNA, 819 bp, Acinetobacter baumannii
atgaatacggcttttaacctggaacaatttctcaagcaggccaccccagtggaagataaatacactagaacaccaaattacctggtggataagggctatgtgtctgaaatgacgggtagcgctttgaaatgctacgtagtgattaaccgctttactgatggtttttgccgtagtaactggtcgattacttctagcttccttcaagaaaagactggaatcaagaaattaaaaacacttactgactcagttcgccagcttgaacaattgggtttggttttagtggttagatcaactggtgaaactaacaaattttcaatcattcatcctgagtttgaaccacctgccaaaatggatggtagtaccgataatggtatggacactacccccgaaaatggtatggggagtacccaccaaaatggaggggagactacccccgaaaatggtactactaagaaagaaacaaataagaaagaaaatattaagaaagatatatgtgaaattttcgagttctggaaaaccacattcagcaaaaatgaaaaaacgattctatctgacaaacgagctagaaaaattcagtctcgtctcgctgatggatatctggttgaagacatcaaacatgcaatcctgaattgctctaagtctgattaccatgttcaaggtggttataccgatattgaattgatttgccgtgaacctgaaaaactagatcgttttatcaatatgttcccaaaagagcaggataaaaccaactctgataattcagaaacaaagcgtaatgcacctgtattgattcgcaaagaatacaagggggctaaataa

SEQ ID NO: 48893 - DNA, 276 bp, Acinetobacter baumannii
atgactaaacgtaaaccaaagaaggatgcgtctatcaccatccatatgccaacagaccacaaagaacagttgtcctcattggctgaaatgctacgagcaggacagggtgcaagtgagtatgtgtacgaaacgttaatcaagcctcatctccaaaaattgaaagctgagacgaagattaaacaaaagattttcggcttaacagagagcgataaaaaccatgagctgcattcagatttatcagtgcgctcagaaacagcagacattaaaaaagcctga

SEQ ID NO: 48894 - DNA, 189 bp, Acinetobacter baumannii
atgaatgtagagcatttgagggagttctacggtgtagaaaataactctcaactagccaagaaaatcaaaaaagcacgctcaggtattaccaaatgggagcaagaaggcataccaccaagaacgcaagctgcctttgaagtattaacaaatggaaagctaaaggctgaccgtcaagcattaactgcctag

SEQ ID NO: 48895 - DNA, 747 bp, Acinetobacter baumannii
atggataattctgtttctgatcgcattcaatctcgaatggctgaattaaagttatctcaagcggatttaatgaggctcactggcgctgctagaggaactgtttctggttgggtaaatggaagtaataatccgagcgcaaagcacattgaggcgctagcaaccgcattaaaaacaacatccagatggattcttactggaaaagaaaaacaaaatttaaccaacttcaacatgcaagaatttatggataagcacggcctatccaagaaagatgaatcatcatttgatgtgaatgatattcaaagcgcgtcagtagttgagtatggtggggatgatggatttatctggattgatgtggtagaggcaagtttttcttgtggcacaggagaatctatagagtttcactttgatgtgatcaatggaaaacagccattcccacctagtttttttaaacaaaaaaatgttcatcctgattgcatgcgcatcatcaaggctaaaggcgacagtatggcggacaagattgaggatggggatttggttggcattgatatatcccaaaccgacattattgatggtcaaatttatgctgtttactttgagggtgaaggcatgattaagcagattttcaaggaagaaggcgggaaactgattctgcacagcctaaatcctaaatacagagatcgtgaagtcacggagcaaaatggattgaattttaaagttatgggtcgccaattttggcgtgcaggttaa

SEQ ID NO: 48896 - DNA, 222 bp, Acinetobacter baumannii
atggaattggacaattcaaaactaccaatcaaccagattattgctcgcatcaatgatgctgcgaaacatggtgaggctttggtgctaaccgctgaagaagtaaagattctttccaaagatattggcgacaaagtctttattcctgtgcttactaatgagcaggtcgtgcagttggtaaaagaaggaaagcttgggcagaaaattaataacaccaaagattaa

SEQ ID NO: 48897 - DNA, 942 bp, Acinetobacter baumannii
atgacaataaccaatacagacctgattgatgatgatgctatgagtgagaaattccatgtagtttatgatggcaaagcattagaagaacacctaatggatgttcgagatcttgcgcctgctatgatggctataagtgacctcttgactcatgccaataaagagatcaatggggataagcttgaaattcaattaaatgtcaaagcaaactttaaaacaggttgttttggaatagaatttgttgagcacctatcttgggtgaatcaaatcaaagatctattagttggccctactgcaacggccttagcaaacgcaagtgggatcttgggattggttggtttttttgggggtgctactgttggtgtaattcaaatctataaaaaactgaaaggcaaccctcctgttaagatagaggaaactgttgatcatgcaaaagtcttttacactgaaactgaatatttagaagttgataaaagagcgttacgtctttaccgaagcaaggtgattgcatccgatattgaaaaaatgctagaaccactaagcaaagatgggattgactcattttatgttgtaaaagaaatgcttgatgaaaatgttgagctatttattgacaaaaaagaagttgagtattttaaatttcaggacattgatgatcatttgagcgaaagcatcacagaaacttttttgcaaattgaatcaatatcatttaaggaaaaaaacaagtggcgattcaataatggcggctcaacaattaatgcttctattactgatgaggtgtttctgcaaaagattgattctggattgcttcgttttggtaagggcgacttacttaaggttaagctaaagaccatccaatttttagctcatacaaaacttaagacagagtttgaggttatggaagttattgagcataagactaccaaacaagaagaatttgatttttaa

SEQ ID NO: 48898 - DNA, 1278 bp, Acinetobacter baumannii
atggataagcaaattatttttgaagacgaacacattagagccatttttttacaaggcgattctaatacattagttctctcttttggcgatttgattacccgggcgagtggcttatctatcaatgctgaaaagtctctaataaagtaccaatacaatgttattggagtgatgccaaaacaaaaatcatggtttccaaaggccagtatgattgagttggcaaaagtcattttgcctattattcagcgttttaaaaatattgtaggttatggcggctcaatgggtggctatgcagcaattaaatattcgaatttattaaatatgaatcgaatcattgcatttgtacctcagtattcaattgaccctgaacaagttgaagaccgacgctatgctgagttcttcaatgctgtcgcgaataaagacatgcaaattcagccgcaagatgtagatgtaagtcgtgaatacattattgtttatgacccttacttttcaattgatcgcgaacattacttaaaaataaaagagatcttgccaagtttacatacaattcatttgccttttacaggacatgaagctttatctgtattggcaagctcaagccttttacatgattttattgagcatgaatttgatgaaacatatttctatcaacaagttcgtaaaatcaaaaaacaaagcaagttctattatcgtaatgttcttgcaaatgtgctgacataccatgacagcatgttattgaaaatattgcgtcaaaatgactttcagttagatgaacgttatttagacaatccgcttaagcaagcggtcacacgtagtcttattaaaacaaagcaagctacagagcaagattttcagaagcttggaattaaaattcagtatagccagcaagctgaaaaccgtaaaaaaggtttgaaaaatcaatttgatgcaatactagtatttaatttgattaatctaaagcttgaaacctatgctgtagatgtagtgttggcaaacccatcatatttgattcccattgtggcagaacacactggggttgttcagattgaattaaataatgaactttatttgttagggatgaatgaccgaaaaattattaaattgtttaaacagggtgatgcactcacttcggatatgagtccgtttgttattaagcaatattctgatttctttgcgttaagctataagcaattaaatttaaattgtgatgaacaaggtgtatgtgattacgttgaaagttccattcagccatctcaacagtttgtattgaccagttactaa

SEQ ID NO: 48899 - DNA, 795 bp, Acinetobacter baumannii
atgacacaatccttacatcctgccgctcaaaaaggcttcagctctgctgctgagctttatcagcaagttagaccaaattatcccgtagaaatagtaagttggctacaagatcggctccaaatacatgaaaattctactgttatcgatcttggatcgggtactggcaaattcttaccttacttaaaacagacacatgccaatattattgcagtagagccaattggcgagatgttacaacagcttcagcaagcctatcctgatattaaaactatacaagcctttagccacaatattccggtaaatgaccaacaaattgatgctgtcatttgtgcccaatcttttcattggtttgacaacatagaaacattgaccgaaatccatcgagtattaaaacctcaaggacatttaggacttgtttggaaccagcgcgatgaaagtatagactgggtaaaagccttagcggattttctactaccacttgaaggtgatacacctcgttaccatagtgaaaggtggaaaaaggtttttgaagagcaagatttatttacttttgacaatttaaatactttttcgcaatcgcagcatggtactgtcgaacaagtggtgagtaaacggttactttcaacaagttttattgcagcaatgaccgaaaaagatcaactacagctcaaagctcagtttgaaaaaattgtttatgattttactgggttaggcccacaagatcagattgattttccatatattacatatgcatatcattttcaaaaaagtacgtcgtcaaatcatagagaatag

SEQ ID NO: 48900 - DNA, 564 bp, Acinetobacter baumannii
atgaaaaaacaacgtttgatgatagctttgctggcgactttaggcatgggttcagcatttgcatcaacctcgagtgaatacaatattgccaatggcttgcttccagttgaaaaagatcaatcaatttctgtattacaaccatttcagggaaattttaggattttaggttcaaaaatttatcacaatgatgagcaagccaaattttcaccgattgattatgcggtaagttggggtttatttgctcaacctgaaatcgcacgacatatttcagtgaaacaatatgaccgctatttaaactggaaaatagcaaaactacctgtaccagctgagcaagcgatgcagatggtatcgaatatgcacattattcctgcaaaccctgaaatcgcccaacaaattaagcaagttaaacgtggtgatttggtttatttaaaaggtgatctggttgaaatcaaagataaagatttagtttggaagtcatctttgaccccaactgataccggcgatggtgcatgtgaactcttccgtgttcaatccattcactgggttgaaaaacaaaatatttaa

SEQ ID NO: 48901 - DNA, 597 bp, Acinetobacter baumannii
atgacagccattacgttggcaacagctttggcacaaaaaggatataaagtagcattggcagattctgacaaccagaaatcttccttacaatggttaaaacaacgtccagataatgtagctgtaattcaaagcctcgactggcgtcaagaaaaatcaattggtgatgcacctaaaaatttagactatttaattattgatgcaccgggtgccctttcaggtgatcatgctgaacaattagtcagcgaagcccatgcgattattactccacttcagccttcatttttcgatatcgacagtacacgacgttttctcaagcatttgcaggatattaagcgtattcgtaaaggtaaagtacaaattttactacttgcaaaccgagttaaaccgaacagcgccagttcaaaagatattcagcaattttttgaaaaaatcgaacatgaacctattgcatggattgccgagcgtagtgcttatggcagtttagcaatgcaaggtttaagtgtatttgataaaccacaaaagaactttattgcaattcaaagccagtggcagcctcttttaaataaactgattgaagataaatctgagtggttctaa

SEQ ID NO: 48902 - DNA, 576 bp, Acinetobacter baumannii
atgccagtatttaataaaattggtgcagtatgtgcactgacagctttattaacggttggttgtagcacggtaagtaagactgtatctgatacagcccatgcacttaccacaatgcatactaaaaaagtggtggatgttaatgaagtgacagccaatggtataggtaaaaaaattggtacgattagctttcaagatagtgataagggcttaatcattacccctgctttagcagatttaccaagtggtactcgcggtttccacatccatgaaaatccatcttgtgcccctgctgttaaagatggaaaaccaggcgctgctttagctgctggtagccactataaccctaaccaagccccacatcatggtacgccaactaccgggcatttaggcgatttaccagcattagtcgttgacaatactggtgtagctacaactgctgttattgcaccacgtttaaaacttgctgacattcaaggtcgcgctatcatgatccatgctggtggtgataactattcagattctcctctgcctctaggtggtggcggagcgcgaatcgcatgtggtgtaatcaaataa

SEQ ID NO: 48903 - DNA, 2151 bp, Acinetobacter baumannii
gtgaataatctgactcaactattcaatcgttttaaagcgaattcaattttaatttattgcctgcaaattttaattgtactcacaggcacaactttaggtttactttggttaggacataatgagctgattgttcctgtgactttaggtgcaattgccgctgcccttactgattttgatgatcgcttaagtcttcgtttacgcaacttgctctatgtctgcctactctttttcactgttagcactattcttggttttttagcaccttataaatttttatttattttatatctttcaatttctagtgcctgtttcattttattgggcgctttagggcaacgctacgctaccatttcttttggtacgattttactctcaatttatagtatgtttggtttaggagaatatgcacactggtaccaacagcctacttattttgtctatggtgcgttgtggtacggcctaacgtctattttattttttattcttaaaccaacacttcctttacaagataaactttcacaaatttttgaagaaatttcagccttacttcaagctaaagcacggttgttcgacccagataataaagaaaatgttgaacagcttttatttgagttatcactacaaaatacacaagttgcgcaaagtcttaatcaaatacgcagctctctgctaactcgccttaaggcatcacgagtcagtaataaaagtatttactggttaaacctatacttttttgcgcgagatatacacgagcaggcaacttctaattatttacactacgagcatatccaacaaaattttagccgtagtgatctcatttttcgttctcagaaaaacctacgcttacaagctcaagcttgccatgatttagctcaatgcattttgcataatcaacaatatcagtcttctcaagaaagccaaattggcctaaaccatttggaaagctctttgaaagactggatacaacagcatccacaaaattttgaagttaaaaatttaaagctaatttttaataatttaaaaggaatgcatgaacaatttgagcagcttcaatatgctcaaccgtttaatgaaacgttgaatcaaaacaagcaagaacatctcaatttactagatgacgatatccaaggattttcagaccttgttttaaaaattcggcagcaactgacgccacaatctgccctatttagacatgcagtacgaattgcggttgtatttgccgcgggttatgccatttccctcttaccttttgcccaacatggttactggattttgctcaccagtttatttgtttgccaaattacttactttgcaaccaaaagtcgtttaaagcttagaacgattgggactttactcggcgttttattgggtattcccattttatattttgttcctagtattgaaggtcagctcattcttaccattatttgtggagttagctttttctacttacgccagaaaaaatatgcgctggcaacactgatggcaaccttaatggtattgctcattttcaacttaaaaggtgcaggttacagcattattttacctcgcctaatcgacaccttattaggctgctttattgcttggcttgctgttaattttatttggccagactggaacttccgtaatattccaaacaatattaagaaaagtagccaagccacctttgattacttcaatatgattgtcgagcaatatcagcatgggaaaaatcaagacattgaatatcgtcgaattcgccgagctgcacataacgcacaaattgaattgtcgaatatgatttcaagcttaagtgccgagcccaacccgaatccagagctgattcattatgcctttcgttatttggtttatagccacagccagctgagttatgtcgccgccttaggcagccaaagacaaaaaattgatgatcaacaggtattacaactcttactggattgtcggcaaattcttaaacaaagtttatctgaacaaacttcggttaactttagttttcttgaacagactttaaagcaaattcaaagtttaataactcaagaacatttttcagagaactacacacttgtcttaaaacagatgagtttattattagaaaccttgcctgaactcttaagcttaaaaggcaaacttttagagcatgaaattaaatag

SEQ ID NO: 48904 - DNA, 1230 bp, Acinetobacter baumannii
atgaaaaatattcaaacgacagcgttgaaccgtacaacgttgatgtttcctttagctttagtgctatttgaatttgcggtttatattggtaatgacttgattcagccagccatgttggcaattactgaagatttcggtgtaagtgcaacttgggcgccgtcttcaatgtcattttatttattaggtggtgcatctgttgcatggttactaggacctttatcagatcgattaggccgtaaaaaagtacttttgtctggtgttttattttttgccttgtgctgttttttaattttattaacgcgacaaattgaacactttctgacattacgttttttacaaggtattgggttaagcgtaatttcagcagtgggatatgcagcaattcaggaaaattttgccgagcgtgatgcgattaaagtcatggcacttatggcaaatatctcattgcttgcgcctttgctaggacctgtacttggagctttcttaattgattatgtttcatggcactggggtttcgtggcaattgctttacttgcactgctgagttgggttggcttaaagaaacaaatgcctagtcataaggtgagtgtaaccaaacagccttttagttatctttttgatgactttaaaaaggtatttagcaatcggcagttccttgggttaacgttggccttaccgcttgtgggtatgccgcttatgctttggattgcattatcgccaattattttggtcgatgaactgaagctaacgagtgtgcaatatggcttagcacagttcccggtatttttaggtttaattgttggtaacattgttttaattaaaattattgaccgtttagctttaggtaaaactgtcttaattggcttaccgattatgcttactggtacgctaattttaatattaggtgttgtctggcaagcctatttaattccttgcttgttaataggtatgacactcatttgttttggtgaaggaattagcttctcagtgttgtaccgttttgcactcatgtcatctgaagtgtcaaaaggaactgtagctgctgctgtttcaatgctattgatgacgagcttctttgcaatgattgagcttgtacgttacctctacacccaatttcatttatgggcttttgtcttatctgcttttgcatttattgccttgtggtttactcaaccacgtttagctttaaaacgagaaatgcaggaaagagttgcacaagacttacattaa

SEQ ID NO: 48905 - DNA, 366 bp, Acinetobacter baumannii
atgaaaaagattggtttactcatgatgtgtaatttgttgattctgagtgcttgtacaccaaatacaaatccacctacacctcaagcgaacagtccgatacaagctgttttactcgatcaacctaatcttttaaataatgccagtaatttaagtatttcacagcaaatgaatgccttagaggatccttctaatgctcaagtcactattttgcagacagagccgagtgaagatgctgtttcgaaaacacgtactgagtatttattaaaaaaagatcagaatgtttggaaaatcgtgaataaaaaacaaagttatcaatgtacaaaaggcgaggaaacagcagactttcaagttaatccttgtccttaa

SEQ ID NO: 48906 - DNA, 588 bp, Acinetobacter baumannii
atgagcaatattttagtcattaatggtgccaaacaatttgcccactcaaatggtgaattaaatgacacactcacgacactagcgacgaatcacctcactgaactcggccacgaagttcaagtcactcatgcagatagtgactacaatgctgaagccgaagtagaaaagtatttatgggcagatgtcgtaatttatcaaatgcctggctggtggatgggtgcaccgtggaccgtaaaaaaatatattgacgatgtatttacgacaggtcatggttctctttatgcaaacgatggtcgtagccgctctgatgcttcaaaaaaatatggttcaggtggtttaattcatgacaaaaaatatatgctgtcgcttacttggaatgcgccaatggaagcatttgacgaggcggatcagtttttccatggcgtgggtgtagatggtgtttatttaccatttcataaagccaatcagttcttaggtatgagtaccctaccaacatttattgtaaatgatgtaattaaaatgcctgatgtagatagttatgtggaagcatacaaagcacatttgaacacactatttgcagcagcctaa

SEQ ID NO: 48907 - DNA, 315 bp, Acinetobacter baumannii
atgcttactattatcgcggaaattcgtactcaatcgggtggacagcaccgccaaaacgtattgaatgcatttcaaaaaatcattccaactgttttagccgaagatggttgccatggttatgaacctttagttgaccacatttcaaatgcgagcttccaaaacaaagaccctgacattattgtgatgttagaaaaatgggaaagtgtggctcatcttgaagcacacttagctacacctcatatgcaagcacatcatgaagcagtcaaagatgatgtagttgacgtcaaaattaaaattttagaaagcggcgtataa

SEQ ID NO: 48908 - DNA, 918 bp, Acinetobacter baumannii
atgagtgatagtggattaagtgataaatttaatcaaacttataaatcttttaataaattatttacatatatagataattatcgtgcctctgagtttaatagctatgcatcaaatagattaattgttttaggcgacttaaaaaaagaaataaataatttatttgaacagttcctaaaaaatagtagtcttgattcaataaattttaatattattaatttttatatcagtgatttagaaaatgtcgttgagggtattagagtaaatgaagatcctaggagagtcgaaaaattttatggagaacttgttgatatagtagaaaaaattcacaaagagttaagggcgaattattcaaatagagaaataaataaaaaaattgagtatttagatacaagtattaaagatgtaaatgagttaaaagagcagatcaagaataaagatacgcatgatatttatgaaatagctgcaaatgaaaatcaggatagggctgataattctagaatggcttttataattttaattattttttcaataataatagtttggttttgttcagttactaaaacttattttggattaaaggattatgattattggttttttaaaggaactttaatcttaacttctgtgaccttgattacttactttttaaagcaatcagttaaatatcaaaaaattgcggaccaatgccgacaaactaaaatggaattagaagcttttccaagttttgttgcaagttttactacagaggatccacaaattattgagattaggaaagagcttgcacttaaatattttggtagagagcttgataataaaacaaatgatgaaacaagtaatattctgcaagatcaaatgaaaaacacgactgaaatggttaaaacagctatggaagtacttaaaaagacggggaattcatga

SEQ ID NO: 48909 - DNA, 1206 bp, Acinetobacter baumannii
atgtcagataaaaatactattaatattcatgccgccattattcatagaattttaaaagaacaagatcaaaagcgggaggatgcaaccccacctgtaattagatcaaatttacataccaacaatgaacaaacagtaaagttaattcaatttttagatcgtgagcttagtaagtatggtcttgcacattcaatttcttcaacatttgagcaaagcacaacactgagcaaaaatattaatgattatttgtttaatgagggtgacttacaggttgaagatgatgaaagtgaaacattaattgagtttgagacagaattacaaactagatatagacgattaactaataagcttacacatgctttacattattggatttatagtgaattaaaaactaatggagatcatttgccaattattttctatgaagagaataatactaatttcctttatatggcattattaagtttaaggccatctattacaataaatgaatcaactggtgaaattattgatacttcattaatagatacccaagctttgaaagttgcttttaaaatagatttagatgcaatgaagcttcattcaaattcggatgcaagtattaaacctagtaattatatatcttggatacaaaagggtaatgatgatattcccaaatatatccaaaaatatattccaattatgtacagtatcgatgataaaatttcaactcgaaaattaatggacaccttaggagaatatttagcccaaagtgatttttccaatgaaatttctagtttaattcatgaggaagtacttactcttctaaaaacaaaagctgctcagaaaaagccaattaatattattgaagatattgatccgattattgaaaataaagctcaagtccatggagtcgacataacagagaataactttaaatctttccgggcaaccaatggatatggggagcatgatctagatgctagtaatatattttccccagcaagtgcaacattaacaagttttgaaaaatttactttatctattggtaatcaaaaacaaattaaaatttctggtagaaaggccgatatagagcatacaatagtccttcatgatcaagatgaaaatacgccttatattaaggttgatcttaagaaggaagagttgcctgaagcccgaaaagttttaaagaaaagaaagccttatgaatcagacaaaagtgaggattga

SEQ ID NO: 48910 - DNA, 750 bp, Acinetobacter baumannii
atgaatcagacaaaagtgaggattgagtctctactcaaaattagtcatgatgtaacctttgatgaacaaaacatcaaaggttacgcttgtcttaaaactgaagaagatcttgcccttttaaatgagtttaatgatggtttgattgctgatttaagctgtaagcttgaggtttacagatttaatattggggatgaagttaattacacactatctttataccatacaggtcaacagttcgcttcttatgaaaattttatattacatcaaatgaattttactaataatactattttatctgatgaatatgttatttatgaagaaaaatataaagtagatcatggtgaaaaagcaatttctaatattttgaagttgttttctgattttatcaaaattttatcagaaaagtacttctatcgtgataatcaaattgtcctgttttctaaaacacattgtgaaattagtgtccaaccacgttactatgaaaagtatcttgatcttgcaaaagtttataatgatttaagtttagatcagtcattgaaaaattttatagattggctatcgattgaaagtagtagtaatgaccaaggtttaactaatgctttggaagtgcataaaagtgaacgctattctattgctgcttctgaatttgtagatcatttaattacatttgaaaaaaatgaacgcgttttctctctgttgaagaatatagacactagacctcttgcgaaagtaaaaaccacctcaatctaa

SEQ ID NO: 48911 - DNA, 1308 bp, Acinetobacter baumannii
atgaaacggtcaaaaattgctttagctataacattatcaatttcagcattatttcttactgcatgtaatgacgatgatgatgattactttggagtaaatcctgataaaacgtacatctctgaaaaaaactattctcaagatactttaagtggtgctgcctctatcaaagtgatgacctataacatggagaatgtacaaggaaaaacagctcaagcaacggcacttgtcatgtttcctaaagttactcaacctaaggatggttatcgagtagtagtgtgggaacatggaactgtaggtgtaggggatagttgtgcaccaagtaataatacaattaatccacggtttaagatcttagccgatacattgttggcggctggttatgtcgtgattgctcctgattatgaaggattgggcacccggggaatgcatccatatttgaatctatcaagtgaggctaaatcagcattagctgctgttaaggcagcgaaagatcattatggtaatcagttaaatggtgcatggatgtcgattgggcagtctcaaggtggacatgcttcattaggcacagcggaatttgctaataatgatgctaattacaaaggggcggttgcaggagcgccagcttcaagcctcggatatattatttctacagttgcaccacaagcaattcaagatattcttaaaaaagagcaggctggtactgtacctgttggtacggctgtagaagtatatgctgagcttcttgcatatgccgcatatactaccgtaggtattactgcgtatgagcctaaatttaattatcgtgaaattttccaacaacgttctcaaagtatagctgagttcgcagaggggactacaggtgaaaatggtgtatgtttaaccgatttgcataataaatttgcggatgatattcgagatttcctggctactaatgccggtaaaacagttttagattatcccggtttagctggtaatttccaagaaaacccaactgtgaaaaaattcttggtagataaccaacctgctactaaaaaaattaattcaccggtcatgattgttcagggtactgctgatatggctgtaccatatccagtcacggatgccctgcaaaatggtcttaaaaaaatgggaactgatgtgacatttgtacctgttttaggggctgctcatactcaagcgattgtatgtagaaatgctgaaatttatcaatttgttcaatctaagatgccagctaaaacaaatatagtgcttgatccatcagtaatagatgctagtaagaatgttgaatgtactggaatagcacaataa

SEQ ID NO: 48912 - DNA, 828 bp, Acinetobacter baumannii
atgaaaaaaatactactttcatgtttatgtatattaagcctttcagcatgtgatgatgagacagaggaacaaagtgagcaacttgttggtttttctgcgagtcaagtcgctggaattccaatgcttgagaagaataattataagattttagataataaaatctatattagctatcctgatgggcgtccattaggctatgagcttagtcgacattatttcactgatcggggtgtgaccttggaacccattaaaacaacagatgggacatggtatttgttgggtacacaagttcaattttcagataaagtcttaaactatcaacctgccaatttagtgaaagacgataatttatttttaaatcaagatttaattaaaattgatatttcaggtcagcctgtaactaaatatttagggcaatggatttttgaatcattacctcttagtcaacaggtgttttttgaagattattacaatgcattattacagcaaaatgtagtgaattttcctaaaggctcaacttgttggatgattaataaggtctacagcaataaagactatatagaattttctagtgatggcacttcacctttatatattgattcaaatcgtaccgctccagtaacggggacgtggcaaggtattacgtggtcacgtgatgaggcttcattagcaatgaaatttacaatagataatactgattattcaggacagtatcatcatcaatccggtgctgatgaatatgtcccaccttatactggtaaatattgtgactttgttagtgaaattgctgcggatactatgattaaaacttggaaagggaaaccttaa

SEQ ID NO: 48913 - DNA, 174 bp, Acinetobacter baumannii
atgattagcaaaattcgtctccaagtcgccactgaactgcttgcgactgacttaccgattactcaaattggtttgcgttgtggctataccgaccatagtgctttttgtcgtcagtttaagctgcatacaggcatgtcgcctaccttatatcgcgcctctaccaaaaatatttag

SEQ ID NO: 48914 - DNA, 1290 bp, Acinetobacter baumannii
atgacgacaacactaaaaaaggttgtagcagcctccatggttggctccgtagcagaatggtatgaatttttcctatatggaactgcttctgcccttgtctttggcgaacttttctttcaacaaacgggcaatgctatagatggtattttggcagcatttgccctctatgccgttggctttttagcaagacctctcggtggcctcgtgtttggtcactacggcgataaaattggacgcaagaaattattgcaaattagcctgattattgtcggtatcactacttttttaatgggctgtattccgaccttccatcaaattggctattgggctcctacactcctagtgatactgcgtttaattcaaggctttgcttttggtggtgaatggggcggcgcagttattttagtttcagagcacagtccagatgatcgcagaggttattgggcaagctggccacaaactggcgtaccgctcggaaatttagtagccacactggttttattattactttcaaaaaacctctcacccgaacaattcctagattgggggtggcgctgtgcattctggttctcagcagtcgtggtactgattggtttatggattcgaaaaaatgtagacgatgccgaagtgtttaaagaagcacaggccaaacaacagcttcttgaaaagcaacaactcgggattattgaggttttaaaatatcataagaaatctgttattgcgggtatcggtgccagatttgcagaaaatattttgtactatatggtggttactttttcgatcagttatttaaagttagtcgtccataaagatacttcgcagatcttactgctcatgttcggcgctcatctgatccatttctttattattccttttatggggcatttaagcgatatatttggccgtaaacctatttaccttattggggctgtacttactgctttttggggttttgtcggctttcctttaatggatacaggcaatgactggctcattatgttagccattgtgcttggtttatttattgagtccatgacctactcgccttactctgcgttaatggctgagttatttccaactcacatccgctatacggcgctttcattttgttatcaagtcgcacccattatggcaggttcgcttgctccattaattgccctaacattactcaaagaatttaatagttcgattccgatttctttatatttggttgccgcaagtctaatctctattgtctcgattttgctggtgaaagaaaccaaaggccgatctctagcttttaaagattaa

SEQ ID NO: 48915 - DNA, 1173 bp, Acinetobacter baumannii
atgaaatcatggtctcctcagcactataaaattgaaggcaaaaaaaataagattgataaagaaattattgatagtgcattagaacatgctaaaagaattagatctaaaaataatattaatcccatattcactttaagacacctttcatatttagctaacgtcgaatatagtttccttcgttcaatagtttatagagatttagaagattattgggatttagaagaacctctatatcgctattttcaaataagaaaaaaaaattctttagaaaaaagaagaatttttattccgcatcctcaacttgttaaagttcaaaaatatattcatcaaaatattttgaaatttgttgaatgtcatgaaaatagttttgcgtatactcctggtatttccattgttgatgcagctagcctacatacgaatagtaaatggttgataaaattagacattacagctttctttgaaagcatctccgaagtatctgtgtacaaagtgtttcgatccctagaatttccggctcttttatcttttgaacttgcaagaatatgtacatggaatagtcctagaaaccggaatactattccaccaaggtttaaaatttcaaaaaaaaccaattatacggtttattcttctaccgaaggtattgaattgggacatttacctcaaggagcaccaacgagtccaagtctttcaaatctagtatgtagagaacttgataaacaattgacagcattttcagttaaaaatgaattagaatattcccgatattcagatgatattaccttttcatctaaaaatataaatttttcaagaaaagatgctattgaaattataaaaatggtatataaaattttaataaattatggttttactcctaatatacaaaaaacaaaaataatctctcctaaagctaaaaaaatagttttaggtttaaatgttgatagagaaaaagtaaagttagataaaaaatttaaaaacaaaattaatcaaaacatttatttttgtttacatcctgatattggtccggtacgacaagctaaatataaaaaattctcttctgttcttggttttaaaaatcatttgcatggattaataatatatgctctatcgatagataaagagtttggcgaaaaagctttaaataattataataaaatcgtatggccaatacattaa

SEQ ID NO: 48916 - DNA, 210 bp, Acinetobacter baumannii
atgtttcatttagcgttcgctcaagtaactattacagttacttgtctgattagttttaaactcaatcagtcggctatattctatataagcccaagtaatagctctcgcaaaagagtaaccaagatcacgacaatagcgactaaagtcgctcgattgtgtcctcacttattgtcgcgatcttacttacccctccggggccaaagtaaatga

SEQ ID NO: 48917 - DNA, 1227 bp, Acinetobacter baumannii
atggaaaattatctagaagaaaatgaaagatacaaaaaatggcttaatcaatttgaggaagtagatcaaccttatgctcaattgttaatacaaaaattacaatgggtttcaagtcatgaatttcaagtaaaaattaaaaatgaaatatatagcctttttaacaatgataagattgcactatttgtcgaacgagaagtatctaatggagaaactgtatataaatttgcaagtgaaagaccaagaagagctataggttcagcctttcctcctatcaataatggtataaattctaatcatgaagttggaagtgaaggaattttaaataatattgcaactaccctacaaagatcgaactcccaaaattttttttactatcctagtgcagaaaaaattagagcaaaaaaaattaataaagtgattatattaacggacactatagcttcaggtaatcaaattagaaaatttcttgaagcttttgcacaaacaccgtctatcgaaagttggcattcttcaggttatattagtttttatattgtgtgctatgcaattacggaaaatgcattagatttcgttagtaaacataaacttaaaccacaaataaactatgtttgtgtttgtccaactatatccaactcttttaatccaatagagcaaaaaaaaattagagagatttgtaataaatataatcctaataaacgatcagatcctcctttcgcagtaggttatggagatgtaggatcactaatttattatgaacatggcataccgaacaatgctcctgaaattctttataaaaggtcagaaaaatggttccctctattcagaggaagaacgactatagatttcagtgagcaattaccaactaatataaagtcattagatacagaagactatttaaatttaatgaaagataaaaatatcgttgtatctaagaagttttcaaatttaagtgaaaaagggaaatcttatatacttgtcttattttctttaaaaaaacctcctagatcagtacgagctatttctaaaaagactaagctttcatctagctctgtaaccgatataattgttaatctacgctatttagagtggattgatgactataaccgaataacagatgaaggatatttactaataaaatatttaaaaaaaaatgagtcgaataacgttactatacttcccaatattgataaaaaggaatattatcctacatcgttgaggagaccataa

SEQ ID NO: 48918 - DNA, 591 bp, Acinetobacter baumannii
atgattgagagctggttttttgtattagctatgttggctgttttacttattccgggcccgacaaacgcattacttgcaaccgccgctcactcacaaggtttatctaaaacattctggcttatcccaatggaatggttgggctacgcttatggcattagtttttgggcagtgttcattcatttggcagatccggtttggcctgcactactgcttattttgcacatcactagcgtattatatgtattctggatggcattccgcttatggaaaaccacgcatttacaacaatttagccaaaatcatcgtaatattcgcccacgtcaattattcttctcaactttaaaaaatcctaagtctttactttttgccgcaggtattttccccgctgaaacatggaattcgcctgagaattttctcatggttctggctgcttttactttgattcttattccagcagcaagtttctggatgtttttcggacgtgctttattgacgggatcaatgaaaaaaataaaggccgatcatctatataaaggatcggccatgttacttattttatgtatgcttccggtggtattccgttttttctaa

SEQ ID NO: 48919 - DNA, 558 bp, Acinetobacter baumannii
atggttctaaaagatgatagtttatttttacatcaattatcagatggtcaaagagtatttcttggaatgataggagatatagctcgtagattaatattgttaaatgatagctccgataaccctttaatggggcaaggtattataattattgatgaagtcgagctgcatttacatcctaaatggcaacaaaaaataattggggtgttaagaaaatgttttcctaatattcaatttatagtttctacacattctcctcaaattcttggtgaagtagaaagtaaacatttaagaattcttactcttcaagacactagagaaattaaagttactattcccgaacagtcatatgggttaacctcaagtgaaatagtagaggagttaatggggggtaacggtcgtaatcaagatattaaaaagaagatagatcacatatttaagcttattgatcaagaaaatcttgtagaagctgagaataaaatagaagagcttcaatcagaattaaatggtgaaattccagaactaatagaagctaaaagcttaattcttatgatgaaataa

SEQ ID NO: 48920 - DNA, 642 bp, Acinetobacter baumannii
atgttaaatattactagacttcatgagccatccagtttaactatttatcgctatcaacctgatgctaaatatgatggccctttattcacaacagttaaaagcgatatacgggaagcattagtaatttcacaagggtacctttgtgcatattgtatgcaacgtatatataatgatcgttcaacaactaaaatagaacattggcaatgtcaggatacttactctcaacgtcaacttgattttactaatatgtttgcagtatgtctgggaacaactcaagatcaattgcattgcgactcatctaagggcaataaacaaataacgattgatccagctagcaggagtcaactcgttgaatcttatattagatatactaattccggcgaaatatatgttcaaaataatgaattattaaataaagagttaaatataattttaaatttaaatcatagtcgtatacaaaataatagacaagctgttttaaaagctgtcactactcaattatctaagtacaaaggaacagtaccaaaaagtgaattacagagtttattgggcaaatggagtaacatagacgcagagggtaaaaagagaccatattcaggagtagctatattttatcttaaaaataagctttcgaaagcttaa

SEQ ID NO: 48921 - DNA, 1746 bp, Acinetobacter baumannii
atgttaactaagaactttataaattcttctattattctttttgcgggttttcaccaatatgtttatgcgattgaagatgtctctttacccagtcaggtattgcaagatcagcgtttaaaagagcttaaccagcaattacaagaccagcttgctcagcaaactccttatcaaaacaccaagccattacaggactttaagtatttagctgttaaagaaagcccctgtgtagcggttaaagaaattagtcttatccctttaattggtcagtcggaatctgacttacagcaatttaactttgtggttaaggctataaaaaaacacccacaaaatattctaggcaaatgtattggaacccaaagcttacataacattgtgaactatgcccagaatgaacttttaaaaaagggttttattaccagtcaaattgtcgtgagtccgcaagacttaaatcagggtaatttaaacctgagtgtgcaaattggacgtctgaataaaatcataattcaggaaggtaaaatttcctcattacagcttaagacaggcttgccctttaaagcgggcgacattgtgaacctaaaaaggctcgatcagggtctagaaaatctaaaacgtgtctatgcggtagatatgcaaattactcccgcaactgctcaagataaagaattaacgggctatagcgatttaatactcaaacttcaacccctacaaaaagttaatttcaatttaagtgtagatgactcgggtaatcaggacaccggcacctatatgggaaatatcggcttaggcgtcaataatccatttcatttaaatgatattttatcgttaaatgtgagtcactctttagatgactttcatgaaagtttaaaccgaagttatttcattagttatcagttgcctgttggttattatgatttaggttttagctataacgattatcaatatagacaaggaactgtagcacctgaatctggctatccagttatttatcatggtaatagccaacaagccaacctgaatttatctcgtgtgattagccgtagcggacaacataaaaccagcgtgtatggaaagctttatcataaagaaagccaaagttttttaaatgatattgaaattaatgtcttacaccgtaaaacctcaggctggaatttaggggttcaacaccgtcaatatttaggaaatgcggtattagacggtagtattgattaccgtcgtgggatgggggtggaagcccgaactgcccctgaagaaaacattacggatgtttatggaaaccatcttcctgttgaaggttactcccgtgctccactgtggagtgcagatctgcgttttactacaccgttccttttgctcgataagccagctcaatatcgctttaactggcgtggacaatatgcaccgaaaattttagtacccaatgaccgcttctatattggtggacgctatagcgtgcgtggctttgatggtgaactcatgctctctggcgataacggacagtatctacagcaagaaatcagcttgaatgcaccaattcctaatacccagttttatatggcagtcgatcagggctgggtcaatggccgcaatagcataccgggtcagcgttatttactcggaagtgttttagggctacgcacttatcaaaatagtttttatctggatgcctttacaggtcgggggctgattgcacctgacagcataaaaaaagactgggttaccggttttagtatcaacctttcttattaa

SEQ ID NO: 48922 - DNA, 384 bp, Acinetobacter baumannii
atgtttatagaatttaaagatttgaagaaaaagcgaaacatcgctttattaattgtaatttttcttatttttggtggggcatatttcattattaacaataagagaaatattcaaaaagttgaattagtaatatataccgataaaacgataagcgagaaatttggagaaattaaaagttatagtattcgtagttttggatcggaccattattctagccctaagcgaccagcttactcttataaggttgatataactggtgaaaaagctgatggaatagttgaaattgatatgagaaaagatcaaggacagcttaaatatctatatacgattaaaattacggatgtaagcccgcatagttttcgtataagaataggaaaacattga

SEQ ID NO: 48923 - DNA, 582 bp, Acinetobacter baumannii
atgaaaaaaagattagcgttaacaattttaatttcatcatcttgtacatttgctgcatcaaatgaaggaattgagcaggacgtccgtagttattctttattgcatggggttagcacagcagaagcaaacaaagcattatttttagaagctaaccgagactctgcattagatgctattgaagaagaatttaaaggacgtatcgctggtatttatattgaaaacttgcctacatataaaattgtggtcagagtcaaaggttatggccagaatgaaaagcgaaatatagtagtaggaaaagcaatttctaaagatgatctgcctattgatattcaatacggggctaaagaaactagagaagaggctagagttcagataaataaagtactaaagcttgtaaaaaattattttaaaaacattcaaactgttagctacaatgaaaaaaatgggaatatagttgttgaagttaaaggaaaaagtactgttgaaaatttaaagaaggttgatcaagtacaatctctttggaaaaatccaaatctaccaattgaaattaaatttgttagttggtctattaaaccattatag

SEQ ID NO: 48924 - DNA, 318 bp, Acinetobacter baumannii
atgagtactgatgcggctcgggataaagccatccagatcgaggcgcaagaagatttatatttcttcacaaggtacatgtttaaggagcgccgtggttataaatggatgcagaactggcaccacttagaaatctgtgaagctttgatgaaagtttatcgcggagagataaagcggttaattattaacgttccaccacgatattctaaaactgaaattgctgtaattaattttatggcttggtgttttggaaagaagcctgactgtgagtttattcatatcagttactcggcaatgcttgccgcaaataacgccttctag

SEQ ID NO: 48925 - DNA, 390 bp, Acinetobacter baumannii
atgagctttattactgtagatgacgcaaattcaattttgggcagcgattttgcaccggatagtgataaagctcgtctggttcaactggcaaatgtctggatgaaaaaacggattggttttgtaccggatcctatagatccgcttcttaaggatgctgcttgtgaaatcatcaagggtattttggctaaggtgatttataacggtaaagaacagcagctgaagcgtaagaaagtaaaggccgattctgttgagtctgaaaaggaatatcaagatggatctgaagcaatttccagctttgagcagatagcaattgattttattgattcccttgatctgaaggatcctaacgctagttttaatggctttggaattccactttatagagcatga

SEQ ID NO: 48926 - DNA, 369 bp, Acinetobacter baumannii
atgggactacgtgacgaaattcaggcagaaattgctgaagcatttgacgaggatctagctgacgccgttcatacttttacgtgtgaaaggatagtcagtacaagctggaatcctaaaactaacacttctgaaaatgtagttgaaaattattctggtcgtggcgtcttatttggttcgtacagtcagtatgaagttttaacacttggagtactggccacagataaaaaagctactgtgctgcagaatgaagtttcaatggttcccaaacttgaagatgaatgggtaactgaacagggtacatttcgagttaaacatattaaacaagatccagccgcgaccatttggaagtgtcagttacggagagtgtga

SEQ ID NO: 48927 - DNA, 4062 bp, Acinetobacter baumannii
atgactcaagaatcacgtctagtcattactattgattcgaaaaatgcggaacgaaacgcaagaaatctaggcaatgaactcgacagcatagaaaagaaaggggactttgcatcaaagtccatggatagtttgtctgtagcaacaagagcacttgctggacacatggcaggtcttgttacagttggcgcggctatatccaaaatggatgagtatacaggcttacagaacagacttaagttagtaaccaagaatcaagttgagctaaataaagcaactgaagatacatttagaattgctcaaaaaacttatgcgacatggaattcggttttgcaggtctaccagcgttttagtgacaatgcgaaaacactaaacataaacatggacgaaacggcccgcttaactgaaacagtttctaaagctgtagcaattagtggtgcaagcgcagaagctgctgatgcagctttagttcagttcgggcaggccttggctagtggaacgttgcgtggagaagaacttaattctgtaatggagcaaaccccagcactagcaaaggctattgctaaaggtatgggtattactgtaggtgaattacgttcagtagcagctgaaggaaaaattacttcacaagaaattgtaaaagcgcttagaaatgtagaatctgatgttgatgctctttttgctaaaacagatatcacaatcgggcagtctctcacactcctaaacaacgagatcacaaaatttgttggcgaagcaggtaagggaagtggtgcggcacaggtattagctggatcagttcaaactcttgcaagtaatttagatttaattgctgatggggctttagtagttggtattggatatatcactcgtgcaattttgatgaagagcgctgctattaaagagggaatggcttcaactttagcgagccgccaagcatctgtattaaatgctcaagcagaatatgcagaagctaccgctgctttgaatgcagcaaaagctcatctcgcgaatgtgcgagcaacaaatgcagaaacccaagctaaatttggcgcaacagcggcagcaactcgatacgcacaagcacaggcagcagtaactgctgctacaaatgcacaaacagcagctcaaattaagctaaatactgcaacttcaattgcagggagactagctaaaggggcgtttggattaattggtgggtgggctggagttgcaacattaggagtaatgggattagcggcagcctattcttattttaataataaggcagaggaggcaaagcaaaagcttgctgaacaagctaaagttgctgagaaagctgatgaggagttaaaaaaattaactggcaatgataaggctaaagcagttaatgatttaactactgcttttaatgcacaaaataaagcattagagaaatcatcgcgtgctgtagggtctgcattaattgatatcgagaactatgcacgaggaaatagggaggttgaaaaaatttcccaagaagcgagaactggaactatcagctatacagaagccattgaacgtctaaataaaattaagttgcctacagatctatatgaaaatctgaaaaaacaggctgcgcagtatgatgacaatgcatctaaagcaagtttatcagctgagaaacttaaattattaagagttgaagtgaaacttggaggtaatgaagcacaaaatgcggcaattaagcaacagaagcatgctgatgctttaggaaatactgctactgaagcagaaaaggcaactaaggctttgcaagattatcaagccaagcaaaaagatagcgttattgattcaatctataaatcaggttggcttgataaaggttacactgttgctcaagctaatgccattttagaactgcaaaaagcaaaaggaatgagtgcaattttgtctaaagatgaaattgatagcgcacttagaaatctcaagatcatcgaagaacaacaggagcgagaagataaattaactgaagctaaaagaaagcaaaccaaggaaagtgagaaaaaacttaaaatcacacaagctgaattggaagtagccaagcgatctgctgctttaattgaatcgagtggtttaggtaaatatgctgaaagcaaagggataccatcaagtgtaattgcaggcttattggctcaagaatctaaaggtattcgagaagctaagagtcatactggtgcaataggatattttcaaacaaccagtggttatcgtaaacagaacaatatgtctgttgctgatagttatgacttggaaaagtcgggcaaaattgtaattgataatatcgccaaggtttatgaaaaaacaggtgacttggctcaggcaatactttcccataatgcaggtgagggtggagcaagacagtttactaaaactggcaaggttaaaggcagtgcagagcgaaataaggaggtttcgcagtatgtagctaaggtttcaaggtattccgatatcattgctggtggtgttggcaaaggcggtttatccgatggtgatagcgatagagcctatggagagcaaatcaaggcacgtttagagttagttaagcaaggtctaaaccttcaagagcaatatgaggaggagcaagcgaagcgaaccaaggctcgtaacgaagaaattaaccttgcgcaacaaacgggtcaaacagccttaattcctaaaatcaaagagcgatataaagctcaagatgaactcgccaaacttcagcaagattttgaagtaaatggttataagtggactgaagaacaaaaacttgattacacatataaaaccaattctttgcgattagttgctgaaggcaaactctctgaagatcaaagaaaggttgctttagatggcctggaattgcaaaagcagcaagaacttgagcttatagagttggctcgtgaaaaacagttacttgaggcgaaaagctcatacatgggcgagactgagctagcagtaaggcggtatcaagccgagttaaaagagattgaaaaagttagagatgccaaactaaaagctgggttgcttagcgctaataatatggggcaatttcagactttagatagcgcatcagataaggtttttcagagcggttttaatgcttcacaacaagtatttcaacaaaatgacccgcgagagtatgctcaatgggatttgcaaaatcggtattcaactgatgcaggagggctattaaatacatatatagaccaaattaatggtattaatctaattgctgatgaggaacagaggaactcgcaattattggcagcgcgagagcaatatttacaatccagaaaagcactggatgaaaaatatgctcaagatgaacgggacctgaatagctcactttttgaaacccaattggggcaacttggtagcttaacaagtcagcttagtggctactggtcaaatatgactggaattgttaaaaatgcagcgggcgagcaatctggtatatacaagggcatgtatatagcacagcaagcattcgcaattggctcagccacaattagcgcgttacaggcgtataaccagattctagcaagtccgtggtatttggatgtaattagcaaatcaacagcagccaaccttgtgcttgggatggggatggcgaatgttggtctgatcgctggacaaactatagccggcttctctgatggcggctatacaggaaatgggcttaaacatactccagcagggattgtgcataaaggtgaggttgtttggtcgcaagaagatattaaacgctggggtggggtaagtgttgtcgaatctatgcggacgagttcaccaagtggttatgctaacggtggctatgtatcaaacaatcaatctgatgccattgcaacgagaagagagtctagacaatttgaagcgattaattcgaaccaaaagcaatccaattcgaacgagaccccgatcactgtttatgtcactgtaagctctgatggctcaagcaaaactgagactcagaatgattcaaaacagctaggccagttgattggtaatgctgtaagaaccattattcggcaagagcaaagacagggtggtttgttatcaaagtag

SEQ ID NO: 48928 - DNA, 1050 bp, Acinetobacter baumannii
ttggcaacagttcaacaaaaagtgaatgctgtggctgatgctcagaatgcgacagcagagaaagttgatactattcaaacaactgttgacggacatacagcatcgattcaggaagtgtcaaaaagtgtagatggtgtctatgcagagcaattcatgaagtttgatgtgaatggccatgtctcaggacatggttcaatgaacgatggtacaacatcaacattcatctttaactatgatgcaattcagtttggtacgcctgtcggtgttgatggtgtagaacctaaaccattaatgacactgcaaaatactccagttactttgccaaacggtactgttattccgcgtggattgtatgtcgacaatggtagttttggatatatcaatgcgaataggatctgggcagaaaacttaagtgttattagcgctgatctaggttcaattaaagttaaaaatgcaaatattgatgatggtgcaattagcacccttaaaatccaggatgaagcagtaactgttccaataggtgtaaaagcaattgatgtaaagactatcactacttttgcaggtggagttacaagtggacagcctaataatgattttaacaaccacctatcagcgtgggaaaatcatataggtacacttttacaagtaacgttaaatagaagtggtggaaaagttagaattgatgcttcagtaaatatttgcacacctacttttggcgcttttagtgtaagtgacggacgaggtaatccaattgcagcaaatgacagggccatggcttctttttatatttctatatatcggaatggaaatttaattggacggggttcattaggtgcaaatcttgaaactggtactattaatgtcaatttcaacgggactgcggttatcgtttcagctattgatgataacagtactattggcaatgttacctacacacttaaagcaggatttgctcgacaggagggcgttaatattccattaaatgtggaatcaagaagcaactttatgattacttcgagaacgttaagtgttattgaaatgaaaaagtaa

SEQ ID NO: 48929 - DNA, 576 bp, Acinetobacter baumannii
atgagaaaactcatactatttctacatgcatcgcttgacagttttgttgaagggccaaatggggcaatggatataggttggattgcttacgatgccgatttggcaaatcatgcaaataaaatcttgaactctgctgatacggtaatttggggacgtgcgacatacaagatgatgcataattattggccagctatgctttcaaacccagaagcttcagagcatgaacgaaatcatgcagaatggattgaaaagacagagaaaatcgttttttcaaccacattagatacagttgaatggaataattcccgactcgtaaaagaccatgttgaagaagaaattaataaactcaaacagcaaccgggtaaggatatggtgattttgggtagtccacggttcgcgcactatctgatgcaacttggtttaattgatgaatataaaattacagtttcgcccgtgctgcttggtagtggcttgccactatttcaaggtattgagcaaaagaccagtcttaaacttattgaaaataaaacgtttgcttctggagctatcggtcttcactatcaaaagataagctga

SEQ ID NO: 48930 - DNA, 567 bp, Acinetobacter baumannii
ttgtttaaacattctcaaattttgaaaaaaacattaattacaacgtctttaattacattcagcctctcaagtcatgcagcgcttacctttggcaatgctgaagaaggtcaacttaaagtaagcggtactgttcgagccaaatatatttatgattttgactctgaaccgtctaccagtaaattttcctttaatgacgccgtattatggctggactataattccccaaaatggattggccgtctagattatcgggtttatgaatattacgggcatttaggcgatgccaactggctcaccgatgcatggttgggttataaaattaatgacaacagtaaaattattgctggcttaaaccccgttccttttggcttgggccgcttttggggaaatacttattatttaggcattgccaatagtgctggttgggaagatgtacacaaccttggggtaaaatatgatttcaatgatggaatcaatgaagcacaactcgccttttatcctaccgatggtggcacctatagaggtaaaagcaaaggcactgttgcaaatagagatttgagtcgatga

SEQ ID NO: 48931 - DNA, 3672 bp, Acinetobacter baumannii
atggctacaaattcacttggcagattaactttggacttggttgttcagacggctagtttttcagagccactaagtagagctgaacggcaggcgcgaacatcgagtcaagggattgccaattctttaaatattgctgctattgctgtaagtgcattgagtggagcagtggctggtctttcagtggctcagcttgttaattttagtgatcaagttattcagactggaaatgatattcaaaagttttcaaaacttgcgaatgcttcagtgcgtgaatttcagtattacgccaaaggggcagaaactgctggaatttcattggaatcttttgcagataaaatgaaagacatgcaggatcgtataggcgattttcagcaaacaggtggtgggcctttagctgactttttcaccaatattgcccctaaagttggggtaactattcaacagtttcagaaattatcaggacctcaagcgttacagctattttataattctttagagaaagctggcgcgtcaacaaatgacatgaagttttatatggaagcaatcatttctgattcttctttgttaattccattgcttgaaaaaaatggtcaaggttttaagaagtggggtgatgccgctgaaaaggctggcgctatcatgtctgatgatttagttaagagcttagcagaagcaaaacaaaacctccagttaatggatctgcaatggcagggagtcgaggcaagacttgtaaatagtgttgttcctgctatcgaaacggttatagagaattgggatgatattaaagcggtaactattgccgtatctgctggcatcgcaacaagatttgttcctgctttggttgtcgcaacatatcaacttgggcaaactgctatttttgcagttcgtgcgggcgtgggcttagcaagctttgcaagatctgctggcgctacagctggagtcatggctttacttggtggtcccgctggattggcaatgttagcaacacaaattgctgtagctggtggtgcatatttattgatgaccaaacacactcaagatgcaacaagtgcatttgaagagcaaggtttagcacttagtgaacttcgagaaaaatataaaagctttaccgcagcacagttagctataaaaggtattgaggcaagtgaagaaattgaaaagcaaaccaaagatctaaaaagtctttttacagccttagaacaatttgagagcgacttaaaagttcaaggtgatattaagcaatttacagcgattcaagcgtaccttgctagcttaaaacaaggtggggatgaagctaagaatgcttttgctcagctacaaaagcaaggcttggttagtgagagtacacttaagtttgttgctgaattagatacaaaaattaatgctgcaaataactctatagatcgtcaaaaagagatccaaaaattagttaaagatgttactgatgagacaactaaatcacagcaagctcaagcaaaagctgtcaaagactctactaaggcatggcaatcactgacacaaaaacaacgtgactacattacccaagccaaacaagatgtgcttagagaaggatatatcaagacacttgtaagagagggggtaagtgtagataaagcgaatgtttatgctgatgcacagatcgcagcaaatggagaaaatgcttttaaagcaccattgccaaaggatgtgctacttgctgcccgcgaaaacttcaatctaaaaaattatacttttagtaaagacgagttggcggcaattgctcgtgcgcaaggtattgctaaggcaaataattttgctcagattgaaagtttgtatggtttgcctgctggaacacttgctgccttgattcttcaagagtctggggcgaatgctggagcaaaaagtcatactggggcaataggtcttttccaaacaacgagtgtgtttagaaagcagtatggtcttaatgccaaaagttctactgaagaaattgcaacagcagcagctaaagacttatctaaacatttggctgattttggagccatggataaagcactcatggcctacaatgcaggtgcaggtggcttaagaacctatttaaaaggtggtctatcagatagcaagcgtaaagaggttgctggttacgcaccgggtttccagaagtggttcgccggagtatctggaaaatctactgtagacaattcaattttaatgcctacacaggcagatcaacttgaattaattaataaggctgctgaatctcaaaaagccattgatgatgctaaaaaagatgtcgatgctcggtattacaccgaagctcaacgacttgcaaaagagcatcaagataatattgaaaagattaccttcgcctatgctggaacaccacagttaaaggaaaaattggctcaagagaatgctttatatgccgctcaaattgcaaaacttgagtccgataaaaaggaggagtacaaccagtactttgcttttgaaactgatcgaatcaagcagattgaacaaaactttgatcgacaaaaagagttaatcgactctaatgccgagtatgagtacgggaaatcgaaaaaagctttagagattaaagctgctcttgagcgccaaaaacaagttgaaattgctgccgtaaaacgcgaagaagatgcacaaattcagtcggcgtttgagggttatctaaaccagactgaaattgttgtgaagcgttaccaacgtgaacgtgaagaaatacttcaaacttatagtttaagtaaacgtgttcgcgaagagatggcaaaatctaaggattatgcaatttttgaaactttaaaccaagcttctgacagcgtctttcaagttggtcagaactctgctcaatccctatttaatagacttaatcctgaagagttttcaaagtttaatttgcaaaatcaatattcttcggatttcggaggactccaaacatcctataacgatgaagtgtctggcattaaattgattgaaaatgagagtgagcgtaacgctcaattgttggctgctcgtgaacagtttttgaaagcaaaagctgcacttgatgcagattacgcacaaaaagagcgtgatttggatcaacagaattttgaaaccaagatgcaagtttattcgcaaattgctggaatgacggggcaggttttttcagacatgaccgcactattagagcaaagtgttgggaagtcaaatgcgctttacaaaactatgttctttgcctctaaggctgcttcaatagctcaagcaattgttaacacagaagagggggctacaaaagcactggcacaaggtggcgcttatggaagtgttttggctggagttgttagggcaacaggttacgcttcagttggtatcatggcagctcaaacaatccaaggtatggctcataacggtatagacaatatcccgcgtgaaggtacatggcttttagatggtggtgaacgtgtactaaaccctcaacagaacaaagatttgacgaattatttaaataatcgtcaaaacgggtctagtgagggcaatgtgcaaatcagccaacagattacgtttgctgatggatccgcaagcgtcaatacacaaggtcaaaagcaaattgctgaatctctgaataatgcaatggacgcatgggctagacgtgaaagtcgtcaaggcggtgtcttatttaatcttgtaagacgttaa

SEQ ID NO: 48932 - DNA, 492 bp, Acinetobacter baumannii
atgaaaaaagttatttttactgcttttttaagctattttttaattgtaaccagtcaggtccaagctagaactttttacacaactgagcatgtaaggattattgaaaatttgaatggagacaaaagtaatctttttaaaaactccaaaaaatgggtagcaaataactttaattcagctcaagacgtaattcagtatgaaagcccagaagaagggcaattaattattcgtggaattgcttcgccattatgtgattcaacagtaagtaaaatgcaatgtaatggttactcccaagctaaaatatcttttaatttaacaattgatctaaaagataaaagagcacgtctaaaattcagtaattacggttacgcgagatttggtaacacgccaattgatgaccctattacttataagttgatgcttaatagatttgattctttatcgaatgattttgaaaaaacacttagcaccagcaacaataatgactcttggtaa

SEQ ID NO: 48933 - DNA, 516 bp, Acinetobacter baumannii
atggctaagatcagcattacagacttaaagcagagtgtaactactctaaacgttccagttaaaaaagccgtcaagtggaatgttgaagcgactgaaagtaatattgagtcacttaaaaaattgacgaaaaacaattcattagagcttggtgatattgttgagcttgaagctgatatttttgttaaaaaaatgaacttcaaggaaagtcgcgaggcatccaaagcaattgaatgggatcttaattatgagaatcttgaggattcaaaggttaagaaaatcgactcaactcacatgcaagctgctcaattgcttggttcaatttgctcagatcaaaagggaacaccttttttctcaagtgttaatgacatctataaagcagagcctagtttaataaatgctatgtatgctgctgctgatgaagttaataattttttgggaaagtctcggaagaagagcttgcagacagagaactcctcattgaactcgtcctcaacggaatcggcggaaacaccttag

SEQ ID NO: 48934 - DNA, 474 bp, Acinetobacter baumannii
atggctaatgttaaaactcaaaaaacacagttatttactgtgttaaatggtcaagtggttcgttttgtttgctctaaacggattgacttggggcaagattcatttcaaaaaattgatgtaacttgtcttgatgcagaatcaaaacagtatgttcgcggtatgcgtgatcctggtgaaggtgcaatagaaatcgattacgatgatacgaacaccagtcatgacaaacttattgaaattgccgaatctggagagattttagagtggcatgttggctcaggccatgcagcaacaccaccaacttacgataaaacaactgggattaatctaccaaaggatcgtatgtggtggtcattcaagggttatattaatcctactgcacctaatgcatttgaagtcgattctatagttggttattcattcacattgattcgtacttctggcgtaactccaactaaacgcacggtgacttcataa

SEQ ID NO: 48935 - DNA, 372 bp, Acinetobacter baumannii
atgattgatgttccaatttttaaattagccagagcagatccagcggttaaggctctacttgaaagcgatggaattttgcgagtctggaagtttggaagtgctccagatgagccacaagcgccatatgtgacatggcaaacaatttctggtgattcaaatagcaaccttgattcacgtcctgtttcagataatgcaattattcaaattgatgtatacgcaacagatgaagatgttgtggagcaagttgcaactgcaatgagagatgcaatagagcttgattgttatgtggttcgttatggcgaggcagataaggaccccgtaacaggcatgcctcactattcttttgatgttagctggatcgtaaaccgctaa

SEQ ID NO: 48936 - DNA, 357 bp, Acinetobacter baumannii
atgggacagaaagcaagcgacctacgtcaccgcatcactattcaaaaagcaattcaaacccaagaccaaaacacaggaaaattaatcacctcatggtctaattttgcaacaatttgggcggaagttactgacctttcaacaagggatgttattgcggctaaagcagcaaacagcgcaatacaagcccgtgctaaggtgcgatatagcagcgctacaaaacaagttgatagcacaatgcgggttctttttgatggttactattacaagattgatgggaacccaatgcgagacccagactcacgccgtgagtatttaactatcaaccttgcaacaggtgataaagcatggaatgggtga

SEQ ID NO: 48937 - DNA, 294 bp, Acinetobacter baumannii
atgcctattactgacctagcaactgttaaagctcacttgcgttatgacacaaacgataatgatttggagcttgatgcatatagagaagcagcagagcaggctgttttggattatgtaaccgatgaatttgaagatggcaattatccaaatcaatttaaagtagcggttcttcttctgtgcggttattacgatagcaatcgaaatcttgaaaatggaatgatggttgatgacaattatctaccacctccagtaagagctttgctctataaatttcgcaatcctactgctatttga

SEQ ID NO: 48938 - DNA, 183 bp, Acinetobacter baumannii
atgattactaatgattttgctaaaggtgatgtggttgctttgcagggtgcttggactgaccttatgacagttgaaaaggtagagtatgggaaggtttactttacgtcaggcgattatgcagatttaagcaaggtacggcatgcagaaccggaagagatagaagcgggttgtaagctttattaa

SEQ ID NO: 48939 - DNA, 279 bp, Acinetobacter baumannii
atgaaatgcataacaattgagcgcacagttgatgcttggcatgttgaggcgcttttaataagagcaaaagaagatttttcaacattgcctgcatgggtaaaaaagatgcaccaagaaaacaagtttcttattggtggcagttccatttgtgttcacactagagactacatggaagagctggataagcagcatgttttatttcgtcacgataatggtgatgtggaagctctgcttatagatcaattctatagactctataaagatcctatatgcgggtaa

SEQ ID NO: 48940 - DNA, 294 bp, Acinetobacter baumannii
atgaataaaggccagcaatttttcttaattgatgaagatactcggaagatgtgggataaaaatgctttaagtatgctggaacagactagaactcctgaattgaagcgcaaagaactggagcttgaattagttaaactggttcaaagttatcaacgtgacggtttggatatcgattggatatccattgacttacttaatggtgtagatgcgcgagtaaacttaaatgaaactccaaacattcaagaacaagttacagacgctacaggcacccgcacaaacccagaagaatcctaa

SEQ ID NO: 48941 - DNA, 144 bp, Acinetobacter baumannii
atggatgactattcaaaacgaatgcaagaaagaattagaaaggcagaccgagcagatcgtattcatagttacatttgtttgggttcaatcttggttatcttaggtctggctgtctacggggcttacaagctattaatggggtga

SEQ ID NO: 48942 - DNA, 843 bp, Acinetobacter baumannii
atgaatgaaaaacaaacccgctgccctaagtgtctaacagtttataaagtttctcttactcagttaactgttgctcagggtatggtttgttgccctaaatgtaatttaaattttaatgctctgactaatttagtaaatgttgagcagccggaaacggtaaactcatctgctttagctcatggctctatgcaaacacgatatatgacccattctcatgtgttagatatctttgatcaaaaagttgaaaactctaatattgatcttttgacttatttgaataatttaaattacttccataatgaacctattaatgctcttcctaatcttaatttggctgagcaagcaacctctcctgaacaagataacggtaaaaagcatagctggttgtactatacgctttggagttctgcaaatctgattctgattttggtttttacttttcagattctttggtttaaccctaaactcatgcaacaaagccctgcgattagccatgcctttaattatgtttgtcaaatattgcattgcaacaagtcagctgaacaatatcaacttctttatatagaaaaggtaaagctacgtaaaattggtacagagcatactcaactttcaggtgttcttataaatcagaataataaaagtattgagttgcccaacctaaaactcagctttggcaaagaaaccgatcaagaagaaatcatttttacccctcaacaatacttggtcgaaaatttacgtggtattcaacgcattccgaccaatacaccttttagattccaagttgagctaaataaaagcaaaaaaagcctagtaaattatcgattagaaattgtccacccctaa

SEQ ID NO: 48943 - DNA, 147 bp, Acinetobacter baumannii; identical to SEQ ID NO: 48436

SEQ ID NO: 48944 - DNA, 399 bp, Acinetobacter baumannii
atgtacagaattgcgaaaattttattaacaattttaagatccaagctttctatttacgttattggattatttatattaggcagtcttattgcatcaaaaatttcaggagatatgaatctctttgctgcatccggagctgtactaactatatttggattgttccaaactattcaatttacaactattgagaagtttctaaatcaagatgctattgttcattctagtacaggggtaactggaccacctttatcagttgaagaaagtgaacgaattattaatgagaatagaaagaaagcaaaaattaaacttgagaaagaattaaaaagtgagattaaaggaatctcttacacaattattggtacattaatttgggcatacggaatctatcttcctatttaa

SEQ ID NO: 48945 - DNA, 2310 bp, Acinetobacter baumannii
atgaatgtaaacaataagattggggttaaatcacgtaatcacatacgttcaaaacaagtactttttaagatgacaccttgttgtcttgccatatcggctatttttgcacagcaggcttatgcagaaaccgtaactcaaacggctgaggtaagcgaaaatgcaacacaaaaaccagtaacccaattgcaaaagattgtagtaactgcgactcgtacaccaaaaaatattgcagagattgcaggtacagttcaatctattgatcagaaacaaattatccagcaagctacggcgggtcgtaaagttgctgatattcttgctcaacttgtaccatctcttgcatcaagtagtggaacaacaagtaattatggtcagacaatgcgtggacgaaacgtattagtcatgatcgatggcgtttcgcaaacaggttctcgcgatgtttctcgtcaattaaatagtattagtcctggtatgattgaacgcattgaagtaatttcaggtgcgactagtatttatgggtcaggtgctactggcggtattattaatattattactaaaagagcagatacatctaaaccacttagctttgaaacaaaagtaggcattacatcttcagatacattccgtagtgacggcttagcttatgaagtcggacaatctgtctcatttaataaaggcaatatggatggtttcttaggagctaattttacaagtagagggtctcaatttgatggaaatggcgatagaatttccttaagcccttggcaaggtagtacgatggacactgatactatcgatgtaaatgggcgtttaaatttcaatttaaatgatactcagacattgagctttggtgcccagtactataaagataagcaggatactgactacggaccggattactcttatttaccgacaacctctaagagtaatgatgctacaacgccaacttataaggcaattaaaggtttaaagcttagtaatccattatttaccgagcgttatgctgttaattcacagtatcaaaatcaagactttttaggccaaatactaaatgttgaagcatattatagaaatgaaaaatcacgtttcttcccatatggcctatcaaataaatccgtgacttctgtaaaccagtctcaatcagaaattgaagtagctggattacgttcaactatgcaaaccgatcttaatattgccaatcgggatatgaaaataacctatggccttgattatgattgggaaaaagataagcaatttgttgatattttggcaactcaatatccttatttagtgtatacaccaacaggccaacgtaaaggttatggaccaaacactgaaattcaaaatattggagcatttgttcaaagcgattatgcagttacggataaattgaacttgcaagcaggtattcgttaccaatatattcaagcggataccgatgcttatattcctagccgagagacaacaatggttccggcaggatcaacacatgatgataagccgttatttaatttaggtggagtttataaacttacagatgcacagcaggtgtatgctaatttctctcagggctttagtttccctgacgtacaacgtatgttgcgcgatgtttctacttataccgtttcaacagcaaatctacagccaattacagtaaatagttatgaactaggttggcgtttgaatcaggatgatggcctaaatctgggattgactggtttttacaatacttcggataaaactgtccaattcaacaatcgtgcagcaaaggttgtagatacagatcaaagagtatacggggcggaagcaactattagttatccatttatggaaaattataaggtcggtggcactttaggatatacccgtggtcagtataaagacgtggcgaataaatggcatgaattaaactcatttacggttgctccagtgaaaggaaccctttttgctgaatgggataataatgaagggtatggtgttcgtgttcagatgcaagctattaaaggaacaaataaagcttataaagatgaccgtgaattagcagcatttgcaacaactcaagatgaagctttccaaaacgctgtaaagaatgatgcgaatagtgctgcgcaaatcaaaggttataccactatggatgtattagcacatttcccggcttggaaaggtcgtgtagattttggtgtttataatgtgtggaaccgtcagtatcgaacagtatttgctcagcaagcagccgtctctaatgctaatccgttgttagcaatccctgcagaaggccgtacttatggtttaagttatacttttaactattaa

SEQ ID NO: 48946 - DNA, 7269 bp, Acinetobacter baumannii
atgggatcttctaactacttattgtcggccgttaagcctaatttaggtgagtggcaagaagtagttctatacatgaaaggtaagtctactggggcggcaactggtttagggacaattgataatccacgtactttcccagcacaagctgaatattatgccccaatgtttattgcaaactacaatttccagacaggaatttgtcagcttaattacattattgttgaagataacaactctttagcttctgctaatgatgcaacagcaacggcaaatgatttattcaaaacagcaactaacagaacagaagctgaagctgaaaggaccagtaagcttgaatcaagaatgcagaatgctgaaacaggtattcagagcaacgctcaagcattattgaaaacagctacaaagagtgatcttgatagcgccatggggcgtgtggcgactgatattacagctgcagtgaataacattaagattggtggtgtaaacgccgtagctaattcagaagcgcctcgaacatccacagcagcaacaagccgtgaatacttaatgtatgaacgtagcaaagagttgaaagctttttatgacgaaaatttagataagccggttacgatttcatttgaagtgagtgtaccggttgctggaactgtacaagtatattcatctaatggatcagctcacttcttcacaacttctgttacagtcactaaagcaaatgaatttcaaaaatttgaagttaccgtgtttcctaaattacacactggcagcacaaccgaatcgactattgagttttacggtacatatggcactggtcgaattccaacaattcaaaaattgcagatcgaagcaggtaataaagctacagcgtggagcccaagccctcgagatactcaaagttcattaaatgcaaatgcggaagcgattaagcttactcaagctgaagtgaagaagcatggtgatagtttatcttctcaaagtttagatatttcaaaacttagaaatgatctaactataaccaataccgaagtaagtaaaaaagcgtcaactgaagcattacaaactacaaattcacaagttactgaacaagctggtcagattaaagctgttactgaacaggctaatactttatctgcaaatcttaacaagtccgcaccggctggtacgaacttgttgattaactctaacgtagttggaaactacgatggcgtttcatatcctcatttacgctataagcttggtgaagactgggaagtaggagcaaagtacactcttctttggtgtgcagagcatacacgtggtgctggtgacacaaactcaaatttagctgtatatgctggtggaggaagtcagtttttacagcaggttattaacacttcaggtaaggtaataagcaaaattacttttacgaagacttcagctggtaccgccaaagaagttaacttttatatgcttagcagaccaactgcagacaagcaaagtgttggtactgtgtattgggctgtgttagttaaaggggatttcataactacagataattggattgcaagtccttacgacttcaatgcagcattcgatcaagtatcagcaaatttaaatgaatttaaacaaacgtatgttactgaaagtactgctttagctaaaaaaactcaaaacttagaatcaacaattaatgatcctgtaaatggtttggctgcacaggctaaacaaatttccgaccggatgactaaatctgatgttgatagcgcaatatcaactgcgaccgaagcattgaaaacaagtatcggtggtaagtcttttgacaacatcgttatcgggggtaatgtcgaaaaaagtaaaacgggtggttatttacaagtatcatatcccttagcaaaaagtttaaatgcacctggtattactgttaccgtcagagcaaaagttacctttgataatggagggaacaatgcagccaatttgcgtgtatatattggcggaggtaatgtatttaatgcagatgcacctattttttcagctagtaaagatatctacgaatttaccttaactacaatttctagaacagacgcaactgttgttaatttttattgttttccaaattcttcagcaaatgctaatgccactactacagtgcattgggtagaagtttatgaaggtaataataaagcgttaaatgataaggtaagtacttcaactctaattaaggattactcttctaaagcagatactgctcaagcaataacttctgcaactgaaacccttgaagctaaatttcgtcaaaaatttggcgatctatggactaacagttcagcaactcttgatagtactcgttatacaaaaactgagactaatcaagcgattgcagaggaaagtaaaataatcaaagccgctatttcaactagtggtggtgataatattattaaaaatggtgatttctcaagccctttaggcaccttaaattggcgtcaaaattctgctgtggcaggtaatctacttgaagtttataaagattcaaaaggtgctacttgggggcactttaaatctactaatacaactacatactttaaagggtttattgaaactctgacattggcagatggtttagagatgaatcagaagtacacattgtcatttaaagcaatgtcgttgacagctgcacagactcaaattttattaattatacaccgtcgagattcatcaggtagtaacaaccaaattggtactacatggaataacatttcgactgataaagaaacattatgtacttatacctttgatacaaatattattaatttacagcatattaacttaattttatattcgcaagtaggttttgctcctgactttttaattagagaagtgcaacttgaaaaaggtgagttagccactggttttagaaaaaatcctcgtgaactaattaaggatcttgaagctaatgcttctgcaattgagggtactaaagcggatgttcaaaaaaacggtgagaagattacttcacttgcagagaattatgcgactttaaaatctactgtagacaataataaaactgctgtagatggtaagtttcaggaaattaattcaactattagtgataatcaacagaacaccacacagtctattaataacttggaatcaagttataaacaattaaatcaggaccttggtcaagttttcaattaccgtgtttattcatgtggctggaatggctttttcacagggattaaaaacttaaagggtgaaatcaaatcagtagcttcagctcgtggtttttcagtacatgttttagcagctgatggttctattgcttcttcaactagatatgatacttatgcagctgtagcaaatgctacggcaatgagtaacgctattgctgcgattccaaatgacacctttgttatcgttacaaactacgacagtattggggtaaacctagcaccagttaagaatgcactaatttcattaggtgccaatccattcacacttgatcaaataacgggtcgggatgcatacattttagttggtcagaaggggattggttcaggtcgtggtatagaattgcatgcaacaccagatactggaccaaatggggctaagcaaatcatgcttgcagtccaagtagttagtggtatcccgattggtctggcaaacaatagtggaaacttacaaaaggttttagaaaaccacgcacaaattcttcaagaaaaaattacaagatctgatgcgaaagaagtatttgctgaggaaatcaaagtttttaaagcacaacttgatactttacgttactcagaagagaactggattttacttggtgatgatactaaaaatttaagtatttctactggtacaaaccgaactgtagctgtttgggaactgcaatataaacacaaggaaattccaattgataaaggtgatccgattgttgcaagaatcaaatatacggcgacagctggtttagtcggagctacatgtcttattcaatttcatggtgctacatatggtgtgggattaccagcttttactgttgctgcaagtggtgaaatagaactaacaggtattttcccatcagatttaaaagccacagcttatgacgctattccattgggcttacgatttgataatgctccttcgggaggaattattactatcactaatatgtttattagccggggtaattcagcgccaaactttaaaggtggttttagatcctctcttaaacaaaatgctcaatttgttgaagatacttttatcaaggctgatgttaataagggagttatagctcagcaaatccaacaatatgatgcaactatacctggtggtttatcttctgtagtaaaaacaacaaaagctacagctgaccaaacatcaaaggatctagctacacttagaaatactgaaatttctcagcttcaaacaagtacaaataatcttggttccgcattagaaaacacaacaatgctggcgatgatgattactaatggaaaattgttgcagggagacgtaaatttcaaaaaaggtaacaatggtgtatctgtctataacaatgccggcaatgggaacgtgacagttactcgtgtcgcgaaaagtgctgataacccaactacatcaacctatgaaattgaaattaaaaccattggtgctgccagcccaacatggggtggatttgttcaactcgtttatggccgtgcaaatgctgtatttgtcattaaatatctaatcaaactaccaattggatataagttagttaatgctggtaactcaatggggacaggtgcaattgatcgattcattggcagtactgagggtacaggcaaattcgaaacatatatccgaatgattaaatgcggtgcggtaggaactttttcaaacgcaggacatgtttatgtagcgggtggggctacaccaacagctactgcaccgttagtttggaccttagctcaaattgaacaatatgatgttactgattacgcttcagctgatccgacgttacaagattttgtttcttcagccacagactctatttcaacattaaccaacttcaaagaaacttgggcggccaaacttacagagatgtcttcaaaattagacagtaagaacggcgcttatattttgaatgcagatataacaaatactaatgttgagcgtgcaattgcagcatcatcacagaaaatcacttctgaatataccaatgctatgagtgtgcagccattgagttcaggtgcgggtaaaattttcgttaagcctttaacttggcgtcaaccgatcacgacttcgggtacattggttattaagacaccaattacagttggtgcgtacatgaccaaggttaaaatttctggttataactacaataacaaagaagataatattttcgatctggatttggcattctatgcatatacgtcaacagtgccattttattcgaatatgacctctcgttcttttggtatcactttagatgaaagtaatgctacgactaaaggtctagctttagctttagatagcaataataaggtgtgcatcttaattaccaaaaaagatgcttggtcttacccagcaattacagttgagtcggccactattactcatacaaatccgccagattactttaaagatggctggacggcggccattgaaacagatttatcagtttataagtcagttacgccgtttacagtgacttcaatgatggaaaccactgcaggttcacaagccaaagtggatgttccaatggctcagttaagtgatattgctgctgataataaactcacaccagttgagaaaaaacaggcgaagttggtttgggatacactttatcaaactgatgcaagcttgcgagctgaggcagtcacttatggtatatcttctgctgcttatgccacggcattcagtactttaaatacatatttggcatctttattcgcaaatatgaatgtaactagtacgattgaccgaaaccagttcattacaaactttgctaacgttcacaatgcacgacaagcattagtacgttcaatatcggagaaggctaaagaaatagctgatactgccaaggatatagcttctactacaaaagcgacattagagcgtgattacatgacgtctaccaagacgaatgaagcaatcgcatcttcaacagaaagaatgtctgcactgtattctgcaaatggtcaaaagatcatggcatcagtactagaaacatggcaaaaagattggttagtaaaaactccaagtggaaataagcctgaacttagtttagtagccgatgcaacttgtcgtggaggatatgcattaagaattggtaataacgtaggtaatgatgaagcctggttaaattggttcacatctttgcctatcgatgacaataaatattaccgagttaagtatagattccgccgtgtaagtggtaccggagttgtttatgttggtgcgacctgtcaaaacgccaataaaacaaaatatattgctcaagataactctgaaatcaatgatatcggttcaagtcactatttagtcgcaggtaccgcaccagcgttgggaacttggataaccggtactgcttattttaaggggcgatctgctggtgcaagtgcaggtgctggcactctactaagccctaaaacatttgctaataaagctgctttctttacaccagtattcattggtaactattccggtaaagctggtgaagtggatctagactttatagatattgaagatgctgacaacattgctgattttgaaaatttcaaaaccacatatacaactgatgtgggagcatatgctggtgcattacaaactttggtttctgtttacggccaaaatgctatcaagcttaaatcacaagctgatttgatcgatggtgtgaaaggtaagtacgtaatgggaatggataataatggtgtgttctctggaatgtctatggtcagcgagcaaacgaatggaactgtgctcagctcaataggtttccaagcggatagaattttcttcacaactggttcttcttctactaaatatatgccgttcataatccaagacaatcaagttttgatgaacagtgatgtatttattaagaatttgacagccgcaaactttaaggccaagtctcttacagctgaattattcaatgttgacaagttaagtgccataactggtgaacttgggactttaattacttataaagatcctagtcagcctcaaaaagcaagaatggtcatttcagggaccgctttaaagttatatgacgataacaatattgagagaatttatattggtttataa

SEQ ID NO: 48947 - DNA, 654 bp, Acinetobacter baumannii
atggctttctttgaatacgaaacgcagaataaaactataaataacagttttggaaacgttttaaatccgtttaaagaacgttttgctaagaatcctgtcttgtggtctggtctaactgttgatcgagctgtttcacattatcaggaactttacgcattagggacactttcagcggcccattttggaattgaaattcgcccgtaccgtgcaaacagtaaaattgctcaagcaaatattccaatttttgatcattcaaacaaagttgcttggttagccaataatgtagatgtatcactactagatgcccaaaccgatgcagtgcatgtggggcattttcaactcaaccatgtaactggtaatgcttcaaatgagttgagcatttcatttattgagactaaagaagcagctattgcgaatagtgctaaagctataaaagaaataatgtttaataaggatggtactcagccgccaccaattgaatacttaatgagattaaaaatatatgcttttgataaagctgcaagaaatcaaaaccaatttgaaattgagcatctagtttcacttcaagcaggcaatttgccccttgatgcctctaataaagcacatgccattgttactttaaatttcatcaaaatgtttcccaacttaaaataa

SEQ ID NO: 48948 - DNA, 690 bp, Acinetobacter baumannii
ttgacgaataaagatgatgaattaatcgaatcaacatctggacatttatctgatagctttttcacatacgatacaagtaatggaacattatatttctgttggagaaaacttctatactttaaagatggaagagatcgcagtttagcaaagtgttcattgttagcaagtaaaacgaatgacggaataaactggtctgggaaatttgaaatttatccagaatttacgaacattaataaaaatattttggcatcacctgcgatgatttttaatcctatcgatgggcttttctatctctaccatatcgatgattctgtaaacggaagaattactttacagaaaacagcaaatttggaaaatccaaattggtctgatcctatttacccatctggttttgatgcaatcactccatatcatatggaaataaaatgggttggcgatgcatttgtaatgcttattcatgaagaagttaatgatcaaatacattttgcaatttcttatgatggcttcaattttcaattggggaaaagtgttttagttggtgagacttcactttataaatcgtcatttattccaatttttgagaattcaaaaatgtcaatgaaaatcctttatacaacagatcagcgttttacaccgacatggcgtttacattcaacacaaacgaattttgtagaaattggagatcaataa

SEQ ID NO: 48949 - DNA, 1062 bp, Acinetobacter baumannii
atgacattagagctgaaaacgaatgtagtagtaaaaaactatattataagtgcattagaaatgactattcctagtgattacaatgctaagttagacttttggaaaggcgactatgtattaaatggtaaaaaaaagacactgactgaaatgatttcaactacacgcagtactgtagctggatttactaataaagatggcttctacagtgaagttgcggcaaatgtacctcgtatacattatgatgagaaggttggaattggtctactatgtgaagctgctgtaacgaatcttgttgcaaatcctacgcagcctgtgtctcaaattgtaagcgttaacttaaccaccacgaattatctaatttttcaagtatttggtgttggacaagctgaaattacaattggtagtgttgcatctggtattgtgacacaagatcagccttttatttataaagcatcggctgtacaaactgtaaatgtaaatattaccgtaactggaaatcttacacattttcaattgtttcaaagtaacagtgcaaaaccaattcaaacccatataaaaaattcacaggctgctgatattcattattttaaacaaacaccacatcgcaaagggacgttgattttaaaaagaagtgaaataccagatttgactaatattattgcgacaggaagatcatttactatcgtacaaatgcttgagaaaacttcaggagctattctacttgcttcatcaaaatcaagcacattaagtcaaaaattacttaaatattcaaatgcttcaataactaattcctctgctgaatacaaatttgacgttgttaattatgatgaaacaatagctatatcgtgggacttagatacgctacaagtcaaaatactctcatcaggaaatatttttaagcaaacggtgacagcaatggatggtgtcgatggaatagatcgattaattttaggtacaacagctaccggttggggtgccacttgtgaacagatcattaaagaactctatgtatacgacagagttttgacagataacgaattattggcaattaaaggtgagtaa

SEQ ID NO: 48950 - DNA, 810 bp, Acinetobacter baumannii
atgacccttcaaaatacccttgataccatcgcaccactcggccacaccatcattgccgtatcagctcctccagcagctggagctgacacaactgcatggatcgaccacttaacatcagttagtgactcaattgaacaacgtccagcaattctagttgtacctttttcagatattgaagcagctgaagcttttgcagatcaagtacctgttaaatcatcatatcgtgtaatctgcccttgctatcatggtgctgcaggccaagagcctgaaattgcggcagcaatcgcagctgctttagcagattcaaatgatcccgctgtgccctttaatggtgtgaatcttggtggtgtaactgctgtatcagatgaatttaaacttacatttgaacgcatggaacgtgctatgaataatggcgtttgtgtaattactactggtgcagatggtaaaccggaaatcttacgtgcaatctcaacttatcgcattaatccggactcaggcttagctgacgaccttatgctggatatcaatggtgtattaaccattgattatgttcgtaaagtgattcgtgaagatttaatgaaggaacgacgtcgaaaaaatactgctgcacaacgtcgtaatatcaagtctattattttgtctcgcgcccttcagctcgataaagctgaaatcttacaaaatgtccgggaaacagcagatcaaattactgtaattgaagatacaactgaccgttaccgtgtaaatgtaaaagtccctgccgattgggtccgcggtatgcatgttatagctacaaccctagacgtttattaa

SEQ ID NO: 48951 - DNA, 378 bp, Acinetobacter baumannii
atggctgaagagtctgttggatatgtaattttgagtgttgatgggcaagaatttgattgtgcatcattcaacccaactaagaattcaggaaagcgcccagttcctactatgaatcgaactggtgaagtgaaacatacagcaaaaggtattaaaacttatggtctatcaattgcggtagttatccctgatggtaaagacccaattgattggctcagtattgaaaatggtcgtctgagttcagagtctgagacgggtaatttccgagaaacctatattgacgtcaatatccaaacgatgagtgatacatatgacgtcaatggtgaagttcgtcggaaccttgaaggttttgctttaagttatataaatgaaagtatgtaa

SEQ ID NO: 48952 - DNA, 342 bp, Acinetobacter baumannii
atgaaacaaattcagattgaaggaactttgcctgtctccattaaaaaaatggttggtcaaacagaagtgaaacttcgtaatgttgttatgcgtcaggtaacatcgattgaatatctacaagctcaagcattaatggaacccggacaatttatttctattgcagatttagcttcaatgaccaagcttgtcgatgaagctgggcatgaacatgaaattacttacgacatgttaggtcattcttcttcagctaatttaaagtatttagaagaaaaacgtactgagttaattgcaaaggaagcagccgagagttcatccgaagagcaagaatcatcagaaatttaa

SEQ ID NO: 48953 - DNA, 210 bp, Acinetobacter baumannii
atgcttctgggtgtgccttatgatcaagcggtcattatgccgcttgatatggctttagcgttactcaatgatgagcggctagacaatactcatcaaacaagacaaacaaaatctaacgccacttccgataaatctaacgtgcatttaattaaagctgaaggtactacttttgttgctaaaggtcgtaagaactctaaatccaaggattaa

SEQ ID NO: 48954 - DNA, 276 bp, Acinetobacter baumannii
atgagtggaagcaatactactgtttcattaacacttcaaatcaagggtcagcaagctacccaagaaatgaagcgtttcactgatcagcaaattcaagctaacaaaacgatcaatacgcaatggactcagattggttccgctcaagctaaattcgttaatactgcaagagctggtacacgagaaactattaatactgctcgtgctggtgaacagttattgcgtacaaaccgtatgcttgaaggggttttacgtcatcaaagccaatctctaaaataa

SEQ ID NO: 48955 - DNA, 1818 bp, Acinetobacter baumannii
atgtcactctggcaaaaaagcacggctataggtggagcggctatagctggtggtatgtatctttcaaatactctacagaagccacgaaattatgatcaacaattaacttatattgctgcaactgccactggtgggcaaggtatgacacctgaagcacgtctggcagcacgtggtcagttaaatgaatatattaaagcggctgtacgtaatggtggcggtacacgtgaagatgctgcagaagctgctaatgcattgattgcttccggtaaatatgaacttaataatgtttctgctgcgttaaatgctgcagttaaaacagcctttgcaacaggtgccgcagctacagatgctgctgccctaactacacgtatgcaagactttggtattacagatttacaacgtggtcatgatatagcagtacgtggtggtcagcttggtagttttgaatataaagaccaagctaaatggctggcacaacaaatggctgccgcacgagctgttggttatagtggcgaaaaaggcttcgttgaacttgtagcaatgaatcaggttgcaatgaaaacagctggtactgctgatgaggctgggaacaatgttgttaaccttcttgcaaagttatcaagccgtgaatttagtaaatctattggagatgctgttgtcccaagagctggagatccaacaaaatctgatggtaagaaaaagccaaaagaagtctttgattggaatacttactctattcaacagcgtgagcaaggtgtctatggggtcgaagcatttgtaaaattgcttgagcgtcaattagcaagtaactctcagtatcaaaaattacaggctcaagcgaaatcctcaaattcagcaacacgtaatgcagctctgcaggacatgagcaatattgctcttggttcagaaattggtgagattattgctgacagacaggccctaatggcagcattaagtgttgtttataataaagacactttaaataatttaagaaaacaattgccaaatgcgtctggcacagttgacgctgattacgcaatggttagtcaggctgaatgggctaaagatcaggcattaaaccaagagaaattattcgctcaatctaaagcctatgatgctgtttctgaatcactaggcaatgttaaagaaaaattatctgactgggcatctggaaatgaagcattagcagcgagtgcctatagtgcctctgtagcacttggagcacttgctttaggtgcgggtgcagcaacaatattaggaggtaaaggtggtgtcgcaggtaaagctggaactgctatggcatcacgagcaattccatacctccaaaaagcggctgttccactcactatcgcagctggggcttataatctatatgatacagcaacagatgaaacattaactaaagcacaaaagcagactcaatcctccgcaattgtcggtggaactggtggggctttagctggtggttatgcaggagcagcaatcggttcagctattttccccggagttggtacagcagtcggcggaataattggtggaggtcttggctatctattgggagaaaaaggcggacaagagcttggagaatacttttccgaacagacaagtatttcaggtgagcaaaaatcgttaatggaacagcatgctcaacaaaatgaacgaattattcaaggcttacaagatgttaaaaatgcggtagctaataataaacctgtttttggcggcggttctttactggatatgatttctcaaaatgctgccactgagcaaaaaaggttaggtgcgcctaatgtgcctttttatttgcaacgacggtaa

SEQ ID NO: 48956 - DNA, 591 bp, Acinetobacter baumannii
atgaaaaagttcgctgtgataactactttaagcttaattactttaactggatgcacgaaaaaaaatgatattgaaaatactcaagctattagtgaacctcaaataatagataccgcctcaaacttaaatagtgatgaacgtcgaaagttggctttgttacttactatgacactaagtcaaatgggtcaattaagcgaagctaaaaaagttgaagaggaatatagcaaaattaaagatccaaccactgctgacaaatttttaattgaaaaatacactacagctaaaagtgaattagaacaactagctttaacgggtgattatcaggctcaaaggaatattgcttatgcttatgcaactgaccctgaaaagtttggtcgaaatcatattcaggcatgtggttggtatttagtagttttaagctctggcagccctaaagttgatgctggtgataaaagcaatgtagaagtttattgtagccataaatttttgaatgatagcgaacgttcacaagcatttgcctttggcaaagaaacttatgggaaaatttataaagacactaataaatttgatagtttttacggaaccatataa

SEQ ID NO: 48957 - DNA, 1176 bp, Acinetobacter baumannii
atgggttggcaaacagatttacaagatgcaagtttcagaggtgtgcaatttgaatgtacatcaactagtgattctatagctaaagtactcgcaatccatcaagccccctactctaatgatgctgaaatagaggacatgggcaatgatccacgtaaaatttcaattcaagcagtttatatcggttccgactatttaacatgggtcaatgctttagaatcagcactgctagcgactggctcaggtgagctaattcatccagtttttggtgttcagcaagttaatgtagcaacttacactatcaaccatgatgcagaaaatcctgatttttgcagtatttctatcgagtttattaaagcaaaagccgaaaaacgtgagctattcttacctgttgctacgcctgagaaaattgctacagcaactattatagatgctccagcttcagcattggaaagtgcgttagaaaaactcaaaattggcgacactgataagttatttaatacagttaatacgattcgcaccggtatcgatcaggcacgtaattatttaggtgttgcaaaacaagcaattgaggatgttttatcacctgccgattggattgttgggttagttgatgacgtcaccaagcttgtgacctttgataccaatatttcagctttatcgaaatggcgtgatgttgtacatcgagttgagcgttttgaaaacctttttcaaaatgatgataactctccggagttacaacgagtttggcgctcaacacttgctgctagtcaagtggctattgcacagcaagttgttgcaactacacgtacagaaatggcaaacaaccaagaaattagctttaccccagttgatttggctcttgtacgaaaaaaaacacgagaagtacttcagcaagctatccgtgaagaacgagctattaatacctttgaaagcatcgcacaaattcaggtctataaagacgttgctgcccagattcaggatcaaatccaagaactcattgaaacacgtccacccatcactaaaacacaagtaccagtgccttgcaccctgcattggttagcacactatttatatggtgatatgcgtcgtgcagaagaaattcgtcgtttaaaccctgatttgattaaccctgctgcattgcaggtcggcatggagctaacaatctatgcaagataa

SEQ ID NO: 48958 - DNA, 1056 bp, Acinetobacter baumannii
atgcaagataatcaaggtaatgaaattcgcctagtgattgctggacttgaagctaaaggctgggatcaggttgaaattgacagtcagattgatacaccagcagaaaactggagctttacgctatttgaaactggtgggctagccttaaatcctgccattaaaggtggtgcaaaagtacaagcttattattctaatcaactcattttaactgctgttgcagatcgtatttctgaagctgtaagccgtgagggctatggcctgcaagtttctggccgtgacctcgttggacaattaattgattgttctgtgcctatttttaatggccgccaaatcacacttgaagagttggtaggtcgctatgtattaggcggtgacttaggttcactgtttcaagatgtccgtattcaggataatgcatggttaaagaataaagtctctgttgagccgggtgaatcgctttgggattcattgaccaaggcagcacaaatcactggacaacatgtctggcttgatccagacgggactttacaaatcggtgacccttttgcaaacccatatcatttgcaaactccattgcgcctgatgcgccctttaaacaacagcaataacgttttaagtcttcagtatgacaacgacgtttctaatgtctttagccatatcaaggttttgagccaagacggcaacgcaaactcaatattatctgaaaccaccgctcaaacacagtatgcctataaccgcttgaaaatggtcactttgggcgatgtggaaactgaagctgaagcaaatgcagcattagaaaaaatcaaaaaagacaatgaccttgaagcacacaccctaaccgcaacagtatcaggttggatgatcgacggaaagctgtggtcaacaggctggtacatcaacttagaaaccaatgttttatcaagagcgacagccaaatgggctgtgtatggtcgcacgtttcagcttgaccgtaagaatggcaaaacaacaaaacttcttctgaagcgtcagggtgattgggcaaatccactggtactgaaggagaaaaaatcatga

SEQ ID NO: 48959 - DNA, 486 bp, Acinetobacter baumannii
atgatgaaagctgtagcagcccagataaataaggctatgaaacaaatccggcaaccattgttcgccctggtcgcacgtggtggctcaaaagtattgcagttaaagggctttgctgatgaaacattgcaagaagttgagctttttcagcaagtcggcttcaactcacacattcctgaaggtgcccgtgttgtcgtcatccctttgcatggcaagacttcccgttcaattgttgttgcaacgactggtggagctgtggtcgtcaacgtgaatgaaggtgaaacctgtgtatatgaccaatttggacacagtcttttgcttaaagaagatggtacgcatatcaccgctggggacctttttgttgatgacggtgatttgcatgtgacgaatggtcaagtctttgataaggaaggctcaatgcaggaaatgcgcgacatttataacaaacacaaacacggtaatacaccgattccaactgaacaaatgtag

SEQ ID NO: 48960 - DNA, 363 bp, Acinetobacter baumannii
atggcgaatattgatttaaaaacgaaagattatgtgttgatgagccttgatgctgcatttagcaaggatgaggttcaagcaatttgtcagcgtttaaatattcatcgacggaagtattgggcaaatcctaaccttggcagccgtttttatactttgagacgctcaaaagatgtttctcgtaccatccaaacagttaagcaatatgcagaagaagccttagaaggtttggtgccgaatcgttttgcttcaattctggtaaatgctattcagacagttaaaagtcaggtggacctaaatattgaagttacacagctatctggtcagaaacaaacaatcctttattttgttaaggttggaggctaa

SEQ ID NO: 48961 - DNA, 1047 bp, Acinetobacter baumannii
atggcatatccgatcaagacatttgaccaattacgtgctgacattattcaggaaatccaaaatttaactggattaacaatggatgatgaagatgatgcagccattcgcgcagatggtgaagctgctgtagttgagggcctttatcatcatcaaagttatattcaaaaacagctatttgttgctacagctgatgagcctttcctttatatacatgcaaaacgcttggaatgtccgcgtaatggaggctctaaggcttcaggacgagtcagagcgacatcaaatattgcggtcactattccagctggtactaaagtcacagatggtaaaggtcattactggctaactttatataaagagacacttatcgaaaataaacctaaagaaatccaagtcattgctgaatttgaaggtgtgagctggaatttcgatggtgagcaactgctctgggttagtcctttaccgggtgttgcagcacaagtggatgttattgaaatatctgcgggttttgatgttgaagatgttgaagcttggcgccaacggatgatggataaagaggctttaggtcttattcgtgatcgtgaagctgatcttcgacgcatcgtaaaagatgtgccgggtgtagctgatgtttttatttttccgaaacgtcgtggccttggttctttggatgttgcaatcacagcagctggtaatcccccaaactccccaagctctgcacttttagctttagtacaaacggctttagaagaatattcaggtttttggggtgacgtaagagcttatgcaccaaccaaggaatatttggatatcaccgctgtatttactgggtcagtaagtgaaacagaggttgaaaaagttattcgtgactatgttggtttactaaagccgggtgaaacttatgttgcttcaacactagttagtcgaattaaagatttgcaaggtctaacagatattcaacttacacccggagtaaatcaaacacctactttgagcgtatttactaccggttggctccggatcggcacactcaaggtgaacccatcatga

SEQ ID NO: 48962 - DNA, 537 bp, Acinetobacter baumannii
atgacctttgatcaaacagtagagctttatgcttcagtactccgccaattactgccagctggcggttatgacaactcacctaaaagtgttgtcgcaaaagatatttacgcccatgcaaaagtacttgcacaagctgatgttgatgcaaaacgtattttgactacgttggaacatattcctgaagaattactaaccgagtatgaagcagctctagggctaccactgaagtgttctgtgaataaaacaaaaactattgaagaacgtcttcagatcattcaatggattcaacaaaccaagaacgttttaaaccgtgcttatctggagcagatattagcgatgtttgacgttgaattaattgatcttgtgagatttacaccaatgcaatgtacagagccatgcgactctccagttaatacagacagccttcgttataaagtcaaattaattctaaaagccccagtgcaagctgatatggcatgcatcattgaaaattatttaccagcctatgtacgttatgacattgaggaaaaaatatga

SEQ ID NO: 48963 - DNA, 1539 bp, Acinetobacter baumannii
atgaaacgaattgatagtgtaaatgcacgtccagatgtgaacggaactggtaaagctggcttccatgcaaatgatgatgtgcccggacaagatgcaacttatctcactccagattttctcaataccatacaagaagaactagcaaacctacttgagcttagaggtattactttagatccagaaaaacgggatcaactttttaatgctttagctggtaaagatgatgttgatgcggctttagatactgtccagacattacttgataacgagcgcaatgcacgtattaaggctgaccaagatcatttggatgcgttaaatcctcatccgcaatatgtgatgagaaaggactttagacttctatatagaactctaacgcctgagacgacagtaaacccgaagatttatacagatgatccgcaaaactggcagataaaacatacagttgaaaatattagtgctcacatcatgccgaatggtgttattgagcaaacaattaaagtaagaaccgtatatggcgattacaatgcgcaggtctatctgcctattgggctttctaacattctaaatgtctctgcattgtatcaaggacaacgtgagaatcaggacgctgaagatgactcagctatacgtttacttgatatttacgacgagacagttcaattagagaatggtttacaagaatgtagaaccgttgttaattttcgatttgactatgtcagtggcaatactggtggacaacgagaacggtttgcttatttaaaaattatgggttttggtgcttcaaatacagatttggagaatctaaatagttatccgtatccttattatagaaatcaggatgatctagatggtcaggttgtatatattgatcagaatcttacaaatgtaagcttgctagagctattcatccaaacttatggtgcaccaactgctactacaagagctatttttgttattgcttcaggtgtgacactgattgctgttacttctggtagttggttagatggctcaagccgtcaaatcattaactacggtcatatatacggtactggtggttctggcggatactatgatgaaaatactgctatggttggtgatggtggtacggcaatcattgcacagaatgctagtagctttattgatgtacgtaactatggtttgattgcaggcggtggtggtggcggtgcagctggtaagtctgagtattcaataggtgcacaagattattatgctgttggcgcaggtggtggtggtattccactaggtacaggtggagttaatatcaatcaggctgtacctgaaggcaaaacactagtaaatcttgctggagaagctgctactttatctgtagcaggtaatggcgcaactggtacaggtttaaccgctggtggcggtggaaacgttggtgaggatggtaaagctagtgaatcaacccttgataatggtattgttggtaaagctggcttcatttaccaaggtaacgttacgatcacaaatattggtggtggacaaatgaaaggtagattaccgtcaatatag

SEQ ID NO: 48964 - DNA, 741 bp, Acinetobacter baumannii
  misc_feature (475)..(484): n is a, c, g, or t
gtgggtttgacaagtatagatgacgacaacattctaaacgttttgggaccaattgaacctaaagcagataaagaaactaactcaactcaagcaaaaaaatctgcgaagaaggccaatatcaaagaggaaaattggactcgttaccataatgacaaaccggttgagtctccgttagctggccttattgaaaagctaaagaaaactaaaactgcagatgcagctaatagtcttattgaggaaacgaaagactgggcttctgaagatcaaaaatcttttttaactgagttaaataaacacttagtcattattgctggtcaatcaaaagaaaatatttctattggggaaaagatcagacaagcaaaggacctgactacattagatgcccttgaaattgatatttctgaagctgatgaacgtatacaagaacgtctaatggagctggttgtaaaaagaagaaaagaacttgaggttgaannnnnnnnnntcacagtatggatgtgtgaaaacggattttatccatctcaaaaaaatggattcatggttttaaaacgtggcaaagaagtagcaaagatatcaatgaatgaaacaaaatacggtttcccaatgaatgatatttgccaaaagaaatttgcctcgttctgcagagcatggatgaacagagataaacactttattgaacaattacgtttgcgtggtttagcaagattaaatcaaaaaagttatcagatggtggcagcatga

SEQ ID NO: 48965 - DNA, 402 bp, Acinetobacter baumannii
atgacagatttgaataaggaacgagaagttaatttacgctttgaacaagatgatggttttgtttgggtgttcgatggtgatagtcaatttggcaccgaaatcagtcatttaatgatgatgcatgcagatgaatataacgaagatgaattacgtgttacttgtcaccatgcagcatgtgaaattgacagacttagagcagagctagaaaaagccaaagctcaggcggtgccagaaggctacgttttaatgccattagaacccactcaagaaatgcttggcgctgcaaaccttgcaccaatgcctatggtccatattgacagcatatctggtagagagaagcttcgtatatctactcaatacaaagcaatggttaatgtttgcaaatcgggagctgagggatga

SEQ ID NO: 48966 - DNA, 336 bp, Acinetobacter baumannii
atgaaatatcaaatacaaccaacacaagtaccagatgatttagatagctgctggttccaccctgatatagagaagcacgacactattggagagcatgctgagttttatacaaaggaacaatgggcacagcttcaacttaatcttggtgtagaaattcttgttgagcgtttggaatatttggatattccagaaattcctgaagacgactgtgcagattggtcaaactggaaaccacaaccacctataaaagatgcctttcttattgcaggttttgatacagaagatgggccttgtttgtggtgggcaaagcctaaagcggaaagtaaggaggggtga

SEQ ID NO: 48967 - DNA, 270 bp, Acinetobacter baumannii
atgtctaagttagatcaaatgtcagaacaggaaaaaaaggagcttttagaagaattcctagaagccccattagaaaagagttttggtcaggaagcggtagcattgtttttgaaatgctctactcatactttgcaagctatgcgttgtaatggtagcagcctaccttactcaaaagtcggcagatgtgttgcctatcaaaaggcagatgtgctggcatatcaagcttcaaagaaagtatttaatacggctcaactggcaagagctagttag

SEQ ID NO: 48968 - DNA, 1209 bp, Acinetobacter baumannii
atgaagcttaataaaacaaatgtagatgctatccctttgaccgagtctggtcaaaagatttatcgagattctgacctgattggctttgctgttcgggctacaacaaaaagtaaggtttttattgtagagagacgtaatgaaggcaagttgtatcgaatcacaattggtaaaacaaatgagttttcagtagcagaagctagaaagcaagcccaagtgcttctggccgaaatcgccacaggtaaatataaagttaaaagtgaacctgcaaaaaatagcccaacctttcaagaagcttttgaactttacttaaaacataagaagcttaagcagttatctattaatacatataatcattgttttcgaacttttctctttgactggaaagataaagatattttcgaaatttccaaagatgaagtatttgaaaagtttttaaagctttctgagtatagcgaatcgcaagccaacctatctctaaagatgtttggctcaatttggacatttgcaaagattcactattctactgaacaaaatccaatattaaaaaccaaccctgtagatattatccctgctaaaaggggctggaataagattaaaccaagatcacgccatctagatgaagatcaaatccctgtattttacaaggcagtaatggagtatcgtggcgaggattctataagactaaccgagtttactaactcaactagagaccttgttctatgcgtaatgtttactggctgccgtcgggatgaaggtcagaccttaaaatggtcagaagttgacattgaaaaaggcacctttgtattcaaggacccaaaaaatggagatgatcatttgttgcctatgggtgatcaattgtgggcaattttgaaagagcgatataaaaaccggaaaggtgattatgtatttgctggatcttctagaaagggcaatggtgggggttatatctctactcctgatggcgttcttgactatgtagagagacaaactggtattaagatttcactacacgacctaagaagaacatttgctactatctgcaataatcttgactatggtcaatatacaattaagcgccttctcaatcatagatccggcgctcgtgatgatgtcactggtaattacgttcaggtatcgattaaaaagcttcgcaaggccatgaatgacattgaagccgtttatcgtggcgaacttaatccctttgactaa

SEQ ID NO: 48969 - DNA, 516 bp, Acinetobacter baumannii
ttggaagattttaaatattctaaattcacagataaaattacaaaacattctgaagaatttttaaatagagtaaataaagttatttctgacttacaaagtcaaattttggcaatacctcttgctatatctcttattactgtttttaaagaaaatgagaaggtcaatgtttatatatatgctggttttttaatttatttaataatggtgttttatgcttgttgccaacaagcatataatttgattcatattaaagctcaaattaaccagtttaatgaatatgctaatttacctaaggatttatcaccagaatggaaaaaggagattaaacctgttaagacgaaaatattctggcatgaatcttttttagtattagtagctttatttattggctttttaattggtatttgtattattaatataccctatctatatgaaattattttatttttaatttctttgaaaacattttcttttgtattggttttttattcttttattaaattcttcttttattaa

SEQ ID NO: 48970 - DNA, 204 bp, Acinetobacter baumannii
atgacaaatttcctaatctttttcatcgttattcttgttttagccctcattattttttggttgattctggattatcaatttactcgatacatccgtgaaatgaaggctttttataaggaagaagatctccaaaacaaaaacgtacttaaacttaatcaaccgttccactatgggagcaataaatgtggctatacccaatcttaa

SEQ ID NO: 48971 - DNA, 1140 bp, Acinetobacter baumannii
atgaaaacatttcacatcattacatatcggcagctttttgcccttttgaccttaggatttggttcagtatgtatggctcatgcagaagtaaattcttcctcaacccaacaagtaaacggtttgtcatctggagcacaaactgaagaaaataaagatgaaaatcttttagaccaaattccaagatggattgatgcaaccccaacgattttcccggagcagtccaacgaaccgattgttccaccaaccgagcaaaccgaagatcagacttggtttgaccgtaaacaaaagaaaatccgtaattgggccgatcgtacatctggaaaaattgataattggtttggtgaagttgacccacaaaaacccgcgtcagccaccattcgggtcatgatcgataactattggaatgaatatgataattatgaaatcaagcccagaattcgcggtaagattaaattacctactctagagaagcgtttaagtgtggtatttggtgatgactctttagatgacgaatttaataatagcccagccaatatcaatcaaaacccaaatcaagatccaaataaaaagttagatggtaaacgaactcgagatgacaacagctcaatcgcattacgttggtcaaatttctcgaaaaagctaccttttgaaacagacgctgacttaggtatccgttctggcgatgatatttatgtccgcttaaaagcatcgagagactggcaactccgtaatgattttaaattttatgcagaacaaatttatcgttatggcatagatagtgaaaactacttacgtactaatcttgaactcactcatgctcgtccaaatcagccaatcttatcaaaccagttcagcttaacttatgccgatgatcaagatgacgatttaacatgggaaaaccgtcttttccgagaacatagcttctttgcaaataaccgttttaactatggcatttatacaggtggctactacaatgacaacgatttacgtttaaacagttggggaccatttgtatcatggcgtcagcctgttttacgtgaatggttctttgtacaaggcgacctcaattactttaatgaccatcgtgaagatcgcaaccattatgtgagcacattcttacgattagaagcccttttctaa

SEQ ID NO: 48972 - DNA, 297 bp, Acinetobacter baumannii
atgcatgctaaaacattagttaatagttatttgaatattgaaaatatttcaatagaaaagttaagaaagctttttaatgaaaataacgctcatgatttagatatatttgaagatgttaattctctagtttttaaattagatagtatcagtctagcaactgatctatatgaagtattggtctatgtttgtaagatagatattttatcagtgcataatttaaaaatagcatattacaagaccatttttgatatggactacaatattattgacgattttttcgttactctaatcgattga

SEQ ID NO: 48973 - DNA, 1446 bp, Acinetobacter baumannii
atgattactattgatgaattggtgaaaaataataatttaggcctaacttttaagtctggtagatcaggaggtaaacgtatagttaaatgggcccatgctgtagatttaccagatccttggcattggatatcacctggcaccctcgtaatgaccactggtggtggtttaccaacagaacccgctgaacagattgaatggttacgacagctcgctgaagctcaagccagcgcccttgttattgcccctagagattttgctccttctattactgaggagatgctagatgaagcaagtgatttaggatttccaatattaggagctagttttgatttagagtttttgagattagctcgtttggtaattgagagcgttttgcaagctcaaagagaccgttttgacgcaggaaataagctatttcaagtctatactgatgcgttatgggaaagttcacaattagatgagcgtctacagattatcgggcaaaagttatctttaaatttacaaatcttagataatgaaacacttactcctatttttaattttagttctccggtatcaaaagataatattccctatagtgtaaaaataccgggtagatcccaaactactctaaatattattaataaagagtcgcgtttttttgatgagacatttttaccgcgtattttagccggcttacttagtattgagctagaacgtgaaatgatagaccgtgatggaattcgtgaagaaggtgaagctttatttgatgacttgttaaatggggaaattgaatttggtgctgcaaaaattatgttagaaagacgtggcttacaaggtaaattagttactatcgcaattgatccctcaaacaaaggatctcgacaatacgcagacattcaccatatacctgaattttataaaatttatccattattttcttgtgatgaaaatagaatatttgcggtacttcctgatgatagtaatttattaaatgctcttattaattattttggaaaaggaacaaaaataggtataagtagcccaattacagcaatgcttggtttcaaagaaagtattttccagtcatgtttagctttaggaagaatcaaagaaagccaaactgatttaattcactacaatcatttagatctagaattagccttaggccctaagactgttgcagaagcgagagctgttgttggtcattattttggccgtattttagaatatgaacaaactaattccctaccattgctcaaaaccctagctgtatttttaaaatatgatggcaattggaaggtaaccgcttctaaattagatattcatcggcagacactagtctatagattaagagttatagaagaattaactggcataaagcccacaacaagcttaggtattacacggttttggatagctttagaagcagcaaaaactataggattattagaagattattattaa

SEQ ID NO: 48974 - DNA, 4911 bp, Acinetobacter baumannii
ttggatattacaactttaaatgatggtaatagtaaaattaaaaactttaaactgtatagcaagaataacttactttgggattatttaacgaaagccccgcctcaattcgtgggtaaaatacaagcagaagctggtgagaaattaacattaagtggaaagaaattaattgcattagatggcattgatttacaagcaagtcagcttaaattagattctgagttagatagtcaaaaaaatattaatattacctctaaaaaagatgatctaattttagaaaaaaatttaaatacacaaaatgatattaatattacagcacttgctggtggagttactgcaaatagcttaaaggccacatcttcggctggaaagatttctatactcgcgaataaaaatctgaatttaaactcgacccaaacaaccaaggcgatgccttcagctgataaagatgaattagcaactgatcagacggttattagtggtttaaaaggcgtaacacttggctcgattggtgatggcactgttaacttgcaatcggtacaagttaatgcgaatcagggtgatatattagtttcgagtaataatggaatcaatctaaaggctaatagtgatgtttctgtgaaaggagacactggttataccaaaatagtcaataatgttctaaagggacaaaccgtttcgatagaaaatagcaaatccgatattaaaatccaaaatacagatctaggctctacggttggtaaacttgcgatcaatagtagagcaggcatgagtacaattatcgatagcgtattaacgtcaaaaggtaatactgaactctttgcaaaagatttactgactttacagggcgtgaatgctacttcagaccagcatctggcagtaagctctggccgtacggtttatagcaatgctgagtatacgccagcgaccaaatggattgcgaataaagtaacaaacttaacatctaagggtgtcacctctgtaacggctacaggaaaccaagtattacaaaatacaaatttaaccggcggagctgttctattagaagcgggtggttttattacaggccagactggattgaacttaaatgcagtcggaagtgatttacttaagaatgatacaaagttaaatagtttaaatggtgacctaactattcaaacaaattctaacttaacgattgacccaaaagtttacagcttaaaggctgttggtgatatcgagctcgtttctaaagctggtactttgactttaaaaggctatgaaggagctaaaggaaatggatcggaacaagttgttaagctggatacagcaaatggtggtattaatttagagggtactaaagttgatattcaaggttcacaactaatagcaaaaaaagatattcaagtggtatcaactaaggatgatcttttaattgatggtgtaagaaattctttctctaatataaaatttccagataaggccaatagagaaaaaatagtacaaactgattttattcaagaacttaatgtgctgaaagcaacccaagaatatctaaattatcagcaagcactaaaagatgcaaatgatcagataaaagctggtgaagattggatgagaacagcacaaggatcaattgcattaacagcaaaaagactgaaagatgagggtgagagaaaattagctcaggttaacgagacatataaaactttaattacaaacttgaatggattgcaacgaaatattgatcagtcaggggcaaatattagtttttacgagcaaaacttaaaaggacaacaacatgcttcggtaaatataaaatcaattgatggaaatattaatttagtttcggccaaaggtttgagtttaagtggttcaaaagtcaatgctcaacaaggagaagtccggatagaagcggcaggaacattaacaaataatatttataatattcaaggtcaatatgatagcgccactgaaaatagtgttaaacaaggcgctatagctagcagtattattattgatgccaatcaagattcatacgaatttggaaatgaaacagatacaacatatgcttggagaagtcctgtagatgctccaagcatatatgggaaaaagggtgtaaagattaaagctacaggaaccaatactacagacaacttagtattacaaggagtagatattcgttcggaaggtgatgttaatatcgaagcccataaaaatatcatttttgatgtggctgtggaaagtggttacgataagagtacaacgacggaaactaaaaagaaatggtatggtaaaaaaaccaccacaactacggtaaatacttcaaataaaagtgaaggggtttctgtaaacattaatgcaaagaatattaatattaagagtaaagaacagaatacaaaagaaatgacggggaaaaaccgtacaagtattgatatgtattctagtcaatttacagcaactggtggaaaaattagcattcaagctggaggagatttaaattttcttactgcacttgatgttgaacaaaacaccgatgatataacaaaaaagtcatcttttttaggggtgaaacttaataaatcaaagactacagctacacgtaatattaaggctgagttacctgcgacgttgaaagcagactatattggtactaaatcaggtttagacacacgtttaaaaggtcctgaatttgaatatttaagtggagcaactattgaagctggtggtgtaatttctcttgaaagtgcttctaatatagttgaacaaactttaaaaagagataaaaactctgtagtttggcagtcaatgcaagataaaggctcaattactgaaactgctcagctaccaagttttaatgggccagttttacctacctttaaagcggcaggtggtttgagtgtgcaagttccaatcagtgaaaaagatgttaataaagttgaattgagagatgaaatcctaaaactggcaaatcagccaggtaatgcttatctcaaagaattagttaatagaaaagatgttgattggcagaaagtacttcttgctcaaaaggattgggattataagtcacaagggttaacagctgcgggtgctgctcttattgtcattattgtaacgattgctacgatgggttcaggaactgctgcagccgcaggagctgctggtggaacagcagcaagtggaactactgtaggcttgggtgcaagtatgattggctcagctggtgttacaacagcaacagttggaggtgttacaacaattacaggcgtttctacgcttggggctatggcaaatgctgctattacaagtttagcaactcaagcaagtgtaggattgattaacaacggtggagatatcggtaaaacactaaaagatttagggagtaaagactcggttaagaatttagcagcttcagtagtcactgctggattgttgaacggggtggcgacaaacttaaatattagtagtaatgctattgtgaatgacattgccaataatatggcaactggaatgatacaaggcgttggcagtacgttgatagattctgcggttaatggtagagacctaagcgaaggcctggaaaaagctttattagcaggattagcaaactcattgcaagcaccattagcaggcgcaattggtgacacattagggatgagtagtaatgcctttgtgagtaaagttgttgctattgctgcgcatgctgcagcgggttgtgcaacaggagtggttgataatgaatgtaaatcacgggctcttggagctgctttaggggaagttattgcggaaaatatgttcaaaccagcgaatggcattgaatatacggaagcggaaaaatcaaaaattctcaacatcactaaacttaccactggagttgttgctgcctatgcggggtataatgtgactgctgctgcaaatgcagcggatatagccgtaagcaataattatttgaaccatgtgcaagagaagcaaaaaagtcaagaacttaaagattgtaatgttcttacttgtggtggagtcgttgttaaatgggctgcaattagtgcaggacaagatgcaaattatgcagcaggctttgcagtaggtattccgacctctgttgctgagtcggtagtaggtttggcaaaaatggctcttagcccaatacaaacctataaagcgatcaaagaagttatcaatagtgaaaacgctctaggtaatattagtgatgctattaaacaagattatacgaaccgtattaataagcttgaatcagaatatgaaaaagctggtattaaaggttcatataatgcaggtttagaagcaggcaaacttacagctgatgtagcgagtttatttgctggtggggctagtattgctaaaggtggagtgattctaacagaaaaagtagccgcaaaagtaggctataaagtcttgaaagatcctatcataatttccgataagggtattccagttactttagatggtcataaaatctatgaccctcaatttactccattgagtacaaatcctggagcaacttatagattctctgatcctacgcatagaaaaactgggggggatgtctattttggtgaaaatattgcgacctcttatttcgaagttagacaggctgtcaatggtaagtctttatttgtgggacaggtagaggttaagaacatgttggatttaactgaccctaaaatattaaaacaaatgggtattgatcagaagaagttgactcaaattgtgaatacctctactgaacaagattttgtatatgcgtatacaaacaagatagctaatcaagcttacgataaaggttactctggtattatttataatagcagtcgtaatactggatccagcaataatcgagcagtgattctatttggtggacgttatgatgctgaaaagattaaaccagtactagataaaccgattttaaagaaataa

SEQ ID NO: 48975 - DNA, 480 bp, Acinetobacter baumannii
atgagagccttacatcaagtagcagcgaatatgattggagtgataccttattatttaaataaatatcagcaacatggtttacaatatcagcctcaaagagattcacaagcagaaccggcaggtggtcaatgtggaaactgctatacaatcgtatggataacaggtcgtaatgatcctattttgaatgaagatgatagtaatatacctgacagtggaccaatttacagagagtactataaaaataaactaaaacggtttttaagctcattacctccctgcccaaattgtcatcaacaggcatatgatttattcgttaataatacgacattaactagatttgaagatggtagtccagctccaaaatatccagaggaatattatggggttgatgaagagatgtcagctaaagtaaaaaacaaaacggtctggtggtatggtgataaagctgaagctaaaaggttaaatctacaattcttatga

SEQ ID NO: 48976 - DNA, 333 bp, Acinetobacter baumannii
atggatttagatgaattaaaaaaatggaaagctgcacttcccaattatgcaatcacacctgaagcagcaaagttgcaccagcttttagactgtaaagcgacagcaagtgaccgtgaaggaattgcatttctaattttaaccggaaaatttttaggttttttacccgattactatacaaagaaatgggttgaagatggttttatgcaagccatttcaaaagaaaaaatgcattacagcacacccatttgcttaattactcacaaaggcaaaaaccataatattattttaaaaacctttatggagatgcttgagaagcggatcgttgcgagttaa

SEQ ID NO: 48977 - DNA, 390 bp, Acinetobacter baumannii
atgagcgatttagaaaatcgtttaggcattcggctatgccaacgtggccgcgcagggtttgcactaactgatgaaagtcgtgaaattttagaatatatagaagtcctcaccgcttctatcgaagactttcgctccaaagtcaatcaaatgcataaccgtctaaagggtgagtttaatataggtattattaataacctcgtgaccatgccaagtggctacattaccaatacgctggcacaacttgccgaagaacattctgaagtgatcattaatattagcatgagtacactttcagatattgagtgccgtgtgctagacaaccgtttacatgcgggagcaattccccttgtgactccgctgtctggcctagactattttgacttaatatag

SEQ ID NO: 48978 - DNA, 957 bp, Acinetobacter baumannii
atgagcttaaattatcaagcgcattggatgccattttctgcaaatcgtaatttccataaagatccgcgcatgattgtcggtgctaaaggatcatatttaattgatagcactggtcgtgaagtctacaactcattatcaggtctatggacttgtggtgctgggcatacactttctgaaattcagcaagccgtaagtactcagttggcaaagttggattactcaccggcatttcagtttggccatccattgtcgtttcaattggctgaacgaattattcagcttatgcctgaaaaattgcagcatgtgttctttaccgactcaggtttagagtctgccgacaccgcaattaaaatggcgcgtgcctattggcgcattaaaggtaaaccaagcaagactaaattgattggtcgtgcccgtggctatcatggtgtaaacgttacgggaacaagcttaggcggtattggtggcaaccgtaaaatatttggtcagcttatggatgtagaccacttaccgcataccttgcagcccgatttaagttttaccaaaggctgtgctgaaacaggtggcgtagagcttgccaatgaaatgcttaagttaattgagctacatgatgcttcgaatattgccgcagttattgtagagccagtgtcaggttcggcaggatgtattgtgccgccgactggttatttaaaacgcttaagagaaatctgcgatcaacacgatatcttacttatttttgacgaagtcattactggttttgggcgaatggggaaatggacggcttcagaatattttgatatcacgccagatattttaaattttgccaaacaaattaccaacggcgctattccactgggtggcgtggtggtaagccatgaatttagattaattaaaaagagaccagtgaatggtctcttttttcttaattatactagcatcctcaaatttattttttag

SEQ ID NO: 48979 - DNA, 306 bp, Acinetobacter baumannii
  misc_feature (289)..(298): n is a, c, g, or t
atgatgaaaagactaagacaacgccagcgccaacaacgcagtatttttgcgatgttgcaaagctactctagggagataagtactttcaaaagttcggaggctattgctcctaaagaactacaagcacaatctgcaaaacctagatatatcttcacagaactagggaaagagaagctttgcaaacattgtcaagaatattggcccattgattctgaattttggttcatggttaaagctaagcttaaagatggatccgtcgtacttcgaccagattcagcttgtaaaggtnnnnnnnnnntgttatga

SEQ ID NO: 48980 - DNA, 732 bp, Acinetobacter baumannii
atgaaatctaaatcaatcagcaaaaaacgctcaaaaaaatacaatccaaataagctaacaccagcgcaagttcaagctaatcagagaaaggcagaaatgcgcagagaagctgctcaagaatatgagttcagcatgaggttcgtttcaaaagatgtacgggactatatcgaagcaaagaaaattgaagaggcagcattgcttgagcgtttccctaatcgtttaacaataccatatcacttcagtattgcagcttacggttaccaagatttagcaattgttcaagttctcgaacatgtagaagagtgtgaaaaatggaatgttgaactcactatcacaatgtccgatagaaccgatcaatatgaagggcaactaataataaatcagccatttacagcgccaaaaatgaattattttgagttttcagaaggaaaagcagactgttacgtagatataggtagtggattacgtagaaaaggctggaaaggattaaatgctgagatattaatggcattagaccaaaataaaaatatacctgatggttttgggatcgatttgatagaggtagaaataagtacctcctcaaaattcaaaagtgtgtcagcgtataaagaatttttgagtgttgctgcatgggtaaacagtggtgtagctgaggaaaaattacgccagctttggattgctgatcaaattatagggaacggtaaatcgcttggttttggggatgcagcatga

SEQ ID NO: 48981 - DNA, 975 bp, Acinetobacter baumannii
atgattaattttatcaagccccttcacttcaaaagagtaagttttgagatacctttttttccagtaataaacattgtttcaatttctggcggaaaagatagtgctgcaacattgcttttagcacttgaacaaaatgtctctaatcttttagctgtttttgccgataccggtaatgaacacgaaattacatatcaatatatacgttatttagaacataaagtcggtgtaccaattatttggttaaaagcagacttttctaaacaaattgaaaataaacggaagcggttatttaaagtaattcgtggagaaatagtaaaaggaaattggtcacggaaaagtgccattcgtgcattgaaacatacaaatgttactggaaatccattcttagatttatgtatctggaaaggtagatttccctcaacaaaagctcgattttgctctactgaactaaaacgtgaagttatcctttttaagcttcagtttcctcttattgatcagggatacaaaattatctcttggcaaggtgtacgtgctgatgaatcaccagatcgagctaagttaccaataagcgacaatattggggatggggttacaaactatcgacctattcataaatggactgcttctgattgttttgacatgcattttaagcatggtgttgaaccaaaccctttgtacaagcaaggtatggggcgagttggatgtatgccttgtattcattgtaataaagcagagttgcgcaaaatcgctgatcgtttccctgtagaaattgagcgaattaaacaatgggaacgtatggttagcgctgcatcccgtttaggttcttcaactttctttcactccgataaacgaggacatggcatcaatgaattagttgaatggtccaaaacaacaagaggaggtaaacactacgatttaattccactgacagaagatcaatcagcatgttcttctgtttatggcttgtgcgagtaa

SEQ ID NO: 48982 - DNA, 456 bp, Acinetobacter baumannii
atgatttttgaattaataaaccttagtgataaatgtacatttgaagcaccaaatttaaaaattgctgcattagttacttgtgtacttggaaatggacaatattctgcgaagggaatacagcatgatatagatgttccattttttcttttcggaggacatgaagagtggtttgtctctaaatttggaacaaattttgaagaaacacttatacaagttagagatgcagagaaacaagatttagtagatagctttaatagcgttttattaggttcctaccttgaccggacagcttttttcaaagcctacaacttaattaaagatccagttgaacaaaacaaatggcgtagacaatggttagatgaacgccgctcgtcttttaacaatatctgtgaacgtgcttggaattatgctgaacaagtgagcttgtataaaccagctcaggaaggtgcagcatga

SEQ ID NO: 48983 - DNA, 276 bp, Acinetobacter baumannii
atgttgaaagtaactgaatttcaaggaattaatactgttttaacaacttttgcagaagaagttataaaaactcaacctgaattagctgctaatattcttttaaatattaaaaatatttctaatgaacaccatccgttagttgaacaatctttcatcttagataattttgaaaaccatgatttagcatctttaaatataaaagaagctttaaatagttttaatcatgagttagcaagattaatgattttgactaaaaataatttgatcaaaaactaa

SEQ ID NO: 48984 - DNA, 1254 bp, Acinetobacter baumannii
atgccctggcgctacaaggcaccgatagcgcgcaatcggtccatgatcatgactagcgctgatgtttggagcctgttctggaagggcttttcgccagcgtctcatgggcttctggatgaacagactttgctgatccgtcttacacacgacgaggagcatacgccaatttgtagccgatgcgattgcccttgtttcctagtacatgacatcaattggcgccgagttcgcgagtcacccattatgcagtatcgcgtcgagttggatgtacctgtgcggcggctgcgttgtccacaatgcggtccaaccagagagcggatcgattggctaccacggcgctcccgtattacgcaatcattgcgcaactggattgagaaattagtacagatgctgcccgtcagccatgttgccaatcttttgggcttgcattggcatacagtcaagaccattgacatggagcggctcaaacgtgatttgcacgagccaaatcgaagtcgattgcgccgcctgatgatggacgaattcgccctgcacaagggtcatcgctacgccacggtggtcgcctgtgccgacacccagcaggtggtgtggattggcgagggccgctcccgtgaggcgatccggccgttcttcgagtggttaggcgatgcccggaaccagatcgaggcagtggccatggacatgaactcagccttcgatcttgaagtgaaggcccagtgccccaacgcggtggtggtctacgatctgttccatgtggtggctaagtatggccgcgaagtgatggatagagtgcgagttgatcaggccaatcaactgcgagatgacaaggtcgcccgcaaggtgatcaaaagcagccgttggatactgttacgcaatgctgacaaccttgagcccgagcaggcggtcaagctggacgaactcctggccgccaatgcgtccttgactacggtatacgtgctcaaggaccaacttaagacgctatggtttgcggaaagcgagacgacggccagaagcgcctggctggaatgggccggcatggccctcggtagcggaattgatgctttggtacgatttgccaagaagctggagccatatatggagggtatcgtttccagtgccctccaccggctgaacaccagcgtgctggagggcatgaacaaccggatcaaagtcattaagcggatggcctacggataccgcgacacggactacttcttcctcaagatccgtgctgcatttcccggcaaagtgcgatga

SEQ ID NO: 48985 - DNA, 1266 bp, Acinetobacter baumannii
gtgcgctcaaaagatttttcctggcggtattctcttcccgccacgctattgctgttatcaccattcgatttgctggcgtcactgggcatggatatgtacctgcccgtggtgcctttcatggcggatgcacttgggtccggtgcagggacgatccagctgacgttgacggcatacctggttttgcttggagccggacagcttctcttcggcccactgtcggatcggctgggtcgccgccccgttttacttggtggcgggattgcctatattgcggcttcattcggcctcaccgtagtttcatcgccagaactttttctgagcttccgcgttcttcaggcctgcggcgcttcggcatgtctcgtttccactttcgcgacggtacgcgacatctattcgggccgtgaggaaagcaacgtcatctatggcttgctcggctctatgcttgcgatggttccagcgataggcccactgctaggagcgctggtcgacgcgtggctcgggtggcgcgcaatcttcggcttgctagggatggcaatgataggcgctgttatcgcagcctggcgactctggccagaaactcggcggcaccggacggcagacctacagtggtcgcagctattgactcctgtgaaacacctgaacttctggctgtacacgctctgttacagcgcggggatgggcagctttttcgtctttttctcgaccgccccttggctaatgatggggaggcaagggttatcgcagcttagcttcagcttgctatttgcgacagtggccatcgctatgatggctacagcgcgagtcatgggacgactgattccccggtggggaagcctgaagactttacgagtgggaatggggtgtctgatggcgggagcgctgttgctcgctgttggcgagacattggcaccggtctcggtgcttggcttcatcgccccgatgtggctcgttggtgttggtatcgccactgcggtatcggtggcacccaatgccgctcttcgaggtttcgatcatatcgctgggaccgctacagcagtctacttctgtttgggtggactactgttagggattatcgggacactcattattacgcttttatcgactggtaccacctggccgatcatcgcttattgcctcatcctcgcaacagcagtgctttgtctgtcctgcatcaatcccaacagacgccatctcagccaagaagaacatgatgccctggcgctacaaggcaccgatagcgcgcaatcggtccatgatcatgactag

SEQ ID NO: 48986 - DNA, 324 bp, Acinetobacter baumannii
atgagtaaagatgatcatgataaatttgtattattcctgatagttgtaggctttatcgtgttagttgtttgcggtcttgcgtggcagggagcaggcatctttaacttgcctttcacagtgatgctatggactatcattagattaattatcgtggtatcgcttgtatttattactggaaaattcggtctatcaagagagtttactttccccgcagcagcagtaggtttagcttttagtttattccctgtccttgatcatattgcgttaggttattctgctaaaaatttctatgaaaccactaattttaggttctttgcactttag

SEQ ID NO: 48987 - DNA, 2919 bp, Acinetobacter baumannii
atggcgatttatcacttatcagttaaatcaggtaggcaatacggttcttcgggaagtcgaggggcaagccattacgcttatataaatcgtgaaggtaaatacaaaagagaagatttagaaaatataaaatcaggaaatttaccaaattgggctaaagatgctgctcatttttggaagtcagcagataagaacgaacgcattaatggacgtatttatactgaattggaaatttcattgcctagagaattgaataaagaacaacgtgaagaattagtacaggaatttgtagataagactttaggtaaaaacttcacatattcctatgcaattcatagcccattagcaagtgatggtgaacaaaatcctcatattcatttgatgtttagtgaaagaaaattagatggtattgatcgtgacgaagtacaacactttaaacgctacaatccgactaatcctgaaaagggcggggcaggtaaagatcgctatttttcatctaaagtttttgtggcagatacacgcttatcatgggctaaccatgtaaacgatttttgcgaaaatttaggtcttgatgctcgtatagatcatagaagttataaggctcaggggcttgaattatccagtcaaaacttcagggctgattatgttagtaatcataaatatttcattaatgaaaatataaaaaatatacgtcatcaaaatggcgaaattattattgagcgtccttcggaagttattagagctttaacttctaatcagtctgtatttactgcccgtgatcttgagcgttttgttatggctcatactgacagtcaagaacaatatcttaaagcctatgaagctgtaatgacttgtcctgatatggcaatgttgtttgggaaagataaggttgtattctcatcaaaagaattggtcggaattgaagattctattactgcatttatctacaatgccaatgagcaaagtcgagtacagaagccatttaatttaactgaaaaattcactttaaatgctgtaaaaattgctgataaaagaacattcaatagagagcaagaagcagcctattatactttgacttctactgatcgaatctcattgctaaatggttcggctggtactggtaagtcttatgttcttagtgctgtttctgaagccttcaaaacttcagattataaagttcatggtattgctttgcaggcaattacagctagagctatttctgacgattgtaatattccaagcagtacaattgcttcattccttgcccgatatgaaagtggtaattttgagatcaataataagactgtcttgatcttagatgaagcggggatggtcggctcaagagacatgcaaaaacttctcatgatcgtagagaagcatgatgctcaaataaaacttgttggtgatagttatcagttaagtgctgttagtgctggttctgcttttgctcatattcaagataaccttgataagaaaaatattgcttcattagaaaatatacaacgacaaaaatatgcgaaggaatcagagaaaatgattgaagcatctaagttgttatctaagcatgaagttgacaaagcattagatatttataagaccattaatgctgttaatgaatatgaatctcacgatctagcactagccaaaactattaaatcttggagtgaagattctagcgaaaataagttaatgcttgctcattcaaataatgatgtgaatgaattaaaccgcatggcaagaaatgtattaattaaaaatggtcaactttctgctactggtaatcatgttaaaactgctttcggtgatattgaaattactgtcggagaaaaaattgtatttaagcagaatgattcaaaattaaaagttagcaatggtgaaacagcaaaagtaatcggttttgaaaaagataatcttaataacattaaatttatgatggttcagtcagatagaaataatgagatcattaaagtagatttaaatgaatacaaccaatttaaatatggttatgcaaatactattcactcatcacaaggtatgactgttgataatgcctatattgtggcgagtgagaacatgaatgctaatttaacttatgttgctttgacccgacataaacataatgtcgaaattaattattctgctatgtcgtttaccacgaatgaaaaagaattcgttaaacgtccagatgggaaaatctcatatgatcagaattacaatcctgttgaaaaagaagttacaccttttgaaaacttcaaaaaagttctaggacgatcagaaaagaaagaattttctacagacttcactttagtagacaagcaagaaaaattgatcaaagcatatctgcaagatcaccgccaccatattgaagataagcgggagatatacggaattaactcgaagatacatgctttaacttcagagaatcgtacattcacgaaggaagaaattgttaccgaggttcgtgcgaatcttaaatctaaatctattttaggtgatgagatcggtagcattagaggtatgaaaattgcaaaaggtgagcttctcaaacttgaggaagggttacagatcaagactggattctttaagaaagaaacctttgagaagggaacagaattaaaggttcttgatgcctacaagatgaaagataaaccaatgattaaagctcgaatcaatgatatggaatatgagattccatttgaaaaactttctgttaagtattcagatcggtacttcacagagtttaaagatcagagcgcacaccgttttactgcccgcaataaaactgaagtttatagcgagtaccgtgagcagttattgaagcaaaagattactgcaccggaagaaaatttgaatgctcctaatcacaagatgaagctgcaaagcaatcttaatactacccctagaaatacacctagaatctaa

SEQ ID NO: 48988 - DNA, 531 bp, Acinetobacter baumannii
atggctatcgaaaatctaaaatttactgaagatcaaaaaaagtttgtaactgatgaaatctctcgtttgaagggattagagaatagaaaccaaactgaagatttaattttgtcacttgttaaaagtattgaatcaggctcaccaacaaagcagcaaattagttcatttgaacgtgtaatgaaaaatgaatttaaaaaacataaagcacgtttagaattagaaaaaattaaggaagatgaaaaaaaacttttagctagtttgaaaaaagatgctcaagctgctcaagttaaagatcgcaaaaaacgtgaacataaattaatttcaattggtgcgctttttgaaatagtagatttcccaactgaagataaaggaattattactggtgttcttttaaaggctcttgaatcatataaatccaatccccaacattttgacagtttaaaaattgctggtgacaaatttattgctgatcgggaacaatcaaaaaaatctaaatcaactctagttgataattcaggctctacaaattaa

SEQ ID NO: 48989 - DNA, 411 bp, Acinetobacter baumannii
atgaataatgctcaattcaaaattgaatgcttcagaaatggtttatatagcccagagcaaataattgaattttacaaggtagtccacacggaagaaactaagtacaatagccgtgatgctcaactttggattaatgggaaaagctctagggaatatcaaattgaccctaaagcaattcaaattgtagatatgcttaatgcaatcagatcggaagtaattgcaaaagaaaaagagcgtatagaacttggcaatccaagatataaatatctattcaaaggtgaacaagcactatggtcggagcatcaggaatttataaatttacctgtcaatttttataattcaataatggttgagctaggtaaaaaagatttaatttattttgaattttcaaaaaaagatattgaatcctaa

SEQ ID NO: 48990 - DNA, 423 bp, Acinetobacter baumannii
atgaaagaagctgtttctcaaaatattcaatcagacaacttgagccatcaaaacgccatcaagaacaaggaagaacaaaaagcccgaattaaaaaattccgtgatcagttagagatcgggacgatcttatatacctcatggggatatgagcaaacaaatgtagacttctatcaagttattgagaaaagccgggcatattgtgtcatccgtgaacttaaacaggcttatgatgcaacaggttcaatgcaaggttatgttgtgcctttaccgaatgaatttaccagcaaagagccaatgaaaaaaaagatcatggataactatatcgtgattcatcagtctgcaaatgcaacagtattagattttgaattattgccgacaggtacaaaagtttataaacgctgctatacatcatcatacgcataa

SEQ ID NO: 48991 - DNA, 2673 bp, Acinetobacter baumannii
atgaaaaaaaaatacaatgttcgatctcaggcaacccccaagattggcaaaacaattcttaaattaagcacccttagtttaagcatgatgtgtcttaccatggcacaagcagcagaaaccgaacaatcaagtaccgatgaaaaaccaacaaaagtcgtaaaagttgccgttacaggttcttcaattaaaggggttgcggcacaaagtgcttcgccaattaccgtggtgaaagttgatgaaatattaaaacaaggggtaacaacaacagaggaagcattatctaaaatcaccgcaaaccaagcaggatttgttacggcacaaaatgtaggagcaagcggtacagctggttcaacagcaaacctacgtggtattggcgccaataaaaccttaatcttacttaatggtcgtcgtttagctgctaatgcttatgatagtggtgtcactaatttaaatattattccactcgctatgttagatcgcattgaggtcttacgagatggagcatcagcaatttatggtacagatgcgattggtggtgttattaactttattaccaaaaaacaattcactggtttaaatattagtgccgggttaactcagccagaacagactggtggagatacgcaagatattagcgtttttggtggttttggtgatcttgatgaaaatggtttcaacgtttttggtgttgtagattatcgtcatggtaatgacatcatggcaaaagaccgtaaagtcagtgaacgtggtggcttactacctgagctaggtgttaaaagaagtagtagcggtgcatttcctgcaaatatttcaaaaaatttaggaaatccttacgctgcaacaggttgtggagataatcctcttgtttacgttgatgaaaatacctgccgcttcaatagccaagcggtaatcggtattgttccaaaaacagaagacatctcagcaatgggacgtgcaaccttcaaactcaatgataattttaatgctatagctgaatatgtatatgcacgcaatgaagtaactacctcggttgctccagatgtattctttgacttaccacttgaaggaaatagtaaatactatccaggtaacggcattactcctgcattagcaggcgtcaatggacaagacattaccctatctctacgctcgcaagctggcaatcgcgtaagtacaagtgtcaatgaatcccatcgtatctttggtggtttagaaggcgaagcttatggttgggatatcaatacaggcattacctatgcgaaaagtaaagcctcagatgcattagacagcggctacttaaactacggtaagacttctgaagcactacttgcagggaaacttaacccttttggtgcacaacaacctgaagatgctggtttatgggggactttaggcgtaactggtaaatatatggatgccgatgttgattcaaccacagttgatttcacagcaagcagaccaatttatacattaccagcaggcgacgttggcttcgcagtcggggctagttaccgtcgtgatgactggacatcgaaagtaaattcagaaatcgcaagtctcgcaccaagtactggtgtagatccagatgaaccagtcaacaaagggaaacgtgaaatcaaagctgcttttaccgagctgcacattccacttcatagaacattagaagctcaacttgccgcacgttatgatgattacagtgactttggcgatacttttaatcctaaatttgcacttcgttgggaaccaatcaaacaattaatgttccgtacttcttatagtacaggtttccgtgcccctactctttgggaaatgaatgcaccaaactctgtaactaatacatctgccagctatgatgatccgattctctgcccaggtggaaaagtaaacgaagccgctggcggtgataaaagccgcgattgtaatatgcaatttgaccgtaaaaatggtggtaacaaagatttagatgcagaggaatcaaaatcattcacagccggcttcgtgttagaaccaatcaaaaacctagtcttaactttagactattacaatatcgaagttgaaaaacaaatttcagctctgccagaaagcgatatttttaacaatccaactaaatatgcagataagtttgtacgtaattctgatggttcactcgcatatatcatcaccactcaacaaaatatgggagatttaaaaacttccgggattgatgtcagcttaaactatgctacaccaatcacagcaacaggccgttatagctttggtattgatggtacttatgtcatcaaatatgactaccaaaatgaaaaagatggcgaatggattcacaacgtaggcagctacgaaggtactggtccaatcattcgatggaaacatgtggccaatctaaactggaattaccaagactgggctctcaatttccaacaacagttcactcgtggttatgacgatcaaaacgccaatgatcaaaaccataaagtcagtgactacacactctacaacgtttcgggcacatacaaaggctttaaaaatttagagttaactgctggtatcaagaacatctttgatgaagaacccgctgcaactaatgttgaggacaactttcaaatgggttatgacccccgttatagcgaccctacaggccgtacgtactttttacgtggtacttacaaattctaa

SEQ ID NO: 48992 - DNA, 810 bp, Acinetobacter baumannii
atggattatgttcagaccaattacagtgctgatagtattcaagcagttttattaaagcttgcacaatcaggacttaattttattcaaattggtggaacagttgttttaatcccaattattgctttttacttcttattagactgggaccgtatgttacaaaacttacgtcgtctcattccacggccatatgaggctacgaccttacaaatcgtccgtgaatgccatagcgtgttaggagcatttgttaaaggtcagttccttgttatgcttttgctcggtgtagtttatgcagtaggcttacaattaattggactagaggtcggcctaattattggtatggtggcaggtcttgccagtattattccttatctaggatttgcagtcgggattattgcagcggttattgcaagtttgttccaatttggaatggactggacacacttattacttgttggcgtagtctttatgattgggcaggcagtagagggctatattctgcagccattcctactcggtgataaaattggtctttcacctgttgcagttgtatttgctgttttagctggggctcaattggctggctttttaggaatgttaattgcattacctgtggcggctgtcattgtggtgctcttaaaacaccttagagaaaattatgaacggagttcattctatgctccatcttctacattattaatccaagagggtaatattgagcaacttcatgtagaaactgaaaatactaaacttgatcttgaagttaaaaaacagcaagatacagataccccgaatctttcagatcagaaataa

SEQ ID NO: 48993 - DNA, 4917 bp, Acinetobacter baumannii
atgccaacagcaccaaaaactatttctcaagcgaaagcaaagccaagtgtgagaacaaataccggacaggtcgcggtagtacctttaaataaattgtatgccgccgatgttaaagcaggtatgaataaaattgattcatggctaaaaacgaatactaaaggttatgtcgatttaaatacgattaaaagtactcttggcacactgccagtcattggaaatgcaattgctttagtcgatgcaatttatgatgttatagacattagtaaaaaacctagcccagcttttacagattggttgaatttgggactggatgttattggtattattccagcaccgccaaccatggcaacaatgcgaatgagcctaagacctacgttgaatttggttagacaaaaggcaaaaggcacaatttctgatacgattctggtcattcttagcgatcatttaaatgaaagaattgctggggaattagaccaatttgcgaaaaatgcccaaccccttgtcaaccagatgttgcaaaattgtggaacaaaaattacagctatcagtaatgattttgctaacggaattcaaaaagtacttaatggaaaagtatatagctctgctggtaatttaaaaaacgcgcagaaacaattaaataaagttaacttaaataatttacaacgcaatcctaaagcaacgatatcaaatgctgttgatgggctcgtaaatatttggaaagcaggtgtaaaagagcaaataaataccgttgccaaaggtgtatctgctgttgtgcctgctagtgcaacacaaccgatccagaatgcaatcacttctattcgtgtttttggtagaaaagcaccttcatatttaatggctttggcagatccagcgaaagcaatgagtatcgcttggctactcaatgttttgcttaaagctgtacagaagttcaaactaaagggtacaaagactgcaaatattaaacctacacaagtcactgaaaaaagaagacaaaaaccaaacggagagcttgagaaagctaatgttcaagcaaagtcaaagggtaatccgagtgaaactgtatgtgcattaaatttaaggggtggtaaaagcaagcccaaatctacctctggtacaaaaagaaatattacctttgctttaggtacagagtgtttaactcatcaagatgcttatgtgtcatcaattttaagctttgtattaattcggaaatatgcatctaatctttatcaactagatcatggtgagtttggtgcaagatggataacaccgtttacaacccgtattgttccacagagtgaatatattgaagagacagaggaacgcgctggatatttaaaacacttaagtggttttgagtttattggagcagatgctcgtccagttaagttaccaaacctgaaagtaggtgagagtttccataataagactgaagatttttactatagtgtaatttctgaaaaagttcagatgatctcttatcaaaaagaagagaaacacttatttgaaaaatatcaggatggttatcgactttcagccatagaatacaagaatggacttactttagcagtacgttatgaccatcacttcgaaggtctaagttttatttcagatattgttattaaagaaaaacaaaaacagttaattcatgtggcatttcaggtaaatgcttctggaagaattgaagatgtgtggctggttgaaaatggtcaacttgctcgaccacttgcgagttataactacaatgaaaaaggcgatttggttgaagcgattaccgaaaatggagcgagctatcattaccaatatgaccatcatcttttaactcgttataccgatcttacaggtcggggtatgaaccttgaatatgatggtgtcgaaccaacgtctaaggcttatcatgaatgggcggatgatggcagttcagatacaattttacagtgggacgaaaatattcgtctaacgtatgtgacagatgcttatggagccgagacttggtattactacgatattgaaggctatacctaccgtattatttatcctgatgggctggaagagtggttcttccgtgatgactttggccgtgtaactaagcatgtagacactgatgcagcggtgactatttatgattatgatgagcacggcaatattgtgtctatgacacaaccagacggttcccttctatattatgcttatgatgaaaaccgtcagcttataggtatggtggatgctgaaggcggacgttggtttaaagaatatgatgcggctggaaacattaccaaagaaaccgacccactgaagcgtgaaacacaatatagctataacggtttaggtttacttacttcaattaaagatcctaaaggtggcactaaaaccttaagttatgacgaccaaggcaatttaattagttatatcgattgttctggtaaagaaaccaaatggacttacgacaaaaaaggtcgggttgttgcaatagaaaatgctttaaagcaaaaagttgaatacttttatagtgatctaacaattgagcaacgtgaaccaattattaaaggtttacctctaaatgcttttggtcaacttgaaaagattaaacatgctgatggcacagaagaacacttcattcatgatgctgaagggcgtttactggcacatatagatcagaaacagaatatcaccagatatgaatatgatgcggcaggtttaattgcatcacgaacagatgcgctcaatcataaacttaaatatgagtgggataagcttaatcgtctcaagcgcctaattaatgaaaatggtgccagttaccaattcttctatgatgtcgcaagccgactcgttaaagaaattgattttgatggtaaagaaaccatttataactatgacgaaacagacggaaaccttgttagtagtgttgaagtcgcttctatgcatggtcaagatttacgagatcgaattgcaccgaaagatcgtattcaaaagtttcttttcgatagcatggggcgcttagaacagcgtacagcaggctatggatatgttgagcatgatttagagcaacaattagttgaagaatttgcttacgatagtaatggcaatcttattcaagccaaaaatgctgaaagtaacctacagtggtattacgatgctgtaggcaatgtaattcgtgaacatcatcaagactataaaaccaagaaaactggagtctggaaacacagttatgatgaaattaatgatcgaataaagactgtgcgtccagatggacaaaagattgactggttaacttatggttcaggtcatgttcatagtctgatcgtgaatggccaagatgttgtaagtttcgagcgtgatgatttacaccgagaaatcgcccgtcactatgccaacggaattagtcaagaacaacattacgatacgatgggacgtttaacccagcaaaatattgttaatggtcatgagttcggttatccgtcaaatgaacaagttagccagacccagaacaatgcaattcaagaaactcagcagttgattcaacgtttatatcaatacgataaaactggtcaattaacaggaattaatgatacgcgtaggggtaatatcaattataaatatgacccagttgggcgtttgcttgaggctagcagtaagttaggtaaagaaacatttagttttgaccctgcgagtaacattctagattcatatcatagtcagaaagttcaaagccattcacaaaagctagatgaaacagtctatggttataatcgtttggttaataacgtagttaaagaatatctagatcaacaataccaatatgatgtttatggacaactggtttgccagaaatcaaccaagggtaatttatatcttgagtgggatgcgtgtggacgactaattaaaagtcgtaatgctgaatatacggcagagtaccgctatgatgcattaggacgccggattcaaaagcgaagtaaacatcatcataccagtggtgaacataacatcatttatggatgggatggcaatacacttgcttatgagtcgaatgagcaaattaccaagcattatatatatgagaaagattcatttgtaccactggcacaagcggtttatgcagaagaaatagagcttcatcaaacacctgactgggcagataagccttatagtttacaacgtgacccattatggaaagtaaccaaaactgcaaaagactttaaagatttttggttctatcattgtgatcatttgggtacaccacaagaaatgacggatcatacaggtgcggtcatttggaaagctgaatataaggcttggggtgagtgtaaagctgaaaaagctaaatctaacttctttgaagactctgagatcatcagtaataatatccgtttccaagggcaatatttcgaccaagaaacagggcttcattacaaccggtatcgttattattcaccgtatgtagggcgttttatttccaaagatcctattggattattgggtggagataatgtatatgcttatgcgccgaatccagtggaatgggttgatcctttggggcttaactctaaaaaaactcctgctcaattaacagcagatagagctagatttgaactaggcaagacttctggtgctgcagctgatctacaagttggaaatgttaatattacaggtataagtggacgagtaggaaaaaatgttcatccacaattaaaaaaagcacttagagatgttcctaaagaagaacaagcgccatggcatggagcatgtgcagaagttgatgcgattaataaagcactaaagaaaggtatgaatattgagggtgctacaattgacgttgtaaatattaattctaatgataaacgtcatggaactcataaacctgcttgtagcagttgcagtaatgttttaaagcaatttggagtaaagagtaatgagaaataa

SEQ ID NO: 48994 - DNA, 684 bp, Acinetobacter baumannii
gtgttccaaggcggcgcatcggcaagtgttcaatctagtttgccaccaccaccaaaacgtgggcagggtgtacttgagttgttccatgaatatgcacatggtgagtttgttaaacaaggcggttatacagtgactgattcgttagggaaacagttcaaaggacaactggatgataaaggttttgttcgtgtttcgggtttagctacaggttcagccaaaattgtatttgaagaggataagcgtaatccttgggatgaagcgagtgattttaaacgtcctcctatgtggccaagtgataatgatacgagtgctcaaactttaatgggtaaagcagatagtgttttgaaaggtgcagtgacagaagctaaaaaagctttaggtcaaactttcacaaatccaagttcgattatgagaacaatcgatactgcaaagcaattaaaagaaaatggtgcaagtgcattgttgccgatggtgcaacaaggtgttgaatcacatttaacgagtcaattgactaattttacctctaaggttttaagccaaagttcgacagggcaaggatggatgcatgggaaaactaaccccgttgctccagttaccagcggattaaatgtaaatccattaagggctcaagactcgaaaaatacagagactgctcttaatcctatgagttttaagtttaaataa

SEQ ID NO: 48995 - DNA, 2493 bp, Acinetobacter baumannii
atgttgaacagtattcatcaagttttagatagtttgggtattagcccgcagaaacgtgctattcatgttcaatttacgtctccgatattgaatgaccaagtatttctgcaaagaattgatggtgtacatgcactcaatgatggtttaaaagcagaacttttatgcctatcgacaaatgcaacgattcaacttaaatcttttattggtgttcaggctgctgtagatattgtgacggagcgaggtgaattaactcgcgttacaggcattattactcatgctcaacagggccaatcagatggaagtctaactttatataagctgaccttagaagatccaaccgcattatggaaatatcgccgtaattcacgtgtatttatgaataaaagcgtggttgagatatgggaaatattatttaaagaatggcaaactaaaaatccgctatttgctgcaagtttaagtttagatttaagcggtctaacacaaacttatgaagtgcgtccttttgtgatgcaacataacgaaagtgactggaatttccttacacgcttacttcgtagtgaaaatatcagttggctcattgatgaagctcagcatattgttccaagtaccgatacacctattcaagctcagaaactcaggttaattgatgccaatagtcaatatcagcctttagaccgtaaaacgattcgttaccaccgtagtagtgcggtcgaacaatatgacagtatgactcgcttaactgctgagcgttcccttcaacccaatgttatgcatatacaacgttggcaagcagaaatattagatcaagaagaagggattggaagtgttcaaagtaagcatcagcatagtgaacattatgacaatgctacacttggcttggagcaagcttggaactatgcgcctgcatggattggtgacttaaagggtgaggatggggttactaaatctggaaatcaacaagttgaacgattaaaccagaacctccacaattactacgaggcacaggcgaaacgctttattgcacaaacaacagtccgcgatgcctatgtgggttactatttcgaattaaatgaacacccagaaatagaccagcatgaaagctcagataaaagctttttgattgtttctaaaaacttctttaatcagaataatttacctaaagatttaaatgatcaaatcaatggtttattggcgcaaagtaactgggcaattcaaaaccccgagaacagtgatgaacgccaagcgaatcaactgattttacaacgtcgtcatattccaacaacaccagcttataacccgcaaattcatagtccagtcactcatccacaacgcgcaaaagtggtgggtcctgaaggtgaagaaatctatgtagatgagtgggggcgtattaaagtccgcttcctatttacgcgtagtgatgaccatagccatgatggtggagcaggaaccaacaacaatgacaccgattcagcttggattgacgttctaacgccgtgggctggagaaggttatggtgcgcggtttttaccgcgtatcggtgagatcgtcgttattgacttctttaatggcgatatcgaccgaccatttgtaatgggccgaattcatgaggcccagcgccatccaaccaaatttgataacaaaggtaagcttcctgatactaaaaagctcagtggtatccgttctaaagaagtgtcaggtggtgggtttgggcaactcagatttgatgatacaccgggacaaattagtacccagctacaaagcagccatggtgcaagccagttaaatctcgggaaactgagtcatcctaaagataaagcggaaagtgaagaccgtggagaaggctttgaactgcgtacggaccaatggggagctttgcgcgcggggcaaggtttattggtatccacccataaacaggataatgccaaaggagaccaccttgacgccgaagttgcgaaaaagcaacttgaaggtagtcaaactaacagtaaagcgctaagtgacattgctaaaaaccagaaaaccgatgaaatcgaatcgattgaacagttaaaagattttgcctcacaaattcagcagcaaatcgctaaatttgaaaaagctttacttcttttgagttcaccggatggtatagctctaagtagttcagaagatattcacatctcggctgatgcacaaattaatcagattgctggagacagcattaatataagtactcaaaagaatgtgattgcccatgcccaaaataggctcagcctttttgctgctcagagtggactaaaagctgttgctgcacaaggcaaggtagaaatacaagcccagtcagatgctttagatgtgcttgctaataaaggtattacgatttcttcgacagaagactgcattgaaattagtagtcctaaagaaattgtaattactggtgcaagttcacaaattaccttaaatggttcaggaatctttccgaaaactggcgggaaattccaagtcaatgcctga

SEQ ID NO: 48996 - DNA, 1119 bp, Acinetobacter baumannii
atgtggcagcaattaatcacgtggctgaaacacttaagttttttagtcaaaaaagaattcttaaccatttttagtgatcctgcaaatagggctattctatttgtacccgctctgatgcaagcacttttatttggctatgcggctacttatgacgttaaccatgtagtttatgcaattttagatcagagtaacgggcaggtttcacatgagctgatctcgaagctcgatggctctggtatttttaagcgtgttgcaacactggaatataccgaacaaatcaaacaggttattgataatcgtcaggcattgctcataattacgatccccaatgatttcgagagtaaattaaacaataaccaaagctctcctatacaggtcattgttgatggtagaaattcatctacagctatggttgcagggtcatatctaaataaaattattggtcagttcaatcagcaaaagtttagttcagctttaccgattagccttgaaacaagaacatggtacaacccaaatcaagagtctcgttggagcttaatgcctgcattaattgcagcattaagtatgatgcagacattacttttatctgctttatcagttgcgcgtgaacgtgagcagggtacgtttgatcaattattagtgacaccgtatacaccattacaaattatgattggtaaggctttgccgccgatttttgtaggtttgatgcaatcgaccattattttattgattattttgttctggtttaaaattccaatgaatggctctattggactgctttattttggattattcagctttaacgtggctgtagttggtgtgggcttatcaatttcagctttatctttaaatatgcaacaagctatgctttttacatttttattgattatgcctttaatgttactttcaggcttactgacacctgtagaaaatatgccaaaagcattacaagtagcaacttatgcaaatccattaagatttggaattaacttagtacagcgggtttatttagaaggtgcaagctttgcccaagtcaaattgaattttttaccaatgattgtgctggggatagtaactttacctttagcagcttggttgtttagaaatagattatcttaa

SEQ ID NO: 48997 - DNA, 1758 bp, Acinetobacter baumannii
atgattgatagtaaagcagtggttcaagcccataatttattcatgacttttaaagccgaaaataaaaattcagcagatattagtgcaattgttgatttgaatatgcaaatcaaaaaaggagaacttaccgctttagtcggtccagatggtgcgggtaaaacaactttattaaggttaattgcaggattatataaagcgagttcaggttctcttcatgtgcttgggtttgatattgaaaaacatcctcaagttgtccaagactgtattagttatatgccacaacgttttggactctatgaagacttaagtgtacaagagaatttagatttatatgccgacttacacggcgttccaaaaaatgtacgtaaccaaagatttaaacgtttattggagataacgaatcttactcagtttactcaacgtctagcaggacaactttctggtggaatgaagcaaaagctaggattggcatgtactctagttcgttccccagagttactgttgctcgatgaacctagtgttggagtagaccctttatcacgacgggatttatggatcattattgaacaacttgttcaggaagaaaatttaagtgtaattataagtaccgcttatatggatgaagcagaaaagtgcgcttacgtgtatatcatgcacgaaggcaaaattttaagacaaggttcacctgagcaattaaaagcgttagtacatgagcaaacatggaaaataaaaccttcagagcagattaagactcggattgtacaagcccagttacttggaaattctggagagattattgatgcagtgccaaggggagagcaagtaaactttattagccgccaaaaagaactatcaacaaatattttacctctggggctagtggcaaataggcgaccagctgaactcgaagatgcttttatgatgttgttacaacaaaatcaaaaacaacaaatctctatttctcagcaaacttttcgatcagaacaaaacaataattcgcaatcagaccaagcggtcattgtagttaaagatttagtcagaacttttggagattttactgctgttgccaatacgtcatttactgtacagcgtggagagatctttgggttacttggaccaaatggagctggtaaaaccacgacatttcgcatgttatgtgggttactaccggcaagtagcggttacctagaagttgcaggtaaaaacttacggacggcccgtgctgaagcaagagctaaagtaggctacgtctctcaaaaatttgcactgtatagcaatttaactgtgttggaaaacttaaagttctttggtggagcctatggtttatcgggcaaaaaactagatcaacaaattgataaagctttacaacaatatgatttaaagccgcaaattaaaagcggtgatttacctggtggttataaacagcgcttatctatggcggctgcattattacatgaaccagaaattttatttttagacgaacctacgagtggaatagacccgcttgcacggcgtttattttggtacagcattggtaaactcgcaaatcaaggcattaccatcattattaccacccattttatggaggaagcagaatattgtgaccgcattgccatacaagatgcaggaaagttactagccctaggttctcctcaacaggtccgcgaattggcaagtaaagataaacatattgttgatatgaatgaggcttttattgcaattgtggaacaagcacgtgcattaaggcatgcgggttag

SEQ ID NO: 48998 - DNA, 312 bp, Acinetobacter baumannii
atgaaaaatgaaattatgagtaaagcagaagtaagtgcatttacttcgctttttttaggtttagtaggctactcagtttttatgttttatctccttgctaaaagaagtaaaggaataaactactttaatgatttatattcgattaataaatttgtagtttattttttattctttttgttgtttttattagggagacaatttaaaaactatataaatctaaaaaatatatatgttgtcaaatttattaatttcatcagtgcttttagtattggtgttttattagcctctggcttttttactattgttttatag

SEQ ID NO: 48999 - DNA, 576 bp, Acinetobacter baumannii
gtgatttataaacttaaaatgtggatctctagggaagtggttgatccatttttttcattatattcgtatatttataaaaattttgttcttgttcttaccttaagtttttgtctaattgtaatactttgtgctcttaacccaagtatagtttttacccctaaaaaagagggttttgttgtttatgaacctgaatttcatatcaaacatgggcgtatgacatcattaataataaaagataattataaaaaaaatattattaattgtgcatattttagaaatgagagtggttcattttgtgaattatataagcctagaaaactacttaaagttgagggaggtttttttcctaatttatcattattttttaaaaataaatatattgtagtcactagaatttgttttgaagatgaaaaagggagggtaattaatttttcaacaagtgaagaaaaaattgcttcttggtggaattgggttatgttccccaccttattgattagatatttaattttaatctggttagtggtggttgtttcaatattacttttaaaagctttcaaatatcagaataaaagttaa

SEQ ID NO: 49000 - DNA, 1029 bp, Acinetobacter baumannii
atgctgttaaaagttggtgaattggctaagcaaacaggacttactgtccgtgctcttcatcactatgacgatatcggtttacttcagccttcggcccgttccgatgctggttatcgactatatacccctaaagacattactcgtttgcatcaaattcaagcattacgagggctgggtatgtcgctagccgaaatctatacggttcttgaagatcccaatctagcacttttaccaattattgatcggcagattcaagcaattgatcaaagactggcagagcagaagaaattgcgaaatcagcttggacaattgaaatctcagctcatcaatggtgaagaacttgatttggaggattggctaaatatgctggagcttatagcaatgtacgagaaatactttacgcaagaagaacttgaaaagcttacatttttacaatcaggtactaaaagccaccaagaatggcaagagttaactcaagcagcaaatgcactatttaatgctggagaatcatctagcagtgaaaccgctcaaaagctcgcccataagtggatgaaaacacttgagcagaatacgcgcaccaatccagaatggcttgttaaattaaataacatcaattcagcagaacctgaatttcaggaaaaattaggagtaatgccagaagttgttgagtttttacttaaggccttttcagagagtaagctgagtatttttgctcgttatttatctgataatgagtttgcttttttaaaggaaaattatgttcgcgaaatgaaaaaatggcctcaactattagtcgatattgagaaattgattgacgctgaggttaaaccgaatagtgaaggagcaaagcgtttggcacagcaatggctctctatgctacaaggttatactggccaaaatccaagtactcaagaaaagatccgtacagcaatgcaaaatgaaccaagccttgctgacggtacttggctcaaaccagttaccctacactttctagaaaaagcagtagcagcactaatgcgtggtgcttag

SEQ ID NO: 49001 - DNA, 471 bp, Acinetobacter baumannii
atgaaagtcattaaatacgccttattttcccttaggggagtgttgataataaatagcgcagaggctggaaatgcatctacttcattaaaggtgagcttaaccattgtagacacttgtgaagtttccacacaaggaaacttagattttggttcggttgaacgtgctcagccagtccctactgcaagaacggatgtaactgtgcaatgcagcaaaaatacaccgtatcaattggcagtaacctctgacaataactttgaacttaaatctactgccagcccagcatctgttgcatatgtactgtatcaagatgcgggccacactcaaatttggggaggggcggcggataaattacgttcacgaattgcgacagggatgaaagaaaatattcctatccacggggcaatcacatcaagcaccaatgttcaggcgactaagtatgaagattgggttcgtgtgaatgttatatattaa

SEQ ID NO: 49002 - DNA, 1374 bp, Acinetobacter baumannii
atgaataatattccacatgcaaataagtcattctggctagcccactcaggcgaatatattccatcaccacctcttagaggtagcattgatatagatgtggtgattattggaggagggtttactggattatctactgcttatcacataagaaaagtggattctgctgcaacagtggctgttcttgaaggcgaatgtgtagcatttggtgcttcaggccgtacctctggctgggttgtgccagttccagtacttgatcccactactgcaaaagtactttatggaaaagaaagattaactgaacttcaaaatttcgcatggaatggtctggactatgtgcaggacttaatcaaacgcgaaaatatggatagcgattttgaaatgcctggtgtgacatttactacacttcgcggccatgaaaaaagattagagcactttactaaatattggcaagatcaacctcgctctaaagacagcgtctatatggatagagctacagtaagccaagctctaaatagtgatgcattttctggtggatgccgaatgccacattctgggcaagtcaaccctgtaaagcattctcgagaactaaagcgaattgcagaacaggctggtgcacaaatttttgagcaaacgccagtattggatatagaagataaggaaacgttctttattctcaaaactccagaaggagaggttagagctaaacatattgtattaggtaccaatggttttactcatttattgccaccagaattggggctaaaacgcgcccaacttccaatgtttgtatatcagttaattaccgaacctttaactgatgaagattggaaagcgcttggatggaaacatcgtggtcagttttatgacaaaacaacctattgtcctccaacctgtagaacgactgtagatggaagattgcaatttaacctatgtgatatctatgtaggagaagggcgttctatggatgaagcacagaaagtgcaattttatgatgccgctgagcgaatgtataaaaaggtatttcctgcatttcagaaattaaaaattgctcaacgttggagtggtgcttgttctattccttttgacgtaaggtctcaagtgggcacactccataatggtcgtatttcttatgcctatggatacagtggtgcaggcgtaatgatgtcacaaaattatggccgaattttagctgatcttgcattgcaacgtaaaacggagcttaccgagcattggtttgttgccaatggagaaaaaggacacgctaaatttaaacgtttcccattaattccgggtctcatcgctgcgctacgtacttatttcgaatacgaacgagtatcagcactttctaggagaagacgccttggactcgattaa

SEQ ID NO: 49003 - DNA, 1260 bp, Acinetobacter baumannii
atgaatgagataacaactaaaaaggcaaatccgattttattaggcgtacttggtgtattcgttagcaatatcagtcacgcttcagcacttgaacaatcgggccaatctatcttgccatttcttgaaaatggaaattatgcagaagcaaatttatttgcagttgatgcatctgtttctggcatagtcaatgatagagccgatcttgtaagagatcatcaaagtcgagatacaggtgatatcgcagaaagtacgcaattttatacagctgcaataaagttacaactcacagatcgtttaggttttggtgtgctatatgatcaacctttttcagcagacatcaaatatccggcacgttttaataatagttattttgataatgatattagccatgaaggtacatcagtaaaagctgatactcaaaatttaagtttattattcggatattctccatatcagcattttcaaatttatggtggacctgtttatcaaactgtaaaagcaaatgtagcgcttagaggtaatgcctatactcaggcttttaatggctataatgctaagtttaaacaacaaggtgaagttggttggttgttgggagggagctatcaactacctgatatagcattaaaagcagcaattacatatcgctctaaaatcaaatatcaatttcaagtggaagaagatatttttggtgaaccattaaaacttgttgaaaatgagaaaacccaattagagactccagcatcattaaatattgattttcaaacaggtatttctgaaaaatcacttgtttatatgaatttaagatgggtgaattggaaagagtttgaaactcgtcctccacaatatggagctctttctgaaattttaatgaaagaattaaccaatggcgaatatattcaaggattcaagctcgattcttaccaaaacgatcaatatagtgcaactttaggaattgcacaccaatttacagaaaaatggagtacttcaacagatgtaagttgggattcaggtacaggtaatcctgcatcaacgatgggacctataaaaggttcatggtcacttggtttaggcgtccagtttaacccagctaaaaactactttataactggtagtttaaaatatttttggctaggtgatactaaaactgaagatgggacttattacttgccaatagagggaatcaagccatacgcagaacaggcaaatttcaaaaataaccatgcaattgcttatggtttgaagtttggatattggttttaa

SEQ ID NO: 49004 - DNA, 1479 bp, Acinetobacter baumannii
atgcgtgagtatcaaaactggattaatggacaatcttctgcgccatcaacttctgaatatatcgtgagaacttctccagcagatggtactgctttagctaagtttccacgtagtggacaagaggatgtcgatattgcagtagctaaagctcaggaattacatctttctggtcaatggtcaaatttagcagcctcagagcgtgcaaaactacttaataaattcgcagatttaattgaaaagaattctgaaagtttggcaaaaattgaagctgaagaagtagggaagccaatattttatgccagaggcgaaattctatgggctgctgaattagttaagttcgctgcttctttagcatggcaaattccaggtgaggcacacacacatttaggtgaaaacaaactaggtttagttacacgtgaagctcgtggtgtagtaggtcttattgttccttggaacttcccattagtatgcctttttcaaaaacttccatatgcattagcagcaggatgtccagttgttatcaaaccttctgaatttacatcgggaacagctttagaagttgcaaaacttgctaaagaagcaggcttgcctgatggtttgattaatattgtttgtggtcgtggttctattattggcgatgctttaacccgtcatccagatgtaaaaatgatttcatttactggctctactggtgttggtaaaacaatcgcacgtttggcagcagatgacatgactcgtgtagcacttgaactaggcgggaaagcggctaatgtcgtgtttgcggatgctgattttgatgcagctctagatggtgttttatttggtgtaatgctaaatcaaggtgaagaatgtgttgctggtacgcgtctaatcattgaggaatctatcgcagattcttttgttgaaaaattagtagaacgcgcgaaaaaacttaccattggtcatccacttgatgaaaatactcaaattggcccattaattcatcaacagcactttaacaaagtacttgaatacatcgaaattggcaaaaaagaaggcgctaagcttgtattagatggctctaaacctgaaggtgaaaatcttaatgatggttattatgttgggccaacaatttttaccaatgtaaaacgtacagatcgaattttccaagaagaaatttttggaccagtacttaccgtaacaacatttaattcaattgaagaagctgttgatctggctaatgatgttgaatatggcttgggtaatggtctttggactaaagatattgataaagctatcaatgtttctaagcaacttcaaagtggtactgtgtatgtaaatacttacttagaaggagctgcacaattaccatttggtggatataaacaaagtggttatggtcgtgagaatggtgtagacgctttacttgaatatatggaagtaaaatctacatttattaaacttggcgcacgtacaccagttttaccaaatacattgtaa

SEQ ID NO: 49005 - DNA, 1119 bp, Acinetobacter baumannii
  misc_feature (442)..(451): n is a, c, g, or t
atgaactttaaacgaatgattaatgttgtaggtgctcatgcaggcggtgagcgtaatgatgtgattactggtggtgtgctcgacgtgccaggtcaaacaatgtttgacaaaatgacatacttacaagagcagaaggacgaaattcgtaaactcattctgcaagagcctcgtggtaatgtaactcagtgcgttaatttggttttaccgtctaatcatcctaatgcagatgctggctttgtgattatggaatcggaatattacgttccgatgtcgggcacaaataccatttgtactgtaacagtgcttcttgagactggcatgattccgatggttgagccaattacaaggtttactttggaagcaccgggtgggctcgtgggaatcgaagctcgttgtgaaaatggtaaatgtattgatgttaaatttaaaaatgttccatgcnnnnnnnnnngtctcaagaagcactgttacagtacaaatggtaaatgtattgatgttaaatttaaaaatgttccatgctttgtttttggtctcgataaattcgttgaggttgaaggtttaggcacagttaaagttgatgtttcatatggtggaatgatatatgccatcgtagatgcacaatcagttggctttagccttactcctgacgaagctgcagatttagttgaagtgggtgagcgaattaaaaaagcggcagcacaacaagttcctgctattcatccagagcaaccgttaattcatactattaatcagacattatttgccggttcaatttcgacaaataatgaaggtttaaaaactgcaaagaatgcagtgattgtatcaccaggacgtttagatcgttcaccatgtggtacagggacaagtgctagattagctgtaatgcatgcaagaggacaaattggcttaaatgaaaagtttgttcatgagtctgtaattggcagtaaatttactggaattattgaagaaattggttctattgctggccaaacgagtattactccatcaatcacaggtagcgcttggattacaggtttttatcaacatgtattggatgcaagtgatccattcccggaaggttttactcttggggatacatggaagaaagaacgtaattaa

SEQ ID NO: 49006 - DNA, 3237 bp, Acinetobacter baumannii
atgcatgtcattttcatctcggcttgtgaaaaaagagctttaaagaaaactcgagcaattttggatagctatgctattcgtacaggacattcgtcttggcaagcaccaatgacaatggacggcttaaaagaaattcgtagtgcattaaaaaaagtagctacccgacaaactgcggtggccgcttacattaattttggtgtacgcagaatgaagcttgcatgggttgtgggagcaaaacataaatttgcacacgatggtgcatacccagttgcatcgactaagaaacagcaaaagttactcatgcttgatgagtgggtcaaagtaagtagcttgttggcaggtgcagcaggagacatgcatgatattggtaaggcatcccagcattttcagaaaaaattaagtccagaaatggcagggcaaaaaattagagatgacattcgacatgaatggttgtctttaaaactattacaacaactcagaaaaaatggatgggactggcagcttgcttggaaaaatttagataaaggtttagataaatttactttaggtgatcgacaagaaattgaacagggaatccaaaacgaattagaagcagtcgattatttggttgttacgcatcatgggttattaggggtggaagaagctttaaaaaatgatccattagccttacctcactatggaaatcatgtccggacattggttccaagccttgaacaaatgagctgtgcaggtgaattgccagactctatttttaaaagtcatcaaaaacgtatgcagcgtttaactgcattaataccaaaacaaaaaataaaccagcttttgtactggaaagccttagcactacattcacgagcagcactcattcatgccgatcatattgtctcggcacaacaatattctttgcaaaaacctgaaaatgtatcgttatttgcaaatacaaagcttaaaactatagaccaagacaaaaaagccaaattacaagatcaaccactagaatggcatttacaccaagtcggagatcgggcttcacgcattgcagttcaaatgatgactgatttgagtttacctggtctatctgagcaaaccgttgaatatatttgccagcccacaactcacccgcgtttccaatggcaaaatattgcagcaagtgtattgcaaaaaaatatacagaagcatcctgaaacaccagcgttggtattcaatattgcagggactggaagtggtaaaacccgcatgaatttgcgcgccgcttgtactttacgaccagatgacccaagaatagcgattgcgcttaatttgcgttctctaactttgcagactgggcatgcactgaaaacctcgatgaatctatcggaagatgaaatcgccgtaattattggagataccgttactcagactttattcgatcaaagtaaagagaaaattgagtttgttgatgaagatgaaaatcatccagaacctatttttgatgcttggggtgaggactgtgatttatctgagtggttacatccattatttacggttgaaaaaaatggacataaagttttagatcaaaaggaaactacaatccttgcttcgccattattagtttcaaccattgattatctgattgcagcaggtgagccacatagacaaggacatcacgttaaagcattacttagagtggtgagtagcgacttgattttagatgaagttgatggctatgaacctaaagcattgatcgctgttttacgtttagttcagttagctgcaatgtatggtcgaaacgttatttgttcgtcggcaaccttatcacttacagttgccaaaacaattcatcgggcttttgagtcgggtatgcaaatgcgggcagccctttatggtaccgagaaaaaatcaatcattgcgattattgataatgagcttaaaccacaggtctggttagaaagatcaaatcaaaaatcagaatttaatacaaactaccaaaagcatttagataatttacaagttcacttgctctctaagcctacccatcgactggctcagttgctttcgttacctgaaactacagttttatcgtggaaacagtcggtattggaaggagtaaagcaacttcatcaagagcatgcatggaattttaaaaagaccgaaaagaaaatttctttggggcttatacgggttgccaatattaaacatgcaattcgacttgcccaatttttatcagatcatttacctgaggcaaaaatagcttgttatcatgcgaatgactggcttatttcaagattttataaagagcaacgtttagatcagcttttaacacgtcataaagacggtaaaaaaagaaaaactggtaatgagcagatcgagcaagatgatgaaatcattgacctcattcaaaaatctaattctctaaatattccatttattgtgattgcaacaccagtggaagaagttgggcgagatcatgattttgattgggctattattgatgcatcaagtgtacaatcaattgtacaaacagcaggccgagttaatcgtcaccggttagaaaaagtacaacaacccaatattatgattccccagtggaattatcgttattgtgaacaacgtgatattgaaaaacttaagcagcaaagtaagcagcgtcgacctgtatttgtatatcctggctatgaagggtatggttcatctgtaacatcaacttattcatctcaagatttaaaagagcttttaccatgggatcatcaatctcaattagtcattaatgcccgtttgcgttttgatcaagtaaattgtttatttgcaaaacatgatgatcaacaaataggaaatttttgccaaaattattttaatgatcaaggggagcagttattttctcggtcggatgtagatgcaagtatcatgacagagaatatttataatttaacgcctttacgagaacgtaactatcaagaaacctatatgtttgagtggactaatagcttgattgttaaaaaacaagtttatggttttgatgaaaaagcgactaaaactttaaaatatccaaaatatggtttggtatgggatctagtgaagttcgaagaaattcctgctaagccacaagcatggttagctctcgatccacaacaaatgaaagattactgttatgagtaccaaattgccaatgagcaaggctgccgtatatctttaacaccttacaatagagatgaaatacctacttggtcttatgattatggcttcggtgttatgcaaaaatag

SEQ ID NO: 49007 - DNA, 1299 bp, Acinetobacter baumannii
atgaaacatgagaacaaagtattttttctcatcgatgtaaataacatgtacgtctcatgtgaacgagtctttaatccaagtttaaacaataaaccagtcatcgttttgtcaaataacgatggatgtgccgttgcgcgcagcaatgaagcaaaaaatttaaatataaaaatgggggtgccattattccagatcagagacatagtaaaaaaacacaatgttattgttctctctagcaattatgaactttacgctgaaatgtcgcgcagatttcataagattcttgcatcgtatgtaactgatgaagaagttgagaaatattcaatagatgagtgttttgttgatttttcagcttatgaaaaaaattttgacctagaaaaggtcgctcaggatatgcgcctaaaaatatggaaatggattggtttgcccgtgtgcgtaggtattggtcgcagcaagacggaggcaaagatatccaatcatatagctaagaaaaatcaaggctttaacggcgtttgcgatctcgtaaacatggatccgtgcaataaagaatattactttgctcaaatagatgtgagtgaagtctggggggtcggccgtaaacatgcaaaaaagttgcaaagcatgggaattaatacagtgcttgatctagcttgtgctgaaccacgtgaaatgcaaaaacgcttttctattgttatggctcgtactattaacgagctacaaggcatctcttgcctagaaattgaagacactccgccatctaaaaagcaaattattaagtcatgttcttttggtgcgaaagttaccgaacttattgacctacaagaagcaatagccatgcatgcacaagaagcatgtaagagattgagagatgatgaatcattatgcggctgtcttattgtttttgttcaatcaagtccttttgatgaaaatgtaccgttttataacaagtcaataaccggctcattttcacaaccaacagattgtgcgttagatttcgtaaaagctgcaacaaaaatgctatctcacatttttaaagaaggtattaagtataagaagtgcggtgtgatactaactgggctagaacccaaaacaggtcacacttatgacctgctcacagatttcgaagctatagaaaagaaagaacaattgatgaaaacactagagaacgtacacacaaaattcggaaagaaaaaactcggtataagttcgtgttatgtaccaggtcgcaactggtcaatgtcacgagacaaattaactaagaatccatttaaatgggatgaactacctttaataactaaatga

SEQ ID NO: 49008 - DNA, 495 bp, Acinetobacter baumannii
atgagcgaaattgcaccatccattatccagataaagccttatataactcaaggttttgctttgtctgatgttatgtctatcaagctagttgtaccttcctctcatatgcttatcccttatgcacttgagaagatttcagcaggtttcccaagtccagcacaagattatgtagataaagcgctcgatatgaacgagcacttaataaaaaatgaaactgcaacgtttattgtcaaagttgcctccctatcgatgctcaacgctggcatagatattgatgacgaattgattgtggatcgtagtcttgatgcaaagcacggcgatatcgttattgcactaattgacaatgaattcacagttaaacgtttaatgatcgatgaaaaaggccaatggcttaaagcagagaatccggattataaaaatatttatttagcggatggccaagaattaataatttggggtgttgtcactcatatcattaaaatgacacggcattaa

SEQ ID NO: 49009 - DNA, 3753 bp, Acinetobacter baumannii
atgaacacaatggatacttttcatcaaatggataaatctcaccaaggctatatcaccgaattcaacgataaaagtgagtttgaacaacgcattaatacagcttggcgacgtgccgaacctgaagctgtagaagagctattacaagctgctgcggtatctgatgatttagatcataaaatttatgaccttgcatttaaccttgcccataatttacgtgaacgtaagacctcttcaggtaaagcaggtattgttcaagggttattacaagaattctctctttcttcacaagaaggcgtggctttgatgtgtcttgctgaagctttgcttcgtattccagacacagcaacacgtgatttgctcattcgcgataaaatcaatcaaggtaactggaaagaacatgttggccaaagcagcttaatgtttgtgaatgctgctgcatggggtctcatgttaactggtaagcttatggaaacaccaaagcaaaccagtctttcaagtgtacttactggccttttagcacgtagtggccgtggcattattcgtaaagcagttgacgttgcaatgcgtatgatgggtgaacagtttgtgactggtgaaaccatcgaagaagctgtcgaccacgcaaaagtacttgaggataaaggtttccgctattcttatgacatgttaggtgaagctgccttaaccgaccatgacgctgaacgctactttaatgattacacacaagccattcatgcaattggtaaagcgtctaatggtaaaggcgtatatgatggcccaggtatctcaattaagctttctgctttgcatccacgttaccaacgtgcgcaaattgaacgtgttcacaaagaactctacggcaaagtatttgagctcgctcgtttagctaaacagtacaatattggtttaaatatcgatgcagaagaatcagagcgtttagaaatttctcttgagttacttgagcgtctctgttttgagccagaacttgcgaactggaaaggcattggtttcgtaattcaagcttaccaaaaacgctgcttctttgtggttgattatattatcgaccttgctaagcgtagccaaaagcgtctgatgatccgtcttgtaaaaggcgcatattgggatagcgaaattaagaaagcacaaatcgaaggtatggatgactaccctgtcttcacgcgtaaagttcatactgatttgtcttatatcgcttgtgctaaaaaattacttgcagcaccagaatttatttatccgcaatttgcgacgcataatgctcaaactttagcaacgatctatcatttagcagatccaagcaaatattacgctggtcaatatgagttccaatgcttacatggtatgggcgagccgctttatgaacaagttgttggtccacgtgagcaaaataaattaggcgtgccatgccgtatttatgctccggttggtaaccacgaaacattgttagcttatttagtccgtcgtttacttgaaaatggcgcgaatacttcatttgttaaccgtattgccgataaaactcttaaagttgaagatcttatccagtctccaatttatgatattcgtaatgcagctaagcttgaaggttcagttggtttaaaacatccatcaattccactacctttagatatgtacggaacgcttcgtaaaaactctaaaggttatgacttagcaaatgacaccccacttgcagctttagatagcacagctcaagaattacgtaatcgtatttggcaaagccatccgttgttggctaatactgattctttagaacaaggtcattctgttgcaattacaaacccagcacaaaatgatgaaattgttggttatgtacaagaagctgatcttaagcatgtcgaaatcgctcttactgcagctgaacaaacccagtcagaatggtcaaatacacctaaggatcaacgcgctcaatacttaaaacgcgcagctgacctcatggaaagccgtattcaagagttgatggtattactttgccgtgaaagtggtaaaacttatgccaatgcgattgcagaagttcgtgaggctgtagatttcctacgttactatgcaacccaagttgaaaatcttcctgcaaatacagttattcagcctttaggtactgtactttgtattagcccatggaacttccctcttgcaattttctcaggtcaaattgctgcggcattagtcagtggtaactgtgttattgctaaaccagctgaacaaactccattgatcgcagcccaagcagttcagattttaagggaagctggtattccacatggtgctgtacagctacttcctggccgcggtgaaacagtaggtgctcagctcagccaagatagccgtatcgatggcattatgtttactggctcgactgaagttgcaaaaattttacagaagaccgttgcaaaacgtttatctgaaaatggtcaatctattccactcattgcagagactggcggtcaaaatgcaatgattgttgactcatctgctttaactgaacaagttgtattagatgttgtaagttctgcttttgatagcgcaggtcaacgctgctctgctttacgtattttatgtgtacaagaagacagtgctgcaaccgttattaaaatgcttaaaggtgcaatgcaacagttgatcgtaggtaaccctgcaattttaaaaactgacattggtcctgttattgatgacgaagcaaaacagacgattgaccagcacatccagaaaatgaaatcgaagggttatccggtacatcaattgatgtttggtgcaacaagccaaacagaattagataaaggaacttttgttgtgccaacagcaattgagcttcctaatcttgatgacttacaacgtgaagtttttggtccagttttacacatcattacctataagtatggtgaacttgagcaactcatctcaagaatcaacgctaaaggttatggtttaactatgggtcttcatacccgtattgatgaaaccatccaaaccgtaattcaacatgctgaagtgggtaacctttatatcaaccgtaatattgttggtgctgttgttggcgtacaaccattcggtggtgaaggtttatctggtacaggccctaaagcgggtggccctctttatatgtatcgcttaatgcagcattgttctaacaaagtattagcaactccatttgcggtaaaaaatgagcaaaccatttttgaaggctttaaccgtgaggtttatcaaagcttacaaaactgggcgaaacaacatttaccacaagcaaaccgtgaaattgaaccttttggtgttggtaagttttatgagttacaaggccctactggggaaagtaaccaatatattattttgccgcgtcatcgtgttctttcaattgctgatacagaacaagatcaattgcatcagttacttgcaatctttgcagttggcagccaagctgctgtaatgccaaatagtccattattggcaaaacataaacaaacgttgccaaaagatgtacttgatgcgattacaaccattaaaaacatcactacagatgattttgatgcagttttacatcatggcaaccgcgaagagatcttctcattacagcaagaaattgctagccgttctggcgcaattgttggtattactcatgttgaaccaaatgagtcgattccacttgaacgtttggtaattgaacgtgcaattagcgtaaatacagctgcggctggcggtaatgcaagcttaatgacaatgtctgaataa

SEQ ID NO: 49010 - DNA, 288 bp, Acinetobacter baumannii
atgaatggcccattattaagccttgatcgcaccgatttaaaaattttggatattcttcaaacagatgggcgtatttccaacagcaaattagctgaactcgtcaatttgtctccaacagcagttatggcacgagtgcagaagctcaccaaagatgaattcatcttaggttatgaagctaaattaaatccggttaagttaaatgcaaattttttggtttttgtcgaagtcttacttgataaaaccacacccaatgttttagatgagtttattgatgcagtcgtgccataa

SEQ ID NO: 49011 - DNA, 1443 bp, Acinetobacter baumannii
atgaataaacatttattagcaaaaatcactcttttaggtgctgcacaactatttacgtttcatacggcatttgcagatatacctctgacacctgctcagttcgcaaaagcgaaaacagaaaattttgataaaaaagtgattctgtccaatttaaataaaccacatgctttgttatgggggccagataatcaaatttggttaaccgaacgtgcaactggcaaaattttaagagtaaatcctgtatctggtagcgcgaaaacagtatttcaggttcctgaaattgtgagtgatgctgatgggcaaaatggtttgttaggttttgcttttcatcctgactttaaacataacccttatatctatatttcaggcacttttaaaaatccaaaatctacagataaagagttacctaatcagacaattattcgtagatatacctataataaaactacagatacatttgaaaagcctattgatttgattgcaggtttaccgtcatcaaaagatcatcagtctggtcgtctcgttattggtccagaccaaaaaatctactatacgattggtgaccaaggtcgtaatcagttagcttatctgttcttaccgaatcaggcacagcatactccgactcagcaagagctcaatagtaaagactaccatacatatatgggtaaagtattacgcttaaatctggacggcagtatacctaaagacaacccaagctttaacggcgtagtgagtcatatctacactttagggcaccgtaatccacaaggtttagcatttgccccaaatggaaagcttttacaatctgagcaaggaccaaattctgatgatgaaattaaccttgtattaaaaggtggtaactatggctggccaaatgtagctggttataaagatgacagtggttatgcctatgcaaactattcggcagcaaccaataaatcacaaattaaagatttagctcaaaacgggataaaagtagcaacaggtgttcctgtgactaaagagtctgaatggactggtaaaaactttgtgccacctttgaaaactttatatacggtacaagatacctataactataatgaccctacttgtggtgagatggcatatatttgctggccaacggttgcaccgtcatcggcatatgtatatacgggaggcaaaaaagcgattccagggtgggaaaatacattattggtcccatctttaaaacgtggggtgattttccgtattaaattggacccgacatatagcacgactttggatgatgctatcccaatgtttaaaagcaataaccgttatcgtgatgtcatcgctagtccagaaggtaataccttatatgtgctgactgatacagcgggaaatgtacaaaaagatgatggttcagtcactcatactttagagaatcccggttctctcattaaatttacatataacggtaagtaa

SEQ ID NO: 49012 - DNA, 444 bp, Acinetobacter baumannii
atgagttatcaccatattttagttccggtcgatggttctcctacctcacttattgctgttaatcatgctgcaagtcttgctaaagcctttagtagtaaagttactttggtatatgcgctcactattgatccatttatttcagttgaaattattgatagtacagaaattgcgcaagattattttaataaagcgagagcttcgattcagagcattttagatcaagctaaagaacaatttagccaacatggaatttctgttgaaaccaaaattgttgaaggtcaaacaattcatacagaaatcatcaaagcagcaactgagctaaaagctgatttattagtgattggttctcatgggcgaaaaggttttaaaaagttcttcttaggaagtgtaactcaagcacttttaggagaaattcatgtgccagtattggtcgtaactgaataa

SEQ ID NO: 49013 - DNA, 753 bp, Acinetobacter baumannii
atgagacttgaaggcaaaattgcacttattacaggtgcaggcgcagggattggcgaagcaacagctttactttttgcaaaagaaggtgcaaaagttattgtcgctgatagagactttgaaaatgcaaaaaaagttgctgatcaaattggtgaaaatgcttttgctgtagcagtagatgtagccaaaagttctgatgttaaagctatggttaaagctggagcagagcattttggtggtttggatattttagttaataatgcagggtttggtactttaggtacagttgttacacttgaagaagatctttgggatagcgtcatagatgttaacttgaaaggtgtattcctctgttcaaaattcgcaattcctgaattaattcgacgcggtggtggatctattgtgaatctagcttctactatttcagtagttggtattccagatcgtgctgcatatgtagcagcgaaaggtggtgtggcggcattaacccgtgctatggcattggatcatgcaaatgaaggtattcgagtgaatagcgttgctcctggtgttatcaattcaagctactacgataaaatgtttaaagaagttgaagatcctgttgcatttaaaaaaggcttagaagcacgttctcctttaaataaaatgggtgaaccgattgatattgctaatatgattctatttttagcatcagatgaatctacattctcaacaggtgctatgtttactattgatggtggatatactgctcgatag

SEQ ID NO: 49014 - DNA, 813 bp, Acinetobacter baumannii
atgagtatgagtcacataaaacgtgttggtgttattggctttggcgcaatgggtaaatatgttgtccattcactacaaacacattcagaaaatcttgaattatgtttactgctgaattcaactcctgacaatgatgtattgactgaatttaatccaataaacattgaaactgatgttcaagatttaattcagtggcaacccgaccttgttattgaatgtgcagggcattcagcagttattcatcacgttccatcactcttagaagcaggaattgatgttgtaatcgcatcaattggtgttctagcagatacggtgattaatgaccaattacagtccgctgctaagcaaggtgatgccagattaattttagtttctggtgccgtaggcggtctggatgcattacgttctgctaaatctgcgggattaaatacggttgaatatcgcggtagaaaacctccaaaagcttggaaagggtcaccagcagagcaagagtttgatttagatcagattaaagaaccaacttgtatttttaagggtactgctgctgaagcggcaattaagttccctaaaaatgccaatgtgacagcagcggtcgcgttatcaggtttgggatttgatgatacatcggttgagctcattgcagatccgactatcgaaaagaatattcatgaggtttcagcaataggatcttttgggaacttagatatcagtttgagtaataacccattacctgaaaatccacgcacctcatggttagcagcattaagtattgaagaagcagttactaaacaactgcatagtttgacattctag

SEQ ID NO: 49015 - DNA, 759 bp, Acinetobacter baumannii
atgactattaatgtatttcataccattgaaggtagtggcaaaccagtagttctaatttctggtttgggcggccgtgcttcattttgggatgaagtaaaaaaagagttattagggcgttaccaaatcattactcttgatcatccgggtgttggtcaaagcccaattattggtgatcctaatatttctggaattgcagaagcagtgatagagattttagatcattacaaaattccttcggctcatattttaggacattctaccggaagcttggttactcagtgcctagctctggattatgcagatcgagtaaagagtatagttttaagtagtggttgggcaaaaccagaccaacgatttattgatttctttacttatcgaaaagaaaccttagctgtaatgggggaacatgcctataacgagctaactcgttatatcgcatatccatcggaatactacgaatatcactttaaaaaggaaagtggtgtggtatcaactgattcccctaataaagaaatgattttaaagcgtattgatatgttgttgtcttattcaagactagaggaactcaattcaatacaacattcagctttagtcattggcgcgaatgatgattatgtcattccatttttacattcaaagcaactttttcaagcaattagcaatgctcaattagttgagctaagtggtggtcacttcacaccaaaggttaaacctgctgcttatgctgagattgtaaataagttctgggagtctatgtaa

SEQ ID NO: 49016 - DNA, 510 bp, Acinetobacter baumannii
atggcagagaatactgaagataaaggtgtggtgtattacttcaaccgccagacagagaaaagctactggcagccaaaaccagcaaacggtttcgtcactgtagctatctcaccagaatttgctcagatgaaacgtgacttctcaatgggaacacaaactgttcctgtcggtggacgagttcgtgaacatgctcatcctgatcatgaagaggtactgcacttcatttcaggacgcggcaaagcaattattgacgggaaagaatacgtattagaaccaggtgtaaccgtatttctaggtacacataactctcatacatttattaatgatggtgaggaagacctgcattgggcttggttcatgcaaccaagtgggcttgagtactttttccgggacatcggtcgtccacgtaaagagggagatccaactccagagccatttgaacgacctgaaaatattgaacaaattgaaggaactgataaaggagtatttgcatacactaaaaatacgtga

SEQ ID NO: 49017 - DNA, 1173 bp, Acinetobacter baumannii
atgctatataaaagtttacttttaagagcaaggttagctacatcccttatgttttttattaatggtgttgtacttgctatctgggctaccaatattccagaacttaaacgaaatcttgcattaactgaccaacagcttggttttgcactaagtggttttgccgccggtacaatgattactatgtacatagctggtatcttggccactaaaattggtacacggaatactttggtgttaggagggattcttttatctttcactattcctttatgtgcatatgcaccatcgtatacgacttttgttgctagtattttactgcttggcgttataaacagtatctatgatgtagcaatgaatagtcatgcatgtgtaatcgagattgaaagaaaaaaagtacttatgccctctttccatgctttatttagcataggtggattaattggtgcttcgactgttgctgttttactttcagataaattaggggcaacttactgtttaaccttagctggagtgctcgtattcgttgcaactataatctcagcctttttcttagtagatattcgtcctgaagtccaagctaatgaaggaaaagtgaaatttagattaccaaatcgtactctactctatcttgcatttttaactttcctcgccttatttattgaacgaactctaattgattggagctcattatatttgacagatatcagtcatgtttcaacgaatattgctgccctaggttttgctggttttagtttggctatggcacttacacgtttatctggcgattactttattaataaatttggtgaatcaaaggttcttattacttcaggtcttgcgggtgcaattggtttactattagcaattatcttccctactcctacagtttctattttaggattcttagtagtaggtctaggtttgggtaatatgattcctgtattttatagtcgagcaggtaaagtattcccggaatcacctgctgttggttatgctctaaatggtacattaggttatacaggatttttaattgcccctatcattattggatctgtttctacagactattcgctacgcatagcgatggtacttccagtacttgcatttatattcttaacgatagtgcatatgaaaccaaaacaagtgagcattactactccacatgcgcgctaa

SEQ ID NO: 49018 - DNA, 1653 bp, Acinetobacter baumannii
atgcgcgacatatacggaagaacagtacaatcagcatatgactatgttgtggttggttcaggatcagcaggaagcgttatcgctgcacgtttagctgaagacaaagatgtcaaagtcctgctccttgaagcaggtccggttgacgatagtttatatattcgcatgccagctgccttgggtttccctcttacagatgaccgtttcaactggtacatgcattctgaagaagaaccagagttaaataaccgtaagatttatgaagcccgcggtcgagtactcggtggttcttcatcaatcaacggcatgaactgggttcgtggtaatccatgggattacgataactgggaagctttaggtgctaaaggctggagctataaagactgcctaccttatttcaaaaaagctgaatctttcgataaaggcggcaatgaataccgtggtgattcaggtccaatgaaaattgaaacctgtaaagcaaataacccactgtatcaagcctttcttgaagcgggtgtacaggcaggttatgaacgtgtagatgaccataatggttacaagcaagaaggcgttcatattacccaacgtaatatccataaaggtttacgctggaatacatcacgtgcttatatccatgaaaataaggatatcagccgtttgcatgtgtgtgacaagtcacaagtgacccgtattgagttcgataagaggaaagctgtacgcatccatttccattggcatggtatgcctcaggtcattgagattaaacgtgagattattttatctgccggtgccttgcatactccacacatcctgatgctttcaggtattggtgacaaagcccatttgaaagaacatggaattgaatgtgttgctgacttacctggcgtaggccaaggacttaaagaccatgtggctgcgccggttcaataccgtgcaacccaaaatgtttcgattgccaaagaactcaccttgtttggtaaagcaaagctgggcgctcagtggcagttctttaagaaaggtttgggtgcaactaacttctttgaagtgggtgcatttattcgaactcgagatgacattaaagtgcctaacgtgcagtttgagttcattccattattaggtgaattccagcacggtagcgtccaactggaaaatggcttccagtacttctttagccttatgcgtccgacgagtaccggccgagtatggttaggaagtgccgatccgtttgcagcaccgaaattccgatttaacttcttaagcacagaagaagacagacgtgatgccattgatgcggttaaggcgatccgtaatgttgtatcacaaaaggcatgggatcacttacgtggtgaagaggttacaccgggaccgaatgtacagacagatgaagaaattctggcaatgctaagagacaatgcaggtaccaactatcatccgtgctgtacatgccgtatggggcacgatgaaatgagtgtggttgatgagtttggtcgtgttcacaccttagacaatgtgcggattgtggatgcatcgatcatgcctgagatcccgagtggtaatttgaatgcaccgatcattatgatggccgaaaaaatggccgatatcataaaaggtactaaatctttaatatcagatactgattattttaaagtggcataa

SEQ ID NO: 49019 - DNA, 954 bp, Acinetobacter baumannii
atgagtcaactccgtcaagaacgcagccgcccacttatgctttcaaagcgtgcctgcgtattttacctagaaaaagttcgtgtcgttttaaaagatgatcgaattgtttacttgacggagaactcacaacctgtggaatatttttataatattccagagaaaaacaccgcctttttactacttggcaaaggcagctcattaacagatgcggctgccagacgtttagcggaatctaatgtcatggttgggttttgcggttccggcggttcccctttattttcatcattagacttaacatttttagcaccccaaagtgaataccgccccactgaatatatgcaaatttggatgagagcgtggttagacgatgacgcacgtttactcatggcaaaaatattattacttgaacgtattgccctcgtatcacaatcatggaaaaagaattttgatttgattcaatctggtatttatattgatgaaaatgctttaaacacgttcaaacaagatattgatcgctccgaaaatcaacaggaattacttgcagccgaaggacgttgggccaaaacgctatacaaacaacttgctaaaggctttggagttgagtttattcgtgatgaaggcaaaaactctcatgactctattgcggatatagccaacagctaccttgatcatggaaactatattgcctatggctatgcagcagttgctttaaatgggatgggaattagctttgccctccctattttgcacggtaaaacacgtcgtggaggtctagtctttgacctagctgatctagttaaagatgcttttgtaatgccactcgcttttacatgtgcagcaagaggattaaatcaaaaagaattccgaatgcagcttattgaaacatgccaagaccaagatattttagattacatgtttagcttcattactgacatatgtagtaaaatcaaataa

SEQ ID NO: 49020 - DNA, 609 bp, Acinetobacter baumannii
atggatgccaattactatctggatatccgtgttcttgagtcatcagacgatacggatttaaaacttggtcatattcgtaatcaaatttacaccgtcattcatggtgcttttcggaaactgcctgcgcattacgcccttgcactagagatatctgataaattgaaagcgaagcaggaacaatttgaaaaaaaacatggtcgttcggctaaacctaactttgatattttgcgaatttttgcagaaaaacaggatgagttagatgagttaatcgaggcaattaaaggacactggaaaattcgcgactataccgttttaggtgccgcaattcctgttcctactgccaaaatttctggttggaaaagttatcgaaagtttcgtattccaactctgaaatctgaacgtactaagctttcccaccaaaatgaacctttaagagatagacgcttaaaaacggccaaaggaatgcccttctttcaggtggtcagtagtacaggtcatggttttacagtcattattgatgttcaggagagtgaaaacgcgggatacgggctgccagatagctatgggcttgcccgtaaggaaagtccttttgccctacccgtcttttaa

SEQ ID NO: 49021 - DNA, 1062 bp, Acinetobacter baumannii
atgacaatttttaagaaattaccgggtagcctttctttacaacgcggtacagtggtaagtgatggggctttttttaatttatttgaagatggcaaacaagagccgttacacgtgatgtatcacggtattcgaggtactcaaaacgtagcaggtaacaaagaaaaaggggctgcaacaggtaattcacttgctcgcgaagtcaccaatattcagcttaccgaatctgcaaaattacaacctaaagcgaaacttttggtgaaatgggactttcgttttattgatttaagctatgtactgtttgcaagtgcttctaaagctggtgctgataaaactgaagaatataatttccgccaagctttcttaaattttgtaaatcgcgccaaagaaagcgatggacttaaagaagttgtgcgtcgttatgtacgtaatattgttaatggccgttggttatggcgcaaccgcattgtcgctgaaactattaccattcaagtgactgctcaagactaccctgaaatatttagctttgatgctctttcttataaccttaaaagttttgatcaaacgtctgaacaagaacaaaaactagcagacattttgttaaaaggaattacaggtgaatccacaagtgcagcactacatattgaagcgattgttgacttcggaatgggtggtgtagaagttttcccttctcaaaattacttagaagataaaccaaaaggtttctctcgatctctgtatcaattaacaccgaaaaaaccagaccaccaagcaaacgacaaccaatatctggggcaagctgctttacgtgaccaaaaaattggaaatgctctaagaacaattgatacttggtatccattgtttaaagaaaacgatgagaaaccaattgcggtagagcctaacggtgcaaacctagaaggtcagattttctatcgcgtaggtaaagacaaagtttctgcattcgatattttaaaagaaattgatgagcttgatccaaacagcgaaaaaggtatgttcctaattgcttgtttaattcgtggtggcgtgtactctgagggtgaataa

SEQ ID NO: 49022 - DNA, 885 bp, Acinetobacter baumannii
atgagtcgttatgtcgttattcctcgtatgcgagtacaaaatgcaaatatgcaaactaatggcttcttattaggtggtgtgcctttgtttgcagccaatatgtttgcacatcatttggcaagacaattaggcactcaagaagaaggcattatttatattcatcatgaccaacagcgtttaggtgggcaagcctatggccgctttacgcctgctcaacgtcgtggtgccgtgtttattggtaaaaaggactattcttctaaaaataaatatgcgttgtctttacaaccaactgcatcttgtcatttagagtttagccttgttatcaaattttctagctctcgtattagtccagaaaaactaacaaacatacttaaacgtagccgttttgctggtggacaaattatcgagtttttagaaattacgacacatgctgaaaatgaattagaaacagctttaaagaaaatcaaaactgggtttgccattttagatcgacaagatttgcttattgaatatcagcaacgtaaacaaattaatcgagttcaggcatttacccaactgttggcattaaaagcagatgcgcttagaactttctttaatgaccaaaatttaagttggatatcggcaactaatttgggttacgccctacttgagccactcacagaccaacgagctggtattcgccaagcacaagatcaggaaacgacagcccatgcctatgcagaaccacttacaggcattgttcagtatttttctttaggcgagattctaaggaaaaataccgagactgaggatgacacttggcataacttgcaaaaattattgtggacctaccactggccacaagacgacatttttcttttaaaacaaaattgcatcaatgcataa

SEQ ID NO: 49023 - DNA, 1167 bp, Acinetobacter baumannii
atgcctgaaccacaaactgatatttttataaacgctttagaagaatcggtacactttagtttaaagacgattaattccaatattgaaaaaggtggaattcgtttaagtaaacaacaagcacttgatttaccctatctcagtgctcgaactttattaaatgaagacttccttattccaaccgattatcaggcaaatgcaggtaaaacggcttctatttttaaagtcgtaaaagcggccatgattaatgatgatatcagttcagaagaagctgagtttcaacaacaagtggaacagctcaagccatccatttcatctatttttaatgagccgtatcaagcaggtacagaaaatattgatatacgtatgcgccagcttttaattccaaaaaatggtgaatacgtttcagttagcccacttactgctgctggcgtaaattatctggtgaaccaagaagttgatgctgtaaatgaattacgcaaagaaaaagacagtgaatttaatcgcattcaaactgctgtttttggcataggcggagccaatccacaaaatgtgggaagcctcgttcgttcaatgcaacgccctattacagtggatgctcctcaagcaagtgaaaaagtacgccaagcattagcgattttctataacggaattacgatacgtctatcccgcaaaataaaactgcttaatggaactaaacgggcaaaagaagcaattaaagagtggtcagaaattttaaatcgccaacttattatcaccgcgacgaataccattcaaaattggcatgacctcgagattttcgctccctctaccaatcgggatgttcgagatcaggaagttattttcctgaatatccttgctaaagatgtattaagacaggcgacttttcaaaaaaatattttagaagaggctgaatcaattttaccaagtatggaagaaattgagcgtccttcattctgggttcatccgagcctttcgtttgttttacaaggtttgattgacccagaactacgagatgatcactggagaataaagttctcagattatcttgctagaaaaatcaccaatgaaacctttgatatagaaataaataatgaaactgtaacgattagcctagatagcaattcagaaggttatatcgcccgccgcttacgggagattattcgatga

SEQ ID NO: 49024 - DNA, 1665 bp, Acinetobacter baumannii
gtgaaatatcctaaattatgtcctttaacggcggcaattgttatctccggtttttctagctttgccaatgctcaattaggacaaaacttagctgttgatatccgctcactatcgatggggaatgctgtaactgcagaccctccaggtattagtgcagtccattttaaccctgcagctttagcaaaaattgatgggctgcaaacagatgtgcaggggattcttgctaacttcgatattcaacgtgagttctccgctccacctggttataacatttttggttattccgatgacccacttgtttgtaatgatggtcctgaggtttcagctaatatttgtacagattttaaaggatcagtacatggtgatgttgaatatgcaagtttatatgtaccaattcttaaaaagatggttgatcttggggcgggttatccactagttgcccctacagccggaattgcctataagccaccaggatcaaaagtcacctatgctacagctatgtatgcaccattagtcgcaggtttcggagctgaaaatggtaatccaggcaactacatgggacagcaagttgcagttgagcggatcacttatttatcgccatcttttggttatcaggtaaatgatcatttatctattggtgcttccgtagggatgtcctataacgcaatcgcactgaaaactgatctacgttttcctaatgaaatgattggtgttttacgtatggtcgatgatgtggtgtgcgcacccttcaaagataataacgatatgattactgatttgttgttattaggaatttgtaatgctaaagaaggaatgaacccatttaataaaatgggtgccttacaagtttctttagaacaatcattaagtccaagctataacttgggattgctatgggaaccaacagacgattttggttttggtatggtatatcaaagtgcagccaagatgcgtctaaaaggtaaatatatgattgataatgccaaagcacctcaagagctagtacgtggcctgaattcttctgcaacaggccaaattttagctgctattcttggcttacccggttatgttcctgatattgagtccggtttggttgcaatggatcttgaatacccagcacattttcaagcgggtattaaatataaaatattgccagatttacaattaaatttagatgttggatggactgattattcggcatggaataaatttaaatttgagtttgaccggcaaatcaccttattaaaagttgctaaacttttatctaatgacgttactgataattctttagcattaccattaaaatttacatcgccgtggagttgggggattggccttgaatattcagcaactgatcgtttgaaattacgagctggttatgagcctcgtgccagttcaatacctaatgacaaacgcaataccatggttccaattaataacgcacaattatttggtcttggtgtaggttatcgttttgatgcagatacagatctagatctttcagtagggttccttcgtagtcgtgacaacatcccagcttgtacgagtactttatcgaataaatgtggtgtcgataatattttattaaacccttattctggcttagatgtaaaaacgaatacaaaagttacagtacttggtttgagctatagaacaaaatggtaa

SEQ ID NO: 49025 - DNA, 1182 bp, Acinetobacter baumannii
atgaataatcgatggataaagatgagtgtgttggctttaagtatgagtgccattacagggacaatttatgccgaagagcaagtgcaatcaacgcaagtatccgattctaatcagtctgtagaagcaaatgaaaactctggtgcttcagatactactagttctagtgaggctacaacagatagtactacacaaacatctaatgtctctgaaactaataatgtagttccagcatctaatagtgaggcacatcaagctgcaagtgcactacagaaaaaagaaggtgatgctagccaggagacaaatttacaagaggtatttacttcaaatgagcgccaatattctttgattaaaaagggtgtaatttcttcttattatgatcttgactacacttattatcgtgatactcgtattgatttagccttatcggataattcctctcagctcaaccgtttacgtgttgaggaagatgcaaaccatacattaacaaatagttttactttgcaatatggggtattagataacttaactttatccgcaactcttccttttgtagcaaagtctgaaattattcgtgatacaacaactgcaggattgggagatatttcatttggcgcacgttgggagccgtttcctttaaaacaaggtcgtttacctttggttctttttggtagcctgtcaacgaagactggcgatagtccttatgagattggtttagatgaattgtcaacgggtaaaggttattactcagttggtgtgggagcaagtacccgtaaatatattgatccagtcgttctctttgcttctgcttctgccaattacggctttaaagaaagtggccttaatcaagcccgaggttcgcgtacattaacttcatttgatccagggattagcggtggcttttcttttggtttcgcttactcatttaactatgacgtgtctttaaccatgtcatatcagcaaagttttaatatggatgctgaattccagtttgaaaatggagaaagctataaatcacctgatcaaagtagtgcgatgttgtcttttgctttaggtgttcgggtttcacctgaaacgattgttaacggtaccgttggtattggtttaaccgaagatgcgccagatatttcacttggtttgtcattcccgttagatattttaggttttaataaaaaacaaaaataa

SEQ ID NO: 49026 - DNA, 666 bp, Acinetobacter baumannii
atggctaaagttttgtatttgtacggtgggtggcctggccattacccttatgaagttgctgcatggatgctcaatttactaaaagagctagattatgttgttgaagaaagtactgatatttttacattagatcgtgatttaaccagctatgatttaataattattggctggaataatgctgtaacaacagaaacactaaccccctcacaagagaatcatctcctaaaagccattgaatcaggaacaggcctagttggaatccatggagctggcgctgcatttagatctagtttgcgatatcactgggtacttggtggctcatttgttgaacatccagctggcgaggcttatccaaaaccttatatggttaatatgattgattcatctcatcctgttacacaaggcgttagtgattttgaagtccgttctgaacaatattacatggaggtagaccctaatatacatgtacttgcggaaacaacattcgatggtgatcctatgccatggctaaaaggccataagagtcctgtagcttgggtacgtaattggggagatggtcgtgttttctatcattctattggccatgataccaataatctctcggacccaaatattcgtttactaactaagcaaggtatagcttgggctactcgtaagcaaaattaa

SEQ ID NO: 49027 - DNA, 1080 bp, Acinetobacter baumannii
atggtttcgatgaaggatgttgcaaaagagtgtggggtctcacaggcaacagtttcatacgcttataacggatctcctaaagtatcaaaagaaatgcgtgagttaatattcaaaacggcagaaaagataggctatatggggccggacattagggctaaaagtcttaagtctggaagagtaggtgctataggcttaatggtgatggatcaattagcttatgcatgtactgatccgtgggttatcacgctattgcagggtattagtagtgttgaagaattatcagatgtcgcattaactttaataccgattaataattcaagatttaaggatggggtgggaacaaatgaatatagtcttgcaacacgaggattggttgatggccttattatttcaacgctgccagataatcatccagtagtaaaagctattattcgacaaaaaattcctgctgtaatcttggatgcaccattagttgaaaatataaattacatcggtatagatgatagaaatgcagcaattaatcaaatggaacatatattatctttaggtcataaaaatattggaattattatagaacgcttaataccagatggttttaaaggttttattgatgaaaaaagattaaaaaaatcaacagaaatgatttctagagaacgcttatatggatatctagaagcagctaaaaaatatggaattagtttttcagatttgcatatttatgaggcaggaggatttaatattaaagatggtaatatagctacatctatgttactgaaaaataaagatataacagctattgtggcagcttctgatgtgatggcgattggcagtttaaattttgctaaccagcatgatattaatgttccaaataatttatctattattggcttcgatgatatacctgaagcatctatacatggtttaactactattcaacaaccacttttagaaaaaggagcttacgctgccaagttacttttagaacttcttaacgaagaaaacaacctaaagatccataagaaaatttttgaaactaagttagtaatcaggagttctacttctgttctaaatataaattaa

SEQ ID NO: 49028 - DNA, 870 bp, Acinetobacter baumannii
atggaattaacccataatacaactttagccaaatatagttcactagttgtggaagtggagtcagcaaaggaagctggttttaaaagccttgaactatctgcaaagaaggttgcggattatctagatgctggttttacagagtctgaccttaaaactttacttaaaggcttaactatttcaggaatgggatatttagttaatatagaaagacaggggcttgaacgggaagatttaattactgatgcccgaaaaatatttagtcttgcccaaaaaagtggtgcaaagggtgttcaggttttgagtggacctcttgacgtaaatgctgttattagtcattccgaacaaaaacaatttaatggttataaaggcctgttaggtctagaaattgatgagatcatagaaaaaacagcacaaaatttatcgatcttggcagatgtagctcaagagtatggtttagtaatttatctagaagctctggcatggaccccgctcaaaaggctagaagatcaaattaaaacaattcaattagcaaacaagaataatatcaagataattattgatttttggcatttgaatacttgcgggaatactccggaagatgtcaaaaaactagataagaacttaatttatggtgtacatgtttgtgatggtttagagaatagttctgctataccagaagaagttagattaagaaatgtcgacttaggtcaaggagttattcaattagataaatggatagaagctgttaaggcaaccggttatgagggttggtgggcatccgaaagtttttataagaaagagcatcaagattcaccattagaaaatgcgcaaaagcattataagtatcttgaaacactaattcttaattaa

SEQ ID NO: 49029 - DNA, 1614 bp, Acinetobacter baumannii
atgtgtaatttaaatattgaaatgaaaaagccatctttcgattatattgtgataggaggtggctctgctggaagtacaatttcaggcagattaagtgagaactcgaataattctattcttttgttagaagaaggtcctagggataaaagtatttatattcatattcctgttacttattataaaacagctcaaggtccattactcaagcgctataattatgtaaggagcgcagaacaaacaccacaacataaagcgacgatggttcaagccaaggtattaggtggggggagttcagttaatgctatgctttacttaagaggtaatgcaaacgactatgctgattgggaaaaagcaggtgcaaaaggttggggatatgaagacgtaattaaatattttaaaaagtcagaagataacaatacttttcataataaagtacatggtgtcaatggacctcttggagtatcagattgttcgtataaacataatttatctcgcgtttggttaaaggcgtgtcaagaatatggtcttccttttaatgctgatttcaactcaggtgagcaacagggatgcggtttttaccaagttacaattcgaaatggtcgtcgctcgagtgcatccaaagcttatttatcaaataaaagagataatttaaccgttcaaacggggtgtaaagttttaagaattatttttgaaggtaaacgagctgtcggcgttgaatttattaagaatggaaaaaaagaaactgtatattcaaaaaaagaaataattgtttctgctggtgcttttggttcacctcatcttttattattatctggattaggtccaaaagaagatttgaaagagcacggtattcctgttgttaaagatttacctaatgttggacaaaattatcaagatcatattgaaatgtcccttatttataagcttaaaggtgctttcagttatgacaaatataaaaaattacagtggcaagctgtagcgggacttcaatttttgttatttaatgctggacctgcgacatcaaatattattgaaacaggtgcattctggtggagttctcaagggaaaacgttaccagatctacaattatttttcttagcaggtgcagggattgaagaaggtaaagatggggttcctggtggtaatggttgtacgatcagtattacacaaacacgcccagaatctgtaggctatattaaactacaaagttctgacccatataaacagcctttaattgttcccaactatattacatcgccaaatgatttaaaaactttagcggatggagctaaattggtgcaagacataatgtcccaagaggcttttaaagattatgttgaagcaagtcatgttccagaaaaaccactaaaaactcaggaagattttgaaaatttcgttcgtaaggaggcttatcctggtcttcatccttgtggcacatgtcgaataggggaagatgaaactacctcagttgtagatcctgaattgaaagttcatggcgtcgaagggctacgagttgcagatgcatcggttatgcctaatgtaatctcaggaaatttaaatgctgtaacgattatgattggtgaaaaagctgcagatttaatcttaaatggttaa

SEQ ID NO: 49030 - DNA, 708 bp, Acinetobacter baumannii
ttgaataatattagtgaaaaagaattatataattattataaaaacaaagcgttggctttaaagcaactgggtattactatggtattaggaccaatagctgatattataactgggtcaaatccctggttgaaagacagacaaattaaaacaacttcatataatattagccagttagttaaaatatttattgaagctctacagtcattggagattgactgtgttactaaacattttccgggatataatcatttagaaaaagatccagcaatggaagatactttgttaactacagataaagaaacaattatcagcaacttagttagcttcagttcagctattaaagttaatactgctggaataatgttaggaccagcagctgtagaggtttttgatcaggtgaattctgcgtcaacctctcaaaagttaataaattttttgaaagaagatctaaattataaaggtttaatagtcagtgacgatctagatgctccagcaatactaagaggtaaatcaatagatgaaattgctgttcaagcactgaattcaggagttgatttattattattgagttctgaaaatgatcttgatcaaattgctcaatatattagtctatcagttgcttcaggaaatttagatagagaaaggctatctaatgctgcaaataaggtaagaaatttatcattcaagaaaaatttgaataataattaa

SEQ ID NO: 49031 - DNA, 861 bp, Acinetobacter baumannii; identical to SEQ ID NO: 5314

SEQ ID NO: 49032 - DNA, 861 bp, Acinetobacter baumannii
atgcatacgcggaaggcaataacggaggcaattcgaaaactcggagtccaaaccggtgacctgttgatggtgcatgcctcacttaaagcgattggtccggtcgaaggaggagcggagacggtcgttgccgcgttacgctccgcggttgggccgactggcactgtgatgggatacgcgtcgtgggaccgatcaccctacgaggagactctgaatggcgctcggttggatgacaaagcccgccgtacctggccgccgttcgatcccgcaacggccgggacttaccgtgggttcggcctgctgaatcaatttctggttcaagcccccggcgcgcggcgcagcgcgcaccccgatgcatcgatggtcgcggttggtccgctagctgaaacgctgacggagcctcacgaactcggtcacgccttgggggaagggtcgcccgtcgagcggttcgtccgccttggcgggaaggccctgctgttgggtgcgccgctaaactccgttaccgcattgcactacgccgaggcggttgcggatatccccaacaaacgatgggtgacgtatgagatgccgatgcttggaagaaacggtgaagtcgcctggaaaacggcatcagaatacgattcaaacggcattctcgattgctttgctatcgaaggaaagccggatgcggtcgaaactatagcaaatgcttacgtgaagctcggtcgccatcgagaaggtgtcgtgggctttgctcagtgctacctgttcgacgcgcaggacatcgtgacgttcggcgtcacctatcttgagaagcacttcggagccactccgatcgtgccagcacacgaagccgcccagcgctcttgcgagccttccggttag

SEQ ID NO: 49033 - DNA, 312 bp, Acinetobacter baumannii
atgacaagacgaccgcgccggaaccacagcccggctttcaaggcaaaagtggcgctcgccgcgatccgaggtgagcagacgctggtggaattgtcccagcagttcgacgtgcatgccaaccagatcaaacagtggaaagaccagctccttgatggggcgacaggcgttttcggcgatgaagcgaaggcggaaccggcaggtccaaccgtcgatgtcaaaacgctgcacgccaaaataggcgaactgacattggagaatgattttttagccggagcgctcggcaaagcgggattgctgggcggaaagaaatga

SEQ ID NO: 49034 - DNA, 123 bp, Acinetobacter baumannii
atggcaactaaacgaagaacccagacccaatggcagcaactcatcgaacaatggaaacagactgatgagaccattgccaatttctgtgttcagcacggtttaaatcaggcgagccacggctga

SEQ ID NO: 49035 - DNA, 1530 bp, Acinetobacter baumannii
atgtcatcggcaaggaatgccagggcgagtcaagtaccgaactatgaacgtcatcggcccgaacagacgcttctctatcaattggttcagcagcactatccggtctttaagtcttctttagatgaccagggacaaagtttgccgcgttacgttcagagagaattcgaggattttctccaatgtggtcggctagagtatggctttttgcgtgtgcgctgtgaagattgtcatcacgagcgtttggtcgctttcagctgcaaacggcgtggtttctgccccagctgcggtgcccgccggatggtggagagtgccgcacttttggtggatgaagtatttcccgcagagcctattcgccaatgggtgctgagttttcctttccagttgcgctttttgctggcccgttacccggagctgatgggcaaggtcttgagcatcgtttaccgtatactctcaacccatctgattaagaaagcgggttttaccaaggctacggcacaaagtggatcggtaacgctcatccaacgctttggctccgcgctgaatctgaatgtacactaccacatgctgtttctcgacgggatttacaccgaagacggccatggtaaacagcgcttccatcgggtcaaagcgccgacccacgatgagctgaataccctcgtccacacgcttagccatcgcattgctcgctgtctggaaaagcgaggcgtattagagcgcgatgccgagaatacctggttgactctggaagaggaggaaggcgatgtgctgacgcaactgcagggcgcatcagtgacctatcgcatcgccaccggtcctcagcaggggcgcaaggtcttcaccctacaaaccttaccggggcgagagaatcaggccgacaccaacagccgagtggcgaactatgccggcttctcgctacacgccggtgtcatggccgaagcgcatcagcgagataagcttgagcgcctgtgtcgctatatcagtcggccagcgatctcggaaaagcgtctggcattgaccgccaatggacaaatccgctacgagctcaaaaccccttaccgcaatggcactacgcatgtgatcttcgaaccactggatttcattgccaagctagcggctttggtacccaagcctagggtcaaccttactcgattccacgggctttttgcaccgaacagcaaacaccgcgttcaagtaacacccgctaagcggggcaaaaagcccgatcaatcggaaggtctcgatactggctggtgtgacaagagccccgcagagcgccaccgcgctatgacctggatgcaacgactcaagcgtgttttcaacatcgacatcgaggtctgtgaacactgcggtggccaagtcaaagtgattgcaagcattgaagacccgaaggtgattgagctgattcttaattacctcaggcagaaagccgctaaggttgacgctgccaaacagcacgaattgccgccagagcgagccccgccactgactcccagcctgttcgacccatcgcagacttgcctatttaattga

SEQ ID NO: 49036 - DNA, 942 bp, Acinetobacter baumannii
atggacgaaaataaaaaaacgtatccaccttcttgggttgtgatgcaaaataatattcaagaatgttttaaaagtatgaatattgatgaaaagcgtatattgatacttgctagtccaattgctagaactactcaagcaacagaaaaagatcctattatgattaccgctgaaaaattcgctgaagagtgtggaattaaaacgcattcagcatatacacagttagaagtagcaagtagaaatctgattaagcgtagtttttcttataacaatgaaagagggaaacgtgttctgtctaattgggtaattgattgcatttatgaagatggaggtattgcaattcgattccctgagatcgttttattgatgcttacagaatttgataaattaaatccatatacaaagtacaaaaaagacatcgtacttagtctaaaaaaagattactcattcgatttttatcacttagctaaaaaacatcaggctatgggaaaatttgaaatgtctttagaaagaataagaactgaatttggcttacctgagtcttatcacgatctaagtaatctaaaaaaacgtgttatcaatccatcactagatgagatcacagctaatacagatattgccctaacttatgaaaacgttaaaaaagggcgttctgtggttggctttaagtttactgtcagagagaagcccaagcctagattaatagcatcagagcgagagcaagaaacactagatatattccgcagtctgtctgatggtcaaatcaatacctacagctctattttgtcaaaagtaggtagtattagtgatctagctggagcaaaagactatcaagcatttgcaatttggattgctaatattttacgagatccaaaatcagtcagagaggaaaccgcaaaacgtatatttaaagccttgcggactgaaacagattttaaaggttaa

SEQ ID NO: 49037 - DNA, 270 bp, Acinetobacter baumannii
atgacaaaagctgctgaaactctcgaaaagaaaatcgaagcccagttagaaaagctgaaacagttaaaggctcgcaaacaagctatcgaagctagagaaaggtcaaagcaaaaagagcaggaaaggaaggatgatactcgacgtaaaattttgctcggttcttatttaattaaaaagatgcaaagtaatgaagccaacaaagaaaaaatactcgctgaactcaacgagtatttaacagaagatcgggatagacagctttttaacctttaa

SEQ ID NO: 49038 - DNA, 282 bp, Acinetobacter baumannii
atggctaaacgtaagattatcgtaaccagttcttttaaacgtgatattaaaagacgttacttagaactggttacggctgaatgggcagaagtattagattgtttagttgcaaataatcctttgcctgaaaaatatttagatcatcccttgaagggtggtgcagagtttaagaattgtcgtgattgtcatgtgaagcctgatttagtcttgatctataggcttgttggtgatgatattttagaactgcatcagttggatagccattccgaaatttttggatga

SEQ ID NO: 49039 - DNA, 294 bp, Acinetobacter baumannii
atgtccgcagtcaatttcaatatgcgcttagaagcagagttaaaagaacaagccatgcctattttggaagactacggtttgactatgccccaagcattcaaactgttcttgaatcaaatcgttaaaactaaagcgattcctttatcttttgactatgcgcgagaaactgctttaacacctaaagcagcagccaagttacttcaatctttaaaagagattgaaaatggcgagtacaccgagtacgaaacggtagaagaagcgattaaagctatgtcggaagaagcacatggctaa

SEQ ID NO: 49040 - DNA, 897 bp, Acinetobacter baumannii
atgatagaaaatccgcaacattttaatttaataacaaattttgaagaaatcacatctagacctaattttgttgaaaaagtgacgattgctaggggtgaggatgttcaaaacactatctctgatttagttggtttttatgtgctaagggattttgttagttgtgggatttctagttgtggaaagaaacatcaaaaaggttatatcgcagcactgcatgatggaaatgaaattatcattggccataagtgcgggaaaaaacactttggtgtgagttttgatgaaaaagctaaacaattcaagcatcttagagacaatgcgaatcaatatctgcaaattaaggcaatgtatgaaaagctgccacagttaaaggaaagtctagaaagaattttgaaccagtcgggcaaaatgacattcttgcaaataaagatggcagtaaagagctttaaagaagatgcatttgattactggatgcgaaggagaattggacaagaggtaacaagcaacggatctatttttattgatgacttcaaaacagaagaagaaatcaatgctgaaatcctaagtggtagaaagaacatctcagacatcaagcgggttttggtcgcaaatattgctgaatatgatgttatcgccaattggcataatgctgaaaggttaaaggactactttgatcgtctgtacagggaaatcaagaaccccaaccaaatggacggggtggcaattaaggcattatccaaaaagcttagacagcatgaccaaaatttgagggagttggaggactatataaaaagaggtaatcgcttatttacccctgaaaacctagttcaattctccgtgttatttacaaaaccacatgatcaaaaaattattgagaaatatgcaaataattttgcttga

SEQ ID NO: 49041 - DNA, 504 bp, Acinetobacter baumannii
gtgataaaagaaaatgtaaagttgcatatcatgcaaggtgtagactggtctaaatatgatttgcctgaatggttgcgccaatttggttattggcaaggggcagtgattcgctttggtggatctactgaaaatccattagtaggagcgattaaaaaagcaaaacttagacttaagaaaggggatagggaaaagatcgttgcttattatctctgtgatgaaaattttatcgagaagccatctaaaaaacctaatgtctgtctaattacagacgatgaggctagagctgtacagcgcttggttattgatattttagacggttgcacttctgaggctatgcttgattggatggatgcaattattgagcgttatttcaatcaaaaatcatggactcagttagtaactccagagcgaacagccatggatgcaaaatacgatgttcgttgtggcttagcagctttgcacaatcgctaccagtttattagatataaaaatggctcagtatga

SEQ ID NO: 49042 - DNA, 279 bp, Acinetobacter baumannii
atgaaaacgttcctaatcattatgaccgttgtttgtattgcaacttttatgggtttggttatggctgcattagctgcaaagctgcaccagttttcaggaagtctagctaaatttcgtttttctttggctttcatggatatcacttttttctttttatgtgttttgaccctaatcgtattgggtggaggtaaatatctggcgttttctcacggaattttatttttgttggcgttgtatctaattttttatcggttcgaaaagtgggagcgtaaagcgtga

SEQ ID NO: 49043 - DNA, 1332 bp, Acinetobacter baumannii
atggggtttagttcaaatattcatgatgtgaatatggagcaatgtgtactagctgctctaatgaccacagctttgtcacttgagacaattggtcaagaattggatgttgaatgtttttattcagatcgtcaccaacagatctataaggccattgtagagctatcagaaagcaactgtccgtatgacgtggtaatggtgagtaaccacctaaaaggcaaaaacgttttgcatttgatgggtggggaagaatacttaattcaacttatgcaagatgcaccgagtagtttttacaacgctgaaagttatatcactcagttaaataaactcaaaacacatcgaagaattgagcagattggtttacgtattgctgcaatggcgaaagatacaactttgcctgatgtatttgttgaggctgaaaatcttcttgggcaagtagataaggcggatgatgctgatatgggggcaagttttggaagtgctctcgatagtgccttagagcaaatgattgacaagtttgataagcagagcagacacgaaacaacaggtgttaagttcaaccttaaaacactagatgagatgctgggaaccgtacaaaacggtcatttttgtgtagttggtggtcgccccggttctgggaagtcaactttagcccaaatgatggcaattgatacggcaatgcttaaaaaagagggtgtccttttcatatcagcagaaatggacaaagaaacactttctaatcgtatgtttagctcacttagctccatcccatacaacaacctacacaatgcaacactttacgatgggctgctaaaagaatatgcaaattacaaacaagtttatagcgatctgcctatctggatagagccaaagcaaaaaccaagcattagtgaagtaagagcatatgcaaggagagctaagcgccgtttctctaagatgggtacaaaactaggatgcattattgttgattacctgcagcttgtaagagatccgagcaaaaaagaccgctttcaagaagttggctctattagtcgtgaacttaaatctatggctaaggagtttgaatgcccggtagtagcgctcgttcaattaaatcgtgaatcagaaaaaggtaagaaaccgaaagcttctgacatcaaggaatcagggcagatcgaacaagatgcggatcaaattattctcgttaatccgctcactgatgacaagacactacaacctcttggggtcactgaactgattattgccaaaaatcgacatggcaaaagagggagtgtgcgcgttcaagagtttctagatgtttgtaaatttaaggcaattgaggtgactgcagaatga

SEQ ID NO: 49044 - DNA, 798 bp, Acinetobacter baumannii
atggatgcctgttacgaccgtgaatcgttcccaacgcttgaagaggctattgaatgggtatgggcggaaactgaggaagaaattgacgctgttaaatttgtacttaagaagtttttcaaattaaatgaggatggggtttatattcaaaaccacattaaagaagagcttgaaaagtatagagccttccttgctaaacaagcagagaatggcaaaaaaggtggtcgcccaaagaaaaacccaaaaaatgattctggtaataatgggaatgattttgataattctggctttaaaaatgaaagccaagaaaacccaaatgaaagtgaattaaacccagaaaaacccaaagaaacccaaacaaagcctaaaccatctaaccatctaaccaacgaaccatctaaccaagaaaataatatatgtccgcctaacggcgaacctatgtctgctgaaaagcctaaagagaatttaaaaaatgagattcaagaggttttcgagttttggaaagtgacgtttaacaagaataatcgaaccgttcttgataacccgcgcaaatccaaaattcaagcaagactcaaagagggttacacggttgaagatatcaagacagctattgttgggtgctctaaatctcaattccatattgagggcaatcatactgatctaacgctaatttgccgcgatgcaaccaagcttgatcactttcttgccatgtctaatccagcacaggttgctatccaaccacaaactgaggatgagcaaccagcacccactcaatacaaagtaattgaagggagatggtaa

SEQ ID NO: 49045 - DNA, 1308 bp, Acinetobacter baumannii
atggctgagtggattaagaaagcacaaccgacagatcagcgtgttgcgcagaatgataagttaaaggaagacgtgtcacgaattttactagatattgagaatcgtggtgatgttgctgtaagagagctatcagtcaaattcgataaatgggagcgtcaagattatcgacttactgatgctgaaatcaaacaatgtatggatcaattaactgagcgtgagtacgaagatattaaattcgcacaaacccaagttcgtcgttttgctgatgctcaacgtcagtcaatgttaaatgtcgaaattgaaacaatacctggagttttgcttgggcataagcatattcctgtaaatgctgctggttgctatgtaccaggtggaaaatatccattacttgcttcagcacatatgtctatttgtacagcaaaggctgctggtgttaacaacattattactgcagctccgccatttcaaggtaaaccagctccatatattgtcgctgcgcagcatatggctggcgctgatgcaatttattcacttggtggaatacaggccgtaggtgcaatggcgattgggactgaaagtattcctgctgtagatattattgtagggcctggtaatgcctatgttgctgaagctaaacgtcaattatttggtcgtgttggtatagatctttttgctggacctacagaaacattattaattactgatgatagtgttgacgcagaaatgtgtgcaacagatatccttggtcaagccgaacatggacctgattcaccagccgtcatgttgacgacttctcgtgagttggcattagaaacattaaaagaaatcgatcgcttattagatttacttccaactgcagtttatgcccgtacggcttgggaaaactttggtgaaattattctttgtgaatcaaatgaagaaatggcgaaactatcagatttttatgcttctgaacatgtccaaattatgacgcatgatgatgattactttcttaaaaatctaacgaattttggtgccttatttgtaggaccaagaactaatgtttcttatggcgataaggttattggtactaaccatactttaccaacaaataaagcagctcgttatacgggaggtctatgggttggtaaataccttaaaacttgtacttatcaacgtgtacttacagatgaagcatcagctcaaattggggaatattgctcacgcttatgtctaatggaaggctttgttgcacatgctgagcaagcgaatctacgtgttcgtcgttatggcaagaaagacgttccttttggtcaagctgcagtttaa

SEQ ID NO: 49046 - DNA, 360 bp, Acinetobacter baumannii
atgatctctattcttaaatccattgtactaatgattgttattgttgtttcagtccgtgaattatctttaatttttatgaactattttgggcatccagaacttagtaatcttgtaggactgttcttactattaataagtctcgttatatatagaaaatttaaaggtattccctcctccttgattactgctaatcaactgataatgaaagaaagtgtctttgcatttttacccgtatgcgttggctctttaatcatgctttttcatcttgaggacagcttatatcttttcttgagtattctcgtcataagcacccttttaccattgttactatttgcattcgttgcagaaagagtactttaa

SEQ ID NO: 49047 - DNA, 666 bp, Acinetobacter baumannii
atgttgtttatactttattttttaattactgtattaggctatttaacggctaagctaatttattcatatattcctagaataccgataatagtctactcaatgttcattattttaattttacttgtaataagtaaggtttcttataatgactatatagagacagtaagtcctctatttaatcgacttttagggtatgtcaccgttgcgcttgcaattcctttagcaacaataaagtatgaagattttccaatttcaaaaatatcagctttagttttatgtgctagtactcttgctgttggattaccagtagggcttgcctacttattacacttatcaacatccatgattatttcttttacaactagagccatcactacacctatcgctctaaatattgcagaaattattcatgctccccctgctcttgttaccttaattgtaattctttcaggcgttataggagcagcattttcacccttactacttaaaaatattaatgatgaaagagctgcaggattagctttaggtttagcagcacatgctataggcacggctcaagcatggcaaagaagccctgttgctggacgctatgctgcatttggaatggcgattaatggggttttcacagctatctggttaccactcacaattaaaatactcatataa

SEQ ID NO: 49048 - DNA, 1032 bp, Acinetobacter baumannii
atgggtcaaaataataatgttatggaaaagttgaactcagtaagtgtaattgatgttgctaaagcagctaacgtttctattgcaacagtttcacgtagttttaataaaccagaaatggtaaaacctgaagttcgagaaaaaatcttagaaattgctgctaatatgggatataccgcaaattctgcagcaaaatcattaagatcaaaaaagactaaagtgattggtgcaattattccaaccttagatcactcgatttatgcaaccatgattaatgcttttcaaaagaagctatctgagcaaggttatgttgtatacatcttaacttgtggttttgatgcaagtgatatctttgataaggtcacattacttttggaaagaggagcagaggctttactcatcgtaggagagattcttgataaaaatttagaaaagtatttattaaaatttaaaatacctacaatttgtacttattcatatcatcatgattctaaatttccatttattggatttgataattacgcttcaacaaccactattgtagaatacctttattctttaggtcataaagaaatagcaatgatctgtgggcctttaaaaggcaatgatcgacaaattgctcgagtagaatcttttaaaaattttatgacatctaagcaagctgagcattcagtttgggagtgtaaaaatcaatataatattgcgagtggaaaagaaatccttaaggaaatagtcatatctaatccgaatgtcagtgccatcatctgtaatagtgatgtaattgcttttggtgttcttgctggagcaaaagaacttggtataaaaatacctgaacaattaaatgttattggttacgataatttagaatttgcagaatacctaactcctcctttaactacattaaatattccagcagaggaaatgggcattctaagcgctaaagcggtattggataatttaaacaatcaacagcctttaaagtcatatttgttaaaaaccgaactgattgttagagagtcaactaatccagattaa

SEQ ID NO: 49049 - DNA, 252 bp, Acinetobacter baumannii
atggttgtgaataacaaaattactaacctacgagaacaggctggtatgaccgtctatgagctatcgaaaagatgcggtttcattagtaatggcaaagttgtaagtggcgcattacttaacgcagaaaaaggaaaaaatatcacaattgaaacggcttttttaatctacactgaactcaaaaaagctggtgtatgcgagaagtttgaagatgtcttttggcttgaacgtgatgataaagatatcgaaaactaa

SEQ ID NO: 49050 - DNA, 288 bp, Acinetobacter baumannii; identical to SEQ ID NO: 46104

SEQ ID NO: 49051 - DNA, 771 bp, Acinetobacter baumannii
atgaacaatgtatctgtttttaacttcaatcaaaacgaagtccgcaccatcgtaaaagaggatggtgaaatttggtttgttctttctgatgtttgtaatgttttagagattggtaatgttagcatggctgccagtagattggatgctgaagaaattaccctcagtactattgagggtagccataggcctactaatttagtcaatgaatctggtctttattctttagttctaacaagtcgtaaacctgaagctaagcaatttaagaaatgggttacttctgatgtattaccaagtattcgtaaaaatggtggttatattgttgggcaagaagttgattcaccagaattattgatggctaaagcacttcaagttgcaaacaatattttagagtcaaaaacaaaagagttagaggcagcaaagtcaaaggttgagttattagagccgaaagcgcaagcacttgaaactatagctaatactgatggcacatacactatacgcgaatgtgcaaaaactattaatatcggtgaacgcaaactaataagtctattaattgataaaaaatggatttatcgagaagagcatggacgtttacaaccgtactcaacaaaacgagaggcaggaatatttatcaatcgcccatcaccagtaatcataaataaaaatactggtgaggagaaagttcatttacatatgcgaattacagcttatgggttaacaaaaattactgagttggtgaatagctgtaaacataacggagggtttgcagcatga

SEQ ID NO: 49052 - DNA, 384 bp, Acinetobacter baumannii
atgttagatttgaataaggaaagagaggcttttgaagcaagcgagtatgtaaagacaataatccacaaatttgaatggtctgaagaatttaaaaattatcagattaaagactgtgtgattaatggaaatatttttgatctgcttgaagcgaaaaatgatgagcaattattaaatggcgcttggtttgggtggcaagaaaaagccaaagctcagacggtgccagagaatcacattgttgtaccaagaactagagaagttgtagtggcaattgaaaaaatagttcagcagcaatgtgatgccagtggagtacaggaaccgcttcacagattggattggtggagaatcctggaggaaattgctgaaaaggttgaggagattaagtga

SEQ ID NO: 49053 - DNA, 387 bp, Acinetobacter baumannii
atgaattttaagaggcaagtaaccctaacttataggcatcttcaagcaacaagcctttttgctgcacagcgtgaagtaaggttctacttaatgggcgtgttggttaaagatggaatgatggctgccacaaatggtcactgtgccctgatctgtgatgctccagaggttcaagatatagaggtgattatcccaattgaaatagttaaatcttttattaaaaaggtcggtaataacccaaaagtaaagactatcactttaagccaaattgatgatgaattttggttattggattacgaaaatgggatgtttgaattctttcgtccaattgacggcaagtttccagatataagccgtgttgatattccaaaaccgaccgaacccccctaa

SEQ ID NO: 49054 - DNA, 435 bp, Acinetobacter baumannii
atgagtaatgtaattcgctttagacgaaatgggcttgcacataagatcagcccgcaagatgtaaaacaaaggctactcaatcccagtaaggatcttgaccttaaaaaggcggatcaaattttaggagtttttttcgataacttgtcacaagaagaaatcatcgaattggcacgagtagcaactttagaagccttggaggcagatgctcgctataagaaaaccaataatgcaactaaacagattcttcacttgctaggtagattcttggatcgccgatctaaagaggaatggaagaagtataacgactccatgacactagattcagaagcagcagcaaaggcgcgtgcatttgaagaagctaaagacgtattgccagaaattgctggaaccacattcgcaaccgtatttgcaaacaacaaagaggtgcaaccatga

SEQ ID NO: 49055 - DNA, 228 bp, Acinetobacter baumannii
ttgattgatgttgccaaaactcaagcagatttatctcaagattatcacaatggcgaacttgctcaattaactggtggtcagtaccaacttgatgagctgaaaaataatattacacaccttgaggttgtcccagagaagcaagaaatcaacacaaatcatttagctccagcgaatgcggccacctctaaaacacttacagaaggttttaagaatgacggacggcgttaa

SEQ ID NO: 49056 - DNA, 1503 bp, Acinetobacter baumannii
atggaaaaagaagcagatatagtcattatcggatcagggattggaggcagctctttagcttacagcctagcagattctggtaagcgaatcgtgatattggagcgtggcgaatatttaaaagattccttcgaagctcgtgatgatgcttcaattttcttaaaaggtttctacaaatcctctgaagtgtgggaaggtactgatggagagaaattcctaccaggtaattattattatgtaggtggaaattcgaaattctatggggcggtcatgtatcgctaccgtgcagaggattttaagccaagaaaacatatggaaggaagtgctcccggttggccaattccctattcagagattgaaccatggtatgagcaggctgaggaactatttaaggttcatggaaaagcaggagaggataagacagacccacctcgagctaactcgtatcgttatgatccagtacctgatgaaccagcgattgcttctgttcgtatgcggcttaaacaggcaggtgtgaatccaactaccttacctttggcaattgatatagaaaaatggcttgatcgcgccccaacaggctgggatgcatttcctaacacaggattagggaaaattgatgcggaagttggtcctttagctcgagctttgacgtatccaaacgtttctttgattacagacgcaagagttttacgccttgaaactgatatcagcggagagaagataacttcagctacttatattaaagatggcaaagagtaccagattcatgctgatatctttgcagttgccgcgggggcggtacagtccgcagcattgttactaagatcagcaaataaaatatatccaacaggattagcgaataggtcagatcaggttggaagaaattttatgaatcacaatacaaccgctttgattgcaattgatccaagagcagaaaatacttctgtatatcaaaagactcttgcatttaatgacttctataacaaggatccagaaacaggtttccctttaggaaatgttcaattacttggtcatattacaggaaatatactcaaggctaatttgccttcactatttcctctatggttatcaaatttaattgctcgttactcgtatggttggtttcttacaagtgaggatcttcctaatcctgaaagccgcgttatggtacgagatggccaaattgtgatgcattgggtacgttccaatatgaaagcacacaatgaattgattaaacgtactcgtgctgtcatgaaaaaagcaggttttcctattgtactgacacacacatttgggcgaaaaactacttctcatcagtgtggcacagccagactgggaaatgatcctaaaacatctgtggtctcaccgaattgccagtctcatgatatttcaaacctttacattactgatgcatcagttttgccaacgtctgctgcagtaaaccctgctttaacaatagcggctttagcacttaaagcaggagcagccattaaacaaactttttaa

SEQ ID NO: 49057 - DNA, 1257 bp, Acinetobacter baumannii
atgaaaaaacgtgataattctcttattacacaaagaattcgcttagcaagattagctacttttggtggcttcatgctaataggcgcaatgatttatgtttggtcaactagtgttagtgcttatcggcattatctaggattaaatggagctgaaggtgatgcaagtttcggtatcattgcgttaggtataggggttggatctgctgttggtgctctaataattgggcgatttatcgacttatttggagcaaaaagtgtagtagggtgcacactgattttatatccaatttctatcatagcgatggggtatattccagagttttggtttgcatttgccgctggtgtagtaatgggattgttaagaggggcaactgattcagcattaaatgcacatggagttcaggttgaacgcttttataaacgaccaattatgtcaggttttcacgcctgttatcctttagggggatttatatttggtatgttaggtagttattttgcaggtataagcccaaatagcgccacaattccatttactatattgggaggtgtgttacttattgttagctttattttatctagattcttattagataagcatgagattgttgaagatgattggcaggaaaatcatactgaaaattctgatgataaattaaataattactctaatggctatattgtactgctcatgattggttttgggatcttattgcttgcaagtatgtttggggaaaatgctgtaggtgattggggacaagaatatatgcatcgtactttgggtacgactacagctgtagctggtatggcgattagtttcttctcaggtgcgcaatttattggaagactatttggtgatcgtttaacggaaaaatttggtgctccaaaaattgttttttgcagcggaatattagctattttaggtttacttttacaaacatttggaggaagtgtacagcttgttttttgcggatacgctttatttggtttaggtttatcctgtttagctccgattatgctatcaagtgcaggtaggaaagaccctaaaaatgcagggcgtaatattagtatcgttaatggaattgggtactctggtatgcttttagctcctgcaatactttcaactatagtaagtcagtttggtattgaaagattactttatttccctatagctctaatgataattttcgtaatcatcacacctattataatgaaagagaaaaagaaaaataaatttgtcaaacttcaaaacgcgaattag

SEQ ID NO: 49058 - DNA, 1509 bp, Acinetobacter baumannii
atgctaaacgcaaaacaacatgctattcaaaaaactaaaatcgcaattattggtgctggattcggtggtcttgccatggctattcgtctgttacaaagccaacaatcagatttttttattttagaaaaatctaatgatgtcggtggaacttggcgtgaaaaccgctatccaggagctgcgtgtgatgttcaatcacatatgtactctttgtcttttgcacctaaaactgactggtcaaaacgttatgcagaagctcctgaaattttcgattatatccaagatataaccgatcaatatcaaattaaaaactactgtaagtttaaccatgaggttactcatgtacagtatgatgaaatgcgccatgtatggtcactagattttgcaaaccaaccttctctcgaagcacaatttgtagtttttgcatcaggtccgctacatattccacaaatccctcatattcaaggtattgaaaagttcaagggtaaagtttttcactcttcccaatgggaacatgactacagtctagaaggtaaatcagttgcttccatcggtactggtggtagtgcaattcaatatattccagaaatcgcaaaagacgttaagcaattatatgtattccaacgtacagcagcttgggttatcccacgagatgagcgtaaatactctaatttgagcaaagctctatttaaaaaatcaaacttctatcgacaaattcatcgcagccgtctttattggagtaatgaatctcgcgttgttcctatagttcagccgcaaatcatgaaatatgggcaaaaattagctgaggcatttatacgtttccaagttaaagataaagatttagccaagaaacttacaccagactttgtgatgggctgtaaacgcattcttatttcaaataaatacttccctacatttaaccgtaaaaatgttgaattagtgaccgagggtattcaagaaattaaagagaacagtattattacaaaggatggaaaagaaagaccaattgactgtttaatctatggaactggttttgttaccgatccacgtatttatttaaaacattttacatgtattggtcgcaatcaaatagaattaaaacaggcttggaaaaacggtgcagaaagttattatggaattatgaccaagaattttcctaacctatttcaactggtcgggccaaataccgttttaggtcataattcgattatatttatgattgagtcacaagttaattatattttacagcttattgatctggttgaaaaatctggacagcacgctatagaagttaaaccggaagttcaggattccttcaatcaaagaatacaaacacaacttcaaggtactgtatggcaagctggcggatgtagcagctggtatcaagctgccgatggaaagaacttttctttatggccaacttatacatggaaatattggctagacactcgtaaagttaatcctaaagattatttgttattaaataaatgctcacagagctatgcagcataa

SEQ ID NO: 49059 - DNA, 1020 bp, Acinetobacter baumannii
atgaaacgatcggcacttggtttaatctatttaattcaaggaatgcgcaatgcgggcattgatgtcgactcacgtttggcagatataggtattaaagtagattccttggacccaagctcaacaattcatgacagtttggaatgggatatacagcaaattattagtgagaatgttgacccagagaaaggattatttattggacaacactacgcattggcaggttatggtcctttactcatgttacttgtgaccagtcatgacatacaaacagccttagaaaaaggcatacagtatcaaaagcttactcatttatttggtactttgagcttacaagaaactgaaaatcacatcattttgaactatttaccggtcgatttaaaaacagaaatcggtttactccgtgcccaatgcgaaatttcgggcacttataagtttattcaggatatttataccatgatgggcttaaaaatgcctgatatgcgtatagatttaccatttccggaaccctctgatccagataccgttgctcaatattacgcatattatggagatgatctacattttaattctacacatgcagcatttagcctaagtaagaatgtgctggaaataaaaattccttcagcagatattattactcatcgtatctatgaggctaaatgtattaaagaaatagaaagattaaatgaacaagatcatcaaataccgcctattattcaatatgtgcaagattatttagagctacaacaaggaattatcccgagcatggcggaaaccgcttttgctttgaaaatgcctgaaaggacattaaggcatcaattgcagcagcttaatacgagttataaacaaattcgtgaacagattattaagaataaggcgcttaaacttatggaatataaagagtattcaatagaagttattgcagaagcacttggttattctgaacctgccgcttttaatcatgcatttaaaagatggtttggacagagtcctcggcaatatggaaaagagttttactga

SEQ ID NO: 49060 - DNA, 2349 bp, Acinetobacter baumannii; identical to SEQ ID NO: 46699

SEQ ID NO: 49061 - DNA, 330 bp, Acinetobacter baumannii; identical to SEQ ID NO: 46650

SEQ ID NO: 49062 - DNA, 279 bp, Acinetobacter baumannii
ttggctttagctcgtgaaaagcgggctgagtttagcgcacagaagcttgaacctatttttgagaagtacccggctgtaaaagttcggtggtatgacgttgaagcgtttagcactaaagccaatgatattgctgtgtttgagacgtcatctctgcaagattattattttgtgattgatgcgattcgaaactctgagctttgtacagtgccctactttgagtttgtagagattattcctgcaattgaagatgggtatgtagagtatgaaagttctttataa

SEQ ID NO: 49063 - DNA, 837 bp, Acinetobacter baumannii
atgagtagtaactgggtggatatttcaaaagataccaatacgggtatcgaaacaatccgtgctcattttactggtcatgcgtatgatccccattggcattcaagttatttaattggtgtaactgaatctggcattcaacaatttcattgccgtaaaaagcaaatcaatagtcatgctgggcaagtctttatgcttgagccagaagaaattcatgatggacatgcgcctgcatctgatggttttacctaccaaatgctttatctacatccagaatggttaaagcaacgccttcaaggtttgtttcacaacagccccgatcattacgaactagtgattgatgcgccattaaaatccgatgatcaacttgcaatcattacttcgcaagcatttcgacacttacactataaagaaatgaatatcgtgaaagacaatagtctagatatgcttattcaatatattgcccaaggtaaatggttaaaaaaagcttctcaatcttcgtgtattcatgtaccccaaatcgcccataaaatccgagatattctgcatgatcatttatttgaagatattgggttagaagatatatcacgtatggtgggactagaccgttaccatattcaccgtatttttaaatccacttttcatttagctcctcatcaatatcttattcaactgagacttacacgagcacgtgatttactcgctagaagtatttctccagcacaagttgcttctgacttatgtttttcagaccaaagtcatttaagtcgttggtttaaacgctgttatggactaacaccagccgcttacagaaaaatctgcacaaatcttcaagattaa

SEQ ID NO: 49064 - DNA, 594 bp, Acinetobacter baumannii
atggatgatatcaatataaggattgcacatcgaatacgagagctgcgtttagcacgtggatatactttagatgtgttagctgcccgttgccaagttagccgttcagctatttctttaattgaaagaggagaaacgagccctacggcagttgttcttgaaaaactagcgaatggtcttgaagtacctttaactcaaatttttacgaatgaagcgggtaattcatcatctcaaccgcttattcgtcggaatgaacaagctgagtggcgagatccggaaactggctatatacgccgtacagtttcacctccgaacttaaaattaccctttcagattgttgaaattgaatttccgcctcattctcgaattacttatgaaactaatgaaagctctagagtggtacagcagcagctttgggtcgttgaagggaaaattgaaattcaattaggtgaaacttcttatgcattaggtcaaggggattgcttggcaatgcaattagatcaacctgtcatatacagtaatcattcagctcaagttgctcgttatattttagtcgtttctaatcaactggtgcccgctcttaaggaatctttatga

SEQ ID NO: 49065 - DNA, 825 bp, Acinetobacter baumannii
atgaacattaaagcactcttacttataacaagcgctatttttatttcagcctgctcaccttatatagtgactgctaatccaaatcacagtgcttcaaaatctgatgaaaaagcagagaaaattaaaaatttatttaacgaagcacacactacgggtgttttagttatccaacaaggccaaactcaacaaagctatggtaatgatcttgctcgtgcttcgaccgagtatgtacctgcttcgaccttcaaaatgcttaatgctttgatcggccttgagcaccataaggcaaccaccacagaagtatttaagtgggatggtaaaaaaaggttattcccagaatgggaaaaggacatgaccctaggcgatgccatgaaagcttccgctattccagtttatcaagatttagctcgtcgtattggacttgagctcatgtctaaggaagtgaagcgtgttggttatggcaatgcagatatcggtacccaagtcgataatttttggctggtgggtcctttaaaaattactcctcagcaagaggcacagtttgcttacaagctagctaataaaacgcttccatttagccaaaaagtccaagatgaagtgcaatccatgctattcatagaagaaaagaatggaaacaaaatatacgcaaaaagtggttggggatgggatgtaaacccacaagtaggctggttaactggatgggttgttcagcctcaagggaatattgtagcgttctcccttaacttagaaatgaaaaaaggaatacctagctctgttcgaaaagagattacttataaaagtttagaacaattaggtattttatag

SEQ ID NO: 49066 - DNA, 306 bp, Acinetobacter baumannii
atgcgcgtacgtgatattttaagtaattctgaacaacattacttaagcatagaaaatgtagcagaatacctacatatgtcagatcgcaccttaaaacgacagttggcagctgaagggacttcattttcaacattagtagatgaagttcgatatcgtcatgcgacttctttactttcacgtacagattatagccttgaacaaattgcagatgaacttggttactccgatgtcgcaaatttcagccgtgcattcaaacgctggagtggccgtagtccgagtaactggcgcaaagacccctatttataa

SEQ ID NO: 49067 - DNA, 378 bp, Acinetobacter baumannii
atgcctaaaacaattttgaataccaaattggagctcctacaaacgctttggaagcaaaaagatgtacaaggaatctttgatcatctttatgtagataaaaccgagattagtgggcaaggtacgactgagttatatacaggtaaaaataaactaatcaacttactaaaagatcttgtagagggatcttgtgatgttaatcttcgtatttttaaaagcactgaattaagcaagcaattaatactcacatgggtaaattggacagtttataccgatgatagaaatgatcattttacaatgaaaagtctctttttatggcaagaaattgatcaagactggaagattatcgctgatatgtatgctgatgacgcaataaattaa

SEQ ID NO: 49068 - DNA, 1302 bp, Acinetobacter baumannii
atgttatcagttgaaatgccaacaacctattatacgaccacaaaaaaatatgacttacactttccaaatttggaggatgatattgatgtagatgtagtcattattggtggtggattctctggtgtgaataccggtcttgaactaattgaacgcggtataaaaagtatcgccattcttgaaactaattatattggatttggggggtcaggtcgtaatggtggccatattatggctggaattggacatgatcttgatcgtattaaaaaatttgttggacaagatggcttaaacacaatttttgaaatcagtgattccggctcgcgtattattaaagagcgtatccaaaaatataatattgatgcagatgtggtatggggatacggctatctcggatttaacaatcgtcaagctaaattattaagacaatgggaaaaagaatacaagagtattaacaatgatgttgaaattgagtttcttgaaggtgttgaagtaaaaaaaatagtcggttcagatagctatgcctgtgcgttaaaacatatgggcaatggtcactttcattctctcaatatgctcttggggtcagcgaaagcttttaccgaccaaggaggacaaatttacgaatactctcctgctatagaagtaacctacggtgaaacaatcagagttagaacaccgaaaggttcagttaaagcgaaaaaattattgtggtcatgtggagcttttttaaatcgtttagagccttatttacataaaaagaccatcaatacttatgcttttcaacttatgacagagccattaagtgatgaactcatccatcgcataagccctattcgtggagcttttagtgatattcgccctgtaattgactattacaggataactaatgaaaaccgtttgttattcggttctgcgacagcaatcacggaatatattccatctgacttaaagaaatggaatagacaattaatgctgaaaatctttccttatttagaaaatgttcatatcgatttagcatggggtggccctatggaatgttcagccaccctcttcccacagattggcaatcatcctaaacataaaaatgttttctttgtacaaggatattctggctttggtgtaacaccgagccatgtcatcagtcaggtggtcgcagatggaatgatggaaggctctaaatattgggacgtcattagcgctatccctaaagcaagtgtttggggtaaagaacacttcaaatcactattacttacaactgcgaaatttatccaccaattggaaggctatgccaacgggagacgttaa

SEQ ID NO: 49069 - DNA, 624 bp, Acinetobacter baumannii
gtgttggtttttctatttgtcggtattggtatatcaggactagttgatgccaaaacagctctagctaatccaaacggtttctatatcgatatgtttataaaacttactggtgaacgctgggcaccattatttagtatttctctactctttgcgctatttatgggtgtgaatgcaggtatagctgatggatcgcgtgccttatacggtatggcacaagaagggctcaccttaaaacaattcagcaagttgaacaaacacaatattccagaaagatgcattgttgttgcagtagtgattaatgtacttatgattattttccttaaatcaccattagcaatcctaattgcagcaaatttgggttatgtactttcaatattttttgcattaacaggttattgcttattaaaaaataaatacaaacaacaaaatcgagaaataaagcttagtcaaaaatggattccttttgcttaccttctctctatttataccctcattattttaatcattggtgtgatttatacagaagaagctggctacggctctattaaagaactacttagcgcagtactttttttattaacttcactcatcttttattggtttcggaaaacctttcagaaataa

SEQ ID NO: 49070 - DNA, 1374 bp, Acinetobacter baumannii
atggattggttaaaacagccgaagatgagtatgtcttatattgcgcctacggactctgcaaatttagaaaaattacgcgacaacagtagtaatattggtttctataaattaggtttggaagctgaattagaaattaacaccaatattcgtaaactacagttaggttgtggcggtgtaaatggtgcgggtggctgtgatattgatattgataatttaagtttaagtggacagaattttgatgccaatggtaatccgctacctatgtctaatgaagatcgtgcctcatcttcggctgttttaaccaatccattcattgagtttgctgttaagaatccaaactcagcatcaacacgtgaagtagttggtttaagactaagtgctgaaaaatttattggcttattaacagctggtactgaaaatacaaccaccccgaatgggatcaactctatttctggttatatgaaagttcagtccgatagtagcggtttgattaaaggttatgcaacaacttcggccacgcgagataatttatatggtgcaaatgccgtaacaggacgtttacaagctttaggacttggctcattggcagaagtagaatttattacctcaaatggtggctttaacattcctggtattcaaaataactattttgaaattgctccaattcaagttaatggtaatcgtgttacctcaaaagttttatctgctccagtgaaagtccctaatatttatgtaggtcatagtagttcttatccagtagatggtacggtgcaatataatgcagcaggtccacatgatccagcttatcctgaaccaacaggtatttatactcaaggtggtaaggtcgaggcaactgttactagttgcagcaaccttctagtgtgtgcaatagcaggggagggtaaaaagttttcaagcgtatatatgaatggtacgatttcaaatattactgcaaatttaaatttaacccagtcattgggccttattcataatttaccaattaattcaccaatgtatctcgcactacaaaatcaaatgctccaatggccgggtgcgaaagcagatgatgtagctcaaaaaggctggtggatgtcttttgcaaatccagttaacgttggtaacatcattccacaagatgcaattgatatttccccactatttccacaaatttcaacagcagtttctgcatttttacaggctaaccctgccaaaacttctgatcttgatggattattattaggggctgacttagatgtaaatattggtacgattgatttaaaaaatagtccgctcacattaaatttaagcaacttgcagttaacgaatcaaaactttaagccaaactgccatggttcaggtttaactttttgttaa

SEQ ID NO: 49071 - DNA, 612 bp, Acinetobacter baumannii
atgaaaattttacatattgattcgagtattctgggcgaacaatctatatctcgaaaactggcagctacatttatagaacgcttgaatgaagcagatcatcaaaatgaaattacttatagagatattgttaaagaccctataaatcatttaacaggagaaatcgcagcaggttttagaaacttaaatataaatatttctgatgaaaatgtaattaaggaacatcagctttccgatgagttggttgctgagttcttaaatagtgaactcattataatctcagcccctatgtataacttttctattcccactcagttaaaagcgtggtttgaccgaattgcacaggttgggaaaacatttaaatatacggaaaatggccctgtaggcttatcagaggggcgtaaagtagtaattttatctgcaagaggaggattctattcaaaagagcctctctctcatatggactttcaagaaaaatacatcacagctttttttaattttttaggcattaaagatatttactttgttagagcagagggaacatcaaaagccccagccattaaagatattgaaattcaaaaagctttgtcgagtattgatcatgtattacgttaa

SEQ ID NO: 49072 - DNA, 771 bp, Acinetobacter baumannii
atgaaaaataataaagttaaaaatttaacttaccgtttaattctatctgcgttaactctatctccatttgtaattcaaaatgctcatgcagcagttaaaaatattgttttagtacatggtgcttttgctgatgggtcgagttggaatgcagtttcaagtcgattgcaatcacttggataccatgttacttccgttcaaaatccattaacttctttagatgcagatgttgatgcgacaagacgagttctagaaagacaaaaaggtgatgtacttcttgttggtcattcttggggtggtgtggttgtaacagaagcaggtaatgcaccaaatgtgaaaggtattgtttatttatctgcgctcgtaccagatagtaatgaatcggcatctgatttactcacgcgcttaaagtctccaatggaagggcttgagcctgataaaaacggtttgatttggttagatgactttaaaaagtttcaaaacgtaatggccaatgatatgtcggaaaagcaagctaaattacttgcatctgttcaacagcctatctctgctaaagcattcacgcaaaaaatttctgaagctgcgtggcgtgtaaaacctacgtggtatctcatgacaactcacgataatgcattgagtccgcgaacacaggaattgatttctaaacagactcactcaagtgtaatccgagttaactctagtcatttatctctgatttctcatccagatcaagtttccaaacttattgataaagcagctaaaagctttaaataa

SEQ ID NO: 49073 - DNA, 891 bp, Acinetobacter baumannii
atgaaaatcttaatctatgtgcctcagttttgtatttattcagtcatagctggaattaatgatattttctggattgctaacaatattataaaaagcaaaaacttattgaattttaaaaacttaagtgagattaatgagtttaaagttgacctcgtaagtattgatggtaagcctgtcgtaaatgcacaaaacaaaatgatagatgtagatctttcgatagaagaagcaataagtagtgatttaattatcgtgccaggaatgatgctgagcgatgagcaaactcctattatgccttcagaatataaagcagtattaaagtggcttcaaaacgaaaatatcaaaaaaacaattatatgtggtgtttgtgctggaaccttcgtacttggagatgcaggcttattaaataggaagaactatgccactacatggtggttgtatcatacctttcaaaaaagatttccccatgggaaattaagttggggcaaaacctttgaaaaagataaaaatattattacaactggtggtccgctatcttggattgaactcgtactttatattattaatcaatttgcaggaccggaagtcgctaaagcaacctcagatttagcagttgcaggagcacagcccgtatctcagcaaatatacgtgcctgaaggttttacgagttcagttgatcctttgctcatgaaaattgaagagtttgttaaatatactaatccgaatatttcacttgaagaactagcagaaaaattaaatataagcgaaagaacgctttacagaaacgcacaaaattgtggctacagtgaagacactgcctttaggaaagcttttacaaagatcttaaatatgaacccattagaatatagaaaatatattaaaaatagagtttaa

SEQ ID NO: 49074 - DNA, 873 bp, Acinetobacter baumannii
atggtgattcttatgaataatgttcaggaaagaacaaatgtaactgctcaaggaagaagcgagctcatcaatcatattcaacaaaatttaattacattaatttcatcttgtcgttctgtcgcagatatgtgtcggaaaattgatgtaaacaggcagcaatttaacaaatatctagctggtcaacatattccttctcaaaaagttcttcaaaaaattgcccgctattttatgattgaagctaaagatcttttaataaatcctaaagactttaaatgcttatatgagggattagaaaatgaaataccaacaacccttcgatactcaaaccagttcaatgattttttacaccttgctagagcaacaccagaactcatggaggaatatttaggggtttattacagatatcattattcatctatttataaaggtaaaattcttcgttctttaacttatttatatcgcaaagatgcactagttcaatatgtaactattgaacacttccctcacttagataaccctaaaaaaaatgctttcaaatttcgatatgatggcttctgctttatgcttggagatagagtctttatgattgatatggaagaaaagcaatataatgaaatgactttttctatattaactacacagcatagacgtcctattaggtttctttacggtattctgtcaggtattgcttctacatcttttaggcaaccttttgccaccaaaatggcattccaattaatcgacacagggcctcttaaaaagcatcatcttcaagctactactgttctagagataaatgattcatcaattccatttgaaattaaagaataccttctagcagatacctcaaaaacgatatggggtggagcttaa

SEQ ID NO: 49075 - DNA, 1209 bp, Acinetobacter baumannii
atggaattttataaacgtatagcactatttaatacatttttactaccactcactgtcatacatgcatttgaatttaatggatatataagatcgggtattggatatagtgaaaaaggggacacacaaagctgtttttttctggacggtgcaaaaagcaaataccgtttgggtaacgagtgtgaacagtatgtagagttaactggcactcaggaattatataaatttaaagataattctacagtggccctaaagggtacattggcgttattacaagattttggtgatgataaagatttttctggaaataattatgccaaatgggctgaagcctatctcatgtggaataatatcagctacttaaatggtgcaaatgtttgggcaggtcgtcgtttctataaccgtaatgatattcatatttcagacttttattactggaatcagagtgcgacaggatttggtatagataattttaaatataacgacttgtactattcatatgttttctctcgtaaggatgatgtatttcaggataaaccagtaaaccgccatgatattactgtaagtggatttaataccaacccaaatggaacactaagtgtaggggtaagctatatctcaaaaatagatgaaccagatagccattcaggtacttcatttagcgttcagcataaacaaaaactaggtaaactcaacaataccttggcctttcaatatggttatggtccaggaactggcttaagttataccggtgatacaagcttatcgagtaaggataaaagctggcgtgtagtcgaatttattgatgggcaaattactgaaaactttagtgctcaagcggagttgatttaccagaaagatgaacgtgaagaagcttcaaatgaacaagagtggtattcagttggtgtacgaccggtatatgccttgaatgatcaatttaagttagtaggagagttgggttttgatgcagttaaacgtgataagaccgcgactttaactaagttaacctttgcaccaacatggtcaccaaaaggaaaaggattttgggatagaccagaattccgtttgtattacacctatgcgatttggaacaaggaagcccaagagcgagctgatctgaacaatgcaggttctacattatcgtcaacgggtaatttcgggacatcacgtaatggtagcaatttcggattgcaagtagagtattggtggtaa

SEQ ID NO: 49076 - DNA, 339 bp, Acinetobacter baumannii
atgggctgtgttgcaattatgcctttaggtagtttgattggttcaggtctaggtattttaaacccgcataccatttcaattattaaagaaaatgccaaaataccggttttagttgatgctggcgttggtacagcaagtgatgccgcaattgcgatggaacttggttgtgatggcgtactgatgaatacagcaattgcagctgctcaaaatcctattttgatggcttctgcaatgaaaaaagctgtggaagcaggacgtgaagcatttttagcgggtcgtatgccacgtaaacgcatggcaaatgcgagttcacctgagacgggttatttctttaaataa

SEQ ID NO: 49077 - DNA, 810 bp, Acinetobacter baumannii
atggatatgagttcttgcactaaagcaggcgagcagctagctcgattctactgtgaacaacctttttttaagaaaaggatacatagttatcaacgatgtgatgctttttcacatatcatctccgaattttatcggctagatatatctaatattgaataccctgttttagccgttccagatggatgtattgatattttatttgagtgtagcccacaacaaccgcaggcccgtatttgtggttctactcttaattctcaggtagtgccacttaaagaaaacaccccttattttggtatccgttttttaccgggcattatccccaactttattgaggtatctagtgaagaaattttaaatcaatgccttaattttaacgaacttgtatcaaataaaaactggcttattgaaaaaatttcttctgaaggatctattgatcaacaaattaatctatttttaaatactttttctgaaaggctcagtagaaagttctctacaacaacccaagaagttcttcattttattattacccagaataatgaaataaagattaaagaccttgaaagattgactggttattgtagccgccatattcaaagaatgtttaaacatgatgttggaatgagtataaaaacctttgcttgtatcatccgttttcaatcggcaatacaagctatgaatacatcaaaaagtttaaaactatctgatttaacttatgatttaggctataacgatcaagctcattttcataaagagtttaaaaaatttagtcaaatgtctccatctgattttataaaatattttaagaattag

SEQ ID NO: 49078 - DNA, 1302 bp, Acinetobacter baumannii
atgcatacagatgaaacagcgacttactatacagcgactaaaaagtactttttgaattttccacagcttgaacaggatattgatgcagatgttgtcattattggtggtggtttttccggtattcatacggcattggagttagctgaacagggggtaaagaatattgtcgtattagaaggccgttatttaggatttggtggttcaggtcgtaatggtggacaggttatggctggtataggccatgacctcgataatattaaacatgaagtaggtgaagaagggctgaaaacaatatttgaacttagtgagcttggcccacaaattatgcgtgagcgtattcaaaaatataatattgatgctgattttaccaatggctatacatatttaggttttaactctcgtcaagctaagacattaaaaagctgggaaaagcaatttaagaccatgaataaccgggacgagatttattatcttgaaggaaaagatgtccaacgggttattggttctgaagtttatggcagtgcgcttgtccatatggggggaggccatgttcattcattaaatttacttttgggcgaagctaaagcatgtagtgaaatttatggggtaaaaatctttgaacatacaccagcagttgaagtgacgtatggaaaaaaaattacagtgagaacagcaaaaggctgtgtaaaggctaataaaatggtttgggcctgcgatagttttttaaacaagttagaaccggaattacataaaacaacaattaatacatatgcatttcagctaatgactgagcctttaagtgatgaattaataaataggataagtccgattcgtggggcatatagcgatattcgcccagtaattgattattaccgtgtaactaaagaaaacaggttgttgtttggtgctgcaacaccgctagtagattatattcctcaagacttaaaagagtggaaccgccaattaatgcttaaggtattcccttatctggagcatgtaaaaatcgatcttgcttggggtgggccaatggcatcaactaaaaatttatttccacaaattggtactttaaaagaccacgataatgtcttttttgttcaaggttactgtggttttggtgtcaccccaagtcagattatttgcaaaattcttgctcaagggatattagggggaagtgagcactttaagttactgagttcagtctctaaaccagaaataccttttaaagactcaatgagagcaacaatgtgcacgttaggtaaggtattgcaccaaattaaaggctatgggcagggacgccgttag

SEQ ID NO: 49079 - DNA, 858 bp, Acinetobacter baumannii
atgagaattctctctgacatgtcaaagtcagtaaaggcagtattttttgttgtaatcggtgttttatgtttagcctttcatgaccttttaggtaaaaagttgaaccaaaattattcaatcattttaattttatggtttaggtatctttttcattttttatttgcaacttttcatagtatcaaaattaaaaaactttctaggtttaagcgcattcactttttaagagccttgttaatgtctttgattggcttaagctttattactggattaaagtacatcccattatctgaagctacagcaatcaattttttagcgccaatcttcgttttgattttctctttttttattctaaaagagaaggttattcaggatgatttaataaagattatgattggttttttcggaatacttatcattgctagacctgggggagatatttttaaaatagaaattatcttcccaatgtgtgctgctctattttttgctttttatcaagtgcttacaaaaataactagtatgtatgaaagcagccttatatctaactattatcttggattctatgcattttttttaacctccttggtactacctttcttttgggaaaaaatcgctcctaatgacctcatattttttcttttagtaggtgtatttggtacgttcgcacataccttatttaataaagcatacgttcttgaatcacctgtaaaattagcaccttacagctatatgcaaattctttttgcaacacttttaggatttatattttttggaacaattccagacttaacaacttttttaggtattttcatcatcttctgctcaggtctaaatattcgcttgcacaaaaaggaacaataa

SEQ ID NO: 49080 - DNA, 327 bp, Acinetobacter baumannii
atggtaaaacctgaagttcgagaaaaaatcttagaaattgctgcgattgtcagttattatggtagcaaggtaagagagtacctcaagcaaatagaattaattaactgccctactctttttcatgtagcggataatgatcatctgattacacttcatgaaattcaagaacttgagctgcttagccttaaaaataataaatttaagatatatcgctatccacttgctggtcatggattcaactgcccttaccgtccaaatttctctgctgcacaggcacgtctagcatttgaacgtagtagtaacttctttatccaacatttaagttag

SEQ ID NO: 49081 - DNA, 903 bp, Acinetobacter baumannii
atgctcacagatcttgatgatttttattgttttgcccttgttgttgagcatggtggatttagtgccgccgaacgtgttacggatattccaaaatcaaaattaagtcgtcgtgtttataacttagaggaaaatttaggggttcgcttaattcagcgcagttctcgtcattttgcagttaccgatattggtatggatatttatagacacgcccaagtcatgatgaatgccgcacaagcagctcatgatttggttgatcacttaagtattcaaccaagaggtgtagtcaaagtaagcgttcctgtagatatagcacaaaaccagctacccaaaattttgccagcatttttaaaaaaatatcctgaaattcgattacaacttattgtaagtaatcgacgcgttgatgtgattaatgaaggaattgatattgctctacgggtcagatctaaactagatgatgaccctagtctagtactaagacagtttgcgctaatagaacaaagtctctttgcaagccaagcttatttaaatgagtttggtaatattaagtcacctgatgagttaagtgatcatcgtattttaagcttgtctgaagagcatttagatcaacaatttatattgcatggtccagacaaccaactgaagaaagtgaaagttagcccaactatcatgggaacaaatatttatatgcttgcccaacttgcaagtcaaaattgtggtattgccttattacctgacacagcagccgaggattttgtaaaatcaggtcagcttgtgcaaatcttgccagattggaaagcagcccacggtatattccatgctgtttatccgtcacgaagaggtttactgccagctgtacgtgtatttattgattatttagtggaacatctttcagaacatccataa

SEQ ID NO: 49082 - DNA, 795 bp, Acinetobacter baumannii
atgagagcttctactgttacaattaaaactgaacaagatctagaaaaattaagagtttctgggcgtttggctgcacaagttttagaaatgataggggagtatgtcaagccaggtgtaacaactgaatatttagacaatatttgtaatgattacatcgtaaatactttaaaagttataccggctaatgtgggttatcatggattcacaaaaacaatatgtacttcagtcaatgaagtggtatgtcacggtatcccttctcaaaataaaattttaaaagatggcgatattattaatattgatgtagcaattattaaagatggctattttggtgatacgagccgtatgtactatgtcggtaacgtaaatccacatgctaaaaaattagttgaaactacttatgaagcaatggtcgctggtatacatgtagttaaaccaggggcgactttaggggatattggttacgctattcaatcggtcgctcatcgcgaaggatatagcattgttcgtgaatattgcgggcatggcattggtaaagtttatcatgaacaacctaatattctgcattatggacaacgcggccaaggtcttgttttgaaaaaagggatggtctttacaattgaacctatgattaatgcaggcaaacctcaggtaaaagagttaaatgacggctggaccgtaattactcaagatcattcgttatctgctcaatgggaacatatggttgctgttacagatacagggtttgaattattaacgccgtggcccgaaggtgtgggaaattatccagaaatttaa

SEQ ID NO: 49083 - DNA, 864 bp, Acinetobacter baumannii
atgagttatctatttttgtcgtgtacagagattattatagaagcccccatgaataaatcgctcatcattttcggcatcgtcaacataacctcggacagtttctccgatggaggccggtatctggcgccagacgcagccattgcgcaggcgcgtaagctgatggccgagggggcagatgtgatcgacctcggtccggcatccagcaatcccgacgccgcgcctgtttcgtccgacacagaaatcgcgcgtatcgcgccggtgctggacgcgctcaaggcagatggcattcccgtctcgctcgacagttatcaacccgcgacgcaagcctatgccttgtcgcgtggtgtggcctatctcaatgatattcgcggttttccagacgctgcgttctatccgcaattggcgaaatcatctgccaaactcgtcgttatgcattcggtgcaagacgggcaggcagatcggcgcgaggcacccgctggcgacatcatggatcacattgcggcgttctttgacgcgcgcatcgcggcgctgacgggtgccggtatcaaacgcaaccgccttgtccttgatcccggcatggggttttttctgggggctgctcccgaaacctcgctctcggtgctggcgcggttcgatgaattgcggctgcgcttcgatttgccggtgcttctgtctgtttcgcgcaaatcctttctgcgcgcgctcacaggccgtggtccgggggatgtcggggccgcgacactcgctgcagagcttgccgccgccgcaggtggagctgacttcatccgcacacacgagccgcgccccttgcgcgacgggctggcggtattggcggcgctgaaagaaaccgcaagaattcgttaa

SEQ ID NO: 49084 - DNA, 303 bp, Acinetobacter baumannii; identical to SEQ ID NO: 24284

SEQ ID NO: 49085 - DNA, 720 bp, Acinetobacter baumannii
atgacacccctgctggggcactcgatcacttaccgtatcgctgtcggttcacaggcggggcgaaaggtgttcactttgcaaactctgccgaccagtggtgatccgttcggtgacgggattggcaaggtagccgggtccagcctgcacgccggcgtggcggccagggccgatgaacgcaagaagctcgaacggctgtgccggtacatcagccgcccggcggtatccgagaagcggctgtcgttaacacgaggcggcaacgtgcgctaccagctcaagacgccgtaccgggacggcaccacgcacgtcattttcgaaccattggatttcattgcaaggctggccgccctggtaccgaagcccagagtcaacctaacccgcttccacggggtgttcgcacccaacagtcggcaccgggcgttggtcacgccggcaaaacggggcaggggcaacaaggtcagggtggctgatgaaccggcaacaccagcacaacggcgagcgtcgatgacatgggcgcaacggctcaagcgtgttttcaatatcgacatcgagacctgcagcggctgcggcggcgccatgaaagtcatcgcctgcattgaagaccctatagtgatcaagcagatccttgatcacctgaagcacaaagccgaaaccagcgggaccagggcgttacccgaaagccgggcgccaccggctgagctgctcctgggtctgtttgactga

SEQ ID NO: 49086 - DNA, 444 bp, Acinetobacter baumannii
atgaattaccgacatattattgtacctgtagatggttctgagatttctttggcagcagcacgacaagcggcccatatcgctaaagcttttggtagtaaacttacagcaattagtctggttgcagtggacccgtttagtagtgtcgatttctattacatctctcctgttgtaaaagattattttgttgaagcgcgtgctaatgcagaaaaaacacttgcgaaagtaaaagccctatgcgctgaagaaggtgttgatattgaaacacaaattattcaaggtgaaatctcatctgatggcattcttaaagctgtagaagagttgggttcagacctgattgttattggttcacatggtcgtaaaggtttccaaaaacttattttgggtagttttgcacaagatgttctaaacagcactaaaatccaagttttggtggtaaaagaataa

SEQ ID NO: 49087 - DNA, 372 bp, Acinetobacter baumannii
atggctttaacaagtatcggaaaactcaaccagcttgaacatttagatgcatggggacagattacagatctaggtggtgaagtattagatggttcaccaaatgtaaaggtcttcggaaaaatgtctttaggtgcccctacagatgcgattagctcaggttattttggtacagaaaaaggtaaataccgattggtatacccattcagtgagcaggctgtgattatttttggtgaggtagctattactgatgaatcaactggggtgactacaacatttaaagcaggtgatttttgggtagtcgaaaaaggaacttcaacggtatgggaagtcaaatcagacttctttatcaaacattattttgctgttgtctaa

SEQ ID NO: 49088 - DNA, 1410 bp, Acinetobacter baumannii
atgaatacgtctatgtatataaatggtcaaacagtactagggacaggtaaaacgattgatgttattaatccggcaacattggatgtaatagcaactgtctcatcaacgacaccagaacagctagatgattgtattgccaaagcaaagcaagcttttgcaacctggaaaaatgtagatgaccaaaaaatcgtacaggcatttcatgcaattgccgaagatattttgtctcaaaaaaatgagcttgctattcttattactcaagaacaaggcaaacccgtttttttggcgcagttagaggttgagcttacagcgcagtggatcaattatattgtaagtttaacgattcccgtcgagcattatcaggagacgaatggcaaaaagattacggtttataatcgaccacttggggttattgcatctattacaccgtggaactggccatttatgatcgctgcctggcatctatttcctgcgctaaaaactaaaaattgtgtgattaataagccatcagaatttacgccgttgagtactattaagctggtcgagattatcaataaacatttacctgccggtgtatgtagtctggtattgggtgatgggcaaatcggtagtgcgcttacggcacatccggttgttgaaaaagtgacttttacaggctcaacaagtacggggcaacgtatactacaaaattcaatcaacacattaaaaagtgttgtacttgaattaggcggaaatgatgttgggattgttttggatgatgtagatgttgaaactacatgccagaagctatttatgtccgcttttttaaatgctggccagacttgtgcatgtctgaagagactatatgtgcatgacaatatctatgatcaggtagtccagaaacttaccgagattattaatgctcaggtattaggggatggtttggcagcttcgacaacttttggcccagtacaaaataaaatgcagttcgacaaagtgcagcgtttgattgaagatgcaattgaacaaggtgcgacagtaatccgtgctcatcaatcacttcctgaaaaaggttattttattgccccgactcttgttgtagatgtaaatgaagaaacagcaattgtagaacaagaacaattcggtcctgttttacctattttacgctttagtgatattgataaagtcgttgaatctacaaatcaaagtgaatttggcctaggtggttcggtctggactaaagacttgcaaaaagcgcaggaaattgccgaaaaaatggaaacagggacggtctggattaatagccatgcagatctttccccggaagcagcttttgggggctggaagctttctggtttagggtattcttttggtatgggggggctgctgcaatatacccataagcaatcagttcatataacagaagcctga

SEQ ID NO: 49089 - DNA, 747 bp, Acinetobacter baumannii
atgatagaaaagggtaatgaaaaaaatccgctttttacaaaatgtcaaataggttcaggtacaaatgtaccagaatgcaaatatggtaatggcaatatcaaactaattgttattggagatagtcatactgaagcgatgatccctgctattcaaaaagccctaccacgagagtcagctctaatagactggacttattcaggctgcccaacggtagaaaatataaagaaaattaataaccctgattttaaatgtggagaggttatttcaaagtttacaaagaaaatcaaaaaatatcctcatactcctattttaattattaatcgaataaatgttttatttcatggagcaaaagatggtgatagtgatatagtccaccctataagatatatagataagccatttaaagcatataatgctgagtatgaaaaaacaatgaaagaggcctatataaatacactatgtaaattttcagaaaataatgaagtgtatgttacgaggccaatacctgaatttcccgtgaacgtacctaaaatattagtacatagagaaattatgagatcttctacccctctaacaattactagagaagcacatattaaacgtagtcgactggcatgggaagcgcaagatgaagccgcaaaaaaatgtggtataaagatattagacacaacgaatttttttgcgatcaaaaaatttgttattctgggaataaagggattccattatattttgatgatgatcatttaa

SEQ ID NO: 49090 - DNA, 204 bp, Acinetobacter baumannii
ttgcagaaatttgatcaggctgtcggtttaacaggtattaccattactaagttggatggtacagcaaaaggtggagtattatttaatattgctagtcgtactcatgtgccaattcgtttcattggtgtgggtgaaaaaattgatgatttaagaccattctcggcgaaatcgtttgttgcagcactatttgaaactgaaaaataa

SEQ ID NO: 49091 - DNA, 1206 bp, Acinetobacter baumannii
ttgggcgagtcagctgatttacaccacgctgtccattttgctaaagcaaatcatgttcaaatacaccaaggttttaagatcaacgggacatttgattgtcatattgatgcattgtttgggattggtttaaaccgtgaattaaacggttattggcaacacgctattcaacaatttaatgggcaagcagggctaaaaatttcgattgatataccaagtggtttaaaagcaaatactggctctaccttatcttttgcaatacgggctgatcatacatttactgttttagggcttaaagcaggattatttacaggccaaggcaaagaatatgcaggacaaattcatttaattaatttaataccaatagaccaagagctgaaacctcttgcttacttgacgccaacacatatcaaacttcctaaacgtttggcttttggacataaaggaagttatgggcatgttttggtgataggtggacatgagcaaatgggtggggctgttattatggctgctgaagctgcttttcatgcgggtgcaggcaaagtgacagtggtttgtcatagcaaccaccatcaggctattttgtcgcgagctcctaatattatgcttcgtgatattaatgatttcgatgaaaacggtattaaagaaattttatctcaggttgatgcagtatgttttggaatggggttaggtcgtgatgactgggcacaccaaatctatcaacagtggtttaattatttaaatcagacttcacatttagaagttgttttagatgcagatgccctatggtttctcgcaaagcagcctgaaaaattgagtttacatatttttgcaacacctcatccgggggaggccgctacactacttggttgttctacttggcaaattgaaaatgacagaattgctgcgatttatgcgttgcagcaaaaatatgcaggccagtgggtgcttaaaggagcaggcagcttaattttagaagataacttgtatatttgtacgcaaggtaatgcaggtatgggaactggtggaatgggagatgtgttggcgggcatgattgcaagcttaaaagcccaattccacaaagcagttaccctacatgagatcgtaactctccatgctcaggcaggtgaccaacttgccaaacaaggcatgcgcggtttacaagcttatgagatgaatcaagcaattactcaagtagtaaatcaataa

SEQ ID NO: 49092 - DNA, 693 bp, Acinetobacter baumannii
atggaaaagaagcaaattcacccaacaatggaacgcgtctaccaagtcacaaaaatcactggggccgatttggcttacgccttagatgagactcctcaaattgtttacaattgggagcgccgaggtatttcaaaaactggtgcttttaaagtatccaataaatttaatattgatgtcggctggattcttactggaaagggttcaccatccattgatagtgttagaaataaaaaaatcaccacagatactaaacgaggtggttgggttcctgtgaagtcatactcgaagatgggaatggatggttattacactgaaatgggatatttaggtaatggcggagacggctatgtaccctctcttacggcagggccaaatgcttacgctgtaagaggtacaggtgattcaatgtatcctgctattcgtaatggttggtatgtggtttgtgatccagatgcagagccaacacctacagaatttgtagaggttcaactgaaagatggtagacgaaccattaaagaatttattggaatcgttaataatgtacttcatcttttagctgtaaatggcgaggcaaggatgactattgatatggaggatgtgtctgcaattgttgcggtatctgatatcatcccgccaagtaagcatgtgcatgagtatccagttcaacccatgcagaatatatatttagattaa

SEQ ID NO: 49093 - DNA, 186 bp, Acinetobacter baumannii
atgagtagtgtccaaaaagatgctgagcttatcgacaagcacggaggtgctactgcactggctcaaaccttgggctacaacgttcagcgtgttcaaaactggaaaattagaggcattcccgctaaggaaagacttaaacaccctgaattactcttagtcgattttattccaacaccaaagaaataa

SEQ ID NO: 49094 - DNA, 297 bp, Acinetobacter baumannii
atgaatgaacaaatcttagcacaaaattcagactgtgcaagcccatatgatgatgaggatcaagtccttactcaatggcaagtagatcatgacgcatatgcagactcaatagctgagtacaaggaatctcgcaaagaacttgaaaaggctttgggtgttcaaaaagatttcaacaaaacttcccatccaattggggaggttatagcggacctgcaaaaacatgctcacctatatgcacttttgaatcgatttgagagcgctgtaatcaaccgtctaagagcaaaggataagttgtaa

SEQ ID NO: 49095 - DNA, 1104 bp, Acinetobacter baumannii
atgcgtagttttcgcgagcagggaatcgatgctgaatttgagggaatcggtggccctcaaatgattgcggaaggttttaacagttattacccaatggaaactctgtctgtgatgggcattgttgaggtattaaaagacttaaaaaaactattcgccgtacgtgatggcttaattaatcaatggactcagcatccagttgatatttttattggtattgatgcaccagactttaacctcagactttcgaaaagtatcaaagaaaagaatcttccaataaaaacagttcaatatgtgagtccatcagtttgggcatggcgccaagggcgagtacatggcatcaaacaaagtatagatttagtactttgcttatttccttttgaaaaagttttttatgaacaatatgaagttccagcggcatttgtaggccatccattagctaaacagttaccgcttgagaaccctattcaaattgctaaacaagaattgggtgttgatgaaaatcaaaaacatattgctttgttgcctggtagccgcaaaggtgaagtagaaagacttcttcctatgctattgggggcagccaatattttgcatacaaaatatccagatattcagtttttaattccggcaattaatgatgcgcgcaaacagcagattgagcagggggttgaacaattagcaccgcagttaaaagcaaaaattcatattttagaaaatacggatagcgaatcgaaaattggtcgtatggtcatgaacgcgagtgacattattgccttagcgtctggaacggcgacattagaagccatgctcatgcatagaccaatggtcactttctataaactgcattggttaacttatttaattgctaaattcttggtgaaaataccttattactctttgccaaatatcatcgcgggtaaaaaagtaattgaagagctgattcaggcagatgcaacacctgaaaatttagcggctgaaatagaaaaactaatgaatgttgaaactgctcaaattcaagtaatgcaacatttaactatgcataaacagcttatttctggaaatacagaagatccggttcaagccattttgcaatgtttgaatagctaa

SEQ ID NO: 49096 - DNA, 648 bp, Acinetobacter baumannii
atgtccagatctagacgaagtgatggtgacttaacaaagactaaaattattgaggcagcaggacccttaatcgcccaatatggttttgcaaaaacagcaaacaaaacaattgccaaagtagcaaatgtcgatttagcggcaattaattatcactttgatggtcgagatgggctatatcaagcagtgttaatggaagctcatgcccattatctagatgaacaatacttactagaacttgttgaaagtacttaccctcccgaagaaaaattgagtttattacttgaaactttattacataagttgacggaaaaagatgtttggcatggcaaagtttttattcgcgaactgttttcaccttctgagcatttattaaattttattgaattaactggtatgagaaaattttttcttattcgaaagttgattagtcaagtggcgaacttagatgaaaatgatccggccgttttaccttgtattttaagcgtgatgaccccttgcatgatgcttattattgccgggcctaatgctcaagcacctgagccacttaaaaatattgctcagatgcccttacatgatttagttgaacactttaaaaaattttcattagctggattaaaagcaattagccaatcaaatcttaaaaattag

SEQ ID NO: 49097 - DNA, 408 bp, Acinetobacter baumannii
atgcttgaagaatctgagcataaagatattgcttatgacgtctatcaggttttaaacggtaattatccgttacgggcaacgggctttttaatggctttcattactattttagggcttattccaacagcaactttatttgtacctctactgcgtaagccaaaagaactgttgaccagaaaattctggaaagatgcacgtcgtggcgtcaacttaatttttagtccaaaagatggcgtatttggtagcaccattggtcagatttttgattacttacgtccagacttccatccaaatgatcatgacacgaccgaatatttagagtactacaaagacaaattactcaaagaaggtggcgcgattgcaccttactttgtgaaggaatttaccccacctgtacgcttgtcataa

SEQ ID NO: 49098 - DNA, 1623 bp, Acinetobacter baumannii
gtgcacttggctgacggttattaccgtgttgctggtaaaccaatggctgcgtttacctcaatcggtgctggggcaagtaatacagttattggtatggcaacagcatttactgactcaaccagtgtcatgctaattacgggtggaccaccaacacacatgcgtggccatggccttcttcaggagctagaacgttatacagataatgatttccctaaaatcgctgaagccgtatctaaacgtcactgggttgtcacccgtgttgaagaattaccttttgccatgcatcgtgcatggagtgcgatgactaccggacgtcctggcccggttcatattgaaattccaatggacgttcaggctgaagctgctgaagttgcgcttcatccactgagtgagcgtttacctgtcggcaaagtttatccggatccggaagctgttgcagctgcagcagatgtattacgtgatgccaaacgtcctgttatggttattggtggcggtgtaattactggtgaagcatggaatgaagttcttgcactggctgaacatctgcaaatccctgttgtaacaacctggaatggtaaaagtggtttccctgaagatcataaactctttgcaggtagtgtaggtcaaacaggtaccctatgcggtaataaaatcgcatcaactgctgatgtcatcattgctgttggttgccgtttcactgactggtcatcatcaagctatgccaaaggcgtcacctttgctattccaccatctaagctgattcatattgatattgatccgcatgagattggcaagaactatccggtgacagtcggaattgtatcggatgcccgttatgccttggctcatattcttgagaatatgaaagaagatacggtagaacgtagtgaatacatgcaggctttgaaagaagcacaagatgaatgggaatccaagttagcaacccgtcgtgattcgaaccgtttcccatttacttcgcaacgcccacttggtgcattacgtaagatcttcccacgcaacacgattgtagttgttggttctggtaacactcaaggtgcagttaaacagactttccctgtttatgaaccgcgtacccatttaacttctggtggcttctcatcaatgggttgggcagttccagcagcaattggtgcaaaactggcagcgccggatcaacctgtagtctgcattttaggtgacggtgatttcttaatgacctcacaagagattgcaatctgtaaaaccaataatattccagtggtgttcattattcagaacaatgcaggttatatgtcgatccggggtggtcagcgtaagttgatgagtcgccatgtaggtacagagtttaatactcctgacggagaaccatactcacctgactataagcttatgggtgaatcctttggtttacgttcgtggcgtgtagagagtgctgaagagttagagccagttttacaggcagctttagatagtaatgaaccggtattaattgaaatcccgacagaccgtgatgcagcaggtccatgggtgccgggatggtgggatttcccgattccggaatacatcactgacgagcgtcaggatgaataccatgagttccgtcaatctgaacagcatttgtaa

SEQ ID NO: 49099 - DNA, 732 bp, Acinetobacter baumannii
atgagttattttgatcccaccctcatcatgtttatggtgtacatcgtagcaatggtacttatcggcttatttgcctaccgtgctacaagcgacttctctgattatattcttggtggtcgtagtttaggcagtttcgttactgcattatccgcaggcgcatcggacatgagtggttggttactcatgggcttaccaggagcgatttatctttctggtttatctgaagcgtggattgcaattggtctaattatcggtgcttggcttaactggttactggttgctggtcgattacgcgttcatactgaaatccaaaataatgcacttactctgccagactattttacaagtcgatttgatgaccagaaaaagatacttcgtattttctctgccgttattattttggttttcttcgctatttactgtgcttcaggcatggtagctggtgcccgtttatttgaaaatttgttcggtatgtcatataccaccgccatctggttaagtgctattgcaacaatcagttatgtttgtattggtggtttcttagcaattagctggactgatactttccaagcaggcttaatgatttttgccctcttgctcaccccaatcgtgacttacctcgcaattggtgacacaactcagtttgtgacgcttattgaaactgctcgtccacatgcatttaacatcatttctgatttaagtgtggtggccgttttatcttccatggattga

SEQ ID NO: 49100 - DNA, 717 bp, Acinetobacter baumannii
atggctgctgactctgtaaaatcaattcctgctgctcgccgtattggtatgacctggatgattttatgtctagtcggtgctgtcggtgccggtttctttggtattgcttacttccagcaacaccctgaacttgcaggtgtggtaagcaaaaaccctgaaactgtatttatggaattgaccaaaattttattcaatccatggattgtcggtatcattctagctgctattttagctgcggttatgagtacattaagctgtcagcttttggtatgttcaagtgcactaactgaagatttgtacaaaggcttcattcgtaaaaatgcatctcaaaaagagcttgtatgggttgggcgtatcatggttcttgcaattgccgttctagcaattgtgcttgcgggtaaccctgacagtaaagttcttggccttgttgcttatgcttgggctggttttggtgctgcatttggaccactcatcatcttgtcattgttctggaaacgtatgactttagaaggtgctttagcaggtatgatcgtaggtgctgttgttgtaatcggttggaaaaaccttttcgcaagcactggtgtttacgaaattattccaggctttatctgtgcatttatcagcatcatcgtagtaagcttgatcagcaaagcgccaaactctgatgtgactggtcgctttgagcaagcagataaactctataaagaaagtacataa

SEQ ID NO: 49101 - DNA, 831 bp, Acinetobacter baumannii
atgattaaaaattttaaagaacaaattacattaaatgatggtatgaatatccctaaattaggattaggcgtctggcaggcaacaaatcaagaagcaagttttgccgtacgtgaagctttacaacatggatatggtttaatcgatacagcatcaatttatggaaatgaagaaggagtaggtatcggtattagagatagtggaatagatcgagataatatttttattacaactaaagtctggaatgactctcatggagaaaaggctactacaatggctctggagaaaagtctggatcttttaaagctcaactatattgatttatatttaattcattggccagtggctcaaagagaaaaatatcttgagacttggcaaacacttattaaattaaaagaaaaaggtctaattcgctcaataggagtggctaattttcataaggaacatttagagaaagtaataaaagaaactaatatttcaccagttctaaatcaaattgaacttcatccatatatgcaacagcataagatgaggagtttgaataaaagtttgaatattcaaacacaatcttggagtccattagctcaaaataaagcattaaataatgaaattattaaggatatttctataaaatataataaaacgcctgcgcagattatcatacgttggcatctccagaatgacttaattttaattccaaaaacgactaaattagctcgaattaaagaaaattttgatgttttcaattttgaattagaagatgaagatctcaataaaatagctttacttgatagagaagagcgtttaggcccagaccctgatacttttgaataa

SEQ ID NO: 49102 - DNA, 471 bp, Acinetobacter baumannii
ttgttaactaaaagatctgaatttatatctcatcatcctggagagatagctttaccaggtggatgccgtgaaaaaaatgatagttcgaatcgtaaaatagctttacgagaagtacatgaagaattaggtttaaccgaaaaagatattacatttattggtgagttacctctacaaaactctttaggtgggctaaaagttactcccttagttgctattattccaccggatttaaaaattataaagaatattaaagaggtttctgaagttttttatatacctttaaattatttcttaattaacgatgttaagccatacaaagggaaatacccagagggagaagtagaagtttcatgtattgaatataataaagaaataatttggggcttaactgcaagaataattctttcgttatttgaagttacggttgggtataaaaaagattggacgttttattctcaagaaattgcttaa

SEQ ID NO: 49103 - DNA, 756 bp, Acinetobacter baumannii
atgaagcttacagcaaaacttaaaaaagcaatcatggcccatgcggatgaatgctatccacacgagtgctgcggtgtgatagttggtaaagaatatattcattgtcgcaatatttctaaaaactctgatcaattcgaaatccatccagaagatttagctatagcagaagaccagggcgagatattagcttatgtacattcccatccagatggtactacacgagcctcagaactagacttaattcaaattgagttacatcaaaagccgtgggtcatttgctcctatccagatctggattttcaagtttatgaaccttgtggttatcgcgcccccttagtggggcgtaattatattcatcattatcaggactgttatgcactagtccgtgacttttatgatcgtgagctaggtattaagttgccagactttgaaagaaaagatggctggtgggaggacaaagatcatccttctctttaccttgaaaattatgaaaaagcgggcttctatgaagttgatacaccgcagtatggcgatatgttggtttgtcgggttggacgtaccgagcatcctaatcatgcggtagtctggctaggagataatggagttttaaaatctgaacaaactgaaacttgtatcggatctactctaattttacatcatccatataaccgaaagtcagtacgtgaaatttatggccaacagtggaaagatcgaacggtaaaaatcttgaggcatagagatgttaaaaacaattaa

SEQ ID NO: 49104 - DNA, 213 bp, Acinetobacter baumannii
atggtgggggcgctaatcattcattttttaagctatgcggttcactttgtcattctaagattaagaaagattaaagagaaaaaagctcatttaattaaatttagctgcccttgtggtgggctttttgaaccaacaggtcaagtatatcttacttatccaactcaaaagcagcggaagtgtacaaaatgtggaaactgcaaggggtttttctaa

SEQ ID NO: 49105 - DNA, 585 bp, Acinetobacter baumannii
atgcgaaatattatctggcaaggtcaagtttttgagccaatggctttggaagtatctgggcttgaaatgcgttcagatggtaaagcttcagcaccaactttaagcatggccaacaatatcaacggcattcaaaatgctgtgtctgcttactgtttgcagtttaaagactttgctggcgcaaaacttaaagtcattaccacacttgctaaatacattgatgctgaaaatttcacttcaggtaacccaactgcatcgaatgaatcaaaagagcaaatctggtatatcgagcaaaagacatctgaaaatgcacaacaagtgactttcgagctgtccaatccaatcgattttgagggtttgaaaatcccagttcgccaaataacttcactttgtcattggtgcatggtcgggaagtaccggggcgaggaatgtggttacacaggtgtagcaatgttcactgataaaggtgagccaacagatgatccatctcaggacaaatgtgggggaaggttaagagattgtcgtttacaccatggtgaaaataagccattgccgttcggcggttttccagcttcaagtttattgtga

SEQ ID NO: 49106 - DNA, 630 bp, Acinetobacter baumannii
atggctatagctgaagaattacatgttaaaagtttaatccaaccatattctaattctattattcaggctattaaggaggcgtggtcattgtggctgcaaagtcctttttttggaaaatggagttcacgcggacgtgccacattcgtttgggaaactgtaattaatttactcaaagaaaaatttatgggacgtagtgacgtttttattatagataaaggtgttacggtactttttgtaattcaacagcaagttgtttttcgttttaaattggcagataggactggaagaagtaaaaacgttcaaacagattcggctaaaagctttcatgatcctgaactcaattataatttattagctgaagctgatatagctagtaatattccacgtattgaagttatctatactttaaataagtctgctactcaaatcgataatatcaaaatgattgctagagataaaaattccgttgcttggaatgtaagtttaattgatagccaaacatcattcgttgaatttgacgaaagcaaagatacaagtgactttgatactgttaaggataatcaaacaaaacgtcgtttcaaagggaaatccactggcggtggatttaaaaaagcagaaggtgaatcgtga

SEQ ID NO: 49107 - DNA, 141 bp, Acinetobacter baumannii
atggattatttagaactcagtgaggagttacaaaatttgcttgatgaattgattggaatggatgcaggcgaagagggagaattttcacttactaaagatgagattgtagagaaaataaattctattgaaaatgtgaggtaa

SEQ ID NO: 49108 - DNA, 288 bp, Acinetobacter baumannii
atgatagataattttgaaagtaattttcctctaatgtatcaattgcttggtgcatggtttagtgatttagattatgaagatatcacatatcaggaggtagtaaaaaattataaaaaggtagcaaagagtgaaaaaatagactcgttaaaattagagtttaaagaaattttgataaaaaaaatgattgattataaatatatatctcaactatcaaatatttattttgaaaataatgaagatactttgaaatggctcagtgaaatatataattatttaattgaagattaa

SEQ ID NO: 49109 - DNA, 276 bp, Acinetobacter baumannii
gtgaaaccttcggaaaatgaaacggttgctatagctttagattcattgggaaaaataccaattacaggaatacgtaatatacttgaagaaggagaaaatgtctcatggtttttctattgtggagaattttctgaagatgatgatttctttaaaccaatgcatatatctcatttagaaaactatcttcccgaagttattccttatttggcgttagaagagagatttagatttgtaatagataaacagggttacgaagatgtatggaaggaagagtag

SEQ ID NO: 49110 - DNA, 735 bp, Acinetobacter baumannii
atgattatgggagatatttgtacaagacgttgccctttctgcgatgtagcacatggtcgtccaatgcctttagatgaaaatgaacctaaacatctagctgagacggtcgctaacctaaacttaaaatatgtagtcattacctctgtagaccgtgatgatctacacgatggtggtgcagcacattttgtgaagtgtattgaagaaatcagaaaccgttgtccagatacgctgattgaaattttagttccggactttcgtggccgtttagaaacagcactctctacattaagcttatcaccaccagatgtgtttaatcataatattgagacagtgccgcgtttatataaagcgatgcgccccggttcggactatcagcattcgttaaatttattaaaacgttttaaaaaatactgtcctgatatcaaaactaaatgcggcctaatggtagggctaggagaaattgaagctgaggttattgctctactcaacgatttaaaagatcatgatgtagatttagtgactattggacaatatttacagccctctaaatcacatgcccctattcaccggtttgtgaatttacaagaatttgaaagatacactcagcatggccagcgtttaggctttaaaaatatctggagtgcgccaatggtccgttctagctattttgccgatcggcaatatttcggtgaatttgcaccaaagccattttcaagagaagatgttttgtcatag

SEQ ID NO: 49111 - DNA, 1092 bp, Acinetobacter baumannii
atgactaagcaagttattaatgttggttcagctgcaaatgacggatcaggaacaccagcccggacagcctttcagtatataaacgcaaactttactgaagtttatgacttcctaactggaaccactaatgcaactacactccccgcagctctaccaattgcaaagggtggtacaggcgcaactacggcagcgggtgcacgagctaacctaggtgcagcggcaagtggtgtaaatagtgatattagtgagcttaagggactcacaacccctttatcaatttctcagggaggattaggagctaataatgcacagacagctagaatgaatttgggattaggaactgctgccatactcacatcaacaacaagtcaatatgatcctacgccgggacgagcactaagagtcggtgattgggggatgggggctgaaggttctcgtgtatctgatatggttgctcctcttaataatggtttttttcgaacagatgacactttaacaaatgatactggtaatagtattggtccttatggtttctttttacactgtacccgacgctcaatgggtgtatatacagatggaagccattcatttcagcttgggaaagcagcgtcatattctgtactgaaatatcgatttaataatagtggtacttggtctaattggtttaatttattaactgcacaaaatactacaactgatggaaatggttttattaaagcagcatcacctattgtcaagttgtttaatgatcatattgaactcaatgacgaagctgaaaggcaaccaatcactttcgataagttgggtactggtgattacttagtgaaaggctcattaggttttgctcaggaaggttggtatatcgaagtccctaaagatgccaacggcaacacaatcgtcgcagtagtgtatgacaccctagaaaatggtgacatctcaattaaaacttacaagcgtaagtttgattttgaacttgctgctgttgtggcagatcacgagaacccaatggacattccagaaggccgctggattgatattcgtctgcatgaagagcttgttgtagaggagacactaccagatgacactgaatag

SEQ ID NO: 49112 - DNA, 498 bp, Acinetobacter baumannii
gtgcatttagttgaattacaagatgcttatcaacaaattcttcgtgatactttgcagattatccctttatccgcaaaccaaggtggtcaacttcatccagctttagaaatcgataatcaaattttacgttttagcaaagcaggcgtaacggatcctttaaaacaaggcttatcaccatttgaacgaattgaatatcgttatgatgcagaccaaaaaaaattatatcgtcttaaatatacaaatttgaatacttcgaacagagagcaacctttatcgagtactttgttaagtcaagtagaccaatatcagattatggttttgactccgcaagaagtcacaaaatggcccgaggttaatattgatccaacgaaacctaatgagttaaaaaaattaccgaaagggataaaaatccaacttacagtcgctggtgtaaattatgagtggacttatagcttaaatcagggtgacttatcgctttcgcaggaaggtaattcataa

SEQ ID NO: 49113 - DNA, 636 bp, Acinetobacter baumannii
ttggggcaaaagttcggtcgtgaatttaagctcgatgtcgcaaatacgcgtgaagccatgcgtgctttatcagttcaaatcgctggctttgagcattttatgttgcatgcacatgagcagggcctacgctttgccgtatttttaaaaagtaagaactcaagtaataagcgaggcaagaaacgcccagcaatttacgatcatgaaactaagcgcctaatcactggtgacaatatcggtgaagaacagcttgatatgaatactgaagctgaggttattcatattgttccacgtgtagttggtgcaggcggtaatggaatattacagactgtattgggtgctgttatggtcgtcgtaggcgttttgatgacggtaggcacattaggcggtggagcaccactcggtgctgcattgattggttcaggtattggaatgatgcttggtggtgtggctatgatgcttatgccgaaggttgatactactcaagaccaaaaccaagatggaaacagagcgaataaaggctttggcggtgcagttaccacagttgcacaaggtaatcctgttccaattctttatggtcaacgggaaatcggcggcttcattgtgagcgcaggtcaatatcctgaagatcagatgtaa

SEQ ID NO: 49114 - DNA, 756 bp, Acinetobacter baumannii
atgaaacttacagcaaaaaccaaaaaagcaatcatggcccatgccgatgaatgctatccgcatgaatgctgtggggtaattgttggaaaagaatatatccgctgccgcaatgtttcagctcaatctgatcagtttgaaatccatcctgaagatttagctatggctgaagatcaaggcgaaatcttagcttatgtgcattcccatccagatggaacaacaagagcatcggaattagatttaattcaaattgaactgcataaaaaaccatgggtgatttgctcatatccagatctggattttcaagtctacgaaccttgcggttatcgcgcccctttagtggggcgtaattattttcatggctggcaagattgctatgcacttatacgtgatttttatagccgtgagttaggtgtggagctgttggattttcagagaaaagatgcttggtgggaggataaatcccatccatcactttatcttgaaaactatgaaaaagcaggcttctatgaagtagatacaccacaatatggcgatatgcttgtttgtcgtgttggtcgcactgaacatccaaatcatgcggttgtttggctgggtaataatggtcagcttaaatctgaacagacagaacaatgcataggttcaagtttaattctgcatcatccgtataacagaaagtcagtacgcgaaatttatggtcaacagtggcgtgaacgtactgtaaaaatcttgaggcatagagatgttaaaaacaattaa

SEQ ID NO: 49115 - DNA, 585 bp, Acinetobacter baumannii
atgcgaaatattatttggcaaggtcaagtatttgagccaatggcgcttgaagtctctgggcttgaaatgcgttcggatggtaaagcttctgcaccgaccttatcaatggcaaacaacattaacggcattcaaaatgctgtctcagcctattgtttacagtttaaggacttcgcgggagccaagcttaaagtcattaccacgcttgctaaatatctggatgccgaaaactttacggcaggtaacccaactgcttcaaatgagtttaaagagcagctttggtatatcgagcaaaaaacatctgaaaacgcccagcaagtaacttttgagctttcaaacccaattgattttgaagggttgaaaattcctgtacgtcaaattacttcactttgtcattggtgcatgatgggaaattaccgtggtgaggaatgtggatataccggagcgtcaatgttcaccgataaagatgagcctaccaatgatccagctttagatcgatgtagtgggagtttgcgttcatgccgtttgcgttttggagaaaacaagccattaccttttggcgggttccctgcatcaagtttattgtga

SEQ ID NO: 49116 - DNA, 282 bp, Acinetobacter baumannii
atgggaccagccaacgaaaatttatttttccagccttcagttgcgatgagggcaatgccacccgatttatctggaaacatagtggctgcttctaagaagaaccaattttgcaaactgccaattaaagctgcgaaaacccatacaaaaattgcggtaaatgctcctaaatatccgagtgcaaaaccgaaagacgcaaaaattgctcctgagacactcattgatagagcaaaagcatctgtccactttaacgttttatctaacaacatctttaattccatttaa

SEQ ID NO: 49117 - DNA, 624 bp, Acinetobacter baumannii
ttggggcaaaagttcggtcgtgaatttaagctcgatgttgccaatacgcgcgaagctatgcgggctttatcagttcagattgtaggttttgagcaatatatgttgaccgctcataagcaaggcttggcatttgcaatctttctgcgaagtaaaaatgcaagtaaaaagcgcggtaagaagcgcccagctgtttatgaccatgaaacaaaacggttaatcactggtgacaatattggtgagcagcaactagacatgcatactgaagcagacactattcatatcgtcccgcgtgtaatgggggctggtggcaataatgggattttgcaacttgtacttggtgcgattctgatagctgcttcatttataccaggtattggtcaggctgctcaggttgcattgataggtgcaggtgctggcatggctatgggaggggttgcatcaatgctcatgccaaaaattgataatactcaagaccaaaaccaagacggcaaccgtgccaacaaaggctttggcggtgcagttaccacagttgcacaaggtaatcctgttccaattctttatggtcaacgggaaatcggcggcttcattgtgagcgcaggtcaatatcctgaagatcagatgtaa

SEQ ID NO: 49118 - DNA, 252 bp, Acinetobacter baumannii
atgaatgatgctcaacttattaaaaaattaggtggagtcaacgctgttgcaagacttcttggaataacagctgcatccgtatctggatggagttcaatacctgtcgatcgaaaaatcaggcttgctgtaatagctgaggatatgggggtatgtacacgaaaagagcttttcccagatacataccaagatatctggatcgaattaagacccgccaatagtgaattactcaatattgatttatcaaaaaattaa

SEQ ID NO: 49119 - DNA, 375 bp, Acinetobacter baumannii
atgatgcgtggtggtcaccttgatattgcggtgcttggggcatttcaggtggcagcgaatggtgacttagcgaactggcacacgggtgcgccggatgcgattcctgccgtaggtggtgcgatggatttagcggttggtgccaagaaagtatttatcactacagaccacttcaccaagcaaggtgaaccgaagattgtggctgagctaacttatccggtaacgggtaaacactgtgtggatcgtatttacactgacctgtgtgtgattgatgtgaccagagatggtttaaaggtgattgagaaagttaaaggtcttagctttgatgagttacaggctttaacaggtgcaactttgattgatgcgactcaagggtaa

SEQ ID NO: 49120 - DNA, 849 bp, Acinetobacter baumannii
atgaataaaaatttataccgttttataacactctcagggatattaatggctgcatgtaaaacacatgcagatattgaactttataaaactgatgatacacaaatttcagcgaatatcattgcaactatagggaccttttatagtaagaaaaattatattccaaatgctgaaaatgaaagctatagctggcaagaagggtatctgcaatatggtctaaatgcagaacaaaaaattggggaatttggttctgtatatggtaaagccaacttagtgagcgcaggtacttggggagatggtgatgcagcaggttttactgatggtagtgaacgggcaacaaaaattgaagatgcttttgttggctggaaatcaggcgatttaattccatggcttggacataatgggttagatatttcttttggtcggcaaaatatctgttttggagatggttttctgatatgtgcagatgcaccgaatgtcggccattcaccccttttaggtgaagctttcaaccgtaaaggtggtggaacctattacttggcagggcatcgaaattttaaagataccgtcgtggttaaacttggaaatcaagagggcttacacggtagcctctctacttttaaatcaaataatgcaattcaagcctattcaaagttttatgcggctaccttagattacactgatactaaaaaaggaactctaggctttacttatttacataatgagtctattgatcaggcttttgcaaaacaggtttcatcaattttatctgaccgagaaggaatgaatgtatatagcttacgtggtctaggtagcttaggtatagaaaatctctgtacacgacaaaaatag

SEQ ID NO: 49121 - DNA, 198 bp, Acinetobacter baumannii
atgagcgtaacaatgagtgcagcgataaatctaaaaatattagatttcaatttatctgttaaccatgtccttgtagattcacctggtagtaatatcttatccaagacaaaacaacaatttctttcatatatttctttagagttggtaatagtaataagaattaattttcaaaagagtattttaatagctgatttataa

SEQ ID NO: 49122 - DNA, 573 bp, Acinetobacter baumannii
atgctggtgcagcaaggcagattggcaatacgtgcattacagaaaagcgatgcgccggtgatgctgcgctggctgcaggatgagcgggtgctggaattttacgaagggcgtgacaaacacttcgatctgcaaacggtcattgaagtttttatcgaggatcagggggaaaccacaccgtgtctggtgttactggatgataaaccgcttggttatgtgcagttctacccgctggatagcgaagataaacaggcgctggaactaccggttgaggatgtgatctacgggctggatcagtttatcggcgaaccggatttctgggggctgggacttggtactgagcttgtctcgctggtgcgcgattatctcataacagacaaggccgcacagcgccttgttctcgacccgcaaagccgcaactcacgcgcaattgcctgctatgaaaaatgcggctttgaaaaactccgcttgctgcccgcccatgaaatgcatgaagggcagctgcaagattgctggctgatgcagtattatcccgcgcgcagcagtctgatggcttcgtcacgcccgaaaatatag

SEQ ID NO: 49123 - DNA, 783 bp, Acinetobacter baumannii
atggattgggcatcacaatttgttaagttaaaacaacgctttgcttcaaccattgtggaaatcacaatagttgcaaatgacggtaaagagcgcttaatgacttgtttaccagtaagaaagctttttggttggcttatgacaataagcccaaacaaggtcaaacctgagattcgtgacactgtcatcatgtatcaacaagaatgtgatgatgtgctttgggattactggacaaaaggacaggcaataaacaaacgtcttacgattactcctgagcagcagcatgcactacatgagatagttgaccgccgtgctggtaaaaaccgcagccaacgggcatctatgtgggtacgacataacagacattttggcatagctaagtacagccaacttttatcaatacattttgaagaagctaaacaatacttagaatcaatcaatgttgttgaaaaagtggaatcagatcctttacaacggcttgaaaatcttttagatcgagtttcatcacgttatccagcattagaaaaccctctggcttatgaaattgctcaacaagtaggtgaaaagttaaagtatcaatctccaaatggccctaaaaacttctggatttcaattcaggaaagtggtgctgttgcagtacatcaatacacttcacatcatacacctgtaaatgtcgtacaacttcgggagaaattcaatcaactatgggattttttacataaagatgaggtacttgaattaggtaaagttttaaagaggtttccctatgaacctatcagaggataa

SEQ ID NO: 49124 - DNA, 162 bp, Acinetobacter baumannii
atgtctgctgaaactgtgcctgtacctggcaatgaagtgttgcctgcagggtcagtcgctgttgcagtcactgtatcgccatccaccaggttacctgggtttggtactgaccagctgccatctgtgcctgccaccactgttgcagtggtgccatcaggataa

SEQ ID NO: 49125 - DNA, 672 bp, Acinetobacter baumannii
atgactttaagattaagtgtcgctgcgatgggtttattactcagcggttcagtattttcagcagttacaattacagcgccagaggaaatcgtaatccttgcggtgaatggtcaggaagtcaactctggattattccgttcttctaaaaataattataaagtcgatgctggtgagacaagcctaagtgtacgttatcaagaatattttgagcatttaagtggcgaacacgatattgttaagtcaggagtggttaccattcaaactccagcgctcaaagatggccaaacttataagcttgcaatggtagatgctccaaaacaatttgaacaagccaaaaaatatgctgagcaacctacagtggctttatataattcaaataatgagttaattgttcaacaaactggtgccaataatgaggcaagaccgtggtttgcatcgggattgctaggtaaggttactgatttcacgactaaatcatctaaacaacaacctgatgctgtgtatgcagctgcaaaacctaccacgactcaagctaatgcgcctgttgcaacaactatgcctgctactggtgtagcacaaactaatgatcagcgtttggcagaaatttggaaaaaatcttctaaagcagagcgtcaaaagtttatggcttggttagctgagcagtcgaattaa

SEQ ID NO: 49126 - DNA, 732 bp, Acinetobacter baumannii
atggaaattagtaattataaaattattacaaatttaaaaataaattttgataaagagttaactattattattgggaacaatggagttggaaaaaccagtattttaaatgctatcagaaaacacatcatgtggatagcagccagcattcgtaaagataatgcatctggtggaacaatatcgccagacgaaatcaataataaatcaagtgataataataatggggcatatattgattgtgcttttaatataggaagtaaaaatactgttagaggtagaattgcccgagtaaaagatacttcaacaattccattaaaaagtgaattaactaattatagagagatagggcaaaaaattagagatttaaatgaatatagagatactaatttccctctcttcgcattttatggtattgatagattatcatcaaaaaaaaatctaagttcagatttagtatttaataaagttgatgggtatgaagaatcattaaataaggttagtaactttaatattttcttagaatggttaattcagattttaaaaatgtcagaaggtattctttctgagcagcaggaatacctattacatgatcttaaggcattagagctaggaggagctaacaatagttctagtcctttacaccctatgtatctcaaattaaaaaaatcttttgaagatcaaacttcacagcaatttaaccataacacaaataaattagacctcttgcgaaagtaa

SEQ ID NO: 49127 - DNA, 375 bp, Acinetobacter baumannii
atgatgcgtggtggtcaccttgatattgctgtacttggtgcatttcaggtggcagccaatggtgacttggcgaactggcacacgggtgcgccggatgcgattcctgctgttggtggtgcgatggatttggcggttggtgccaagaaagtatttatcactacagaccatgtgaccaaacaaggtgaaccgaagattgtcgctgagctgacctatccggtaacgggtaaacactgtgttgaccgtatttacactgacctgtgtgtaattgatgtgaccaatgatggtttaaaggtgattgagaaagttgaaggtcttagctttgatgagttacaggctttaacgggtgcaactttgattgatgcgactcaagggtaa

SEQ ID NO: 49128 - DNA, 705 bp, Acinetobacter baumannii; identical to SEQ ID NO: 45284

SEQ ID NO: 49129 - DNA, 411 bp, Acinetobacter baumannii
atgtgggagcgagtttggctcaattttcatgagtaccgactaataaatcttcaagttcagaaaatgtctcatgaagagttggtaaaacttgtaccaaattatgatgaaacattgctttggcaagaaactcaaaacactgaaagtgcttgtcactattacatggctacagcattagatgagtctgaccaaggcatctctatgtcatcagagtggtttattgatttgttagatgccattagtgcaaaacagtatttttccaaaacatatcctggtcgcaaagttgagattcgctcaggcgttgtgtccactgaagatttaatggctttagatggccgtactagtgattgctatcaagctctaatcgatgctcacaaagagcgcttagcttcacttaaaaataaaggggaataa

SEQ ID NO: 49130 - DNA, 237 bp, Acinetobacter baumannii
atgacggacggcgttaattacgccgacctctctagggaggttctttttaaggcgtttttattgtggcttacaaagattgggtatcgcggaattgttagaccatgtgggcgtatggagttttattgcgccacggtaagcaaactttttcctagaaacgtacacatcatgtatgacgggaaaatgaataaagcagctacccaactttataaagaatttgaagatcatttaaaggcgtga

SEQ ID NO: 49131 - DNA, 228 bp, Acinetobacter baumannii
ttgattgatgttgccaaaactcaagcagatttatctcaagattatcacaacggcgaacttgctcaattaactggtggtcaataccaacttgatgagttgaaaaataatattacacacctagaggttgtcccagagacgcaagtaatcaacacaaatcatttagctccagcgaatgcggccatctctaaaacacttacggaaggttttaagaatgacggacggcgttaa

SEQ ID NO: 49132 - DNA, 420 bp, Acinetobacter baumannii
ttgggtggtattcaacttaaagtaaatgatcgtatttatggaaaaattcagcccaaaaaaatttataataaaaatattttaaaattgcatccctatagtattgctgatttatcttacacttatgcttatgtggtagataaagaaatggctaaagttctattagattatcatcataaaccacatgtatgcgatcattgggatgagttgtatcagttctatcccaaaattaatttttatgcgacattcttatttgatcatcctgaaatcatatttcatactcattccactagcagtatagagttagaacggaaactgctttcagaaaaaagtaaagtagaaagaaacatcttcgaaaagttcaatcgatcctttaaaaaaaggtggttaaaattattttatgagcaatatcgtgaattttaa

SEQ ID NO: 49133 - DNA, 426 bp, Acinetobacter baumannii
atgagtaacatcggttcttgtttatgccataaagtaaaattctctgtaccttgtgaaatcaaaacggtttatcactgccattgcagcttatgccgaaaacaaacaggtactggagcaaatgccgctactttagtaaaagaaaatcagtttaactggttgataggtaaggaatatgtggctacctataaaaaagaaactggttttacttcatcattttgtaatagatgtggctcgcctgtccctaataaaattaatggtacaaactatatgtggataccgttggggcttcttgaacaaccgtttaaaccagatttaaaacttaatttttgtatagagtcaaaacatgattgggttatgttaggggatgctcataaaaactttgcacatttacctgagttagaagagttcttaaaatattttgaataa

SEQ ID NO: 49134 - DNA, 354 bp, Acinetobacter baumannii
gtgcctgctgtgctatctacagttgcagtatacgtctggccattgatcacaacagtgaccactgtatttgctgcatctgccggaacgtttttcaatacgcctgtaacagtaacgttgcctgacgcttctgatgcattaatcacattgtcagctgttactgaatcaaccgtgaagttaacaccatctgtatttgggccaactgcatcgacaatagctgtgcctggtaatgatgggttacctgctggatctgtagcaattgctgtaactttatcgccatcatttaaacctggatttggtactgtccaagtaccatccggtcctgcaacaactgttgttgtactgccatctggataa

SEQ ID NO: 49135 - DNA, 348 bp, Acinetobacter baumannii
atgggattcgtaggagtagttagtgctctaactgctgcttatgcatttaccccagctaacaaagaacctgtaacggttgcagctcctttcaaagttgaatcaatcgaccctgaaaatgaacaagcagtacttcaaactgcaaatgaaaagttcacattagaagttgattttgatgctcagtactcaattgatggcaacggctatcaagcttggcgtgaagttgaaattaacgagattaaagacattcgcgtttatgacgaagatggcgaggtattggcttacgttgatcgtttggatgtagttgagattaaagatcttatcgaatcagggattagagagcgcatttaa

SEQ ID NO: 49136 - DNA, 279 bp, Acinetobacter baumannii
ttgcaagagcaatttgaattatatgcagacaacttcccagtttggtctgaacattcaagtgcaattgctcagtttgcgacttggactgcgctttcagaacttggtttaggtgcatcattacagcattataacccgattgttgatgctgatgctgctgaagcatttgatgttccagcaacttggaaattacgtgctcaacttgtatttggttctgttgaagcaccagctggtgaaaaagcatttattagcgatgaagatcgttttaaaacattcaactaa

SEQ ID NO: 49137 - DNA, 204 bp, Acinetobacter baumannii
atgagtgaaaaagcatttaaagatttaaaaattcgatttcatatggcaattggtattgcaaatgccactcaggaagatttctaccctcttagtgaattcattggtgaagatgactggaatgcaatggatgaactgcaaaaggaaacatttatttctgattgcgctaatagacctcttgcgaaagtaaaaaccacctcaatctaa

SEQ ID NO: 49138 - DNA, 567 bp, Acinetobacter baumannii
atgtcaaaaaaagatgacattattaccactgctttaagactttttaattcatatagttataattctataggggtagatcgtatcatcagtgaatctggtgtagcgaaaatgacattttataaatactttccttcaaaagagaaacttattgaagagtgtttattattaagaaactcacttttacaaaattctcttactgcggcaatctctaaagaagacgaaaccaacccactagctcgtattaaagccatctttttatggtattcagattggtttaatagtgaagactttaatggttgcatgttccaaaaagccttagaagaagtattaaaacaatacccgtcaacacatcaaccagcaactttatacaaaatctggttaacacaattaatgcaagatcttcttattcaatatgaaattgaagagtctcgacctttggcattgcttttagtcaatattttagagggtatgaccattcaagctcaagttgagcatggttcagtaaaaattgatgactattggaagcgtgtagagaaactcattgaatttgaaaaaattgcacattaa

SEQ ID NO: 49139 - DNA, 369 bp, Acinetobacter baumannii
atgactaaacatggaaataattttgagcgtgcagcttttgacgattggcactttaaagactggaacgacaactgtggaaatgagctagatgatgtggaagcaagacacttatataaccgtgtctatagcagtccagcaaatagtagagaacgtgaacgtagttttattgcttggcaagcagctacagaacgggcaaacaagaagcttgaaggctgcatattggtaccaagaactagaaaagttgtagtgacaattgaaaaaatagttcaacagcaatgtgatgccagtggagttcaagagccacttcacagattggatgggtggagaattttggaggaaattgcagaaaaggttgaggagattaagtaa

SEQ ID NO: 49140 - DNA, 561 bp, Acinetobacter baumannii
atgaaaaagaatattactcgtgaaaatgtaaactcatttgaaagcaatgttgaggatgtggttgcctatctgacagatctattaactactggtgaagagccaactgtttttgaaacttttgcaatgggatggcttggcactatcagcccacgctttgaaaagttatttaatgaggcaaaaattactcacacaaaacgcccaacattccctgctgaattctcggcagaaatggaaaagtatgaggcactcgttaaaaccacaggtgaggactcagaagaggccagaaatcaatttatgaaagcaatgctcttagctcctgactggtttaacgacatggcaagagatatagcaaatgaaatggggttaatacctaaagaggcgttttgtctagaagacgggataaaggtatttacgcctgagcaggtagcagagcatttaggtgtgccagttgatgtggttatcaatcaaattgaaaaattgagagccattcaaactgatctagataagattgtagctgagagttttgcagttgttccggctgatctttataagattcattga

SEQ ID NO: 49141 - DNA, 417 bp, Acinetobacter baumannii
atgagtaatgtaattcgctttagacgaaatgggcttgcatacaagatcagcccgcaagatgtgaaacaaagattaatcaatccaagtaaggatgtagatctaaaaaaggcagatcaaatacttggaattgattttgaaagcttgccacatgatgagcttttaaagttggctagagctggagctatagaccttatagaaacagatgctcgctataagaaaaccaataatgcaactaaacagattcttcacttgctaggtagattcttggatcgccgatctaaagaggaatggaagaagtataacgactccatgacactagattcagaagcagcagcaaaggcgcgtgcatttgaagaagctaaagacgtattgctagaaattgctggaaccacattcgcaaccgtatttgcaaaatag

SEQ ID NO: 49142 - DNA, 279 bp, Acinetobacter baumannii
atgaaaacgttcctaatcattatgaccgttgtttgtattgcaacttttctcggtttggttatggctgctttagctgcaaagcttcaccagtattcaggaagtctagctaaatttcgcttttcactagccttcatggatatcacttttttctttttatgtatatcggctctagctgtatttgatgggggtaagtatctggcgttcgctcatttaactcaatttttgttgtctttatacctaattttttaccgttctaataagtgggagcgcagccaatga

SEQ ID NO: 49143 - DNA, 282 bp, Acinetobacter baumannii
gtgagtaatgaagaattatccaaaatcggaatgatgtttattcattggattcaggttcatagagaatctatcaatcgctttgaagactttcggaattgttttgtagatgaccctgatgagcctgtgcacagtaaaaaggactacaacaaagcgtgggaaattcagaaggaggcctctgttttgggtagtgaagcgaaaagacgctatgaaaccttacttgaagaagttgatctttatctagcgcgtgaaagaacagatgtgcttaaggagaatgaagcgtga

SEQ ID NO: 49144 - DNA, 387 bp, Acinetobacter baumannii
atgaaaataaaattcttggctattggcttgatgtgcacaatggcaatggttggttgttctcgtgatgctcaagttgcatctaagaacttgtcgtatgcggctgataattttgagttagatcgtagagtggttttttataatgggatcaccggtgaatacattttaacaattgagggtaagtgttcttttgatgctgtcagtgagcgcaaggtcgatgtgacctgcaaaactggtgagtctgaatttaagaaacattcattaggtatatctgacaatgtaacttatttttctgaacaactaacaagtaaaggtgttagcgcgtaccactacaaggtagcttttaaaccacaatcaataattcctgatgttgatctgaaagtgaattaa

SEQ ID NO: 49145 - DNA, 558 bp, Acinetobacter baumannii
atgcctagaattgtatcggttataccgcctaaagatgactccaacattactaaagcacagggtacaaaaatattgcttgataacggcgagtacctacgatgtgtccacaaaatcactttagtagcggaagctgaatcgccgtggaaagctatcattgaagtgtacccatctaatcaagagcaaattgatgcagtattagctgatcttaaggtgttaaagattggagaagctaagagccgcttgcttgagatacaagaggaaatgcaaaaactccaagatgaaaagttatttcttgaacaagaatatgaccaatcaaaatcaggtgtttggactgatggcgtggactatgtacctaaggaaggtacatggttgttgcatggacatgaaactgttctaaccccaaagcaggatgaaagtttaaaagagattctgaatataaattctggtcttttaaagcctataccaccagtaaccgagaaggttaaagatatttacggcgtcattcattccgttccagatcttaaaggtgagcaagatgattccgaagagcattattaa

SEQ ID NO: 49146 - DNA, 291 bp, Acinetobacter baumannii
atgattccgaagagcattattaataatcgcttagggttttatggattggaaaataagcatgaaagaccccacattgtgcttgaactggaaactccagaagttcagcgaaagcaactggaacttaatttggttaagttggtccaagagtatcaacgcaagggtttagatatcgattggatatctattgacttacttaatggtgtagatgcgcgagtaaacttaaatgaaactccaaacattcaagaacaagttgcagacgctacaggcacagagaacaccacaaaagattga

SEQ ID NO: 49147 - DNA, 804 bp, Acinetobacter baumannii
atgactgtagataattctgcatgtttttctaatttaagtaaaccaatgattacttgtcccatatgccttgtagcatttataccaagacaaaagaattctgtttactgttctagagcttgccacgataggagacctagagcaaagcgcaatagaacttataagctacaatacattagatgtgctaactgtaaagagattaaaggtatagaagttaaaggtggaaaccatgcgaagctttgttgctctcgtaagtgtggatttgaatggcaagctcacattagttcagaaagaagtagattaagggctatcggtttgcgcgctaagaaagagttaatacctattaaagtcataaaggaacggattgcacttaaacgaattaaagcaaggaacaaattaataagattgtgtttgcactgcaatcaacaggtatttgaaaagtacagaaggattcatactagatgtttggctgcctacagcgcagagaagaaagcagactacaaattaactgattcatataagaatgcaaagaaagcaaatagggttaaacgcaaggctattcaacgtggcgcaacgattgctgaaccaattaatcctttgttgatattagccagagataaatggaagtgttatctgtgcggtgtaaagactccaaaggagttaagaggctcttactttgataatgcgcctgagctagatcatgtcatacccttgagtaagggtggcttgcatgttgaatcaaatttgagatgtgcttgcagaaaatgcaatgcagaaaaaagtgatcaaatttatcaattaatttga

SEQ ID NO: 49148 - DNA, 381 bp, Acinetobacter baumannii
atgaatctagaaaaatttagacttgttaataaagcactttttgctatagctattggatgtacatgtgtgctggcacactcaaatgttaattcagaagtagaaaaagcaaatgaagaatcttgccgaaatttaatgaaagtagcgggaatggctatgaaagctcgacaggatggcacacccttagaagcaatgttgcaagctatagatatagccaagaaagatggacttagcaacgagggtggcgaatcttttcggcaaatattgattgatgcatatagccagttagagtattcctctcaggagtacagacaacgggcaatcaatgacttttcttcaaagtactatgttaattgtatgaaaggctatggagccactccataa

SEQ ID NO: 49149 - DNA, 1869 bp, Acinetobacter baumannii
atggctctaaatgctgaaaaatttgcaaatcttgagcgcgatattgatgatactggaaaggctattaataccgttgctgttattgagcctcgatatggagagcctttttattcattaccattggcagtgcaaaaagtaatggagacaggtggatttgaaccgttccaaaccgaagcgctattactggctagcacgccgacagtttcacctaaagcagcaaaagctatggataccaagaaaatttggtattggggaaaatatgaaggggaaaatgttgatgcttggcatgacactgggttaagtgagctagatcaggcaagaatatatacagatgaacaatttaatttagcagtacaaaaatcagtatttgaaactttatcgcagttattcggattagctaaatctgatgatgagaagatcaaatctctttttactgatgcagcggggaacgttgtaattggttatgacttagaaaaagatacaggcatttatgctggaatgcttgagcaagttgtagaaattgtaccgggattaaaaatttacaatgatggtagatatttgggtctactaggtgattctgaaagacgaatcttaatcggttatgacatgcttaatgacttgcccatcattgcgggccttgatgagttgatcaatggtgcgggcggcacaaatacaaaacctgttccagccgaaagaaaccatatagttggatacggacagtctttaaaaacaggtgctaccgcaacagttattctaagtattcttcagccttattttaatgtgacattcggtacgggtccgcgtatggactctgctgcaacttcggtcattccattggttgagcaatttaataatccaagttcagacggctacagcaatcgcggtgagacttgttgttctggtgctgcaaattatgcaagccgtgcaatgatgcttgaaaacggtattgatccgaaagatcatgtgatttttgcaagcactgctgcacatggtgggtatcgtatagatcagttaaaaaaagggtctgaatggtatagctttttgattaagcatataactgaagcaaaacggttgagtggagataagacttacaaaacgcaagttattgattgggggcagggtgaaaatgacgccatttatactgttcgaaccccctatgcggtttataagtctgaacttgcacagctgcagttagatgtaagcagtgatattaaagaaatcaccgggcaatctgaaacagcaccatttattacttaccagatgtcatatgctgcccgcacatggcctgatattgcaaaagctcaattagatttagttcgagaaagcccgtattttatgctttcaacacctatgtatcacatgccatatgcagaagacagcattcatttaacaaatgttggttacaagtggcttggtgcttatgttggtcgagcttataagcaatatatgattgatgggcgaaaatcagatttcatcaacccgaaagtagctcaacttgtaggtgatgaaatacacattcattttgatgtgccgaaagcgccacttgtgcttgatacggcaactttggctgctactacagacaacggctttaaggttttagtaaatgatactgcggcaacgatttccggcattagcgcagaaaatgacaaagttattatcaaactgtctagcccacctgcaacaggtgcatcggtaattgttagatacgccctagattacctaggtgctggattatcaatagatggcggtgcttccggcaatctccgtgattcaacaacagattcaattgaaattgcaggtgtagaaagaccgctatatcacgtatgcccgcattttgaattaactgcatttacagataaaggaatttaa

SEQ ID NO: 49150 - DNA, 780 bp, Acinetobacter baumannii
atgactcaattattttttcaagcgaagaactttgtaagtaagagatctttacctaaattatcaaatgttgatgatttgctgccaaatcttgagtatgaagcgtatgggcattgggtttttgaaaacacatcggcttcattgacggataaagtgaataatagacttttagcattgcaaagtggtgctacagtgcaacccatttactctgaatcgggagtaacaatctcaactgccgtaggtaatgctcttgtaagtgatttaattgatacatcagcacaaagtgtaacgcttacagcagttgtgaaatgcaataacacccaattagctattttattaggaaacttagtacccagcaattctacaacgagtagtggtttagcgggctttgcttcggccgggaagggatacttgacagttaagtcaaccgctgctgctggttcggggggaatttcgtcattaacaccagcatctaggcataatcaaacatcaaacttttttattgctgttagcgtagataaagcaactaaaaaaggaattatttacgttcaacaaaattcggcagaattaacaaacgaagcagtttatacagctcctgtttacgaaagtgcactgaataagtttgcttttggcaataatgcatacacgggatcaaatgccccggcaaatacagcaacttttgcagaaggggttatctttgataaagctttaactttagatgaaattaaagctgtggctacccgatccaaagatagaatgaaaaaccgtggaattaccttttaa

SEQ ID NO: 49151 - DNA, 1398 bp, Acinetobacter baumannii
atgaataatgatagaacaaaaaaattaggcgaaggactttcaaatcgccatatcacaatgattagtattggcggtgttattggtgctggtttatttgtcggttcatcttctgcaattgccaaagcaggcccagcggtgattcttgcgtacctgattaccagcattatggtttttctagtgatgcgcatgttaggtgaaatggccgttttagagccggacactggttcattttctacctatgcccgtaaagcaattggcccgtgggcaggctttaccattggctggttgtattggtggttttgggtacttgcgattccggtagaagccattgcaggtgctgaaattttacattcgtggtttccgagcgtttcagtttctatctatgcgttttgctttattgtgttcttaagcttagccaacttttttagtaccaaaagttttggtgagtttgagttctggttttctttggtcaaagtggttgccattattggtttcattattattggtattttggcaatttcaggtatttggcctttagctaaaaatgtcagtggtgttgctaatttatacaacaacgctggttttatgccgcacgggatgggaggcattttagctgccattttaattacggcattttcattctttggtgtggaaattgtctcgattgccgcagcagagtcatctaaccctaaacagaaaattagacgtgccaccaatttggtgttgtaccgtattattctttttttcgtggtctcaatgtttattgcggtttcacttgtcgattggcgttcaccggacttacaaaagtacgggacattccaatacgttttaatgagcttaaacgtaccgggcactaaacttattattgatacggtcgtgtttatcgccgtagcgagctgtatgaatgcggcaatttatacgtcttctcgtatgttatttcgtttgggaacacgcaatgaagcaccgcaggcagtcactaaagtgaactatgctggtgtaccagcaattgcggtgttttcctcaacttttattggtttagtgtgctgtgtcataaactatgtatttcctggaaaagtctttggcttattgctctcaagcacagggtcaattgctttactcgtgtacttggttattgcgttttcacaactacgtttaagacataagctagaagcagttggagcggaaattccatttaaaatgtggttattcccatggctgacttggtttgtgattatcattattttaagtgtattggcttatatgttcttctcaccagcctatagttatgaaacgactctatctttaggtgtaaccttaggtgtggtggtttgcggtttgtttgtgacccgaaagcgtaaagcaacccgttcggttgcgatcaatcagagtaatttataa

SEQ ID NO: 49152 - DNA, 1095 bp, Acinetobacter baumannii
atgaagaaaatactttttattgttgataacttaggtaagggtggtgctcaaagcattacaagtgctctcgcaaactttttaagccgctcttcattaattaaagtcacagtttgtgcacttgataatacgaatcaggaatgtcatcttgaaccatcagttgaacttattagtttaaatattcgccatgatttttcttatggtaaattgtggaaaaggaaaaatttaacaaaagctgaacaggttatggttgaagaaaaaattaataagaggaattataatttaattattttaggatttcacaatggatattatctttatgactatcttagacaaaaagataaaatctggttttgggtacatggggagatattagagagaagagcttttaaggatatttgggggcagttgcgtagttatttacgttacgaacgtcataaaatttattttaaacaattacttaaggggaaaagaattgttattgtcagtaagcatctcgaagaagcatataaaaagatcttagaatcatcagagtttgtaacaattccaaatggtattgaattaccagaaaacacaaaccgttttaattcaaaaaagtgggatgctttatttttagggcgtttagtgaatcttaagcaggttgatcatactattaaggcgttcaataaagcaaacgtgagcggaaaacttggaatattaggtgatggtcctgaaattttacctttaaaaaatttagtgaataaattaaatctacaaaatcgtgtagatttccttggttggtccagtagtccgcaagattttatatgtcaatctcggtgtgtggttatgagctcatcaagtgagggaagcccgatatctttattacaagctttgagtttggatgtaccaatagtaagttataactcaagtagtagcatcgcattactctttgataatccgattatgaaccgctatctaattccaaaaaatgacatagagaagttagccattgctttaaaagaatgtattaatcatccttatgacataccaaaagaagtcaaaagtattatagatatggaaacaatggctaagtctttcataaacttgattcaagattaa

SEQ ID NO: 49153 - DNA, 846 bp, Acinetobacter baumannii
atgcagcctttagtttcggtaattataccttgttataatcatcgccagtatattcttgatagtatcaagtctgttataaatcaaacttataaagctattgaactcatcgttattgatgatggttcaaaagatggttcatttgaggaaataaaaaaaatagagtcagaatgtcgaggaagatttaaacggttcgaatgttacacacgtgaaaataaaggtctgagtgcgacactaaatgaagcaatacaatggtgtcagggaaaatatgtatctctgattgcgtcagatgacataatgttccctgagaaaacattcagacaagtcgaataccttgaaaatactcctgttattggggtatttagtgcagtagcaattattgatgcgagtggaaatgcagttactacgaggatctctaataagacatcattttcatttgaagatattattctaaataagcatgatttgcccgcatgtacacaaatgcttcgtttgagtactttaaaagatgtaaatgggtatgataaaagtataaaagttgaagattggtacttgtggttaaagctaacaaagaatggtgaaagactcgactatataccagaagtcttttgtggttacagagtacatgactctaacttttctcataatcatttagcaatgtataatgatatgaaaaaaattatacaagactataaatttcattttttatatcctctggctgaatataaaattaatagacaaataacaaaagcgctttttaaaataaataaatctttttctggatatttatggctaagagtaagtaactggtttagatattatttattgaagttgaaaatctggaaatga

SEQ ID NO: 49154 - DNA, 1056 bp, Acinetobacter baumannii
atgaaaattattaatactgtttatggtgatgcaacaggcggtcgttggcaagccatgttgaatatagctgatacattagagcttaatggtcatcaggttgttctgctgcgtggtgttgaaaatgaacacctcagtagtgggtcacgtccaattcatgtcattcctaataccggtttttatagtattaatgctgctctaaaagttagaaaatttttgaaagaacaacaaccagatgtaattattgcccatagtggaaaggctgtttggctatttaaaaatgctcagatcggcatatcaaaaaagatacctgttattgctgtgaatcatagccataatgtaaaaaggacgatcagagctgatgcattcattcatatcacacctcatattcaagagctggtgaaatctctattaacagaaaagcaaaaatcaataaaaatgcatcgtgtaatttctaatctgatgcatctgccggaggagcccgcacttcctcaaccttttaggaacccggttactatagcaatgctaacccgtatgataccaaataagggtgtccatgtcctaattgaagctattcatttattgaatcaaaagaatattcaggttaaagcaatacttgctggtgatggagaaaataaagccgagtatgaaaaaatggttcaggattttggtattgaacatttagttcaatttcctggatgggtaaatgcgcagcaaaaaattgagatttaccatacagcagatattatggctattccttctctaaatgatattcagccacttggaatacttgatgcttttggttggggaaaggttgtcttgagtagtgatcatgttggccctttacaagtatgtaagcatcgagaaaatgcttgggttgccaaagtgggcgatgctcaggatttggcaaatggcattgaatatttaatcaaaaacccagatcttgcattacagctcgcgcagcaagccaagaaagaagcattagaaaagtattgctttgaacaaatagcaaaagagcataatgactttatccatgacgtttatcattactataactag

SEQ ID NO: 49155 - DNA, 690 bp, Acinetobacter baumannii
atgactcaactacgttatattgctttaggagggtgtaatacaatcggagaagttaacaatattggggctgcctatcctgagcgagttgctcaagcaaaagggtggcaattgaaaaattatggttacaccatgtgtagtactcgtgaaggggtgcaattttttaatcataaagcggatgtacgaactgcggatattattagtatccaatatggagggggtgatagttggttaacgtttaaaggttctccttttgttttatactacccagatagtccatggcgtaaattcttgcgtaaacttgttaaaaagttaaaaaaatatgcacgtaaatttcattggcatcgattggttggtacagagaatgttgtccctttagaagaatatatggcaaatattcgatatatcattgaacatagtcaagctaaatatattttgttaattgatacttatccgaatttagataaaagtcgtgaacctagaattcgtgaatataatcaggctttaaaagccttatctgatggtaagcgtgttttatatgttccaaattatgagcgtttgagtttagatgaaactagaaattatgacgatcaaacccatttatcggcagtgggccaacaggttgttgcagatgccattattgaagttatagataaactcagtgctaatggtaggctggaaacaggtaagtaa

SEQ ID NO: 49156 - DNA, 672 bp, Acinetobacter baumannii
atgtacacatcgttaggacaatcttctgagatatatcatgtacatagagaaagtctcgcacctcttcctcaacaagagttcaatttaccatttgcctctatcgactgtgatgtagttgttttactggcatgcacacaaacacaaaataaagacacaattatttatttaaaaggtccagatatactcgataaaaaatttatcgctacccgcttttttttccagtctgaaggatttattttcaacttttttggttcatttatcaaaagaattcgttcacgccgccaaaactttagtagtgaatcttaccggatcctacttacagatatcacggaaaatcatttagaaagaaatatcaaaacaccagaaacagcttataactggactaatccgcgttggcgcttaagcgaagaaaaacgtaatgagcgatataaaaaacttcttcaatcatttcaaactgatggatataattttgcacatccaatgcatatcatgctgtgtcgatctatgggggtaaaagataaattaaatcaaggccatcatcgcattatattctgcaaaatgtttaatattcatgaggttagcactaaatttattagctctgcatacatgccaatggctatccaaccattttttaagaaatttattatgcttattaattacaaacaagtttaa

SEQ ID NO: 49157 - DNA, 1071 bp, Acinetobacter baumannii
ttgaaaacgcagcagctttcttcctcaaaacaagtaattttagccctgacagatgataaggctggacatgaaacacagacccaaggaattattcaacttctaaatcaaaatcaagaatataaagttgagtggattcatttggaacaacccaatcactggttgtatcgtctgcttcgctggctattaaattttcacattgatattaattggttacgttattttgtgtctgatgagatgcttcaacgtttagaggatttgcctgtcgcgtatattatttcctcaggaggtaatactttaataccaaatgttctattaaaaaaatactttttgattagaaaatataatgtaaaaaatattgtggcaagttcattgagaggaatctcaccaaaaaaatttgatgtgatttttacagtacgtgagcaacaagcatcattagagcattatttatattaccctattgcaccgaataaaatgactagtcttcagctaactcaagatcaagcaaggaagaatctggaaatcagttctcatgaacaagtaattacagtactcattggtgctgatagtgaaaaagtaggaatttgttcgccattacagtgggcaaagttactacaaaatattcgtttacaattcccagagtcccgactacttctaaccacttcaagaaggacatcaatgaaatttgaaactgagttgaggaactattgtgaaaaaatggagatttttaaagcacaagataaaatgacatgggtagctaaagggcaagcgtgtgatattaaaaactatattaaggctgcaaactgggtggtatgtagtcaggattctacctcaatgatggctgaaatcatgatggctgaaaagcctcttatagttgtatataatcagactgaaatgaaggatccattaattgattcacagttatcaatgcttgaagaaaaaggatggttatttaaactggatatcgaacatttatcagaaatcaatcaatatcttgaccattaccatcaagtggttcatagccataatttatataaagccttaaataatcacttagctagtgaaaaattataa

SEQ ID NO: 49158 - DNA, 1269 bp, Acinetobacter baumannii
atgacacagcgattagaactacatcaggtagagcagttaacagcttgtaagatatcactattacttggattaaatgccgagcagaattatattgagcaatttttccggttttgtcttcgcctgttgaagtgtcaaaaagctttgcttacttttaatcaggaaccttatttttggcatcattgcccagatggcatgactgcaatttcctttaaaccttcaagacacctaaaacaatgttttgctaaacaacaggtgattcatcacaatcatccttcttatcaaaatttaatcaactatttaaaagagctaaatattgaatgtgggcgtgccttagctgtccatttggtgcagcctgaccagacatctatgggatttgcagttttcttcgatgatgatgaaacttgttttgaagatgatcaaattcagttgcttctcgattactgttctagctttatgcaacaagtcgagttgaagtttaattatgaagaattaaatgaactctatgagcagcaagtcgcactgaactcgagtaaaacaaagttcttttctattatttcgcatgacttgcgggcgccgtttcatggcttgttaggtttctccgaagtgttagctaaagaacgtgaaacactggatgagtcgagtattcaaaatattgctgattatttatacgacacttctcaatcgacctataacttacttgaaagtttgctgacatgggcaatggccgaaggtggtcgctttgtttatcacccaattaattttaagcttagacaagtgagcaatattgtttgtgatgtgctgcatactttggctttaaagaaaaatattgaattggtaaatgcggtttccgaagatttaaaaatctatgccgatatcaatatgatgacttccgtgatccaaaacttggtgtcaaatgcattgaaatttaccgatgttgacggctctggaaaagtgttcattgaagcaaagcaggtgggtacaaatgtcgaaatcactgtgcgtgatacagggcttggcatgactgaacagcaaatggcaaatttattccatccgcgtattacagcaagctttaaaggcaccgctggggaaaaaggtgcgggtttaggtttgagcttatgtaagcgttttgtcgagattaatcaggggaaaattagtgtaacttcccaaaaaggagtgggaacgacatttaaagttttattaccctctgctcaagaagttcctgaacatcatatagaacaacaaaatacatctgaagcaaaattggtttaa

SEQ ID NO: 49159 - DNA, 870 bp, Acinetobacter baumannii
gtggaactggaacctctggccaatgccttaaaacaggtggtactgcaacagcaggtgatccatgcagatgaaacaccggtgacggtcatgcagatgggtgaaaatgagaaaaagcccaaaaaaggttatgtctgggcctatgccagcacacagtacaatccagttcaggctgtgatctatgactttcaagatagccgttctggccagcatgctgaagacttcctgaaaggctggcagggtcatttggtctgtgatgattacagtggttataaagcacgctttagatcaggtcaggtcattgaggtgggctgcatggcacatgcacgtcgtaaattccatgaactacatgtgaccaagaaaagtcaggtcgctgaacaggcattagtgctgattcagaaattatatgcgatagaagcagaattaagaaaaaagacggatggtacagcggaagaccgctgcgaataccgacaacagcatagtcaaccggtcatgcaacaactatatgaatggctcaaccaacatcagctgacggtgccatcgagttctccaaccgcccgggcgatcaattacagcctaaaacgttggactgctttaagccgctatctggatgatggcaatctacccattgacaataattggatagagaaccaaatgcgtccctgggccttggggcgtaagaactggctatttgcaggttcgctgcgcagtggtcaacgagctgccaatatcatgactttaatccagtcagcaaagctgaatggcttggatccgtatgcctatttaagtgatgtgctgaaaaggttgccaacacataaagtgccccaaatagaagaattactacctcaccgctggaaacctgaaccccgttaa

SEQ ID NO: 49160 - DNA, 264 bp, Acinetobacter baumannii
atgaaaagaggttattttaataataagattaaggacagcattttttttaaagagaattcaaagaagtgggttttatcaatagagtattcgacacctatttggtatgacttgataatggatgagtgtgaagagtataaagagttttataaggaaatattaaatgaccaagttgaagcctcaaaagattgtaatgaaaaagagtttatttactttttcacatctagacctaaagttaggtttgatctctcacggaaaattaaataa

SEQ ID NO: 49161 - DNA, 528 bp, Acinetobacter baumannii; identical to SEQ ID NO: 46241

SEQ ID NO: 49162 - DNA, 459 bp, Acinetobacter baumannii
gtgacagttatagatacaagtaattttctgcaagctgatgatattgaaaaagtaatgttagttccctttgccgtacataatggacaccatactgatgatgctatggaaaattatatcggggttgattcaaatggacgtcaaggacgttactatagattagctgctgaaaagctgggattagtcgagttaattagaaataaccatactattttgactcctattgggcaaaattttgttactttcaataagtcgcaacaagatcaatatatggattcagctattcggaacttgccagtattcgccgctgccatccagtttacccaaagtcaaacacctcctccatctcaaagccaattaaaacagtggtttattaatttataccctggagagcaaaacacagctgaacgaagattttatactttcataaactatttgcgtttttgtggatttcaatactaa

SEQ ID NO: 49163 - DNA, 1905 bp, Acinetobacter baumannii
gtgttagctaaaaaaaatgaaatactctatcaagagaaagtaataaattgccgccctctattgaaatgggctggggggaaaactcaacttttaacagaaattacccctaaaataccaaagaaatatggtcgatatattgaacccttttttggtggtggagccctcttttttgctttaaagccaagcaatgggataattgcagacagtaatccagagttagtaaatctctatcaatctgtagcagatgatgtagatggaattttagatcagttaaagcagtatcaaaatacagaagaagttttttatgctgttcgtagtcaagattggaaaaaactacctaatgtagaagctgctgcaagaactatatttttaaatcggacttgttttaatggactgtatagggttaacaaaaagggacaatttaatgttcctttcggaaagtataaaaatcctaaaataatagatgaagaagctttaagagctgcatcaataatactaaaagacactactattatttgtggagattataaagacgtattaaggaaacaagctcagcctggagactttatatttttagatcctccatatttacctatttctgaatatgcagatttccaacgctataccaaagagcaattctatgaagaggatcacacagaattggctgccgaagtccagcgcttacatgaattgggttgtcatatcatcctaacaaattcaaaccaccctttagtacatgaacaatatagaaaattcccaatagaagtagttcaaactaaacgttatatttcatgcaatggtaaacgacgcactggggaagatgttattgtgacaattccaccaaaacctcgatttgatattcgtatagttcctgaaagcttatctgaacaaataaaattatatcctcctactcgctatatgggttctaagaataaattattatctgagatctggggtgttgcttctcaatttgagtttgacacagcggtagatttattttcaggttcgggcattgttgggtatatgtttaaatcatatggtaaaaccgttattagtaatgattacatgactatggcatctgtttttgctaaagcaatgattgagaataataatattgttttgacctctgaagaaaccttatcattacttgaatcaaaagggcccaatgattcatttgtagaaactaagtttaaagacttatatttttctgatgatgataataaattaatagatattcttagagccaatattaaaactataaaaaatccatataagaaagcaattgctatgtctgcattaatgcgtgcttgcttgaagaaacgaccacgaggtatttttacctatgttggctatcgttatgacgatgggcgtaaggacttatcaatgtcgtttcgagatcaatttttagatgcagtaaatatgattaatgcctcagtctttgataatggtcagcaaaataaagctcgcctcggagatgcgatgacattaaagcatcaaggaaataaactcgtttacattgacccaccttactattcaccattatcagataatgaatatgttcgccgatatcattttgtagaaggtttggcccgagattggcaaggtgttgaaatacaagaacatactgttacaaaaaagtttaaatcgtacccaactcctttttcttctcgtaaaggtgcaacggaagcctttgatctattatttaagcggttccgtaatgacatacttatagtatcttattcatcaaatagtctacccacactagatgaaatgttggcgattatgtcaaaatataagtatcatgtagaggtaatcccaatagattatcgttattcaattggcaacaaaaatgccaactccagtgataacaacaaagttcaagaatatttattcatagggtattag

SEQ ID NO: 49164 - DNA, 288 bp, Acinetobacter baumannii
atggattacattgaatttcgacgccaacttggtaaggcaggtcttacgacaggagagtttgctgaattggtaaagatgagcagtaatgctgtgaccaattgctcaaaaaaaggggttgtaccatctcatctagcaatcattgcaacgcttatggctgtaatggccgataacaaactggatttccgtgcagtttttaatgagattgagatagaaccaaagaaaccacgtggtggtgcctctaaaggaaaatttggtggcagtaaacaaatagttttaccaatggagtaa

SEQ ID NO: 49165 - DNA, 1728 bp, Acinetobacter baumannii
atgaagcctaatgatgttgtctcgaacctgccaaacaacccgacaccgaatactcatgcctctgtcgattctgcgcagcaagaacaacaggctggattagattttgttcgccaagtcattaccgatgatttagctgccggacgtgccaaacaaatcgtaacgcgtttcccgccagaaccaaatggttatttacatattggtcacgtaaaagcaatttgcctcaactttggcgttgctgaagagtttaatggtctttgtaatttacgttttgacgatactaaccccgatgcggaagaacaagagtatgttgatgggatcgccaatgatgtgaaatggcttggatttagctggaatggcgaaccacgttatgcttccggttattttgatcagctttatgcttgggcaattcagttgattgaacaaggcgatgcatatgttgatttgcagtctccagaagaaatcaaattaaatcgtggtagctttgttgagccaggtaaaaattcgccatatcgtgatgcttctgttgaagaaaaccttgctcgttttgaaaaaatgcgcaatggtgaacttaaagagggtgaagctgttttacgcgccaaaattgatatggcaagcccgaatgtacatatgcgtgacccaattttgtatcgtgttttacattcagagcatcaccaaacaggcgataagtggaaaatctacccaatgtatgactatgctcatccattgtctgatgcaatcgaaggaatcacacattcactttgtacattagagttccaagaccaccgtccgttttatgactggattgttgaaaaagttaagtctaaagctgtgccgcaccagtatgaatcttctcgcttaaacgtagattacaccattacgtctaaacgtaaattacgtaaattggttgaaggcggttatgtgaatggatgggatgatcctcgtatgccaacggttgtgggtatgcgtcgccgtggtttcacaccagaaggcctacgtgatttctgtaaacgtgtaggtgtgtctaaaactgacggtattgtagatgtcgcaatgcttgagttctgtattcgtcaatctttagagaatacggcagcgcgcggtatggcagtgttaaatccattaaaagtaacacttacgaacttatcggaagatttagaccttacccatgctcgtcatcctaatgtcgatatgggtgagcgcgtgattccattaactaaagaaatctatattgaccgtaaagatttcgaagaagtaccgccaaaaggctttaaacgtttaattcctgatggtgaagttcgtttacgccatgcatatgtgattaagtgtgatgaagtcattaaagatgcaaacggtgaagtcgttgagctgaagtgttcgatcgatccggatactttaggtaaaaatcctgaaggccgcaaagtaaaaggcgtaattcactgggtatctgcaactaaaggtattcctgctgaagtacgtatttatgatcgattgtttacagaagctgaccctgaaactggtgatgatttcttagcaaacttaaatccagattccttgaaagtggttcaagctgtgatcgaacctgctttagctcaagcgaagccagaagatcgcttccagtttgaacgcgaaggttatttcgttgctgatcaatacgatcatactcctgagaagcctgtgtttaaccgtgttcttgacttaaaagatagcttcaagcctgagaaaaagtaa

SEQ ID NO: 49166 - DNA, 1830 bp, Acinetobacter baumannii
atgaataatttattgtcgaaaatgttgggctgtgccttggtctcaacattgttgcctctgcaatttgcatatgcccagatagaaaaagatttaccaaaaaatcatacggtttctttaacctttcatgatgtgagagatggtgtcttaaaagaaggtgatcgggatatttatgcaatccaaacgaaaaatttagcacagttctttgactggttaagtcaatctgactggaaaccaattcgcttaaaagatattgaagaagcacgtaaacaaggtaaggaattacctcataattctattttgttaactttcgatgatggcgctttaagtagttatagccgtgtatttccattacttaagcaatatcagattccggcagtatttgcacttccgaccagttggctaaatgggaatacacaagctggttatgaagcttatgggcaaggaaatctagtcaattggaagcaagtgcgagaaatgcaagcttcgggcttagccgagtttgcaagtcatagtgatgatttgcatcatggagtattggctaatcctcaagggaatgaacagcctgctgcgacttcttacacgtatttaaaatcccaaaagcgttatgaaacggatgtggaatatcaacaacgtattttgcaggacttaaaaaaatcatacgccgttttaaagaaagaagtgggtgttgaacctaaggcaattatttggccttacggtgctgtgaatgagcaattagaaaaattgtctcaagaagccggctttattttttctttcagtttaggacgtgatggaatgaatagggtgagtgactcgacttttaaacgtagtttggtcactaataatcctacagctgagcaattaacagagggtatgatcaatattctcaactttgaagaattagatttatttaagcaacctcgccactttgtgagtatggacttaaaacaattagctgcttcaactaatacacagtcagatgagaaactagggttattgttatccaagctttatagcttaaaaaataacactttgatattgaaacctttagatgatcaagatggtgatgggcagtatgacattgcttatttcccaacaactcaactaagcgtccagcaagatattttgaaccgaactttatggcaggcacaaactcgtgccggacagtcggttattttagagttgcctgtatatcctcaaaaaaataaaccgtttttggtggtagacttagcgaaggatatcgcacgtttcaatagtaatttaagtggtattcaacttaatgctggaaccactttaaattgtgctatgcaaagcacaacaataaaagaaaatgcctgtgctgaccaattaaaacagcttacatatgtgagccagcttactcaaaaggctgtgaagccttatttaaacatgagtaatcaggctcagtttagtttattgcttacacctgattttgaacatattgaaaatttaccaacgcttttaaaaacgctgttatcccaacatgatttagtaaatcttaagttcaatatagtgggtaagcaaaaacagtttaatcacgtattagcaattttaaatacgcttgatgcgaaatataaacagcgcattatgctgactttatcattacccgaaaatagtcagcaaaatgcctggcaagaagtgaaacaaggtcttttcaatattcagcgcataggtattcagaaatttggtattgatggctataccaatgaaaactcaaaaaatgttcatgaatatttatataacccgattagtttaaattcgagttcggtcatgtatcagccctttgcaggtctcgcgactgaggggaaaaagtaa

SEQ ID NO: 49167 - DNA, 129 bp, Acinetobacter baumannii
atgtctcaagcatcgccagtctatcagggaagttgtttatgtcagggtattcgctatgaaattaaaggcgatatcggagatattatccaatgccattgtcaacgctgccgaaaatccaatggaacgtaa

SEQ ID NO: 49168 - DNA, 864 bp, Acinetobacter baumannii
atggaaattaaattattgtttttgattttagttttattatttcctataaatagtaatgcttttactatctatagttttgttccatttcggtatcatattgataaatcaggaaaaaaaatagatggctattcacaagcacaacaagctctttatagagttggtacaaaacaaataaaagttttatatgagaaccaatttctaacaaataaaaaaccagattttgaaaaaataaagaaaattgttgaggatagtaagaaaaatcctagtataccaatttcatttgatatagaaattggtaatgatagaaaacctgagacgatcctccctactgttattgatactttaagactttatcattccttaggtggagcagcagaggtaggagtgtattctctattaccagtaagtactgaaggtgaaatgctttccaatgaaaggataccaggatatcaaatacttaataaaaagtatgagcctattgcagagttagtagattttcttagtcctgtaatctacaactataatattcgagatcctaaaatatggaaaaaaataattgatattaatatggctgagagtcataaatatgctaataaatataatttaaaaatatacccttatataacagctagttattatttttcagataaggatcctaaaacaggaatgcgttatgttgaacccctaacagatgtagaaatgagtgatagattagattatttcaaaaagaagggggcggatggagtgattctatgggaaagttctgagacaagacaaaagaatgggatgaagcctttaatggattttagatcgaattgggcaaagggtgtagctgattttattcaaaaaaataagttaaagtag

SEQ ID NO: 49169 - DNA, 126 bp, Acinetobacter baumannii
atgattggtgcaggtagtattgtcactaaaaatgtagaaaaaaataaagtagttgtaggtaacccagctaaagcaataaaggatgtaaatatagacgtaataaacaacaagtggattaaatattaa

SEQ ID NO: 49170 - DNA, 510 bp, Acinetobacter baumannii; identical to SEQ ID NO: 45540

SEQ ID NO: 49171 - DNA, 579 bp, Acinetobacter baumannii
atgaaatactttatagcaaatttatatttttatacccgtaaagagcttctagcaattgctgatggaaaagatgagcttgttgattttctagatagaataaaaggttctgagttagaaagcgcgaaacttacaagtgcagaacgtgcatttttgaatgtttatcaatctgctgtgtcaaatactttggagatgatgaacattgatgtttctacatctagctggatgattggcaatggtttttacgtcccttctatggttgaagattataacaaaacaaatatttctattttagaagtagtactgttttgtaatatcacagcattaaaaacattgatcaaaactgatactgcaataatcgaaacaaggtttgttgagtttctaattaagtacgttgaaaaaatagaatcggtacattgctcagatgataaaatttttaaattagaactaggaaataagtatgaatttgagttacatcaggaaggatacattttcgtagaaagaatttcagatgatgaaatttttctctgtacacgacaaatttcacagaacccttatcctatcaggattctgccttcttaa

SEQ ID NO: 49172 - DNA, 183 bp, Acinetobacter baumannii
atggaccgcgaacacttcatggattttttcaggaatgatgaaaaacttgaacaactaacaccagatgatcggatagaaatttttttgaacgttttactaggcagtagtgatatagatgtaaaacttctaaatgaacttttaaacaattatgatattagtaatatcgtaattagtgaaaaataa

SEQ ID NO: 49173 - DNA, 585 bp, Acinetobacter baumannii
atgcttaaggtgaatattatgaaaaaagcaactcttataactaacaatctaggccatctagtttgttcagactcactaattttcaagtccaaacttacaggcaaaacaatttatttatcaccctctcatttatcggcacgaatttttgaaaaaaactcaaaaaagctaaaatgggaatactttaattgctggtctgatgggctgaatctggtaaaagaaatatttaataaagagcttatagaaaaagagaaaactaacgcattcaaagaaaaacttattccaggttcaattcttgtttctagctggggatcagaacaaacaaacgtaagtttttatcaagtaatttcatctactgcaaagactgtaacacttcgggagattgaaaaatatcgttttgaagaagacatgagaggatgggttactccaaaaccgaatgaatttatagggccagcatttagaaagaaaatagagtctgaatatgttcagattggaaatcgtgaaattgctagattattaaaatttacggtcatagatgaaactggaacaaaagtttatgagcgtcaaaaattcactagttacgcttaa

SEQ ID NO: 49174 - DNA, 360 bp, Acinetobacter baumannii
atggcttgggatgtagaaacaacagaactttttgattcttggttggcagaacaagatgaaaatgctcaagataaaatcttagcgtctttgcttgttttgtcagaactggggccaaatctaggccggcctcatgttgatactattaaagaatcaaaatatccgaacatgaaagagatacgtgtgcaagttaaaggtcatccgatccgtggtttctttgcatttgatccagaacgtaaagccattgttttgtgtgctggagataagaaagggctaaatgaaaaagccttttataaagaaatgatcaagattgcagatgaacaatatgagcaatatttacgtgataattacggagataaataa

SEQ ID NO: 49175 - DNA, 300 bp, Acinetobacter baumannii
atggctaaattaaacgatataatttcaaaacgctcacctgaaagccaacaacgcatcaagaaaatggcaaatcaaatgctattggatattaacctatcgaacctacgggaagagttaaaaatatctcaagctgaaattgcaaaaaatctaggtgtaagccaagctgctatttcaaaacgtgaaaaattaggtaaagatcttaagatttcatcattaaaagaatatgttgaagctatgggtggcaaagtaaggttagatgttgagttacctaacggaaagcatgttgctatatctatttaa

SEQ ID NO: 49176 - DNA, 537 bp, Acinetobacter baumannii
atgaaaaaactagctgtaatgatcgccattgcttcgatattatctggttgtatgacaaaagatagtcttaataccttaaaaaaattggttgtagaaaaagaaataaaagattatgtagcaagcaattatccgattgagtcgctagaaattgatctattaagttcagaaatttacgataattgcatggatgtaattaatatcagtcaactttcgcttgttaaaattgaattaaataaggaaacaaggtatgtcttgaaatcaagtgtagatacaaaaccattaaaaaaatgtatagataattatttagcaaaaaaacctgtctcaaacgatgcaatggaagatctaatttcgaatccttattatgaaaaatacaagaatgaacctgacgtaagagaaataattaataaagcaaagatagacaatcttataacctatcatgagcaaaaggaaatacttgatttagttaaaaataaacgtctcaatcaagctctagccgaaaacaaaatttggtatcagaaacaaattcatgatctttag

SEQ ID NO: 49177 - DNA, 555 bp, Acinetobacter baumannii
atgaaaaatatacctctaatatttgccctggtattagctttatccgggtgcatgagtgacgaagattttgcttttgcaaaagaagaaattgtagaaaaaactatcaatacttaccttcaagatcaatattcgatgattgtaataagcgacataaaaaatgtaactccatcgatatatagtacttgtagtaaatatttgaatattaataaaaggatgatcaagaaacagagggttaaattatctatcagaagtatcgagtctgaatatgttttagataaagatgtgaatattaatgatctcaaatcatgtgttgacgattatttggtaaaaaccccaatttcagaagagtcaatgaaaaatctgaaagatgatacaagagttgagcaattcaaaaatgatcctgaagtacgttcgttaattgataacgctaaagctgatcatttaatcagctattatgaataccagacaatacttggactagtgttgaagaaacattacgaccatgaaattgatttgggtaaagctgcataccaacatgactttcaaagtctttaa

SEQ ID NO: 49178 - DNA, 219 bp, Acinetobacter baumannii
atgaataaatctaaatttagctatgctgttgacttcaataatgaaattgttggaactttatctgctaaagaatacttcagtattgtaaagaaggcttatacggatttagtttttttaaaaaaacatgtttggccattagtgatgcactttctgaatgcatttagtaaatgccttgttccttttaaaagggttaaagaaatacaaattttagtgagctga

SEQ ID NO: 49179 - DNA, 630 bp, Acinetobacter baumannii
atgaaaattaattattttattaaagctgttgtagttggtttaagtgtttcaacattagtttctaccagctatgctgcttctagatctagttacagctcttcatcaagcagaagctcgtattcatcatcatcgagtagtaaatcatattcttcaagctctccgagctcctatacttctcgaccaagtagtagcataagtaaaccaagctacacaccttctaaaccttcagcaaccaccacatataaaccagtggctaataccacctccaaatctaatccgacaaccaaaacagttaaaccggtagtgaaaagtactgaagtaaaacaacctgttcaaaaaccgtatccggtgcaaaataatagcctaagcagctatgatagatttaaacatgaacaacatcaaaagcataaatcttcaaatgattggatgacttggatgttgttagcttggatcgtgtccggctcttcaaatagtcatgcatcaaactcttcagttgaaacaaaagaaatcgttgtcgattgcaaaacctggttaaaagagaatggtcataagtctaatgacattgaaaacctatcaaataaagactttgcaaagatcaaagcatactgtgaaaaagttgataataaataa

SEQ ID NO: 49180 - DNA, 180 bp, Acinetobacter baumannii
atggaagcaaaacaaccagaagtaaaagagcaagaagacatattgtctttaggcttaggggggaatgtcaaaaaaattctcattaaggcagagaagtaccattgttcactttgcgatcaaattttagatccaaaagttgaaaacccaatagatcattcaatgttatgcactgggtattaa

SEQ ID NO: 49181 - DNA, 573 bp, Acinetobacter baumannii
atggaatctatattatcgaactctccaacatccaaagtttattcaaaaataaagtttcaagagttatttaagtcttatcgtatagcaattatattctcaataatatttttaatattcgcattaaatcagaatttttttctaggtgaatacaaagatattttaaggttgggatcatttctttcggctggattaactggagctttatttatgacgaaggttaataaaattcaggatatgtcaagaaagttaagtgatgaagcagtgcttgctcttataaaaatattgtctaatcactcagagtatgtggaggatattaaggtaaaactcaaaaaccataatgaggtaatcgttcatgatgtattaattatacgtagcattttgaatgatcaaatttctaaaattttaaaagaagggagctttactaccgacaaaaaaaatactgatgacatttctttagagggtatagaggacttacggtccaccaagaataaactgagttttttactttatgaattaggtatttcaactagagatcaagaaggttttcaatggaagcaaaacaaccagaagtaa

SEQ ID NO: 49182 - DNA, 258 bp, Acinetobacter baumannii
atgaaaagtgaactacattgctttgaaaataaaatagctactatttttataatagctatttttctcttctttatatttgttttcattaaacattttgatcatatccacgcagctttatggcctaaagttagtgctcaaggtgagccatgcttatataaaacagtaggttatataacttctccgaaagacggtacatcaactgaaataaaaggttgggtgtgcccaacagataaaaatataagttcatcaaataggtaa

SEQ ID NO: 49183 - DNA, 1281 bp, Acinetobacter baumannii
atgaacactaagtacttatctgcattaaaaacaaatttcattaatgaaaacgaactagactcattattaagtgaaattcaggatttaccaggtcatccgcaatcccttacgaccttacaagattgcggatataaaatgggtgtaatccatgaagattactttaacgtaatgtcatcattcacatttcaacaatttgaaaaaagtaagagatctattctatacgtctacgataaagaactagtttataaacatatacaagcaatacagaaagctaaatatgtactacctttaattcttaagcagtatgaaaatacagagcgaaaacttaaagaacttatcgaaggttgtattgctgaaaaacaaaagtatcaaaggaactttgaattacgtcaaagacttagagaggtcttacaaaagaaattaagtgaactgacttctgataatgaagatgagtataaaaagctatctaagcttaatgatttaaatagcctgcaaattgtgaacagtgacttaagccttaagtcttttgatatggctattaatcttgctaaagataaattgggtaactttgatatagcgaagacacacggggatatgtggaacaccaattattctattaaagctttacagagtgataataaggccctgatagaaatttctaaagaccctgaaaaatatgacaaattcaatatcagagacttatctttagtaaattatgtttgcgtcataatttttgtacttgttcttcttgtagcgggattactaacgttaggtgataataaaagcgaaattaaagaaccagttcattttgcagcacttgatgtttataacatggtgaatggttcaaatccttcttcaacaataggaaaacataacaaagaattctttctaaaaaattatgaaagtacggttcaaatatataataaatcacaggacgttttagtagaatatttgaacggttcacgaactttgacaccacagaatagggaggctattcaaaaagggtataccatacttttgcagttagcagatttaaaaaaggatgatattactttttctattaatcctgatattaagtattcgtatgagtatgctttaggaatcaccaaaaagaatgataattttagtggcttttggaacttttattataaagccgtagtttattggtttttatttattttaatcccttttggcatacttaacggtttatctgaattaaggcaatatgaactgagaaataaaattagaaaaatgattgagccatattataagcataattaa

SEQ ID NO: 49184 - DNA, 1104 bp, Acinetobacter baumannii
atgttaaataatgaattaacaacacaagtattttcaattgaaaatgaaatggaaaaacttgatcttgatattgatagaaaagatgaagttttagcaatagttgaaaacttagatctaattaagaacccacaaaaggtacttgagttgggggctaataaccgtgattcgttagctgatctttctaaccaaatgctgtcattagttactaatgatcagttgggagttatgggagaattaatgacggatattactgtaaaattaaaaagaacagacttttccattggtagtgataaatcaaatataccgttgataggggggctgttagcaaaaattggtaattcaaaagacaggcttattactaaatttaagacagtagaatcacaattaaatgataatttattgcaagtagcagaagctcagaaagggttgcaattaaataatgatagcttgacgaaattatttgagcatacaatttctgtttatactcaactaggttttgctgtcatagctggtcgatataaaaaaaatgagcttattggcttgattgagtcacttaacagtgaaggtacagatctagcaaagcaaagagcaaatgcatattcacaaatcttagagcgtttagataagcgtattacggatctagaattgttgagattaagtgccttacaaacgttgcctcagattacttttttgcagaacaataatattgcgttaattgaaaagttccaaactatatctggcttaactattccagcctggcaaagacaattaatgttggccttgaatattttagatcaaaagaaatactcacaattaggtgaggaaattgataatttcacaaacgaaacacttctagaaagcgcgaaagattttaaagaaacttcaattcatattgcaaaacaaagcaatcgccaagttatagatattgagacacttcagaaggtgcagcttgatacattaactgcttttgaagaagttatggcaatcaacaaaacttcagctcagaagcgaaaagaaacacaattacaggcacaacaattaaatgatcagctcaaaagcctggtcgttgcggatccgcaacaattaaaaatcagtgcagattaa

SEQ ID NO: 49185 - DNA, 270 bp, Acinetobacter baumannii
atgaaagaacttgtaatagtcctacgttggttcatcggatttttaacatttctcttaggattgatgactttaatcctatttcttaaatatatatgggaccttgtaataattagaaatattattctaattgtacttagtttcggacttttcggtatgtctttggatataaaagaggatgatgatagaaaacttactttgctgcttttaatatctaccatttctatggtcggttttacaagttggaccttatttaaacagatattgaattaa

SEQ ID NO: 49186 - DNA, 234 bp, Acinetobacter baumannii
atggttaaatgggttagtgcctggttcttggttattaatatttactctccgaataaacatgctgtttatacgataccgttccaatcagaacaagagtgtaaaaaagaagtacttaagcgtttaaaacatgatgctggtaacgaaattcttagcgttaagtttggttcagaggtaaaagagcgaagatcatatagctgtgataaaggacaattacccgtatatccagttaagtaa

SEQ ID NO: 49187 - DNA, 1230 bp, Acinetobacter baumannii
atgaatattaattttaatactgaagaattccttgctacagcaaaacaggctacacactcaccagctttgttccataagaagtctatgcatagtccaatctatgcagaaatccaatttgatataccgttaaactatataagctctaaaactgtacacttgcgtaaaaatggttttaaggaattaaattgtgcaacgtttaaaggtattcctgatctagttgattctaaagttaagcaggtttcaattccacttaaagacttagggccggttgcaatcacaccgatgccagcaattgggatttactatgagcttaataagcgaaataaagactatgggaatgcacttttagaagtaacagttgaagatcgagaaagatccttttctgattacaatgagttaattgagatttcacagggaaaaattaatagctttaatacacctgaaattactttaagacctattgaatttagtaaatcaaaactacctgatgatgagttttgtttaactgtttttattgatgatgctaatttaagcagtaatttaatagcaacaggtttaccaagtgtcacatctattgcgagcttctttaattatgttgaattaaagacaggccaaaaagttgattttgcgattggaatttctggtactgaaaaaaatcaaaatgtctcagtgcgtgagaaagtaattaaatatccaagaacacgtacaaacgtaggtgtcggccaagttgatcagagcaatggaaaattagctctacatttaattattagctgtgagagtccaagtgctgccaatcaagtacgagattatatacttaatgaagatatacgcattgcaactggacttgtttatcagaaatcaatttgtgattttgtaccagaaaatacctattggttatatgaggcggatccaaaaacagtagatgacgatttaagaaaccgttatgtatccggttttcctgtatttcaaccagatactttagattatgcaatgcaattgtatggaacaaacatagttgatagtagacataaatataccgttacttcaaacggttatgcactattaaatgcacctacattctcaacttattcaagaagtgaaacaaaacttcactgctatgcagaaatactttacgcagtttgttatttaagtgaagagtacttgccggacaacttattttggaaaaagaaagaagtacctgggcagttggtttattggtcatctttataa

SEQ ID NO: 49188 - DNA, 1257 bp, Acinetobacter baumannii
atgtcttctttattaggtgatttaaacgcagttgatagctcattaacttcagcaaacttaaatgctaacaataactctgaccgcacaattctaaaattgccgcttaatcgggttaagttggatcctcagaatgtacgtcttgaatatgatcaagattatgtaaaagaactggcaaatactattttgcgagatggtttacttcagcctatttcagttagagccgattctgatagtcctggtgaatatattattaatatgggccattatcgttatttagctcataaacatttgaacttggatactatcgaagcaacgattgataacaaacttggttcacgccgagtaaaaatgtcagaaaacttatttagaaaagacatgagtttgcttgaagttgctacgaatttaaaattgatgctagaagaaggcgtggcagagaatccaaagtatagttatgacgatttagctaatgaaattaataagtcaaagacatgggtttctcgaagattacaattgcttgaatcagatgattatctaaaaagccttatggctaataaaatggtaaatgatgctgaaactggcacgatcattaaaaacttattagctgagtatccagaagaagttaaagcgttagtagcagatcatgaaggtgctatttcatcaaaattagcccgtgtatggtctaaagagctgaagggtgaaattattacctcaagcacttcagacgtaacacagtcatctttagaacttcagaattcgccaaaggctggtgaaaaaaatgaagatagtaaagtggacaatactcaagagctcattaccgaaactaaagagactttacagcaacctgcaaaagttcaagaatcggttgaaaatactgaagcagtgaaagatgaaaaatcttttacgactactactcaaaagcaaacaaaagagattgtaaaacaagcaaatgaaaaggcattttcagagcttgagacagcttattttaatggtattttggaaagttacgtcagtattttagatttaacagaaagcgaagatgaagacttagtatcagtagcttgtggctttttaagaagctttaatgatgaaaatacagctaatttgttttcgtggaaaagcttaattcaatatccagtactagttaatgagttggcgactattttagattctatggcgcaattacatgtatttgttccatcttctaatgttgaagactctcgtatgcaagttattttaaatcaacaagaccttatttaa

SEQ ID NO: 49189 - DNA, 774 bp, Acinetobacter baumannii
atgaaaaaaatcgtaatcactaacgaaaagggtgggattggcaaaacctctgttgctgttcatttggcacattactgttatgagcgcggtatgcgtgttctatttgtagacatggataaacaaggtaatagtggtttctcacttagtaaagttgcggttgagattaaagatacccatagtctatttgcggatatccaaaactttgaaactttagataaatactttgttctttttaaaggtaataagagtttaaaatcactttttgatcctacagaacaagagtttaaactagataaagttgaagaataccaacgtaatttcaaatcaaatattgctaaggctaacgaattttttgatatctgtatttttgatacacctcctacagacggcccgtttcagcgattacctttgttagtttctgaatttgctctatctccttttttattggataaatattcaattctagggctaagaggtattattgataccacacaagaaattaaagaagtaaacccaaaaattcagtttctagggctgcttccaaatatggttagtgctaactctgttactcaaaaaacaactttaaatgaattgcagaaacaactgagtcatttaatgcttgataagactgctttcatccctaatcgatctgcaattgctgatgcaagtgaacaacaagttccagtatggaaaattgataaaacgtcagcaaaagatgtagggcgaaaaatcaaaaaaattaatcaattagttttagagaaaatgggggtttaa

SEQ ID NO: 49190 - DNA, 390 bp, Acinetobacter baumannii
gtgctcaagttgttgaccgaccttaaaaaacaacttgaggaagagggggtgatttcgatttccgatccagcttgtggagctggctcaactttactttcaactgtaaaactctgtttggaatctaagatacaagtgcaagatcacttgtatattgaggcagcagacattgatagaaatgttgctttaatgtgttatatacaactaagtttgtgggcagtgccttgccgtatttttgttggtgataccctcaagttaaagtatcgtgaatgctggtgtagcttaatgtattacgtaaaagggtgggacataaaattgcatagtcaaaaattaaaggaaattgtacataaagctgaagattatgtgcctaatttcattttaattaatgattga

SEQ ID NO: 49191 - DNA, 411 bp, Acinetobacter baumannii
gtgaattcaaaagttaacattggtaaaacttatagtgttttgaaaagtgagtttatacataccttaaaaagtatcgaccaatctaaaaacatttatgaaatatttcatgactttgttttttgttcagcagcagcattaagaaactcaattggtcatagatatcaaaatttgtttaaccacaatattgaaaatgaatatcttcaacgtatcaatcgttacgacgttagtggacgtttaaaaataaaaaaattgttttatctgttggtggatttatgcgaagcaaagggtgagccatatgatgtgttaggtagcatttacatggaattagaaattgggaatgatcatatcggccaatattttacaccaagtgaggtatcaaatttatgtgctcaagttgttgaccgaccttaa

SEQ ID NO: 49192 - DNA, 498 bp, Acinetobacter baumannii
atgaataattattttaatgtattaatcataactgatttaaaaattggtcgtttaaagactccatcacattgtgcatgtgctgttggccatattgatattaagaagccatcttttgaatacaatactggcttagttgccttatctactactatgtatgattgtaaggactttaatgtttatacattaagtacaaaagagtcatttaataagtttatttcaacattaaaagttcttgaagaattgattggtattccttgtcctttcttaaccgctattcaagaaacatatgagttctatggtgacttcatttttgaatgtttgacctggtttaataataacgcagatatattattcagacctgaccacttgggagaattcactaaaacagcagatgagtctcttaatttccaattaatgtatttcaaagtcttagaaacttttcgtaaagccggtttaaatggttttatacaattcaatacattgaaaactattaattga

SEQ ID NO: 49193 - DNA, 207 bp, Acinetobacter baumannii
atgggatctacagtacgtctccgggacccaacagctaaacttgttattgatacagcattagatatgcaacaagagcaacgtcaaatggttaaaacttcagatattgttgaaacattagttcaaaggtatataaatacgattagctttgaagatgttcaacaaactattgaaaaccgtaaaaagaataaaaaaagtaaggacaaatag

SEQ ID NO: 49194 - DNA, 237 bp, Acinetobacter baumannii
atgaataacgctgatcctcaacttgagcatgttgatccagctcatcctgttgcaccagatgcttatattagagttctgaactgtaagagtaattatgtaaatatattggctggatggtttctaaaagatggcgagaaaaagttttatatcgcagaggtaagaggcaatgacgttgaagctggttttaacaggcttgattggttgacagagtttgacacaatttataagggcaaatag

SEQ ID NO: 49195 - DNA, 690 bp, Acinetobacter baumannii
atggaagatatgcaaactatcatagataaaattagtaaatgcctagcattatcaaaaagtgccaatgaacatgaggcagccattgcacttagacaagctcaggcattgatgcaaaaatataaaatcagtgaaaaacaaatactaattagtgatattaaagaacgaattatccagacaaaaactcaaagaacaaaagatattgaaagacgacttaaagtaatgatcgcaaatgtctttgaatgtgggagttactctggttggtacactttagaagggacgagatatcaacaacatgttttttatggagttgaaccaaatgcgtccattgcagcatacgcatattctgtattacttcctatcttgattaaaaacaaacaaagttatttagccactttacatggaaataccaagctgaaatctaaaaggcgtttgggcataagctatcataggggatggattcaaggagtagaaaaaaagtgtaaaaacttaaatccagataaagagctaagggaaaaactgaacgaatatgaaaaaacacttaatcttgtatattgcgaagttaaaagtgttaaacattataataaagatatgctttatcaagcacgagtaaaagggtattcggacgggagtaaggtgaacttacatcatgctattgatcctaatgaaacgaaaaagattttcttgagctga

SEQ ID NO: 49196 - DNA, 405 bp, Acinetobacter baumannii
atgaatcaagattacattgctttcgatccaactctttcaatgaatttaaatggtagagaagttcaatttctattaaatccattagatgaaaaatatgtagaggatccagcaatatttgctgactatagttatataaaagcaggtatgctacctccagaagaatttgaaataagacatgctctcaaaatgatgatattaaatgagaatatgctttcaagatttagcccattgaaaaaaatcttctataaaaaagattttcaggatgtgaaaatagcggctaaatactggagagaagtgcttttaaatttgatgaataaatcccctcaacataaggcagcaattaaacgtatcgcatcaacaatcactggtgatggaatagagcggttaaagccatttttaaaataa

SEQ ID NO: 49197 - DNA, 333 bp, Acinetobacter baumannii
atgattgatattacaagtaaaattcttgatttaaaattatttgaagcagaagtgatcgacattgatgaaactaatcattgggaaaatagtgatcaaattactctgcgacaaagtgaaggtgccttgattgttttaagaataaattatgagtctgaaaagaaagaatcatatagtgtcagtctagaggttgatgagcttgattcttatggtgaatgttatctaaatgattctatttggacgttgtatggctgtgaaaaagatattcttgaaagaattgtaaaacaggattggagccttaagaatttaggttcttataaccattattttaaatag

SEQ ID NO: 49198 - DNA, 297 bp, Acinetobacter baumannii
atgaatattaaaaatcaaaataaacactcaaccaaagaaaaaattacaccagaaataaaattgttcggtcgctattctattagtccgatcaatctaatactacagattgtttggctaatcgcatgggtgtggaaggtaattcaagatttacaaactttacactcttatgaaaaccctctattagtgtattccataggtatgattttctggattttcgttctatatcttggcatctacgttatgactgttgtttcaaataagcttaataaattaatttatatgaggcaaatatcatga

SEQ ID NO: 49199 - DNA, 189 bp, Acinetobacter baumannii
atggaaaatataatgattgtagatgttggttgtacattttggacacttgaaaaaatcttccaaaatgctcatcaaaataagggttttgtggttttaccagctaaggatattaaaccattaagtacagttagaaaatttggccaaagtggttatctggcagaacaaaatatgtctgacattaaatcctaa

SEQ ID NO: 49200 - DNA, 327 bp, Acinetobacter baumannii
atgtcgcaaattagtgaattatcaattgaagagttaaaagatcttcagcttgaagcagccaaattaattgaaatcaaagaagaacaagccattgaggatgcttattttaaaataatttcaattgcagaaagcgtaggatattcagtagaggatcttttgaaagtaggcgcagcgagctctaaaaagaaagctcgtaaatctgtaaaaccgcgctatcgtagtaaagcaaacgaacaagatacttggactggacgcggtaaacaaccacgttggttagtagccgaaattgaaaaaggtgcgaaacttgaagatttacgtatcaactaa

SEQ ID NO: 49201 - DNA, 477 bp, Acinetobacter baumannii
atgaaagtagctggaataaagatatttttaggtagcttattgttagtaagtaacattgctaacgctgactttgttgcaagagtaattggtgtgactgatggagatacaataacagttttagacagatcaaataatcaaataaaggtgcgtctagcagatattgatgcaccagaaaaaagccagccatttggagcaaaggctaagcaagctttatcagatttaacttttaatagaaatgtttatatccaggaaaaaggatatgacaagtatcatcgattgataggaactgttctagtaggtgtggatcctattaataggataatggttaaaaatggtatggcatgggcctttcgtgaatatttagatgatccaataatgttggatctagagtcatacgcacgaaaaaataaaattggtctttggcaagatgctaagccggtatatccgagtatgtggcgaaagaatcaatcacagtag

SEQ ID NO: 49202 - DNA, 216 bp, Acinetobacter baumannii
atgaacggtgaattaatacagtttcctaagacatgctcgatttgtgatcaatattcacaaagttttcaggaaattgagcaagatgaaaattgttttaataaagaatatatatgccaggattgcattgatctaactaacggaatagatattcttgaaaaacaaatgcttgaagatcatcataaaacaaaaaaactatatattgttagcggaaactga

SEQ ID NO: 49203 - DNA, 141 bp, Acinetobacter baumannii
atgaaaattatagctttacttgcaccattagtaattttactagctctcatatttttagggagtaagcaactaattaaacaagcttgtgaaagcggaaatacctatgttggcgaaacaacttgtgaagaaaatgggtgttaa

SEQ ID NO: 49204 - DNA, 192 bp, Acinetobacter baumannii
atgactaataaaggcttgtttgaacaatatttttcaaccttagattttactgaagatcaagatggtaattaccttaatgaggatacgaaaactacttggcaagtatttcaaaaactgcaacaagattttctatttatcaaaagagacaatctgcctaagccattattagaacattttcaggctatgagttaa

SEQ ID NO: 49205 - DNA, 597 bp, Acinetobacter baumannii
atgagctcaaaaacagacactattaacaaatctaaagttataaatttctaccttagtcgttatttagagggtggctttaataagattttttcggatatcgaagcgaccaagaagaagcaagtaaatttaatactactttgtttactagtaattttagcagcatatgctgggtattctggattaacgagtgataactccacgttaggatattactttcttacagcaatatttgctctttctacagttatcttaaagctttggtcaaatagttggtctatccgaacaaaactaaacaatttcaaggtgttggaagataacttaaatgttattgagcatttcctttttaatgaaatgaattgcattaaatcaaaaactttgatcggttgctcactagatcctaattcttcaaatgaaagtgtttttatactttcagctaatgaagaaaataagttctatgcatctatttacaattcaaaaattatagataagaaacctcatcttaccgaagtgattttatcagagtcgcagcaatcatcgttttttaaatgtttagaagattcaaacttgatgaccgagataaatgaggtctggagctga

SEQ ID NO: 49206 - DNA, 375 bp, Acinetobacter baumannii
atggtagaaaccattcaatttctagctttcccagataatatcctaaattttaaaagtcacttagactttgaaaccctcattcttaatttacctgaaaaaatagttcaggacttagatcagagtattgcgaagctgaaaagcatggaatcctgtttcttcactacttatcgtatacctgaaatcaatttacataacttcattcatttacgccttctaaacttcaaaggtcctattgatttagaagatgtcaaaattttagttaattcaaaaggagtatatgcagaaataattgctagtgtagaaggtaagtttaattactggttcgttgagttaaagctatttaacacagaggtggaccatgaaaatgactgttaa

SEQ ID NO: 49207 - DNA, 381 bp, Acinetobacter baumannii
atggttgatgaaactcgttacattccggttaaagttttaagacagggcaatatttattatttaaattgcgaagcgtttgatattgtagaaaaatcaagcaatttactacattgtattgaacaaatgaaaaacaggattatcgaaaaagtggtcgctctgcaccatgctggagaaaaattaccagtatttgatctttacaaaagtttaaaaggtggcgggattttattagaaattccgagtagttgctttgatgatacattagaaagagttactttaactttacctaagagtgttattactggaattgatgccgtttccccaaatagaagcgcaaagtttacacaattggctaaagaatttattgacggagataataagtaa

SEQ ID NO: 49208 - DNA, 525 bp, Acinetobacter baumannii
atgagcagttattcgatacaaatcggacaagttaagggtttatatgatgtatttctcgaaacttgtgtaccaaaaaattctccccaatatccagagcttcagaaaatcggtgatgattttctaaataaagtcgtgatggaggaccctgattatcataatagtcaggtcttcactattttgagtcaagtagctgttcccgaaattcaaaatagacttaaacgtcttgagtccaaagcaaaaaataaagattttgaaaaaaattattttgattggaattatattgagagaggggttgttcaagaaagaaaggactttattaatgctatccatctaaagcaaatatatgaaaaaacaaaaaaactttatgaagctcagaacggtgaagagcttacaagtagtatatatgcagatctcttgaatgcgaatcctcaaaatctcagaagaatgcttacacataaaagagaaattgatactcgtctattagaagaggcaaaaaagtgtcttgaaaaactttctactaaataa

SEQ ID NO: 49209 - DNA, 1266 bp, Acinetobacter baumannii
atgaaactattatttggtgaagatgtaattagtagtgattttgaaggactacaatcattattaaaacaatactatgagaagcggaaacgtccactttgtttatgtactaataatggtgttgaaatgtacatagcaaaaataaatgaaagttatattctaaaaagaatgcctaaaacaggtggaagacattcaccagtctgtttaagttttgagcctcctgaagaactttccgggcttggagaggtacaaggacaggcaatacaagaaaatcctgaagatggtactacaaatttaaaattagatttcagtttaactaaaatgccaggtaaagctccgccagccccttctggagcagatagtgactcggtaagaactgatggaaaaaaacttacattacgtggattacttcattatctttttgaagaagctaagttaaattatttcaatccagacattccgaagagaaattggtatacagtaagaaaagcactgcttaatgctagtgattctaaaatcgccaaaagagcttcattaaccgataatctctatattcctgaaacatataatgatcagaagaaaaaagaaataatagcaagaagaaatgaaaaaatggcccatatgaatacgggcaaagcatcacaaaacctcatgattttaataggaatagttaaagaaatttcagaagccagatatgatttcaaaatggttataaagcattgtccagatttccatttttttatgaataaggatctacataaaagaatatttaaacggttccaagaggacttagagctttggggtgctcacgaaaactctcaattaattactatctcaacttttactagaggaatttctggtgtagctaatttagaagaagttagtttaattgttgtaaatgaacagtggattccttatgagaatatgtatgaatatgatcttataaatgaaatgatcagagaaaatagaccttttattaaagggttgcgttacaatctggatagaaaaaaaccgttgtcgagtttagtggctcttgatactttgcctgttcctacggcaatgtatatcattccggcagcacaatctcacacgtataaagaaagtgtagttaatttgattgaagctagtgaatatgaaggttggatatgggaggctgaaatggcgatgcctgatcttccaaaacttggattattaactacagattcagaaattttagaggacaatttaaaaccaaatgagcagttattcgatacaaatcggacaagttaa

SEQ ID NO: 49210 - DNA, 1083 bp, Acinetobacter baumannii
atggtaacaaataattttgaaaattctctaaattctagtttgaattcggaagaaaacattaatcaacaatttactcaatttgtagataagtattttagtttttctaaagctttagctgttagtcaagaaactccaacagctatattaactgtgggtactcatgattcaggtaaagacgtaatcgttgcacaagcacaagatgaattaaataaaaaaggtggttcaattttaattgaccaatcaatttttaaagttgcggatccgcaacaagataaagaccattcaattcatcaattgatttctactattagtaatgaaaaatataatttgcttttaaatcatgaatttaaaaatgaaaatgttttaaatgatattactgaatcgcttaagagtaaaaattatacgattgaaatcagagcagtttcttcattcccccctaatgaaaactctttagataaaaatacacatcctgaaactttaagagcaatagaagaattagaaaattcaaaagctgtggatagttttaaagtttatgatcgtgttggtaaagaaatttactcaaacatgcgtaatgatgaaggggtatggaaccaaaaaaaagctggtttaaatatctataatcaagaaacgaataaaactttatctaaaacggaggctgattataatttgctgacgcaacaacaattaaaagaaattgaaaatgctcatctaacaattaatccacgtgaaaaccaaaataaaaatataaacgggaaatcagaaaagaacttagaaataaatttagacccaccaaagattattaaagatcctggtgcatttagagatgtagtacatggtatcgtgacggatgagtctgaaaaggattttacactcaaaatcaataacttggttggaataaaatacagtaaagatcaattaaaggatcaactcgaaaaagacaataacttttatcgtggacgagagttatttattaatcatgctggggatttaccgcaattaatgaatgaaaaggaaatacaagattttcatattactcaagaacaaagcttacaacatgatgttggcgtagaactagacagataa

SEQ ID NO: 49211 - DNA, 1176 bp, Acinetobacter baumannii
atgggcatacttatgactgtaaactctgttaatttaaattctaaaaaagactttataatcaatagattatatgaaaacctaccaaaaaaaccttactgtaccagtgacttcttcggattaaagattcgtgacaagaaacaagctatacgtcactcacatatacaaattaatcatccgaattttaaaagatatatagttattgatgctgattatccaggcgcagcaacagcttggcggtatgattttgatgacaatattccagtaccaaatttaattgtagttaatccagaaaatactcattgccatttttactatgaacttgaagctccagtaagttttactgaaagttccagcaagagagctcaagaattttataattcagtttctaaaaagctcactgaagtattaaaaggtgacagcaagtacgtgggactaatagcaaagaatcctgcacatgaaaaatggattgtagaagtaccacgattagaaaagtattcattgcatgaacttgttgaacatttagaacttaagccacatgaatacagaaatataaattcagaaaaacccggtatagagaaatttgtaattaacggccgaaatgatcatctatttaacgaaatacggcatcaagcatatatcgacattagaagttatagaagtaaaacatttgttgagtggtttgatcatgtaaaaagcttattaataaatgcaaataagaattttagcgttccgctaccatattcagaagtttgtgctacagcaaaatcaatcgcaaaatattgttggaaaaaagatagctactgctttcaagagttttgtgaaaggcaacatattaaagcaaaaaaaggtggacgtgcaaaatccgataaatatgttgaaatgaggcgcacggctgcgcgtttattgcgttctggtaaaactaaaacctatatatcagaattacttcaagtatcgtacagaagcgttctgcgttggcttcaaggcataaaagtacaagctgctataatgcatttatcagaattaaaaaagatatgtgacaatgcccaaaatcagatattagcctgtttcattgcttctctaatcgttattattttagatgagcacatttatgatcttaatgaatctgaagaattaaaaattaccatcaaattcaaattaaaagttccaattcaataa

SEQ ID NO: 49212 - DNA, 234 bp, Acinetobacter baumannii
atgaaaaaaatctttttatctttaactttgggtttaacacttgctgcttcaaatgctgcttttgctcaaaaaaaaggaggcgaatgttattcccgtgataactcaacatatatgtgccctgccattagccaaaaagatcgtttaactatccaacaaatttatgatttgggatggaaagtagtaggttactttggaacacaaacaggtagatcaattatcatcgagcaacaataa

SEQ ID NO: 49213 - DNA, 252 bp, Acinetobacter baumannii
atgattgaaaataagtttatgaaatttttgttatttcttttatttgcaattatgggctccacacttagctacatgattaacaatataattcctttaattattttacttgttatttatggattaattgttaaggatccagctttaagagctcataaatttctagaaagagaagtgtattttgttccgtgcgatcctagtacatcatacaaatatgctccttttgcgcctccattttttacttcaagcaaataa

SEQ ID NO: 49214 - DNA, 1041 bp, Acinetobacter baumannii
atggttcaaacaacaatgaagtcaatttggcatatgatattgctttttctggcaataatagcattagtaacatcttcaatttttattgtcattttaaatttttatatacagtcaactaatacttttatttggctaaactttatagtcattgctatttcactgatttatatattgtcttttatctggaatactttttctgaattactgaaagaaaatgattttaaaataatttatgtcgggcttactttattgttatttatgtcggtattagcatcaggcacgtatcttcatttgtatactttacgtgatcaacagaattttaccaaattaaataatgaagacgctaaaagtaaagaatttggaattattcaaaaaattggccgtgacaatgatgtgtatataaaacttggaaatacaagaacaagttgggcactaacaagattagcacctatacccgactcttcaggtgcttcaatgtacttaatgaacggatactgttctttgaattattctgatgtttctagtcaatatatgaaaaaagaaatgataaagaatatatcaaataaaaggctcttaaatgagaacttagatattcctaagttgtcaataatgatgcatgagtttgcacactgtattgatattaaaagagattatttaacatttaatatcaatgcagataattcaaataagacaacaattttaggtacaaatgctattacaccaaaatttagatcacacgttaaagatttaatcacttatcaagagtttgggagtgcttctacattgtggaaagaggtttttgctgatctttatatggcaggttatctatatataaatcatcccggcattgcggaccaaattgtacaaaattggagtaaattaagggaaaaaaatgcagaagatgatgaaggtcattcaactagttgttggttaaatattgcacaaaaattaccaaaacctaagacgaacaaagaattaattacatggtctgacaatattaggtccaccagcaaatgtaaaagtgatttttataagtcttaa

SEQ ID NO: 49215 - DNA, 1293 bp, Acinetobacter baumannii
atgaaagaacaaatctttgcactcattgatattaacaactgctatgctagtattgagaggttttttaatccacaactcattgataaacctattataattttatcaaataatgacacaagtatagtagcacgttcagacgaggctaaattgcttggcatcagaatgggtgtaccggtcttcaaaataaaagatattattaagcgtaataacgttgtgatgttgtctagtaattataccgtttatggtgaaatgagtagacgctttcattctatcataaatcaatttgttactgatcaagaaatggaagtctatagtatagatgaagcttggctcttactaactaattacgagagtttatttgatctaactgaatatgcacatactataaaaaaagaaatctttcgattaattggtttgcccgtctcagttggattgggtagatcaaaaacagaggctaaattaggtaattttctagccaaaaagatgaaacatttcaatggagtatgcgatttagttaacatggatccactcataaaagaagacatttttcaggatattcccttgaatgaagtgtggggagttggaagccaaatagcaaagcaattaaataattttgggttttcttcagtttatgacttagctgttgctaatccagtatggataaaaaaacaatttagtgtggtactagcaagaacagtaatggagctgcgaggaatcccatgtattgagattgagcatagtccaccaagtcaaaagcaaataatatcatcaaaatcttttggtcagcgtgtcacagcattggaagacttacaagaagcaatttctcgatatactcaagatgcgtttagaaggcttagaaaagctaatttgctttgtggttgtatcattgtattcgcacactctaatccatttgataataaaagaaagtactactataagagctctacaagtggttttgttgttcctactgataatgttttaactttggttgaagctgcggtaaagctaatcgagaaagtgtatacagaagggatagaatataaaaagtgcgggcttatattaaccgggctggaaccaaagtcacttttcacatatgacttattaacagatatggatgatatagcaaaacaagaaaatctcatgttagcgttcgagtcgatcactaataaatttggtaaaaaaaagcttgcagttggtacatgtatgttcccggatcggaaatggaccatgtgccgtaatagcctaagccaaaattatttttcatgggatgaattattaaaaattaataattaa

SEQ ID NO: 49216 - DNA, 993 bp, Acinetobacter baumannii
atgcctaatcacaaaattagcttgaatgatttgactatccctgtccttttcattctatttgtgatttctatcatgatatggcctctcttgggctttatcatacccttgcattacccggtatttggcttaattcttctttctataatgacgataattcctttgtattttttaataaatagccaaataaaaaagggacctcatcctgttacaagtaagttaaaaagtttcgtaatttctggttctctctcggctagttttacacttctgattgctttaattgctttcatagtaggcaattcgttaaaactctattcgcaaaagcaatttgatgatcaaaggcaagaatttctaagttctgcaaccgggtttaaagtcttaaaagattacgcttttaaaaactataaaactgtggttgagcttggagacataaatgatagctgggcattaacaacacttaatatccctaatgcttctccggcttctatgcaagcagcatcgggttattgcattttaaatctatcaccccaaaatgtcttaaatactgcaccttcttttgtcgataagaacttgtgggttcaaggaatcatgatgcatgaatttgctcattgtcttgataggtcaagagatttacctaacaaaaactctttgaacccattgtccactctgtccatcgctcccgaccaagctaataaagttactgatctgcaatcatatttgcttaatgagagatctgaacaaacacaactctggcgtgaagccgtctctgatatttttgctatcggatactggaaaataaaagctgatcacaataattataattccttagtaaattcactatataactatagagctgaaagaagttccgatgatcctgagcatggaacaatgtgttttatcaaggctgctatgaatagcaaacttcctttatctgaagagaaattgtttgaatggtcagatgaaataagacgaactgctaaatgtagaatttcctaa

SEQ ID NO: 49217 - DNA, 519 bp, Acinetobacter baumannii
gtggaccctcagaaagttattttaatttcgggtttagagagctcgttcaaagaagatgctgtatcagcaactaaagcaaccggcttaggccaatttgtagctggaacgtttgctgaacgaattgctaaatcgagacatcctgaactgcgagcactaagaggtttatctagagaagagctacttgaaaaaaggaaggatccaagaattggagcactagctttagctgaacatattaaagatgcagaagaccgcgttaaatctgcttttaaagccaatggtataagagataacgtaacacttgcagatatttatacagtccataacattggtaatccaagcatggctgtagcagcaagacaaggtaaaatggctttagccggtgtatctgtgaaggctatgagaaacaatgcacaactttacgaaaatggaattaatacgacggcaaaacagtatatggaaacggtcgatcgaaagtttgttgttatcgatgctaagttaaggaacggaaagagaaattaa

SEQ ID NO: 49218 - DNA, 3003 bp, Acinetobacter baumannii
atggactttacaattgaaacgtactggaacgttgaaagtacctacttaatccttaatgctgttgcatctctcatgggaagtagcgactgggtaggggctttaaaattcatctttttaactgcgatcatggcttcgctttttgtatttgctttagatagagatttaggaaagtttgttagaaattttggttgggcttactttattgtagtaatcattatggcgccggttagttcagtggccgtagttgataaacttaagcaagagccaccaaaaattgtgggtaatgttccctggctgttagcaatgggagcattcacaacaaatttcacaacgggatggataactaaagaatatgaaacacttacttccgtacctagcagcctaagtttaacaggaactggtgatatgggctttggtcaagccctaataagaaacacaaataaaatgagtatcactagtcctagtttgcgtgctgatattatgcaatatatcaaagaatgttcaatttacgacatgcaagatggggtattgaatgctgaagatttgatgcaaaaaacagatagttggaacaagctattttccaatacaaatccagcgcgatttgtaactctgggtattttgaaaggtgcacctgaaaccgtcacatgtgtcgaaggagcaacaagattaaagcaacaagttaacgatggtattgcagcagcaatgcgctattacggaaaaaatgcatttatagattttaatgaagcgactgctttatctatgtatacaaatgctgttggaacaagttatagctggatacttggagctaatcaaagtgcttctgatgctgttaaacaaagtatgtttaataacattatgaaagatgcaaatactgaattaccggcacttattaatgatcaaactcgtatacaagaattaatggcatcggcaggtgcagcagcagcttcagaacaaatgaaaggtgcagccgcagttttatcaaaattagcatttgaagtcattccgatagtgagaaattggctagaagttgttctatatgcaacattcccaatagcggtcatgttaatagttttaaaaccgagtacggcagtaaatattttatccggttactttacaagctttttaacgcttggcctttttcctctaattttcgcattaattaatcatgcttcaatgctatatctaagacggaaagcagaagctctagattttagtgagggcattccctttactaaaatgggggtattagactccacagtcgttgatattcaaactgttattggattatttgtaattctaactatacctctagctgcatggatagcacgaggattttatggtgatatagctgcaattggaaatcaaatagttgggcgctttacctcagcaggttcgtcgatcggcagttcaatggcaatgggtaatatgacattgggtgaaactaatattgattcatcttcagtcaacaacacttcaatgaacaaatatgatagcaatctttcacaaagccgaggtttaacaactttaacaaatgagtatggaactagccatacactaaccccatctggagttatgaatactcaaaagcttgaagatacaacagcgcaatctcttcatacaggccaatcaataagcagaagcaacgaaaaccgatatggacagagtacagattctgtatatggcgttggtgcgacatatgacacagcaactggttcaacgaatacaaactcatataacagatctgaaacatatggcttaacggatgagaggggtgtatctaattcttcagtaacaggagttggaaattcgaaagggtatacgactggaacgaaccaaaacgaatcagatactacacatacgggtgtttcattaagtaagacagattatacggccatgtctgccggagcaaacggaaatttaggcttaggtggtggtgccggaagtggtggtggaggctctgaagaaaaacgtgttgctggctctccaactaatccggggaatgttcaacctgaatctaaaggtgaaggtggtaaaggtggtaaaggtggtaaagctggagttggtattcaagctggtgttggagtctatgcacaaggtcagaaaggtattaactggagtggtacacaagatgaaggtcaaaacagaacttcagcagttgatgagtatcgcggtgtatctaccggagttaattatcgtaatgatctagaacataacaaacatgaaagtcaaaatgaaactcacacctcatcaaatggtcatgaacgttcggccagcctttatgaaaataatagttatgcagaaaatagaaatgcacaattaagttcaagaaatgaagaagcacgtagtacttcttttgcaagctctcattcaatggaaagtggttataactatgcacaagatcctaagtttaaaaaagaagttgctcaacattttggcctagaccaggttcaatttagtaatttaagtccgcagcaacaaacccaatacatgcaagattatttagctaatgaaactgcacgaattaaagagactccaagcacatatgctgacggaaagccaattgaatttaatttgccaagtgactttagatcaaataaaggcaatgtgggaagccgaagtgggatcagtgcggattttgctgaaaattctagcaatattggtactggaattaaacaagtgtcagtgaatacggggccatcttcagcaattagtggtgtgaaaaatagtctggatgatattgaaggtaatatgtcagttattcagcagaatcaacataataaaactgagcacacaaaagatagaaactttgagcttgaagaaaaagtaggagaatggaaacgtaaagatattaaggacacgattgattttgatcctattggtcatgcgaaagaagcatttaccgagttgaaagaaaaggttatgccaaaaaatgaaacccatataaacagtaatggtgcttcatttggccagtggaacagaagagatattgacccaaaaaagtaa

SEQ ID NO: 49219 - DNA, 1428 bp, Acinetobacter baumannii
atgaaaattaaagcattaattataggtgttctatttggtattacggtttctgcaaatgccgatccagcctcaatgcaagaagtttttgaccaaataaatgcgcgtggaaatgttactcagccaaccgcaatccagggccagactatgaattatatgacaggtgggagtttgtttatgcgaactcccaacaccacatataatctagctgctattacccctccttcagctaatgctggttgtggcggcattgacttgtatatgggtggcttcagctttgtaaataaagaacaatttgtagccatgctaaaaaatatcggctcaaatgcattgggatatggctttaaattagctttacaaaatttatgtccgacttgcgataacgttctgcaagctcttcaatctgcctctcaacaaattaatagaatgaacattgattcgtgtgaggcagcgaaagggattgttaatgcagcaacttctactgttgcattgcgtggacgcgaacaatcttcaatgaattttggaacaataaaaaatatcttcagtgatatgacagaagcatggaccaagaataagggaaattcacaacaaacaaatcaaactttagataatttatctaatcaagatccaaatatgaaaaatcatataccggatggtaacttgacttggaaagcattatcaaaaatttcagcattacctacagaccaaaaatacttaatcatggcaatggtgggtacagtagttataactgaagatccaaccaatggaacgcctaaaatagtcgcttatccgcgaagaatcgataatatttctacactcattggtactagtgcaagttcacaagcacaatttccagtttggcgttgtgtcgatggtacacgtgaagatgaatgtacatctcttgttcaagacaacttaacaactaatgaaacattctattcgctagtagatgaaaagatgagattactagcggatgctatttcgcaacgtcgcccaattactgatgctggtggaatcattcaattcatcaatttaacagatattccgatctataaaatcatagcactgaatactcgatatggtggtgatagtactgctgcaatgatggccttagaccagtacaaagaactgatagcagcgaaatatgctcttgcttactttgaaataacttcaaagatggttgaagctgctttaggcaatattattgctggaacggctgatgctgtaactgctcaagaagttactaagattagagaaaccttagataaaacaagagcagacttgaaccaaagcacgcaagttgcttacgcacgttccaatgtctcatttaatatcgcccaggaagttcagcatatggagcgaactttacattcaaatttagctccagctttaagacagtcaattgtcttcgctaacacattagataaataa

SEQ ID NO: 49220 - DNA, 330 bp, Acinetobacter baumannii
atgaaagcaaaattaatagtaatttccttatctttgatttgttctggccctatgttcgctggctcaaactcaatgcaagatgtttttttgaagattaatagtgaaagagaaacagctcattcacttcagaaaaatagattaatcaaagttgaatctggccgtttttgtaatgaacataaagaattaacgtctagtaaaactaagattgcggatccgcaacatttacattctagttcattaaacgaaaggagcagaaaacttaaaaaaccagaattaagtggtactaaaacctctgatgagaattgcgataaaccaattcaagtatcttaa

SEQ ID NO: 49221 - DNA, 813 bp, Acinetobacter baumannii
gtgaataaattaatcttagcttcaatggttgtatttagtgggctaactcagctaacaaaagccaataatgtattggattatgactctgtttggaattgtgatcgaactaaagtcaactggtattgtaataagccaaaagaagaaacgccggttcaggaagtaaaaaaggaaactcctaaacaagctcctttatttgatcctattactgatttaaataaattaaagactgcgactgaacttcgagctgagttaaaaaaacgagaagatatagcagtcatgtatccgacagaacagaacatcaaaaattatcttgatgcatggcatcttgtacaaaacaaagcaactgtatttacagaccaatggagacgagtagtttatcagaatccagactatgattattcattaagaaacccatctaataatgcagcgattaaagttcaagcacaggcaaagcaaacgcaaattgatggatatcttaagaacttaagtaaagaacaaggattgatattcttcttcagatcagactgtccgtactgtcatcaaatggctccaatacttaaacaattatcacaaatgtatggttttgaagtgcttggcgttagtgttgatggagctggattacctgactttccaaatcctgtagatggccgtgcagtggtacaaaaatggggtattgaaaaagtacccgctacctttattgcatctaaaaaaactaaagatcacgcaccgattggatttggtgtaatgtctttaaatgaagtcatagaaagaatttgggtacttacaaatacccaaccaggtcaagatttttaa

SEQ ID NO: 49222 - DNA, 2058 bp, Acinetobacter baumannii
atgattaagaaacatcatgtattagcaacaatattgagttttgcatgtatgtcaagcgtcatacatgcaaaaacagcagaagaggaagggagagattttggccaaaattctattgagtccacatcctctttagtaaattctcaaaatggtcagaatacagtaccaaatttttcaactaacgcacctgaatccgcctattatcaaaatggaatgggaaacgttaatagtattggaaaccagaaagttacgaactgccaaaaccaaaatatgagtggaagcaatcaacttaacttggaatgtgaggctattaatttagttaataagagtgctacatctagaccaatttatgaaattgatccaaaaaaagatcccctagtaaaagactctaaggaaactataaaggtatctggtgaaagtgctacacaagcaagcattgaaggttctacaaatcagttttgtttcaataaagaattcgatgttaaaccagtttttgaaaataaacagtgctcagtattttcaactagttctacagaaagctgcataaacaaaattctctttactgattgtatttctccaataaaagacatgatttgtggagaagatggaagcggaattgatcatactactttaaaagtgactaaaccatttcataattcaacaatcacaatggaaaatggctttttaaaaattggcctatttggaactgatggttctaaaggagtacatactgccgaatatagttttgaagttaagaatctggaatctttggctgaatttcgcctcactgattttatgaataacgacggttcaagactttatatcaatggtaaagaagcatggagttttaattgggggggcgctcattgttgctcaggaacaacgaatgtggatctaaaaccattcatcaaagaaggcattaatacagttagacttgaaaactggaatgcacgcacagattggtggacaagtgtaaatattaaaacaagaattgcgtgcgcatgtaaaaaacaaaaggttaatggttgttatgataaatacaacccgactattaaaccatgcaaagagataaaatcagaatgcaaaaaaacaattgatggcgaatgtgtttatgaagaaaaacaattcatgtgtgcggaaaaaactaatgtgtctgattgtcaaaacttaatagatgctggttgttctcaaattaaaagtgtttgttcatccaaagactcagcaggtaattgcttaacttatagtcaaacatatcaatgcaaaacttcagaagcacgaaaagaaaatcgaagagtatgtgtagaggctaaatgtactgacggtaaatgctatcaagaatcttcagaaccggataaagattttggtcaagcaattgcaatgatggaagctacgcgagaagcgggcgtgtatggcgaaaaagattcaacaggttcgttgagagtattcaatggagaagggggaacatgtactgtaaagctattagctggtcataacatcatgagctgttgtaaagaaataaaagttgacgtttctaaagcttcaaacaatgcaactggaagtaagcaaactcaagctatgggtaataacccggaacaagcagctcagcaaacagaaggctcaacttatcaatatgatgatttatataacgatgattcaatgatgaaaaaccttcagggagatctgactggtggatggcttcaatgtaacgaagaagaacgggacttggccgtaaaacgtggcggtagtttatgtactcatgcgcggacatggtgctcatcaaaaactatttttggttgtactgaagagagtcgttcctattgctgtttcaaaagtatcttggcaaagataattaaccgagagggcagaaaacagcttggtctttcattagaaacttgtgaaggaattactgttgagcaattgcaaaaattagatttctctaaaattgatatgactgaatttcaaaactcagtagtgccaaaaaacgttgatttgggagataaagcagaaaagattagagaacgggtaaataagcaagccgtcggaggttactacagtgaataa

SEQ ID NO: 49223 - DNA, 708 bp, Acinetobacter baumannii
atgaaaaaattaatcctagcatcaatttgtttgttgtcttgcaatgtacacagtgcagattttcctagcgaacaagaaattaaaaaggaaatggataaagtaaaaaatcagactttcaaaaagtctgattgggaaatggctcaagaaaaagcaagaaagcaaattgaaatttttaaaagtgttgaggcacgtcctaacaactttccaaatattaatgttcaaaaaccaaatggtataaatcttgatgacattgcagcaagatataaacgtaaagcagaaaataagaaaaatgttgatggtattttagcttttgcaagcttatctatgcccaaagatgctttaaacaaactagtgacagatgttactaaggctggtggcgtagttgtctttagaggttttaaagacggtaactacatggaaatggcgaaagccatatcccagataggcgttaaatcagccaatattcaaattaaccctaacgcgtttaaacaataccgggttgattcagtaccggctatagttttagtaaaaccacgggcagaagaaaatctagatgaagaaggctgtgtattacccgaaaatcatagcaaaattacgggtgatataagtcttgaatatgccttagaacaaatggagaaaaaagaaacggctgaattgagtcagatcgcaaagagatatctgacctttttaaaaggagctaatcaatga

SEQ ID NO: 49224 - DNA, 1044 bp, Acinetobacter baumannii
atgaagaaattttttactattttattccttttaattttcactaatttaagcttcgccgctgactctggatcaaataataatggatctaaaagcttacgttgcccaggcgaatttgctaatccaattagcgatatctgttggtcttgcatttttcctatcagcatgggaggaatgccattgtggaaaggtggacaagaagataatagtaatccatcgcaattgttctgtagttgtgcgatcccaagaatctatctaggaattcaaacaggtttttgggagccagtaagacgagtagatgtaactcgtactccttattgtatggtttcattaggaactgaattggacgtaggtgtagaagcaccggaaggtgaagtacgtttgcatgatgacaacaataggcactcattttatcaagcgcactggtatacagatccaatcatgatgtggttagaagtgatctatgagcatccatgtactgaaactggatactttgatatcggatatatgactgagttggatccgatgtggaatgatgatgagttgtctgcaattttatctccagaagcagccttattcacaaacccacttacacaagctgcatgtgcaggggattgcgtattagcatcagcaggttttggttcaaatggtctgttctggtgtgctggatgtaatggttcaatttatccattaaatgggaacgttggcgcacatgttagtcatattcaagcttcatcactaattgcacaacgattagcagcaaaaatgcatcgtcagttcctaacttggggaaccaatggagaagctggattgtgtggcgtttatccgcaaccaattatggataaaacagcatataaatatcagatgctctatccagtggcacaaactaaaaaaattaatggtaaatgctgtcagccattcggcagaacgacaagtgtatggggtgccgggaaatcatggccggtaactggcgaacatttctcatatgaattattcagaaagaaaaattgctgtttgggccctatttcaccgttctatgtgtattaa

SEQ ID NO: 49225 - DNA, 639 bp, Acinetobacter baumannii
atgaaattttctaaatatctttttttattaccaattttagcgatttcatttaactctaattccaaagatttaggggttaatggagctgtatataaaattcaagagccggatgcattagagcaaatttatacgaaattaaaggctcttgagaaaaccggtgagttaaagcggaaacagcaagaagctgtttcacgtgccatgaactctgctaaaaacccaaaaccagttgaaaatatttctactgttacagtaaagaaggtcaggttatttgacccaaccatgcacttatctaatgacataaaaactgatgaaggggttgtggttgctagagcaggaacaagtgtaaatccattggataccgtgaccatgactaaaacactagttctttttaaaggctcagatccagaacaagtacaagcggtaaaaaaattaactgaattgtataaaaatcgaattactccaattttagtagatggctcttggttcgatttgactagagcttggaaacgtcaagtctactttgaccagtacggttatatctcaaagcgattacaaattacatctgtaccatcgattgttagacaaaatggaaaaatgcttgagattagtgaagtcccagctaaggagttagtgaaatga

SEQ ID NO: 49226 - DNA, 501 bp, Acinetobacter baumannii
atgaataatgaagttaaaaggtttaaggttgtaaacgtcttactagtgacatttgttttgatgttgattgtcagtgtagggctaatgttatgccaaaaatggtttatctatacggtcaatcacacaacaagcttgagtgggaaagtatatgtaattaaaaaaggtgagcctgtacaaaagggtgatttagttggttttttatggcaaggccagatcaaatatcctaaagacgttatttttgtaaaaattgtatcaggtgttgaaggtgatcgtatcgttgttaaagatcgagacgtctttataaatgataaatacattggtagagcaaaaaaacaaagtgcagatggaaagcttcagctcgaagttatctcatcacaagtaattcctaaaaatgaaatatttgtaagcactcctcataaagactcgcttgatagtcgttacgcaaaggtcggaacaattaacaagcaatatattttggggaaagcttatgaaattttctaa

SEQ ID NO: 49227 - DNA, 396 bp, Acinetobacter baumannii
atgaaactttcaactatgcaaaaaatgactcaaggtttagttttaacaatcatcgtaatagttattgcgggagctatggattattacaatgatatgaaacgtccaaagatagctacgatcgatattctgacactggtaaaagaacatgagaaaaagctaacagacttgttatatcaaggcgttaaaaatcttgattcagcaaatgttgatttagctcaacaatcaaaaatagcagatatcgaaaatcaaaaatttactaagcaacttaatagtgcagttcaaaaaatcagtgatgaatgcaaatgtattttggttaataaagcagcgcttttaagtgatactaatcgtgtaaaagattacacacaacaggttagagaaacaatctatcaaaaataa

SEQ ID NO: 49228 - DNA, 2727 bp, Acinetobacter baumannii
atgactggaaataacaaactaatcaattttagagccatgctcgcaaactggtttaaggtccacgtattaggtgatgatccgacaggtaaaaaattctcaactgtagatttaacgaataagattcttgaaagctacggcatgtatcagatatttaaatacaacatgtttaatgtgaaaagaagtctttattataatgatggcccttccgtaagctttgctctagaaatcataccgcagacaggatcaaatgaggacttcgtttctcgcatagtatctattatttcaagtttccctgcggaaacaggtattcagatattaaacttcggtaatacaatttttgaagatgatcttcaagagtacttggatttacgtgttgcggaatatcagaatggtaaagtgtctgatttcgcaatagaatttgcaaagaatcgaatcaaacatatccagtctcgtaaaggacggccacagttcggaagagactcatattacgttattaaaaaaccaaaaattattctatcagttacacgttcgggtagttataaagacccacaactaattaagcaaatggaagagttgttgcatcagacaagtgctcaactacaacaagctaaattacctaatattgttttaacaccaatgttactgcttaaaataattaagccaatgcttgaccctgagagtttatttagaaccgttccaccagaacatgaattccaagtttctcgctcatactacagtgaagattataatcgtctagaatcaataaaaagtcagttaacaccacgtggtcattcagcaacagttggtgtgtctgaaatagtatttggtcaacctataattgataaaactaagggaactaatagatcagtaagagtctatgattctgaatggattgaagaagatgacgatgaagatctagaagaagacaatcgaattgcatttcgtggttttggagttatgaggtatccaaaattcaaacatctttatgaaatgggaaatgtaattggcgatttttttgaaaattcccttcagtatccatgcccttacataatttcgatgggtattcatatcttagataaaacatcttctgaaaccaaagcaagaataaagcaagctcgttcaacacagaatgctgaaagtaaaatggcaaaatggcagcctgagtatgctgaaattgctagagattggaatgcgatcacatatcacctacataaaggtggagggatgtgcgagctctatcatacaatcgggatattcgctccaagatcacaactagatagttattctgcaaacgttgacaatttatggaagtcaaacggctttagcgtaatgccgttatcttgcttacaactgccacttctttattcatcaatgcctatgattttgacaaaaaaggcaagagatgatttgaagaaattaaagctgattacgactaaaacaactattaatgccgtagatatgatgccaattttgtcagaatggcaaggtttcggtaaaccggtaattatggtatttggccgcagaggaacaccttgtttttttgatttattttcaaataaacaggggaactataatttttatatttgtggtacgtcaggcgctggtaaatctgttttctctcttgaaattttggcagcttacaaaagcttgggcttcaaaatatatattattgacgtaggacgctcatttaaaaacttcgtagcgctcggtaaaggacaagcaattgatttcgcaaagcgcgaaaagatttgtatgaatcctttcacatggctagaggtaattgaagatgaggaactttcggaaaaagaaggaaccttaaatacatttgcccaagagatgaaaatgctcttgcctatgtatgcaaaaatggcttcaccatccaaaccattagacgattacgataaagctctcctttcaagagctattagagagacatggttaaaattccgcaataacaatggcgtagaccaaatctctgacttcttgaaagaaattagagatcaaaacggaaatattgatgcacgaggttgggctcttggtactcagttagaaaatttcaaaacaaacgggatgtatggaagttactttaatggtaaagccaacatcgatatgaataacgagatgatatatctcgaactggaagaactaaaagactcacctgaattaaaaacggttgtgcttttcggtgttatgaaccgaatcatgcgagatatgtatttatcgcgatctcaagggaaaatcgtgtttgtagatgaagcatggcaactacttgatgatacagaagaaacagcagcttttattgaagaaggttatcgtagagcacgtaaatactttggttcatttggcatgggtactcaaggtattgatgacgcatttgcgaatgatgctgctagagctgcatataattcttcagactggaaattcttcttacgccaagatgaacaaagctttgaaaagttacttcaagagaaaaaagcgaacttttctgaagctgtcattaaacaaattaagtcaattgaaagtatccacggttggtattcagaaattatggttacttcaccaaacggtcagcacatcgtaagacatgttgcggatccgttttctttagctatggcatcaacaaacaaagacgactacaacttcattgaagaatgcacgaataaaggcatgagtatgacagaagcaacatacgctttaatgcgtaaaaaagaggctgaagaagtatga

SEQ ID NO: 49229 - DNA, 645 bp, Acinetobacter baumannii
atgaaaagaaaaggtattttactttgcttggcaatcaatctaagtggatgtgcagcatttaacggagggttcgacggtttaaatggtcaaagctcattttcatgcaaagcgccagatggaattttgtgtgactcaatgtcaggtgtaatggcgaatttgaatgcaaacaatttgccgtcacagcaggttaaacatggcaatagtaaagaagtaattgcaaatacatatatgcagcgtacacgtgcgactaaagataatgcaatgccagtagctccatacgcagatgaaccattactacgccaaccgaaaactctcagaatttgggtagctccgtgggaatcttcggatagaactttattcgatcaacaatatttctatctagtaatcgacaattggaagtggatgattgaacacaattctcgacgtctacaagatgcatacgcaccaattggagccccaatttcaaactattcaagtccagccattacagttgcggatccgcaatctactaaaacaggttcagatggtcctataccagtaaatgcttcagttaatagccagccaaatagtaaagaaattttgaatggaataaatactgaaataaaagacttgaatgtcgatatctctaagtttactagacagtga

SEQ ID NO: 49230 - DNA, 261 bp, Acinetobacter baumannii
atgaaatatttaattatttgtccattcattcttttactttcaggatgcagtgctctagcaacgagcccttatcaagaaaagtgtttaacagtcaataactcaaaaaatgttaatcaagtaatttctaagcttgaggtacatcttcgtccacctgttaagacaactaagaagccgaatgaagaaactaaattcaatgaatcaattttggctttccaaaatgaaaaagccgttgattcacatacagcattggagaatttataa

SEQ ID NO: 49231 - DNA, 723 bp, Acinetobacter baumannii
atgaaaaaatttttattaacttttgccgtagcaattagttcctattcaatagcatatgcagatgtagcagaagatattaagtctaatatccaaaaaaactatccggcaactactgttactcaagtgaataaaactcctttaaccggcatatatgaagtcgtaatgggtagaaatgtggcatataccgataaagatggtagatacttcatttttggaaatttgtttgatatgaaaacacaaacagatttaacaacgactccaacaagttcaaacatagttgaagttggtttcccgaatgctgatcgtttaaaagatgcaattaaaacagttaaaggcaatgggaaaagaaagctcgtagtatttagcgatcctgattgcccatattgccaacaattagaacgtaatttgcaatcgattgataatgtaacgatttatacattcctttatccgttagagagtattcacccaactgctaaaacaacagcagtatcaatttggtgttctaagaatcctggtaaagcatttcaagattacatgattgaaaatattaagccttcatccaaaaattgcgctcacccaatagatcgtaatattgaatttgcatcaagtatgaatattcaaggtacaccttcattaatatttgaagacggttcaatggtgcctggagcagtgggtgtttctgaactagaacgacttctcaattcatctcagaaatcaaaataa

SEQ ID NO: 49232 - DNA, 1317 bp, Acinetobacter baumannii
atgagtaacgatatcgatttagaaaatcctaatgacaaactcaagaaaaaacaaattaaatggttggccatattaggcacaatattattcattattgttgctattttcttgttttctggaagtccaccagaagaaacgaataaaactcaagcacctgaaaatgcggtaaatgtggaaaaaccgggtgatgctgaagagcaagataaatggagacaaacggccgcaattgatcaagaagctcaaaaaaagcaaattgatgatttaactcaaaccgttaactctcaagttgctcaaaatgatgcgttaaagtcagaactatcaataatgaacgagcgtattagtcaaattgctaatcgttccgaatcaagagtggtagcacaaccaacaaatacaaatccaccaaatcttgggggaatagctggtacatcttcagcttatccaaataaacaaggattgcatggacaaagtattctatcagatccaaatggaactggtatcgatcctcagacaggcgagcgaatacctttaccaaataatatagctccagttaaaacctttggcattattgacatgaataagtcaattgatgaacaaggaaatacaacatctacttcagttaaaagccaacgacctgagaaaacaacatttatcccggatgggagttttgttcgtgtcgtaatgattaatggcgtagatgcaccaactggtggacaagcacagtcggacccaattccagttgtattccaaacagttgggaaattcgatatgccaaataattataaaatgaacatcaaaggatgtcgttttgtaggagccgcttggggtgaattatcgagtgaacgtgttaaagcaacaattcaaagtggtaactgcattattaatggtcaaacagtaccaattcaaattaaaggtcaagtcgttggagaagacggcaaaactggtattcgtggccgtgtagtaagtaaacaaggtcaaattcttgctaaagctgcattagcatccgcaatggaggctataggtggactgtacggtagtacagttggtacagcaagccaatcggcgctaggtactgttagaacgatttcaggaagtgaactgaagcaagccgcagtaggtggtgcgatttcaggtggagcagaaaaactttctgatttctatatgcaacgggcaaatgacttatttcctgttattgaagttagtgcagggcgaactttagagattgttgttcaacaaggtggcacagtagcgaatcaatttttgataactaaaagtgcaactccaatgaatcaacaaaaacgcattttaatggatgactaa

SEQ ID NO: 49233 - DNA, 723 bp, Acinetobacter baumannii
atgaaattgcaactcagtaaaattgcattgtttatatcttctatcttcctgactacatctacatttgcggctcaacatattactaaagctgatcaagaaactgttcaagtaactgtgtcgaatacagagccaaatgtgcttgttgttgatggaagacgaattgttaatttagtgccatcagatgtaacagctttggataccttgccagataaagagcaagggactctctattttaaaatatctccatatttccagaatacacctataactctatttgttactgatgatgaaggaacccgttacaagcttgtattgcagccacgtagcgttggggccgaagaggttgtattagttccgccaaaaccaggtgcgggcacaagcaaacgatctcaatcctatttacagcaaataaaagaattgatgtatgtcatgggagatgatgccgaaaatcctcaagagacacttgccgtagacgggatatcccgttcgttcgtaaaagcagaaatccctttgtggaaagagtctaaatttgttttgttgcgtcgttacgataccgacggtatgtatggcgaaatgtatcaactaactaatttaacaaataaaacaatgaatttgttagagcaggaattttatagaaaaggtgtaagtgctgtttctattcaaaatttaacactaagccctggcagatcgacatttgtttatgttgttagagaaaataattag

SEQ ID NO: 49234 - DNA, 579 bp, Acinetobacter baumannii
atggattcagaagttggaatagcatcaaatgaaagccttaattcaagaaatagatcacagacttatgtgatcttttctttaataggcttacttactttatcaataattgcaaatattgtacttgcacggagtggcaaaacaataattaaaccttcggataattcaggcccaacgtatatcttaggaagtacttcggcaaataaagaatattatttagatttttcaaactatgtaattaattatctattcaatgttacaccaataaatgtatccaagaactttgaaaaaattctaggcattacatgtgaaccatccttcccacaaattcaaaaatatttaagtcaatctgaagcacaaattaaacgtgagggccttaccagtgtgtggtcatcttcaggtgctttcacttttcaagaagcagataaggccataaccattgaaggaacaaggaaaacctatttggcagatcgtttagtctctgaaaaatcacaaaagattcaaactaaatttgtgatgagtaagggaacgatatgtctttattcattaaatgaggtgaaagatgaaattgcaactcagtaa

SEQ ID NO: 49235 - DNA, 294 bp, Acinetobacter baumannii
atgtcttcaggtgtagaactttctcattatgttccaacgtacatcgatgctaaatcaaagttcttaatgttcgatcaagatgttgctttagcttcatttctgatcttcattctgggttttgtttttggtcatcccttcttgggattctttgtgggattcgcaatagcttattacttcaataaagctaaagcaggtctacatcctgattatatgctccacctaacttactgggtggctaactcaccgaaattaaaggagttgcctgaatcaaacaatcgccactttttcggatga

SEQ ID NO: 49236 - DNA, 354 bp, Acinetobacter baumannii
atggaattagttgttccagctcaaacacatcaaatttactttgatatcaaaaaactaaaacgtccagtaacaatcgccttgatggttgtcacagcaatgcttatttggatgactttatcaaccgcaggtactggtacaggtgttggttctacatttaacacttgggcgacaacagtggaaggctggattaaaggcccatacgggaaattagcaattcttgcgagtttattattcgcaattggtgcattcgcttggactcgtgatcttcgcgttattgtaattccagcagttgctgccgttgtagttggaattattgtgtcgttagtaacaggttcgtttacagccgttatctaa

SEQ ID NO: 49237 - DNA, 237 bp, Acinetobacter baumannii
atgaatagattttttttgcttctactatgttgcggatccgcaaccttagcagtagcaaaagaacaaaaaaatgaaacaaaacagcagagtatgaatgaacctaaccctatcacccgatatgtgaatgttcttcaaaagggtgaaggcagagaatcaaaatttgttctatgtgatccagaaaataaaagttgcgttcaacaagagcgcagtgaaaagcatttggcagtagccaaataa

SEQ ID NO: 49238 - DNA, 627 bp, Acinetobacter baumannii
atgattgaagctatgcaaagagctaaaacttacaaaatacataactcaattataaaactttcagcaatcgtatttggagcttgtgttacatcaacaacatatgctgtttgttgggatgaagccgcaagtatgtatggtacggatcctattttattaaaagcaattggatggaaagagagtagaggccatgttggtgcagttggttctttacttaaagatggcaatagagcattaggactaatgcagataaataccattcatttaccagctttaagaaaacaaggaattactcgtaatgatttattcgatccttgtacttctcaaaaaattgcttcatgggttcttgctgattgtttaaaaaaatttggtgaagtctggagagcagtagggtgttactacggaggacctgcttctaaagcatatacggcaatgaatcaatattctgccgatgttagaagatactttgaaggctataaaagaaaagcgggcttaccagcagtttataccccattacaacctcaaagtataaaagctcagtcagttaattataacgaagatattccaaattattcttcagtgaatcaaacaattaagaaaacttcaaatttccaaataattcgattctaa

SEQ ID NO: 49239 - DNA, 336 bp, Acinetobacter baumannii
atggcaaaaaaaggcataaattctttaaatctcattaatagttatgagtcaaaaattatgaatgttaagttatcaactgttgaagcagctctcaatactccgttaaaaccattagaattaaattccgaagtaaaatgtcctaaatgtaaaagtcggaatctcatatgcagcgttagataccaaacagcagatgtaattcattttgaaaatggatgttttcaattaaaggaattagaagcatcaaagattttcaaaaaaattgatctggaatgtaaagactgtggcaataaatttgaaaatgaaaaagttaagacacccaatgaagtgttgttctaa

SEQ ID NO: 49240 - DNA, 432 bp, Acinetobacter baumannii
atgcaaagtattgtcaaacatatatttagacactatttggtagctttattaagtttaggaatatttattctgagttactttgttgggatggtatttggtaaattgctatttaaaaacatgaatgccgtagagatcggatctatttttacagcccttgccgttaatttttacctctccctcctactgtgtaccttcacttttgttgggcaattttttttcaattcattaaaaaaaattgcagacacccctttccaaaatctcttaattcttttaactggtagtttttggatggttgctacacgaactcctgaagtgattacgaacaatattcccttatataactttaatattagcctaataactttatttgcatttatgttgttcattagcaattcaaaatttataaaagcttttatttctaaacaagaatga

SEQ ID NO: 49241 - DNA, 639 bp, Acinetobacter baumannii
ttgaataacgtagctcgtatttacatgcgtgtcagtacagagaaacaagatcttgagcgacaagagaaggtgataaatgatgcgcgaaatgctggttattatattgcagcagtctatagggaaaaagcttcaggtattacacctgatcgtccagaacttaataggatgatacatgaccttcaagccggtgaagtagttattgcagagcgaattgaccgtattagtagattaccattacctgaagccgagaagttaattgttgcaattaaagaaaaaggtgcaaaactttcaatacccggtgtaattgatttatctgaattttcaaaagatgctagtggaatttctaaaattgtattagatcaagtacaagacatgttgctaaaaattgcattgcaaatggcacatgaagattatttgttaattaaaaaaagaagggaagagggaattgaacttcgaaaaaataaaggtctttacaatggtagaaaagctgacaaaaaacttcacgataaaattgtagagttaagaaagcagaatattagtatttcaaaaacggcattaatagcaaattgtagtgtttctttagttaagctagtttggaagagatatagcgaatcaaattcatctcaagctttaaagtaa

SEQ ID NO: 49242 - DNA, 660 bp, Acinetobacter baumannii
atgatccatgaaaatatctacatgcatgatgtaatcgatatattcgatgtttatcaaaaagacgatctgcttaagaaatccaaactaggactcatgaaaaaatgggatactttctcaattatagccatatttttatccataattgctttaatcggtggttccctatggttagttggtttagttagacatgaaaaatctaataatgttgatacagcatttatgatagcaattagcggacttgtatcgatcattattaattactatttaaataaaaaaatatcagaaataattttaagaaaagttttttattcttcaaaagaaaaagaatttaaattatctagaccaatgtatattaacttagtattactttcagattacgaaagatgctctgcccttattgaaagagaaataaccgaagatatgtataaaaaggtaacatatctaaaagaaaaatataatctcccattaaaaaaaccgctcgaaaagatcatgatagaaagaggatttatatcatattttgactatgaatttttatttattgatcatttttacaaaagattcaaagacatggaattagaaacaataaaagaatcaaagatcttagaagcaagagaatgtgtcggtgcagcctataatatcgctaatgataataaggagtaa

SEQ ID NO: 49243 - DNA, 693 bp, Acinetobacter baumannii; identical to SEQ ID NO: 46554

SEQ ID NO: 49244 - DNA, 612 bp, Acinetobacter baumannii; identical to SEQ ID NO: 45949

SEQ ID NO: 49245 - DNA, 372 bp, Acinetobacter baumannii; identical to SEQ ID NO: 45948

SEQ ID NO: 49246 - DNA, 642 bp, Acinetobacter baumannii
gtggttgttattttaggcccatcgggctgcggtaaaagtactttattgcgctgtattaacggcttagaaccgattcagggtggcgagattcgtttaacaggctcaggtgttttgggcaaagatgtggactggactaatgctcgtcaaaaaattggcatggtttttcagaactatgagttatttgggcatatgaacgtcattgacaatattttgctcgggccacttaaagtacaaaaacgtcaccgcgatgaagcagaacaagtagcagatgagttgctaaagcgagtcgggctatatgagcgaaaacttgattatccgcgacaactttctggcggacaaaaacagcgtatagccattgtccgttcactggtcatgcaacctcaagtgattttacttgatgaaattaccgctgcgcttgatccggaaatggtgagagaagtgcttgatgtagtactcaaattggcgaatgaaggaatgaccatgttgattgtgacacatgagatgtcctttgcccgtaaggttgctgaccgcatcatttttatggataagggcaagattattgaacaggcttcaccagaagaattttttgaacagccaaaaacagaacgagcgaaagctttcttaaatattttgtcgtactaa

SEQ ID NO: 49247 - DNA, 1392 bp, Acinetobacter baumannii
atgactaagagaattagttttaacgcttttgaaatgaattgtatagcccatcaatctcctggattatggcgacatcctcaagaccgatctgttgaatataaagatttagaatattggacagatttagcgcaaattcttgagcgtggtttttttgacggtatttttattgcagatgtgcttggtatttatgacgtttatcatcaaagtgctgaacatgctttaacaggtgcagtacaagttccagtcaatgatccgctacagattgtgccagcgatggcagccgtcacaaagcacttgggttttggtgtcacgacttctatttcctttgaacatccttatccttttgctagacgtattagcacgctagaccatttaaccaaagggcgagttggttggaatatcgtgacgtcttatttggaaagcggttcgaaaaacttgggcctaaaaactcaggttaaccatgacaatcgttatgatattgctgatgaatacttagaagtcctttacaagctttgggaaggctcttgggaagaaggttcggtacttcgtgaccgtgaaagcggtatctttgctgaccataaaaaagtgcatccaattcagcatgaaggtaaatactttactgtaccgggcatccatatttgtgagccatcaccgcagcgaacaccagtactttaccaagcaggcgcatcttcacgcgggcagaagtttgccagtcaaaatgctgagtgtgtattcatcgcagcgccgtctaaaattgccactaaaaaagtggtacaaggcattcgccaaaaattggtccaagaaggccgcgacccgtactcagttaaaatttatgcacttttgtcgattgtcactgatgaaaccgatgcaaaagcacaggctaagtttaaagaatatcaaagctatggaagctatgatggcgctttaacattgctttctggctggtctggtgttgatttttcacaattccagccaacggacaaagttgaatatattcaaactaacgcgattcaatctttattagattcttatgtaaatgcggacccagaacgtgtttggaccattgaagaaattgcaaattggaatagtttaggtggtaatggacctgttcttgtaggttcggcagaaaccgtttcggatgctctacagcaatgggttgaagataccgatgtcgatggttttaacttagcctacattttggcgcatcaaacctttgccgatgtagttgagtttattgtgccagagttgcaaaaacgtggggtatatcaaacctcatatgcacaaggaacattaagagaaaaactatttggtgctgggccatatttgcctgaaaatcaccgaggtgcaaaatatcgtaatctaaaagagttaaaacttgctgaggcgagttaa

SEQ ID NO: 49248 - DNA, 174 bp, Acinetobacter baumannii
atgcctgagatacaaattattgccaaggataatcataaaaccttggtaaccacagagggaacttctgcaaaactttcagaagcgtcagttgtgttggtgaaagtggctgccagtgatgtattggtagtgaatagggagggtaccaatgcagtcatacgtctgaaaaatggctag

SEQ ID NO: 49249 - DNA, 753 bp, Acinetobacter baumannii
atgactgctctaaatcaatatggaatgagtttagaaattacgccgcataatggatggtctcagcggttttgggaggatcttttaccagtgaaggagcgggtgagtaaacatccgttttttactgaaatggccaatgggggattgagcctagaaagtttccgttatgctttacttaatttctatccattagtagcgcatttcccgtcctatatggctggtgcgttagctaaagcaactgcttttgcagaacctggcgttactgaaacaagagattggttaattcaaaatattaaggttgaagagcgccatttacagtggtatcgggattgggctagaggttttggattaacggtagaacaactcgatagtgttcgcccaccagcttcgatgaatgcggtgaatcattttctttggaatatgagtcaccgtggcaacttggctgaatgtctggcagcgaccaatttggcaattgaatgggcgacaggtgactggtctattcaagtctataaaggcatacacgcttatacggatcatccggaagttaccattgataagcgttctttagcctggttacgtgcacatgctcattatgatgatttacatccttatgaagccatggagctgattaaacgtttgtgtaatgaacgtcctgattggcagcaaaaagcatttcatgcggcggaagaagggctgcggtattatgaattagctttagacgattgctatagagtacagcttcaagcctctgcttga

SEQ ID NO: 49250 - DNA, 1206 bp, Acinetobacter baumannii
atgcaacatcaaattaatggtattgctttaccaaatgaacaaggattttttggtgagtatggaggtcagtttattcctccgcatttaaaagaagcaatggatgaaattaatgttgcttatgaagaaattcgccatacaccagaatttcaaaatgaattagcagacctctttgcaaattatgtcggccgtccaagtcctttattttatgcaaaacgcctttcagaacagttaggtggcgcacaaatttatttaaagcgtgaagacttaaatcatacgggtgcccataaaattaatcactgtttaggtgaggctctacttgctaaatatatgggcaaaaagaaagttattgccgaaacgggtgcgggtcaacatggggttgctttagcaacagcttgtgctctagtgggtattccatgtgaaatccacatggggcaagttgatattgaaaaagaacatccaaatgtggtcaaaatgaaaattttgggcgctcatttggtgtcagtaactcgcggtacagcaaccttaaaagatgctgtagatagcgcgtttgaagaatatttaaaagatcctaaaaactttatttatgcgattggttctgtggttggtccccatccatttcctaaaatggttcgagattttcaatcaattattggtaaggaaattaaagagcagacgcatcaacgatttggtaaaaacccagattatgttgtcgcatgtgtcggtggcggttcaaatgcaatcggtgcctttacagcttttttaaatgattcagatgtgaaacttgtaggagttgaacctgctgggcatgggctagatacaaatatgcattcggcaaccctaacattaggtaaaccaagccaaattcatggtatggcatgttatgttcttgaaaatgaggctggtgaacctttacctgtgcattctatcgcttcaggattggactatcctggtgttgggccacaacatagtttcttaaaagatttaggccgtgtggaatatagcattgcaactgaccaagaatgtttagatgcgtttatgaccttatcacgagttgaaggtattgttcctgcgcttgaaagctcacatgctgtcgcatgggcaatacgtgaagcgccaaaactgtcgaaagaaaccatgatcgtggtaaatctgtcgggtcgtggcgataaagattctgattatgtggcagaaaaacttaagctttaa

SEQ ID NO: 49251 - DNA, 1188 bp, Acinetobacter baumannii
atgtttgtgcggttattttacaccttacgaaaatatggtgttccagttacgactcgtgaactgattgacttaaatcgtgcagtaagcgaagggctagtttttgccgatcaagaagagttctatcaacttgctaaaaccattttagttaaagatgaacgtttttttgataagttcgatcgtgccatgaaagattactttgatggcatagaaacctttgatattgatgagttactcaaacaagttcataaattaccaaaagactggttcgacttagaacttctagaaaagcatttaacaccagagcaaagagctgaacttcaaaaagcaggttctttagaagaactgatgaaaatgctagaagagcgtttacgtgaacagcataaaaaacatcaaggtggtaaccgtatggttggcacgggtggaacttcaccttttggggcttttggtgaccatccggaaggcatcagaattggtgggccgggccgtaagcgttcggcggttaaagtctgggaacagcgtaaataccaaaatctagatgatgaccaagttcttggtacccgccaaatgcaaattgctttacgacgtttacgtaaatttgcaagacacggtgctgccgaagagttagacgttgacggtacaatccgtgaaacggccaagcagggtattcttgacgttcaaatggtgccagagcgtcgaaatcgaatcaaagtgctcatgttgtttgatgtaggtggttcgatggatgcacatattgcccaatgtgaaaagttatttagcgcagctaaaacagaatttaaaacgcttgaatacttttatttccataattgtctttatgactatgtttggaaagataactaccgaagaacagctactcgcatgaacacatgggacttgtttcatacctatggacgtgactatcgtgtaattgtcgtaggtgatgccagtatggcaccgtatgagctgaaatcggtaggtggctcggttgaatatatgaatgatgaagcaggtgaagtttggttacgtcgcttacgtcagcattttgataaaacagcatggttaaaccctgaaacagaagggtattggcattacactcaaacaattggttggattaaagagatttttgaaaaccacatgtatccaatgactctaaaaggcattgaggacttaacgcgttacctttctcgataa

SEQ ID NO: 49252 - DNA, 1584 bp, Acinetobacter baumannii
ttgcttttatctatctggctaggtttatttctgaatataggtttttttaaaaaaatccatcaacttacaccttataatggtattaagtcagttcttttcttaggggcgacattagttattttaatagcggcatataatttaatttttcaattaataaattggaaatggactgccaaaatctttgcaattttattgatatttattggtggctttagctcttattttgtaaacacattgggtgtcattatttcacccgaccaaattcaaaatatggtgcagaccgatgtttcggaatttaccgatctaatctctttacgctttgttttatggacagttttttttgttattttgcccatttttttaattactcaagttaaatttaaacaagaaaaagcatcacggttgttattgaagaaagtattctcactggtagcttcatttgcagtggtcggtgttttactttttacttactatgtcgatttcgctgcaatatttcgtgagcatcgtgatttaaaagggatgatttcaccgcaaaatagtatttcatcgcttatgtcttactatcataagaaggctccgaagaaaaatctgcctcttgtgatatatggacaagatgctcatcaagttcagcaagtacaaaagaacctccctaagttaatgatacttgttgtaggtgaaacggcacgtgccgaaagtttctctctaaatgggtatgcaaaaaatacgaatccggagctttctaaacaagatattttcaacttttcgcaagtgagctcatgcggtacggcgacagctgtttctgtgccatgtatgttctcgggtatgccacgtgtagattatgatgagcaattagctagtcaccgcgaaggtttattagatattgcaaaacgtgcgggttaccaagtgacttggattgataataactcgggttgtaaaggtgcatgtgatcgcgttgaacaataccagattccagaaaacttaaagaaaaaatggtgtaaagatggcgaatgttatgatgacattctcattgacagcttaaagcagtatttggctactattgccaaagatgatgatcgtccgcgtttgattgttctgcatcaagtgggtagtcatggacctgcatattacaagcgtgcacctgaggcatatcaaccttttaaaccgacttgtgatactaatgcgatacagggctgttcgcaaactgaattgctaaatagttatgataatacaattgtatatacagaccatgtattaagccaaatgattaatactctaaaagaaatatcaaagtatcagacaggtttatggtatttatctgatcatggcgaatcaaccggagaacatggtttatatttacatggttcaccttatgcaatcgcaccgagccaacaaacacatgtaccaatgattatgtggttctctgaaagttggaaacaacataatcttgctcaagtgaattgtttaagccaacaaactaaacaaaagttaagtcaggataatttattcccaagtttgttaagtttgctggatgtaaaaactcaggtagtaaataacaaacttgatatgttgagccaatgtaaataa

SEQ ID NO: 49253 - DNA, 864 bp, Acinetobacter baumannii
ttgtgcaacaaagcctattcaactaaaaagattcaacattcgatttggaaatttgaacgttctccaagtcttattttttttagtttaatttttgtgattactttcggaatcagtttagtaaaatggggagttcccgccacttcccattatgttgcttttaaattaccagagaatagtttaaagaaactaggagatgaagccgagaattatgtactaaataattggactgcacccagccaattagctcaaactcaaaaagaccaaattactaaacaatatttgaatactgttgctgaaaataaaccagccaaattagtgttccgtaaaggtaatcgattaggggcaaatgctgtagcactacccaataatacaattatcattacagatgaactgattcaaatagcccataataatcaagaaatattgggagtattagcccatgaacaaggacatttagtttatcgccatagtttacaacaaggattaactagtttaggactaagtgtattatacattgcaatgacaggtgataattcagatttatttacgtcattacctgctgctatgcttggtgcaaattactcacgtaaatttgagtccgaagccgatctatatgcattacagctgatggataggaaaaatatagaagtctcacactttgcaaatttcttacaacgtttaaacgataaaacagaagaagatctaaataaagcaagtcagtccacctcaccaacctctcaaaaagaatcttcagataataagctatctatagctgttgttgatgctttatcttctcatcctgcaactgaagaacgtattcgaatggttcatgattttgagaaaaaacaacacgctaattattaa

SEQ ID NO: 49254 - DNA, 792 bp, Acinetobacter baumannii
atgaaaatctctcaattgttcttgggtctcgttgcttgttcaactgcatttgcttatgcaggaattgatggtatttcgagtaatgaaagtaacatcaaaatcggtgctgctgccaatgcaagtcatccgggtggtgtagcagcggtgtcggttcaagctgcgggtgcgccatataacgcttttacaggttttagttcgttaaaaggtttggctcaggcttttgctgctcagggaacgagtaacaccaatgtaacggttggcagcaaaacctttaatatttcgcatattccagtgtctgcaatgccaccttcacacagtgcattaggtaattttaactttggtcaggtgggcacacaggaagtctattttggtgaatggtggaaagcgggcgacacgccggcaagcgcgagccataccgtttactacgcgggtgataataccaataccactgttccaaccgcgggtactgcaacttataccgttgcagggattaacggctctggaagcaatctgttaagtggtacgttcacggcaaattatggcgcgggtacacttgaaggaacacttactggaactggtacggctgtttcatcattaagcctagatggtgtggcatttaacccgggtactgctgcgtttgcaggtttggcaacggctaacggtacggctggtatcgacaactctggtgtggtgcaaggtcaattctttggtgcaaatgcttcggctttagcgggtattgcccagtttgataacgtgtcttacaacactgcatttggcggtgctaaaaattaa

SEQ ID NO: 49255 - DNA, 1017 bp, Acinetobacter baumannii
atggccatggataaaagcaaacatcaccaactggttgaagaagccgcgcattggattgttcaactgagttcggatgatgaaagctcacgaaaaaccgccaagcaaaaatttgaagagtggaaaaaaaccagtgagcaacaccgccaagtggctgctgatattgaacagtgtattggttcaattcaaaaactttcccaaaccagcggacataaaaaagtcactaaagttgcccttaaagctggcctaaactcaggcaaagcttataaacatttacgggcaggaacagcttttgccgttgtgtttgttgccatgagtggggcgttattttatttaactgacacgacagtagcctatgtgactgccgacattcaagggcaatcggggcagtggaccacgcaaaccttaccagatggttcacgtttaattttacgtggtaaaagcgcagttaatcttgattttaaaaccaaccagcgagtggttgagttggtgcaaggtcaaatttatgtcgatgttgccaaagataagactagaccctttttagtcaaaaccagtcatggacaaattcaggcactcggcacagcttttagcgtaacctatgacccttcggcaaccgaactcaacatgttgcactcaaaggtaaaagtagaagccacacaggctaaaacgacccaattgcacgcgactcgtcaggctattgttgaagcaggacaagccattaaaatggaccaaaatggcgtacaaaaactgcctgcactgaatgtttataacgaacagcaaaaatggcaaaagcatcagcttatggtggaaaacttgccgctgaatcaagtgctacaagagctagaccgtaactacaaaggcaaaattatttttaatgatgtggcgttgcaacatgtgcgggtcaatgcggtgttgcctttagaccaaaccacagaatcgcttaagcttttggctacggtttttccagagctgaaaattaagcaaatcacgccgtttgtggtcatggtttctttaaaataa

SEQ ID NO: 49256 - DNA, 1722 bp, Acinetobacter baumannii; identical to SEQ ID NO: 45665

SEQ ID NO: 49257 - DNA, 336 bp, Acinetobacter baumannii
atgatccgcattgatgaaatctggttgtctactcagcccatggacatgcgtgcaggtatggatacgaccatggctcaggtggtgagagcctttggctacatcaaaccgcattgtacttacctgttctgtaataaacgtggccatcgcatgaaagtgctggtacatgatggattgggcatctggctgtgtgcccggcggctggaacagggcaaatttcactgggctcaagttcaccaaggtgaaaccgtggccctcagcccggaacagttacaggcattaatccaaggtttgccctggcagcgcattggacgacagcaggtggtgacgatgctttaa

SEQ ID NO: 49258 - DNA, 384 bp, Acinetobacter baumannii
atgaacatggatatatattcagcaacacctcctgttgctaaaaaacgccgaaaatacagcaaagaattcaaactcagtattgtcaatgcctgcaaaaatcctaatacctcgatcgcttcggtcgcactgcaacatagtattaatgccaaccttgtcagtcgttggatcaggatcttcagccatcatgagggtgccgtgcaggatcctactcatgtgaatccagcatttattgctttgccttacactgctgcaatcagccaacctattgatgagaggatcacgttgtgtatcaccgtgcctcatacgaataatgatattcagctaaaatggcagacatcagaaatacctgccttggcagaattactcaaggcacttgcaacatga

SEQ ID NO: 49259 - DNA, 699 bp, Acinetobacter baumannii
atgaatatcctgattgttcatgctcatccagaacctctgtcttttacaacctccctaaaaactacagcacagcaaacctttaaaaaattgggccatcaagtagaaatttccgatttatatgcaatgcagtttaatcctgttgcctctaaggaagattttttagaactcaatcaacctgattattttaattatgcattagaacagcgaaatgccacaaaacaacaacttttggctactgatattcaagcagaaattgacaaagtaaaacgcgcagatctaattatcttgaactttccactttattggacttctgttccagcaattttaaaaggctggattgatcgtgtatttgtctctggacttttttatgggggtaagcggttttacaaccatggtggcatggcaggtaaaaaagcaatgctctgtttaacactcggtggtagaacacatatgtttggggaaaattctattcacggaccaattgaacattatctatcaccgattcaacgcggtagtttggcttatactggctttgaagttcttcccccattcattgcctaccatgtaccttacattagccaagaagcgcgtgaaactattcttgaggactatgtcacgtatctcactcaccttgaccaacttgaacctttaaaatttcctaaacttgaagaatttgatgaaaagttatatcccctctaa

SEQ ID NO: 49260 - DNA, 783 bp, Acinetobacter baumannii
atgcggatgggtgagaataataaaaaaccgaagaaaggttatgtctgggcctatgccaccacacagtataatccagttcaggcggtgatctatgactttcaggatagtcgttcaggccagcatgctgaagagttcttgaaaggctggcagggctatctagtctgtgatgattacagtggttataaagcacgttttaaatcaggccaggtgattgaggtagggtgcatggcccatgcacgtcgtaaattccatgaactgcatgtaactgggaaaagtcaggttgctgaacaggccttagtgctgattcagaaactgtatgcgatagaagcagaactcaggaaaaagaccgatggtacagcggaagaccgccgcgaataccgacaacagcatagtcaaccagtgatgcaacaactatatgaatggctcaaccaacatcatctgacagtgccatcgagttctcccaccgccaaggctatcaattacactctgaagcgttggccagccttaagccgctatctggatgatggcaatctaccgatatgcaacaattgggtagagaatcagatgcgtccctgggcgttgggacgcaagaactggctgtttgcaggttcgctgcgcagtggtcagcgagcggcaaacatcatgactttaatccagtcagcaaagctgaatggcttggatccgtatgcctatttaagtgatgtgctgaaaaggttaccgacacacaaagtgacccaaattgaagaattgctgccgcactgctggaaacctaaatcgaattaa

SEQ ID NO: 49261 - DNA, 1557 bp, Acinetobacter baumannii
atgcataaaggtatacgtcaatctatggcatggctccactcgtggactggtttaatttttggatggctcgtatttgctatttttttaatgggaagtttgtcttattaccgccatgaaattaatttgtggatgcaaccaccccttgcacaatttgaaataaaacaagatgtggcaattaaaacggcatatcaatacttacaagaacacgcttcagatgctaaatcttggtatttaactgttgctacacctgaaagtccggtaaatacgatgtattgggaaaaaccagatggtagttatggaaatgcaaccctcgatgcaaacactggtcaagaattaaaactttctgcgactgaaggcggtgactttttctaccgtttccattatcaactttttggtgtcccgatattaattgggcggttggtcgtatctttagcagcttttattatgttgattgccttaatctcaggcattattactcataaaaaaatcttcaccgatttttttaccttgcgtacctttaaatcgcagcgctcatggttagattttcataatgtttcatctgttattgcactgcccttctttttaacagttacttttactggcttggctattttcttctatctatatttgccttggggaatgcaaaaactctatccagagaatccatatcaatatttcaatgatatacgtacaaaaacagtcacagaaagtacaacaccgcatcctgcacagaatttaccagttgaaaagctattagcccaacttaaacagcgttggggaaatcaaactttagcaactatgagtgttaaaaacccaaatacgaatcaggctcaaattacgttcattcagcaagaagaccattctattacccgcaatcaagcacaaatcacattagatgctacaaatgctaaagtcttgggtgatacacgtaatcatagtcctattgccacactttatgctggagtatatggcctacatatggcaacttttgctcagcctctacttcgcttaggattgtttttctctggcattttaggctgtgtaatgattgcctctggcttgttgctttggagtcttaaacgccaacttcaaagtaaaaatagtcagtttcatttagggcactatttagttgaccgtttaaatgttgctacctttgtaggtttgccttgtgcaactcttgcttatttgtatgcgaatcgattgtttactgtcacggccaccactgttaattatgaaatttatagtttcttcttcgtgtggctcatgagctttattattgcgctcatcactaaaaaacaatatttatggcaaactcagctaggtatttttattctgcttagtattgcactccctatcttgaatataagttatttactgaaaaataattatattcaaaactttagtggttattgggattttgtacgtatagatatatttttctggttatttgcagctttagccttttttatatttcttaaaattaagcctattcaatataaagcttcagataaaattcaaaaaaagctgagtaagttaaatattgaggtgaattcatga

SEQ ID NO: 49262 - DNA, 1533 bp, Acinetobacter baumannii
atgtggaattttccaacaccgcttcctgatgagctgatttacagtaccatcgcccgtgctggattacaccatggcattcaaagtccaaaacagttacttgatgaggtttaccaagatagaaaagtcgttgctaccatagacttacccagtcatttaaatgctatcgtacatttattagagcgaactggctgttttagtttaatagacctgatttacaaacatacgatgtttggcttatatgcaccttttgttcaggagtcccatcgacaaaaggcaatcactttaatggctgagcaggcatctggctctattcatcttatgcttggtctgaatgcttccagagtccccaacaacaccaaattccactactgtccaatctgcatacagcagcaacgagaaacttatggagagtatttctggaatagagcctggtttctacccaacctttcaatctgcctgaaacacaattgttcacttctgtctcaggattatattcaacaacagcatcggcatctattcttgcccttattaccaaatcaaactcaagactccgctcattcctattacaaggaagacttcatactagggcaaatggctgtggagttattacaactcgatcctcaaccatcgccaagccatgaacaatggactaaattttatctggaaatggctgatgcaaagaatttccgtagagggaatcatgtttgtcatgagcaaacttatgagcaagtgattaaaaattttaatcttggttatcttcgttctaagaatttaagtattgaccaccaacaagatacttcatggcttaaatctattttcagaaaacaccgcaaagcctttagtttcttggaacattgtattgtctggtcttcatttatacccaaaatgtcacctaaagaaattatgcaatatgtcagctctatttcagcaaccccatattttgtaaaacgaactatttctactgataatattcctcctataaaaacagaggagatgagacaaaaatggcaagatatcgtacaacttcatggtgtaaaggctggccgtaatattaaatcaggttcggcaacttatatgtggctatatagaaacgatcaaaattggctactgacatttaattcaggacatttatcacaacctcaagcccgaaaaaataaaataaattggtctatccgtgatttttcaataaccaaagaattattcaaagttttatatcgttcaaatgatgacttagcttgtccaagaatgtcaaagagttggtttctcaatcagttatccaaaggaaattccatttccaaacatttgcaacaactgcctttaagctccaaatttctttcagcttattctgaagatacaatggcttatcaaatacggagaattacccatgccatgatcaggcttggttatacagaatccagtactaaagatagatggcgaatattacgacttgcaggattaagtaaagaaaggattactcaagaagcccaaattttcctaaatataatttgtgagaagaagacttatgcacattaa

SEQ ID NO: 49263 - DNA, 252 bp, Acinetobacter baumannii
atgacagttttacaatcatttgaaaaagcagttttaaatgaagtttgtcctgctggcgaagcgtggatgtgtgaggttaaaaaaggccaatattttcgaattattgaccttgagggaaaccaagcagtcgatactttatttatgagtgcagaaaacccgactgagcgttatagcgcaatggataccttggctatcaaccaacaaatctatttagctctgtacacgataaaaatagataactcattgaaataa

SEQ ID NO: 49264 - DNA, 1164 bp, Acinetobacter baumannii
atgcgcgctcttacttaccacggtgcagaagacgttcgagtagaaacggttgcagacccgattattcaagaaccagatgacattattttacgtgtgactgccacagcgatatgtgggtccgacttacatttatatcgaggcaaaatcccaaagactgaacatggcgatatctttgggcatgagttcatgggcattgttgaagaggtcggtccagccgtcaccgcagttaaaaagggcgaccgtgtgattgtgccatttgtgattgcgtgtggtgattgtttcttttgccaactcgacctgaccgctgcatgtgagaccaccaatacagggcgcggcgcgattatcaataaaaagcagattccaccgggtgcagctttatttggctatagccacttatatgggggggtaccgggcgggcaagcagaatatgttcgcgtaccaaaagccaataaaggaccttttaaagtgcccggctcactgtcagatgaaaaagtgcttttcttgaccgatattttgcctacggcttggcaggcagtgaccaatgcccaagtgaaacgtggctcaaccgttgcaatttatggtgctggtccagtcgggctattaagtgctgcttgtgccaagatgcttggcgctgaaaaaatatttatggtcgatcacaatgaatatcgattgaactatgcggcggcaacctatgacgctattccggttaattttgatgaagtcgatgcagccgaatttattattcaaaataccgacaattatcgtggcgtcgacgcggtaattgatgcgattggtttcgaggcaaaaggcagtgtcattgaaacagtcctgaccaatttaaaacttgaaggttcaagtggcgcagcgcttcgtcaatgtatagccgcggttcgccgtggtggagtagtcagcgtaccaggtgtctatgcaggcccgattcatggttttttatttggtgatgcttttgataaaggcttaacttttaaaatgggccaaactcatgtgcatcaatatttaccgcaactcttagaattgattgagcgtggtgaattaacacctgaaacgattattacccaccgaatgaaattagaagatgccgcagaaggttatcgcatttttaatgaaagagaagaggactgccgtaaggtgattctgcttccttaa

SEQ ID NO: 49265 - DNA, 1206 bp, Acinetobacter baumannii
atgttaagaatttctatatcatctccccaaattaagggttcattcccgctcagcttactcagtttaatgattttaaatattcaaggtgctaacgccgaggaattgattgactcctcatcaaaagccgcagccaccatgccaaccataaaaatcgaggccatgagtgagctcgacccgattaaaagctatatcgattatgacaaagccaatgtcactcgtaatggtttagataaaaaagatatccctcaaaccgttgataccattgatgttcagaaatataaaatttatggatcgaatgacttaagcgtcatgctgcaaggtacaccaggggtatcaaccagttacgatatgcgcggcgatgggatcacgattcgtggttttggtgctgatacaggtgatatttaccgtgatggcatacgcgaaagcggacaagtacgccgcagtacagccaatatcgaacgtatagaaattttaaaaggccctgcttcggttttatatggccgtagtgctggcggcggggttgtaaatatggtgagtaaattcgccaattttgactctaaaagttcagttggcgcatatgcgggttcatacgataactacggaacaaccgctgacatcaaccaagtacttaatgacaatttagcagtgcgtttgactggagaatatggcgaggcaggcagcttccgctctggtattgaaaataagattgagatgttttccccaagctttacctataagaatgacgatggaaagctgacctggaccacacaatatacctatgacaaattaaatcgtgtacctgaccgtggaccaacacgtgacaacttgcctgcgggaacttctattaaaatgggatttgcccaagacggcgattatgttgatgatattttgcaagtcattcgctccgatgtgaattatgaatatgcgcctgactggaacttccactgggcagcgagttaccgtcaagcagaacaaaactttgaccacttttattttggcaattattgtggtttagatggaaaaaactcaaagaatgaggcgtgtacaaaaaaggttacatcgatcaaatttactactggcaacaaaccagcaataagaccaccaccaatacatttgatattaagggcaagttcaagacaggccaacttgaacaccaaattatggttggtacagactggacttatgaacaacgagagccacgtctag

SEQ ID NO: 49266 - DNA, 531 bp, Acinetobacter baumannii
gtgaaatttgtcgtgtacagagctttaagttatgaaatgcagtttggtgaatggctacgtgaagaacttaaagaaggtggaacattaagttcgcagaaagacccagatattagtatattgcttagaaaagcgagatctcatcatacagttttatttggtccagctttagaccaatgggcacctgaaatttctgatcaagaactatggcaagcaatgtctgatacttatcccgaaattgtagctcattgggatgaggatgcagatgaaagaaaccagattttagctttatgccggatctattttagtttagtcatgaaggatattgcttcaaaaggcaatgcagctcgatgggttatgcctcagcttcctcctgagcagaaattcgtattgcagcggcttatacaggaatatagaggggaaatcggtaaacaaaattggcaagaggaacattatgctttgcagcctattgttaattttctgagttcaaaaattgaagagcagtttgagcagaaaagaaatttgatcacataa

SEQ ID NO: 49267 - DNA, 267 bp, Acinetobacter baumannii
atgcgctatatcgatccaaatcaaccaggttcaaaagttcaatttaaatcacaatatgaaaattttattggcggtgaatgggttgcacctctaaagggtgaatattttgataatgtgtcaccagtggatggaaaagctttcacacgcattccacgctctagtgctgaagatattgaacttgctttagatgcagcacacaaagcgaaagcttcatggaataaatcttcaccgactacacgttctaatatacttttaaaggggctgtag

SEQ ID NO: 49268 - DNA, 1311 bp, Acinetobacter baumannii
atgaaaaaaatagatattaccggaattggtattgggccattcaacttaggtttagctgctcttttgtctcatcatcccgaaatcaaaagcgtatttttagaacgcaaaccagaatttcgatggcatgaaggactgctattgcaaggtacgacattacaagttcctttctttgccgacttggttactatggccaatccttgccatcccttaggctatattaattatttacatcaacatgatcgcttacatcagttttattattacgacagttttttaattccacgccgtgaatatgaccattattgccgttgggcttcaaaacaattacccgattgtcgatttggagaaaacgtaagccatgtggaatatgacgccaagctggataaatttattatagaaagtgaatcagcctcgggcgaaaaacaaaaatatataagccaaaatctggcgattggtattggaactaaacctcgaattcctaaatggctggaaacatgcaaacaccctttggtaaaacattcagcggagtttgcaaaaattcaggaacaactcaagcaatgtaaacaggtcacggttattggctcgggccagagtgcagcagaatgtgtacttgctttatttaattcacttacaccagaacaagtaaaagcaggtgcatctattcgttggatcacacgttctgccggctttcacccaatggaatattctaaacttggacaagagtgctttacccctgcatatatgcaatatttccaaagcctgcctagagataaacgccgcgatattgctgctagtcagggcctgatctataaagggattagcttctcaaccattggcgatatatatgatgtgctttatgagcgttcagtggctggtgaaaaatccggtttaagcctatacacaagctgtgaggttgaatcggttaaagaacttgaatcgggttctctgcgtttaacttgtttgcatacccaactcgatcaacgttgcgaattagaaactgatgcccttgtcgcagctacaggctatgttcatgattggcctgaatggttccaaaatatgaagggttctattttagctgttgatgataaaaatgattgtattgttcaagaagactttacggctttacgttgtgatcagggacaaggtcgaattttcattcaaaatgccgagatttttcagcaaggcgttggttctcctgacttaggaatcggagcaactcgaaattcagtcattattaatcaattactaggacgtaatgcttatcgaattcctaaacagtcttctttccagcactatggcttaccagaataa

SEQ ID NO: 49269 - DNA, 2943 bp, Acinetobacter baumannii
atgcaactggtaatcattttcatttgtttgtatgatgctgaaacaagattaatttgtcaaccgagttatcgttcaatgtgtgaattaacttcgatgcaagcggcctgctggtttggtcgctctggcaacgcaactttaggtggggttgctgcccacctctatgcagaatttgacggtcaatttattgatctacaaaaattacatttagcacttcaacgactttataaagaacaccctattttgagattaagtttgagtgccgatggcatcgcaaacatcatgtctgagaagactcaacagatattagaagtcgatgatttttcaaagcttagcgattatcaaattgagcaaatgctcatgcaaaaacgggagcaatggacccaccaaaaacttgatctaagtcagggccagactgcaagattttctataagtgttcttaaaaataatatttttcgttttcatatagatacggacatgattgctatagatccgtccagttttttgaacttgatggaagatctttctttgttttatgaagacccagaaatatcattctcccgtccgcctaatttttttgactggtatcaaaaaatacggacagatcctgacctaaaaaaattaagccaacgagaccgcttatggtggaaacaacgtctttctcatattagccctgctccgtctctacctttcattcatcaagaattcaaaacagcaaaaagtgatcgtttaagtacttggctatcgccaaaagaacgaacagcattacaacaacttgctagaaaacaacatattactgtaaccaacctgatattaggtctatttgcctatacgcttggtcatgcaaccaaagatcacagcttccgattaaatattcctactttttggcgcgagccagttttaaaaaatgtcgaaggcactattggtgattttgctaatctagtcatccttgatgtcgacatgaaagggacaactaccttagccgcattctgcaaacaaatagcaaatcaaatgcttgagttattagagcattcacattattcgggtgttaatgttctacgtgacctgtctcgttatcatggtagtgcacagattgctcccgtggtatttacagcggcactcgacttagaaaataataatttgctttctgagcatgtccgtcgtgtttttggttcaatgaattgggtcatttcacaagggccacaagttgcacttgatgcacaagttgctcatgtagatgacggtattttagttaattgggacatccgtttagatgctctacccaaagaatggatcacgaatttatttgaatctttcattcatttacttaaaaatcttgccgcacatcctgagcaacttaatacacaaattataagcccagcacaaaatacctcgtcagatcgtacgtctcaaaaaccattaaatgcattacaacaagcctacctattaggtcgaactcaagcccttcctttaggtggtgttgccatgcaagagtttaggcagtatcacggcaaaatggatattgttttattaagacaacgattggcagaaatggtacggcagcatgacagcttacgaacctatattgataaaaataggttaatacaatatataagcgatcaagtgagtgtcaatttaaaagaaatagacctaactacatgggaacctgaacgtgcttctcaccacatccagtcctataaaaatagttatacgcatgagctatttgatttaaatcagtcgccttggaatatcaccgtatttttattaaaaaataatctattaacaatttttgtccgctttgatgcattgattttagatggccgatctatagcttcacttatgttagagctatttgatgggcaacaacatgatatccaaacacaaatagaagaaaatgaagctgaaaatagcttatctgttcatcacacagatatggcttactgggaaagaaaattttctaaattatcggctattcctgcgtttccgtggaaaacgcccttacagcatttaccgacttcacgttaccaacgtaaaagtttggttatagaaaaagatcaatttaaacagttgtctaaaattggcgcaaaacattcactgtttaaaaactcaatcatcatggcgattattttggaagtgctatctcattggagcacggacaaatctctatgcgttgctgttcctacacttcctctctatgccggaccattttctaatagctctacgtttattgctgttgagtggaaaacttcagatcaatttgctgaacaagcaaaccgtttgcaaactgaagttttagagggtttacagcatctttcattttcaggcgttgatctcgctcgactattatttgaaaaagttggcactgctccagtattaccgattgtaattacaaatggtttgtcatggccggtattatctgaatctcatcctattcagcaactagatggactgacccaaacacctcaagttgcaattgatattcgctttagcacaagaaatgacggcgctttgattttcgatattgattatgcccaagaagcatttccacccaacatgattgacgatttcttggatgcactgcaattagcaatcaagcaaattattggttcagaaatattcagttttgatctcagcaattttttcagtgagcttcaaaataaacgactatattttaaaaataatgagtccgatcattcatctataccaattgaaaataatgctaaacagcaaaatcaactactcgacatttacttagaagtgataggccacccgccaaatatggaagtggacaactcaactcattttactcatctcgggctgcgtccacatcatttaaaggtcgtttcaaaacgtattaatgaaacatacgcgattcagctctcacctgttcaacttattcaatgtcgcaatattgctgatgtagagaaactagtaacaccacattaa

SEQ ID NO: 49270 - DNA, 1629 bp, Acinetobacter baumannii
atgaaaaaacagttgattgagtttgttcgctggtctcccgagagagcgcaacactatcgaaataaaggctattggattgaccaacctttgacgcgcattttaacggtaggggttcaatcgcatccgcattcgccggcaattatttgtggtgaacgtcagttgagttatatcgagctggatcggctatcaacaaatttagcttctcgactagctgaaaaaggcttgggcaagggtgatacagctttagtacaacttcccaatgttgcggagttttatattgtcttttttgccttgcttaaagcaggcgtggttgtactcaatgcgctatatagccatcgccaatatgaactaaatgcctttattaaacagattcaacctaagcttttaattggttcgcgtcagcatgaagtatttagcaataatcaatttattgattcacttcatgaagtaaatttaagtcctgaaattattttgatgctcaatcatcaagctaccgatttcggattattagactggattgaaacaccagcagagaccttagtcgatttttcatctacacctgctgatgaagttgctttctttcagctatcaggtggaagtacgggaacaccaaaacttattccacgcacgcataatgactatgactatagcgtgcgagccagtgccgagatttgcgatttaaactcaaatacccggttattgtgcgctctgccagctccgcataactttatgttgagttcacctggtgcattaggtgttttacatgcaggtggatgtgttgttatggcaccaaatcctgaaccgctcaattgcttctctattattcaaagacatcaagtcaatatggcatctttagtgccgagtgctgtcattatgtggctagaaaaagccgcgcaatataaagatcaaattcagtctttaaagttgcttcaagtaggtggagcaagtttccctgaatctttagcccgtcaagttcctgaagtcatcaattgtaaattacaacaagtatttggaatggccgaaggcttggtcaattacaccagactcgatgactccgatgagcaaatatttacgacacaagggcgtcctatcagttctgatgatgaaatcaaaattgtggatgaacagtataaagaggttccagaaggtgaaatagggatgcttgcgactcggggaccttataccttttgcggttattaccaaagccctgaacataattcacaggtctttgatgaggacaactattactattcgggcgatctcgtgcagcgtacccctgatggtaatttacgtgtagtaggaagaattaaagaccagattaaccgtggtggcgaaaagattgcttcggaagaaatagaaaaacttattcttttgcatccagaagttatgcacgcagctttggtcgcaattgttgatgaacaatttggtgaaaagagttgtgcctttattgtttctcgtaatcctgaacttaaagctgttgtgctcagacgccatctcatggagttgggtattgcacaatacaaacttccagatcagatcaaattaatcgaaagtttgccactgaccgcagtcggtaaggtggacaaaaaacaacttcgcagcattttaaatacatctacaacatcttaa

SEQ ID NO: 49271 - DNA, 1422 bp, Acinetobacter baumannii
atggcagaacagcaaccactggttttgcttgtagacgatgaagaagatttgtgccttttaatgcaaatgacacttgcacgaatggggattaaaacacatcttgcttatcgggttgaacaggccaaacaactcttcactcagtttcattacgatgcgtgtttaaccgacttaaacctacccgatgggagcgggatagatttagttaaacatgtctctcaaaattatactaatactcccattgccgttttaaccgcctacggcaatatggatattgcaattgcagcattaaaagcaggcgcttttgattttgtaagcaaaccggtcaaccaagtacatctagatcaattattacaaaaagccttgaatcggcaaaaagtagagcatgatgctgctgagaatgcgttagaaaataaattattaatcggccgttctctacccatccagcagctacgtattgcaattaaaaaaattgcgcgctcacaagcacctgtatttgttaccggtgagtctggaacaggtaaagaagtagttgctaacttagttcatcggctgagtaaccgtagtgaaggcccttttattgcgattaactgcggtgctattccaaccgaactcatggaaagtgagctttttgggcataaaaaagggagctttaccggagcaactcaagataaacaaggcctcattttatcggcacacggtggcagtttatttttagatgaaattgccgaattacctttaagtatgcaggtcaaactgctccgtgcagtacaggaaaaaaagatccgacccgtcggttcagatcaggaaatcgatgttgatttccgtgtgattagtgcaagtcatcaagatttagatttattggttagacaaggtaaattccgtcaagatttattcttccgtattcatgttatggacctcatattgccacctctacgtgaacgtggcgaagatgtccttttactagccaatcactttattcagaaaatttgtatggagtgggaaacgccacctaaacaattaacagaagcggccgaaacttatctgctacagcaacactttccgggtaatgttcgcgaattaagaaatatgattgagcgcgcaattaccttaagtgaagataccactatagatgtatctcatttacatcctgctccactaagagcaaatatttctaatccttttgcttcagctgctcaaagcatacaaaccactgtggcagctcctcaagtcgtaaaaaaattaccaagtgaaggcttagaacgttatttagaaaatattgaaaaagatattttactcaatgcactcaatatgactcattggaatcgtaccttagcagctaaaaaattaggaatgactttccgctctttacgctatcgtctgaaaaaatttggcttagatacggagacagaacaggaagtataa

SEQ ID NO: 49272 - DNA, 558 bp, Acinetobacter baumannii
atgtctttttttgagatatatgatgaaatttataatggtacagaatttgccgatctatactacgagtttcctgaggtaatggagattgtagaaatacaaaataggcacgcaactgatagaatagataaatttaagtggaaaaaaggatgggagaagtattactggtacggcgataaacagttagaggattttgaaatggaatataatttagaagatatttatattctaaaagaagacatggattttttaaaaagaggtgaaagtagaaaaattagggaaaggaaagattatatgtcacctcatattagaaaacagtatgaaaaattagatgtaagatcaaattatactagtaaaaatagcatttctaataaatcaataaataaaattatctatgctttggctaatatggcaaatatagacatctcccaacctcaagctgctttttctcaactacaattatattgtgaaaaaaataacttggagttaccaaataaggatacatgtggcaaggcttttaaagatgctaagtactattttgataattttaattctaaatag

SEQ ID NO: 49273 - DNA, 507 bp, Acinetobacter baumannii
atggataacgaatatgccaaattctttttcaatcggaaagttgatgtctatcaattggagtgtattgagctttctcatccttcttttatgaatacataccgaatagtccgtaatgatgaccgaggtgtttatgttcaacataaggagggatccggtcaggtctattatgaatttttgccagcatctattcaaagatccggaatgctgggtgatctggaccagacattaacagtctctatatctggtttaggtgatgtaatgccggatgagtttgaacgggtaatcgaaggccaatatcccgatgtaaagccaacagtaaattaccggatttacagttcagacaatctgaattctccaatgttttatttactcggactgcaactctccagtgttgcaatgaaccataaagctgtgacattcaaggctgaatcaccaagattaaatactgcgaagactggagatatcttttcgcttgatcgttttagtggtttgaagggggctatatga

SEQ ID NO: 49274 - DNA, 708 bp, Acinetobacter baumannii; identical to SEQ ID NO: 46630

SEQ ID NO: 49275 - DNA, 645 bp, Acinetobacter baumannii
atgttagttgatacctattcaagctcattaagtttaccttctttttcgagtaatacactaaattctataaatcgtagtacaactgtagtttctaattataatggagttgctaatcgcgtaaataaaagcgttgaaaatttcattgatcatactgaatcaatgcgtgttttttttaaaagctttctaaataatcaatcagattttcttgcgttttttttatgcttatgtgtcattggttcttttcaatcatatgatcttagacttgatagtaaagataatattatttcacctgagatatttaaagattctaaaaatagtttttggtgggataaaaaacattattttgaaatatataaattagaagcaactaatagaggaagagaggcttctgcatatatgacagtattaatgcatcaagctgtacaagttgaagaccttaagtttttaaataatttttttcaagagttaaataaaagtagtttaacttcatggtctctcatagctttattacgctcaacaaatgtttataaaaatcaaatttcattgtggaaagaaatgtatttatatactcagaacgttgttataaatgagggattaaacccaaaacgtgagatgtatggcttagatcgcggtttaaatatataa

SEQ ID NO: 49276 - DNA, 732 bp, Acinetobacter baumannii; identical to SEQ ID NO: 46632

SEQ ID NO: 49277 - DNA, 4800 bp, Acinetobacter baumannii
atggctcaagaagctcgcttagtaattgttattgattcggaacgtgcgaaacgcactgcacaagacttatcagttgaattggatagcatcaccaaaaaaggggatttcgcctcgaaatctatggaccggatgtctgtagcaactcgtgcactagcagggtatatggctggtttattaacagtaggttcagccatttcaaagatggatacatatactggactacaaaaccgccttaagttggtcactaataatcaagttgaactaaataaagctacggaagacactttccgaattgctcaaaaaacctattcagcatgggattctgttctacaggtctaccagcgttttagtgataatgccaaaactttaaacctcacaatggatgacacagcacgtttaactgaaacagtttctaaagctgtagcaattagtggtgcaagtgcagaagctgctgatgcagctttagttcaattcggacaagcgttagcaagcggcacattacgtggtgaagagcttaattctgtaatggagcaaacaccagctttagcaaaagctattgctaaaggtatgggtattactgtaggtgaattacgttcagtagctgctgaaggaaaaatcacttcacaggaaatcgttaaagcacttaaaaatgtccaagatgaagttgatgctctttttgctaaaactgatataacaatcgggcagtctctcacactcctaaacaatgaaattactaaatttgtaggagaggctggtaaaggaagtggagcagcacaggctttatcaggatcgattcagttactagcaaataatttgaatttaattgcagacagtgcatttgccataggtattggcttaatgacaaaagccgttttaacaaaaacggttgctgtacaagcgagtattgctgcgtcaaccaaacaagtgtttgccacaattgctgaacgtaatgcaaatattgcagcagcaaaagctgaagtggaatctgcgcttgccgaagcacaaagtacgcaggtgacactaacgaacatcaaagctactcatgctcagatcatggcagaaatagaactcgaaaaagttcgtttaaaagcccaaatcactgaacaaggtcgcacggctaccatcacacgaatggctcagctaggacgattacaagctcaagttgcgttagaggttgctgctgcggaaacagcacagtctgcagcttcatctagattatcagcagccttaacagcgcaatctgttgctactagccgtttagctttagcaaagtcagcgcttatggcgatttttagcccaatgggtttagcaattgcagcaacagccgcatctttctatttactaagcagcagttcggatgaagtcaaagagtctcttgcaacacaatctgactcggttagtgatttaacagataagtacataaagttaaatactgtgcaagcattaacagagggtgtgcggttacgcaaagagattgagcagcaaaatgatgcaattgatgatgctagtggagctatcaaacgttttgcttatatccaaaaggaattatttaaattatctggcagtgattatgaagattatcaaaatgccattaagtctattgctacaggtgcaagcgatgcaggtgatctcttaaaaaagatgatttcatctggtcgttttagtcagaatcaaattgataaactcattgagttctctagtgcagtagcagaatcaaaaaataagattgagcaaggtaatactgctctaaaactcttaaatgctacttctagacaacatgttgaggtaacggccgaatcaattaagcaattaacaattcaaacaaacttaacaaaagtcgctactcaaaatttcactgacatgaaaacacaaatgcttgattcattacgagcacaagtggaattcattcggttaaatggtggtagcgaagaacaagttaaatcgttgaataaggtaattcaggcatattctttaaatcaaatttcagcaactgatgctgtgagtaagttcaatagtacagccaaaattcctgctgaaaatatcaaggggttacaggatcatgctactaaaacggatcagtctaaaattgcgttgaatcaggctaatgcagagctaaagaaacagaatgacttgcgtaatgagtatctaaagcaacatcaaactgtacttgctgctcaacaaggagaaacaaatgaattaaacaaccaagtcgctgctcaagaaaagttaaataagttacgagacaacgccaacaaagatattctgaaaaatgattttcttataaaaaacactaaggcatttggtggtggcgaaaagggtcttgataaggcgcgtgcggcatcagagttttataccgacaataaaattccgatgactagaagtttaactagtcaggaagctgcaatttttgaggcttggtataagaagcagaaggaagccaaggacttacaagaaagtattaccgaatctagcagaaagcaaaccaaggaaagtgagaaaaaacttaaaatcacacaagctgaattggaagtagccaagcgatctgctgctttaattgaatcgagtggtttaggtaaatatgctgaaagcaaagggataccatcaagtgtaattgcaggcttattggctcaagaatctcaaggtattcgagaagctaagagtcatactggtgcaataggatattttcaaacaaccagtggttatcgtaaacagaacaatatgtctgttgctgatagttatgacttggaaaagtcgggcaaaattgtaattgataatatcgccaaggtttatgaaaaaacaggtgacttggctcaggcaatactttcccataatgcaggtgagggtggagcaagacagtttactaaaactggcaaggttaaaggcagtgcagagcgaaataaggaggtttcgcagtatgtagctaaggtttcaaggtattccgatatcattgctggtggtgttggcaaaggcggtttatccgatggtgatagcgatagagcctatggaaagcaaatcaaggcacgtttagagttagttaagcaaggtctaaaccttcaagagcaatatgaggaggagcaagcgaagcgaaccaaggctcgtaacgaagaaattaaccttgcgcaacaaacgggtcaaacagccttaattcctaaaatcaaagagcgatataaagctcaagatgaactcgccaaacttcagcaagattttgaagtgaatggttataagtggactgagaagcaaaagcttgagtacacatatgaaaccaattctttgcgattagttgctgagggtaaactctctgaagatcaaagaaaggttgctttaggtggcctggaattgcaaaaacagcaagagttaggattactaaaacttgctcaagagcaacgtttgtttcaggctgagcaattcatgctgggagaaatggagcgtatcaaaaaacgttatgctcttgagtatgatgaaatatcaaaaatcactgatcttgaagagcgtagaaggaagatgagtgcatttcaggctgattttattcgtaatggtgtggggaatccaacaattgatcagtatgatacctctagtcagtttcttaaatcgacaaactacaccaagcccaagcaaaccaatatgcaagtattggatgaagattacgctcaaacttatcaaaagttgaaagataatcttgcagctgttttggagtctgaaaaagctagttatcaggaacgattggaggcggagcgcgtattcaaagaagcaagacagcaaatggataatgagtaccacctgaaggcgattgatgcaagaaaagcagatcacgacagtcaattgcaattatacagtcagatgatttcatctgcttcaagcacatggggaggtttaactcaaattgttaaggatgcgcgtggtgaaaattcacgctctttcaaggcaatgtttatagctcaacaatcctttgctattgcttctgcgattatctctgctcatttggcagctacacaagtagctgctgatgcaacgatcccattttttggggcaaaaattgcggcttcaaccgccatgcttgctatgggatatgcaaatgctggtttgattgctgggcaaacaatagctggattctcagatggtggttttaccggatctggtgggaaatatcagcctgctggtattgtccataaaggcgagattgtatggtcccaagaagacattaaaagatgggggggagttggtttagttgagaaaatgcgtaagagtgcaaaccctgaagcttttctcaataacaatgcctcggctgatagtgtcatgcgccgtgcaatgatgagctctaatgcctttatagaaagccaaaagcaatctgatatctttaatcaaccggttcaagatactcagattatttataagggtaatagaagcgtacctatcacttcttcttcggccagttctgatctattccacgatggcaaggtctacttctcatcaaatggttttgttcaggatcgatcaaatcttgaggatgttcaagatttcacgatgggtcaagctgctcgacctcaagctgagattatgccttcaatagagcctgcttcaccgacaatcaatttcaaaattgaagtgattaatcaggtgagtggagcaacagttgaagctgaacaattagacgagcaaacagtccggatcattgttaaagatgaactggataagcagcttccaagaacggtaccgaagcttgtaagtgatcaaattggtaatccaaactcaactattagtcgatctttgactgagaataccactgtaaggcgtaaccgttaa

SEQ ID NO: 49278 - DNA, 1002 bp, Acinetobacter baumannii
atgaaatcaatagacaacaaaaaagcccgtgatcttggcggacagggcttgattgaagtcgcaatctacaggaaagacaacatgtctaatttaacacaaaactttttaaatccaaataataagccattagttattggtgattttaccattcgccaagatgaagaaggccgttttatgttgggtgaccttcataaagcaagtggtggtgaaaagaaacaccagccatctaactttttaagaactgagcaaattaaagagttaataaatgaaattgaccactctgcaaatttgcagagttcagataatgaccactcctcaaatatgaggagtgctgtaaaagtagtcaatggtggtgacaacagaggaacatatgtagttaaggaaattgtttacgcatatgcaatgtggattagtcccaaattccacttgatggttatccgagcttacgattcacttgtgatggagtggttgcttaatggaaaacaaactatctcaccagaacaagctggcattctttataacattgttcatacaagagcaaaaggtaataaaaatttgattgtgcaaatgtggagtcgtttaaaaaaccactttaaatactcagcaagttaccgagaattacgagctattcactttgaggatgctaagcattatttagaagttatggatttaagggcaaagccagaggaaaagaaacctcaagatcctttatttgataaagacgcctatgagctggttcgcaaacttactgaagcagtcatcatagaaaatgatgaaatcgttccagttctgctggctgtaaaaatgcttgatgtgaagaagttcgcgtattactcacacttagtagtgaaagcgaatgaagcagcacgagatattgctagattgttggatttcaggaacctacaaaatgagccgttgatcgatgcagactgttcggtgatagccatgtctaatggacaaagatttctagcacgaccgaactggtttaactgcccagcttag

SEQ ID NO: 49279 - DNA, 171 bp, Acinetobacter baumannii
atgggagtgttatcgaaaccacaacgcaagatgcagtttaacttgcgaattgaacacgagcttcatgaatggttaaagaaagtagcagaggaaaatgaaagaccggttaattatgtaattaatcaagcgattaagaatatgcgtaaagaaattgaaggtgcgaaagcatga

SEQ ID NO: 49280 - DNA, 312 bp, Acinetobacter baumannii
atgagtaaaaatggtggtcatctcacagtccagtacaatctacgctggtcagaagaactgagagacaaaatcgctgacgaagctaagaaaaatactcgttcgatgaatcaagagattattgctcgtttagaacacagttttcggtctgagtcagcatcaaaaccattcctttcttttgataaagatacctcacatctggttattggagatgctgaggagcgtaaacgcctagcccaaatagctgctaaagctgtttttgatgctttaggacaaagcctagatcaagatgatgatgaaaaaaaagcaccctag

SEQ ID NO: 49281 - DNA, 384 bp, Acinetobacter baumannii
atgaaaaagattgttttattaagtttggtttttgggatggccggttgtgcgacaacagctaatttttttgatattcatccaacacctgttagtaattcaggttattggactggtcaatttgatcggttggttgggactttaatactagaaagtgatgggacgggtgtaatttgccaagaccacctaggtacagctagggtaatgtctgtaaaattattaaatgatagactctattctcaggatgggacttactggaaaataagtaatttcactccaacatctcttgagcttaattatgcgcttggaggaggatataaaatgataagggacaatgggcttaaattcgcttcaccagcatgcaaagataagctaaacacaaagtaa

SEQ ID NO: 49282 - DNA, 219 bp, Acinetobacter baumannii
atgtcatgtatgctgactttagaagaaatcgaaattaaacggcaagaactggaacggcatcttgaagatgttatgtctgttgagttgagcaaatggcaatctgaaaacaagctatgtgtttctgatgtgaatatacgcttggctaatgttgttagtctcggagggcctaaacataacgttgttactggagtaagtgtcgatttagataatgagctttga

SEQ ID NO: 49283 - DNA, 564 bp, Acinetobacter baumannii
atgaataaaatatatattagtttaccgatgatttttattcttaatatgagtggttgcgctacagtagctcaaagtgctcctctatatgagaaatatgaatctcaaaatttaaaatgtggtgaagctaatgttaaagtaatttcttattgttatgatcctgaaaaagggcttgaagatagaggtagtggtggtattgtcagagagtgtaaaagtagtgtaattaaaataaataatacacaagaaataaatataccagtaatgtcagaaaaccaaaaaaaattattagagaaacaaggatatgatttctcaggaaaacttgaagaaggaaagtggagcttagttagttttgcgtgtattaaaaataatcaagattcttttcttttattaaatcaagctacctctaacaatataaatatgatggatcatagtaaaggatcattgtgggataatccagtattattagatcttaaaggtaatataattaaaaatggaaataaagaaatattaaaaaatagtaaaaaaggaaaagcaatttcagctaatgcagtttatgggaatgagtga

SEQ ID NO: 49284 - DNA, 1947 bp, Acinetobacter baumannii
atgggtgatatttatcagttgctaaaacccaaaaagggatatgcatatactaaggaacaaataattgatgcctcattagtaaatttacctatacctacagggaaaaagttaaaaggtaattctagagttataggcgatgtagatgaggaaaccttcaaaattatcgttgatacaattatttctttatgttctagatttaatctagaatatcaagaaatggcttatacactattaatttgtttagctgaatctggtttcaatccagatgcagctgctggaaccacaagtgcatcaggccttgctcaatatacaagatcaacagcagatgcttttaaagcaagatcaaaatcaatactaggttttgaaatagacatgagcggaacaaatgtctttgatgcaaatataggttgttatggtgttttagtcgcttttttatttaataagaatttggctctgaaatggggttttaaacctaatgatgataaatattggcaattgatctatatgcttcatcatgatggtcctggttattatgaagatgaccgaggaaaagaacgcgcattgagatttaaatggcgaaaagatgctatagatacttatgagcgggtttttaagaaaaatttacttttattaactgcattgttaaaacaaaaagttgaaacaaagttaaaacttacggatcatgaaggtaaagcaattgaaaataaaaattatattatagctacagttaagagtcctgatagaaaaaagcctactcacttgtcaatgaatagaaatgaaaagaaagagataaatgtagtatttggcaaaaccaattccaatggtgagtcatctccagttcattcgagaattggagacgaaattattactcttttattaccagataattttaagaaattaattaatacaaaatcagcggggaattatgtagttaaaaagggagatactttagaaaagattgcaaaaagaaatggtactagtgtcgagcagcttgccaaggataataatttaaaagataaaaataaaatatctattgggcaacaacttaaagtaaactctgatgtaaaatatatagtaaagcaaggagatactttagaaagtattgcaaaaagaaatggcactactgttgagcagcttgccaaggataataatttaaaaaatattaatagaatagccattggacaagaacttagagtacataaattcctaagacataaaccatctaatagcgctttaaaggatatttttggttctttaggattagataatataaatttagatttaataacattttccaaaaatcatacagctaagcctaaaggtagttctagtaatacaactagtaaaagtaaatcaaatttaatagagttgagaacaccggtaagtgcggaagctgtaaagcctaaaaaacaaactaaacctgttatagaacaaaataaaacacaatcaaacgggaataataagactgtaaaagtagatgtaacagatggcatggctgttatttatacatttcaagatactgaatatggaccacatgatgcaccaaaggtcggttatacagttttttatgatcacttaggtaataaattatacagttttaaaactggtagtagagtatcaagtaaatctaaaaaaaatgcagatggcccttttagtggtttctatacatatattgctggaggaaagcgaaatagtaagttgggagctgcctatggaactacaaaaattatgaccacagatagccgtgcaagatgggtacatggcgggggaagcggtttaagtgatccatatgctgagaaacaaggttggagagtcactatgggatgcacaagagcacaaaatatagatgttgaaaatttggcaaaaaaaattacagaatttaaaaagcaatatcctaaaataaagatcaaatatattcgagatagtaaaggaacttatcctaaatga

SEQ ID NO: 49285 - DNA, 726 bp, Acinetobacter baumannii
atgaagaaacaacttaagtttataatttttacttttctaatgattggtcctatagtatcttcatatgctgactttggttttattcaagataaggatgggtacgttaatgtacgaggaaattcaagtttaaattctaaagttacgtccaaattaaataataatgaaattgtttcttgtgtgatggatgaagagacaaataatttttgtttagttaatgcaagcaatggtgtaactggatttgtctataaaaatagagtaaataattttagtggttacaattctattaagctatctcaatattctagagaaaaagctgtttataatgataaaaatataatagtagaagtgtatgcaaaaaaagctattttagatcctaaactttataaaacttttaaaggtgaatataagtattttaataataaaaaattctttggtactgatggtactttacctaataatgattttttacaacttgataaaatcattattaagagtaaagataagaaaatagaaattggtaaaaatgatatagagcaatacttttttcctaaaaatggtatagacggtgacaagaacgagcttgctgattttaaaatatattacttaaataataatatttttattttaaatgcttttaataatagtggtgcagcagcctataatatcgttttaaatataaaaaatggaaaactagttgccaataaagcttggaaggttgaaatttaa

SEQ ID NO: 49286 - DNA, 606 bp, Acinetobacter baumannii
atgggttatctaacaactgttactactggtgaaggtaaaaatgcccgcgttattaatttcaaaccttcgcctacacatcatgcgaaaaactcaggtgctttaggcggtgaaaccggtgaagtatgggtacctgatcttaaagcacaccctactttcttggctgacctgattactcaagctaaagatcacattaacaccttaacgcctgcacaacttgcagcagctaaagcccaagaagagctagaaaactggaaacaaagctgtgaggaagcagagcatgcaggtgaccttaatcaattaactgagtcgcttgataaagaacacatgtattaccagaacatgcgccaagcaatgttaatgagagctaaagcattgaattgcacgtttgataagcaacgtggcacttggattagtccaccagaatttaacggtatctcagatcaacaaagagatgaacttcagaacttcatagctgaacgtggcctcgatgtaaaaacagtttgtgagcacttaggtatcgatgcccttatccaaattgaagcggcaaaacttaaggcagttaaacaagaaattgaaaccttagctaaaaaggggatgacagcatga

SEQ ID NO: 49287 - DNA, 960 bp, Acinetobacter baumannii
atgaaaaatattttaactgctcaagaagcatttgcagcacttcaaaaaggtaaaactgttctatgtcgtcctattggagacatgttggacttttctgacttagatcaattccccgcttctgtttttggtaaaccgggttttgaattctgcatcaaaatcgaaactattgagctggctggcattacattcacaaagccattaactattgatgaatatgaggaaggacaggatgtttttgtaattactacatattcgccttctatttacgtcgtgaattttagaaccaccgcattaattgaatctattaatagcggctttgttcaacgtgatgcagaaaacgccaagcttcaattaaaagcactatctaaagcgttaggttttgaagttagtgacgattttagtgttattcgcttaggtgatgaaaaaaagaaacagcgtggcaagaaatcaaaagcagaaaagtctattgaagttatttctgcagaaattcaaccaacaattgttattaccgaacaaacaaatgtcaccacatctgaggatctgttagttccagaaactaacgagcctaaagtagatccagaatatcagcaaaccctagatactcttctacagcgtgtaaaagagtcaaaaacacctgcagaagtaaatgcggtttatcgttatacccgcacatgggatgacgaacaaatgaagcctatccttctcgccactcacaaacgtcttgaagagctagaaaaagaaaaggcatctgctaatgagccaccctctttaatggttcaaatccaaactgcaccagaccttacaacgctagatgctttggaaatagacgtggctgcacgagatccgcagattcaaccgaagctaatggggtatgtgagaaaacgccgctatgaattagagaatcctacacctactcaacaagaatctacccctgattatttattagtggacggtttctaa

SEQ ID NO: 49288 - DNA, 246 bp, Acinetobacter baumannii
atgaaagatcagtacaagaaagtgagccaaaaacacatgcttggttttatgtactacttgcaattgctgggctacgtaatagtccggcaaggcatggaccaagcaatgtttctaacaaagcattatgcggtaccagttgcttggcggcgcataacgaccgactatcacaaccgattaaataaacctgcccagcagctttataaagagtttgttgagtggactaaagaagaatatttgagggcttag

SEQ ID NO: 49289 - DNA, 210 bp, Acinetobacter baumannii
atgagcataacacttagcggtcatcaactaaaaagccttctcgaatttgtaaatccagatggtgagaaagatttagatcaacttgatactgaactaacaattaaattctttgaagttggccacagtggaaaaggctattacttttggatgaccgaatatccagaagaaggtgcaatgaagttggatattgaatcgggagctgagggatga

SEQ ID NO: 49290 - DNA, 213 bp, Acinetobacter baumannii
atgagtgaaaaagcatttaaagatttaaaaattcgcttccatttggctattggtgtggctaatggcgatcgtgaggactttgggaaattatcggattggatcgaagaagaaaactgggaaatgatggatgaggaagagcagaaagatactctttcagaaattgcagaggaatgggcgcagcagtatttagatttaggagcgacagttgaatga

SEQ ID NO: 49291 - DNA, 483 bp, Acinetobacter baumannii
atgaatgcacaaattttagatccatgctgcggctcaaagatgatgtggtttgatcgtcaaaatccaaatgtagtatatggtgatatcagaaaagaagaacatacattgtgtgatggtcgttctttagtgattgaaccggatgtgatgatggactttcgcaacatgccttttaatgatggccaatttactttagttgtgtttgaccctcctcacctggtgaaagcaggaaagcaaagttggctagccgccaagtacgggaagttgtcagaagattggcgcgaagatattcgcaaaggttttgcagaatgctttcgtgtgttggccaatggtggtgttttaattttcaaatggaatgaaacacaaatcaaagttagtgaagttttagcgctcacagatcaaaaaccattgtttggccacattagtggaaagcgcagtaacacacattggattacttttatgaaagcggaaagtaaggaggagtaa

SEQ ID NO: 49292 - DNA, 270 bp, Acinetobacter baumannii; identical to SEQ ID NO: 46597

SEQ ID NO: 49293 - DNA, 1044 bp, Acinetobacter baumannii; identical to SEQ ID NO: 46221

SEQ ID NO: 49294 - DNA, 444 bp, Acinetobacter baumannii
ttgagtcaaatctattatgcactgatttatggtcagcccaacaatgcattacataagattgattattataaagaaaaaacggtatctccttatttcgtgaagcgtacagaagcctatattaaagaacatttacatgagccgcttaatgtcgaaattctggccgagcatgcaggcgtgagtgtgagaaccctatttactggttttaaaaattatttggggacaaccccaatgtcttatttaaaagaattacgttttgaacaagcccatttagagctcatgcacaatgaaaatctgtcggtcactgacgttgcatttaaatggggatttacccatttaggccgtttttcacaagagtacaaacgccgttatggtgagttaccttcgtctactcgccgatctggacagagtgaagggtcaggcatcattacttcaattttttcttaa

SEQ ID NO: 49295 - DNA, 966 bp, Acinetobacter baumannii
atgcctattcatacggaacatgatccacgtctgaaatctacactcaaaacccgccacattagcatgttagctttaggtggtgtgattggtgctggcttatttgtcggttccagttcagtaatagctgcagcaggtccagcagccttcatctgctacgctattacaggaattatggtaggtttaattatgagaatgctaggagaaatggcggcagctcgcccttccactggctcatttgtagatttctctagattagctttcggcaatctcgcaggcttttcaactggatggctttattggtatttctgggtagttgtcgttggctttgaagctgtcgttggtggtcaaattattaatcagtggttaccagatattcctgtttgggttatctcacttggcctgctaatcttgatgacctccctcaacttattatcagtaagttcttttggtgaagcagaatattggtttgcgggcattaaagtagcagctattgttgtattcttggttatcgttggtgcatatgtatttaaagtatggccaaattcaacagcctctttttctaatttaactcagcatggcggtttcttgccccatggcacattagcgctattctctggtgtagtttcagtaattttctcaatgagtggagtagaagttgctactatcgctgctgctgaatccgataatccttcacaaaacattcgtcgtgccgtaaatactgtaatggcgcggatcttagtctttttcgttttatcgacactgttcattgttgttgcacaaccttggactaatataattccagggaaatcacctttcgtagcaacacttgaaaaaattggtattcctggtgctggtacaatgctgacagtagtaattcttgttgctgtattatctgtactgaacgcaggtttatacactgcatctcgtttactgcatgtattaagttcaaggggctgtagtagataa

SEQ ID NO: 49296 - DNA, 1665 bp, Acinetobacter baumannii; identical to SEQ ID NO: 48483

SEQ ID NO: 49297 - DNA, 2256 bp, Acinetobacter baumannii
atgaacaacgttagctataaccgtaattttaaaactgggaatgatcaaagaattaatcaccgttcttttgtattaaatggtgttgcatctgcacaaatagcccttcgattaggctatgcattaggcaccgtatttgttctatgtgcatcaaatacctatgctgctgttattgataattcagcaaaaactctagaacaacaaactgctcaaacaaatgtagcagctttacccgcaattaccgtaaaagctgaacaagatgatacttatgcgggagggcaggtttcgtcgaaaagctcagttggctttttaggtaataaaaccgttatggaaaccccgtttaataccattgcgtatacggatacatatatcgccgataaacaggcaaaagatataacaagtgtgattgcgaaaacagatccatccgtgttcaccaatgcggcaagtggtggctggagtgaaaactattatattcgtggctttgagtcgagcccgagtgatatgtctatgaatggattgtttggtataaccccttattatcgaacttcacctgaaatgtttgaaaaaataaatgtacttaaaggtccttctgcattactcaatggaatgccaccaacaggttccattggtgggacagttgatctcactaccaaacgtgcaacggatgaaccattaacacgtttgactacgacatatatgtctgactctcagtttggtgggcatttagatgttggacgacgatttggttcggacaaggaattcggtgtgcgagcaaatgcggtatatcgggatggctctggaccagtagaaaaacaggatttgaaaactgagttattttcattaggaatggattggcatggtgatcgtgcacgtgtttcgacagatctttacacatccaaagatcgagtggatggcgtaacacgaggcatcaacctcggaaaagatatcgcgattccgaaaccacctaaacctgagactttactcaatccagattggtcttttgtggacattcaagataagggcgccatgatacgcggtgaatatgatctgaccaataacgtgatggggtacgcaacctatggacaaagtaaaactgaatataaatataatggtgcgatgtcagcaactgttttagataacactggaaccttccaaacaagtattggtcaactggcatttaatgttgataaaaagtcggcagatgtagggctgaaaggaaaatttaatacaggagcagtaggacatcaatgggtagtcaatgcgacatattacaaacataatcaagatgattatggggtaagaaatgtggcaggagctgaatggacgactaatctttatgatccaatttgggggaaagctgtcccttttaatgcacccctaatatctaattctgaattgcaattaaatagttacggtttggcggataccctatcttttattgaagatcgcttacagttaactttaggtgtacgttatcaagaggtagaaagtagtaatttatttgtgccgacatcgactttgactaaatataaaaagaatgcaacgacaccaggcgccgcaattctatttaaagcgacagataaagtttcgatttatgcaaactacatcgagggcttaaccaaaggtgatgcagccccccttactgcggcaaactatccaacaatatttgcaccttacaaaacaaagcaaacagaatttggggtgaagtttgatcaaggtacatttgcgcataccttgtcattgtttgaaatcaaaaaaccaagtgcttacactgatttagtaactaatatatatacgtctgggggagagcaacgtaatcgagggattgaatggagtttctttggatcaccaattgaaaatgtacgtttgatgggcggtgcatcttatattgaacctgaagtgactaaaacagccatccaaagcaatgaaggaaatatggccgtaggtgtccctaaaacacaagggaaattaggtgttgaatgggataatgaagttgcacaaggcgttttaactttatctagcaatgcaaccgcagtttcgaaacagtatatcgatcaagaaaatacattgcatattcctggacgtacgctgatagatgtcggtgcacgatataaaacttcaatctcaaatcatcctattacttttaaagcagacatcaataacttgatgaataaagcctattggggaatgcctaaactatcgaatttggctttaggcgcaccaagaacgtatatgctatctgtatcatatgacttttaa

SEQ ID NO: 49298 - DNA, 390 bp, Acinetobacter baumannii
atggaaccagtttccactagcggtttaacagcaattttaaaattttatggcgcagcaattatggtgactttagcggtcgctttagttgcagcagttgtattgatgactcgtatgccacgctcaccacaagagtgggcagttggtttgatctgtacggttgtatcaagtttggctggcggctcattcattattgtgaagtggggacttcatgaatgggttactgatgtatgggggatgattgctctaggtgggttcttctttgtttgtggtttacccggttgggctttagtccgttggatttttaattttatagataaacaggaaggtaaaacgatcgttgaagtgatcaaagagtttaagaaagccagaaaagacattgaaaacagttaa

SEQ ID NO: 49299 - DNA, 543 bp, Acinetobacter baumannii
atgaatattgaaaaatatcttgatgaattaattaagcgtgaaggcgggtatgtaaataacccagctgatcggggcggtgcaactaaatatggcatcacacaagctgttgcgcgtgaaaatggctggaatggcaatatgaaagatttgccgcttgatgtggccaaagctatttacaagaagcaatactggacagctccgcgatttgaccaagtaaatgctgtttcttctgcagtagctgaagagcttctagacactggtgtgaattgcggtaccggatttgcaaaacctcttttacaacgagctttgaacttgcttaataaccaaggtaaagctggatatgcagatttagaggttgatggtgtttatggctcagcaacgctaggtgcccttaaaacatacttgtcaaaacgtgggaaagaaggtgagaaggttctggtgcgagtgctcaatattatgcaagggcaacgctacattgaaatctgtgagcgtaatccaaagcaggaacagtttttctatggctggattgctaaccggatcggctag

SEQ ID NO: 49300 - DNA, 1542 bp, Acinetobacter baumannii
atgaaatatgactttgaacaatcggataaagcttttttcggccatcctaaaccattacaaacgctattttttacagagctttgggaaagattttcttattatggaatccgacccttactcgttctttatatgattgcgatggtcaatgacggcggtctagcacttgatcgaccaactgccgcagcgattgttggattatttgcaggctccatgtatttaatgaccgtttttgggggatgggttgctgataactggttaggccaagcacgtgctgtctggtacggttcaattattattgccttaggtcacttatcaattgcccttacatctgtatttgatcaatctttcttttacttaggtttagtactgattgttttaggtaccggattatttaaaacatgtatttccgtgatcgtgggaacactatataaagccaatgatgcaagacgtgatgcaggtttttccattttctatatgggaattaacatggggtcatttattgccccacttattacagggcttttggcgaaagaccatggctggcatttaggctttggtattggtggcattgggatgttaattgctttattaattttccgttttatggcaatgcctcagctccaaacatttaatgagctacgccaagaagccaatagctgtagcaaacctgttgtagaaaataaaaatgcgcctaaaattgtatttagctttttattcgcagttgcagtcgttattgcgctaaccttcctcggtatcattcacatcaatcccgtcgctgtcgcaacctatttaaccgtaggtattagcattgggattattgcttattttgcatatttactacttttcctgaatttagagcaacatgaaaaatttaaaataattatttgcttcgttttattagcagcctctgccctattttggtcagctttcgaacaaaaacccacgacttttactttatttgcgcaagattatacggaccgtattgttttcggatttgaaatcccaactgtatggtttgaatcaatcaatgctctttttattattatctttgctccagttgcagcttggctatgggcgaagctaggtaaagcgaataaagatccaagctatatcagcaaatttattattgcgttgttattcgcagcaggtggctttttacttatgtctctagccagtcattttgctattcatggcggagtagtttcaccattttggttagtcggtactttatttcttcttaccataggtgaactttgcttaagcccaattggcttatcaaccatgaccaaacttgcacctgatgtcatacgtagtcaaattatgggtttatggtttacaggtacagctcttggcaaccttatggcaggtttaattggcgggcaagtctcggcagatggtattaatcatttacctagcctatttatgcgctgtgtattagccttggttattggcgcaatcgtgttatttttattaaagaaaccaatgaataaattaatggacaaaagtaccaacaaagttcaacctgatttggaaacgatatga

SEQ ID NO: 49301 - DNA, 396 bp, Acinetobacter baumannii
atggtgattaatatgaaagacaataatctaaaagatttattccagttcctcttaaaccataaaaaactcatccagtgtgggattacagttagtcagggcagctactcaattaccgatcttaatgaaggtgtttgtgttttggttgaacgaaatgttccattcaaagaatacttatcttttctagaaattatggataaatggcctgagaaaaataatgatcgaggttatacagttagaattgaaggcgaggatccctcagagatataccttgactattatgagaataacaaaaacatgtatggcaattgttcatatggcaagaaacgatgggatctgattttatttgtctatcaagaactattggaagcaaaggaagtcagctatttagaggcttga

SEQ ID NO: 49302 - DNA, 759 bp, Acinetobacter baumannii
atgaacttacaagacttaattagcgaaaatgaattttttatcaggaatcttaatgtagctcagtatgacgggctggatgagttgacaaatttagatgaatataaatctgaatttttggacaaaattagaaaactcaattttggcagtaatgaaaacagacttttgcaaattttagcgcaagacgtttttgaggaagtttacgaatactgtgtatatcaaacctttgtagaatgttgcatgaatacaaaatggatgactgcaaatggttttttctttccagttaattttgatctaaaagaaaaatattatgaagatccagaagcgggatatgtgataaatacattcgatgtaatcattagtgcaaatctccatgcaatataccaagtaagacataatggaaaggtatattttgatgaacatcaagaagagattctacagttttgggctgactacattatcgatattttacgtcgaaataagcgtcaggcagacaagtttattataggtaataaactagaatttgatcttcaaactgaagggtatgtatttccgttagatatggatgaagatactttttatcaaacatttaacgaagcagaaattaacttctatatccttcagcagagtggaaaagactacaagatagagaagttttctaacacgtacaataacggtggagcagaagaaagtaagatggcttttgaatgtttcttaaagttctatccatacacagacttaactttaatagccaatttttaa

SEQ ID NO: 49303 - DNA, 315 bp, Acinetobacter baumannii
atgaaaatttatacaaaaattgcccttaattacttcagaaatttaatttctgcatgtggaaaagaacatgggatatttttctcagaatcaccacaaaatccaaaacatttagtagccaatgacactatttatttcattactcaaattgatgactcaattgtatttattgattgtaaatatggtccagtttcaaattatcggatagatggaattttagattttacatctaattctatagaggatgccgctcaaattgctactaataattttcgtctaatctgtgaaaatcattacactatcttgaattgtgaataa

SEQ ID NO: 49304 - DNA, 498 bp, Acinetobacter baumannii
atgaaaaaatggtttagttctgatgtaaacaaccttgatgatttaaagaaagaataccgtaaactttgctttaaacatcatccagacatgggcggctcgactgaagatatgcaagccataaattcagaatatgagcagcttttaaaagttctaattaataaaaaggcagacagtaactattcagagaaatctacttttaaaaaccgagatgaagaaattgatgcagaaattcgattgagagaagttttagaaaagatagaaatcttggaagggttagagattgagagaataggactatggttatatgtttcaggcaatacaaaaacgcataaggaagcattaaaagaggctggtttaaaatgggcacatgctagaaaactttggatatatgtaggtacagaatgcagaggacgaggaaacaaagatatggacgagcttagagcaaaatacggaaatgaaaaggtaaaaactagaagtaaaattaaaaaaattgcttaa

SEQ ID NO: 49305 - DNA, 285 bp, Acinetobacter baumannii
atgtatgcaattgttgattcaaatatgaatgtcattgatgcttcgatttgtaaaattaaattagaatataaattggctgataaattgttttggatagctcacaattttggtcgtcaagctgaaggagttaagcaagatgaatttgaaatagatgaactaagtgatccagaagtatgcaatgctattcacatggcttatcaaaatgcttttgactataagaagaatgaaattagtgatagttataaaatcgtaaaatgggattgtaaacaggcaatttggatttaa

SEQ ID NO: 49306 - DNA, 333 bp, Acinetobacter baumannii
atgattaaatcaaataatatgatcgacattaaaaatcttatcaatgaatttcgcaatgaaactttattggaaaaagagaaagtctttattgatggtaaagacaaaaaaagcgttattactggttctaaaattttaactctagcacttactaaagagaatattatttatactatttatcacatagaagtatgccgtgatgaggaaggcaaaacagtcaaacgttataaaatccatcaaagaaaatctttaggtttttcaattccacttagctttttggtaaagcgtgaatttgaaaaagctgcaccagaaactttaataaatgctttaatttga

SEQ ID NO: 49307 - DNA, 195 bp, Acinetobacter baumannii
atgattgctcatcgaattaatgattcaactgaagaactaaaacttgaagttttaaaaagtgcagcaggtttttacattggaacttttgattatgattctgataattatggtcctgttagccgtgtatcggaatacttcaagaccagtgaggaagcagaatatgcattaaggaataattgctggacacaacgttaa

SEQ ID NO: 49308 - DNA, 330 bp, Acinetobacter baumannii
atgaataatgttgctcaaacaaatgacgaatctgttaaggctgaaaatgatgcagccaatacaaattcaaatgaaacaaaagcaaaagatgaatcaggtaatattgaagattatttatcgccgaaaggcaaaaaattagctcaacgaaaagagcaaatgaaaagagaattagaattacttgatgaacaaattgctcaagaagttgaacaagcaaaattaaaagtaaaagatgatttgtttaaacttttagatagaaataagcttcttgaaatatctccaaaagtttggaaaaaacatatggacgatattaaaaagattttattaggataa

SEQ ID NO: 49309 - DNA, 471 bp, Acinetobacter baumannii
atgacccaaaagaaagtttcaattggaggtaaggttagccctgaaattaagaaatactatgatgatatggctaatagattaggaatctctacaagtcagttacttgaaaaaatcttaattgaaaaccttacattatctaaagtccaaatcttaattgatgactttgacaacaaagtcaattatatggtcgagcttatcaatcagagttttacgaaccaatctcattttattgatgaaaaatttgatatctcaaattctagtttagctaagttgatttatgaaaacggtttgaataaacaaactgaagagttcattgctactttaactttcttggaagctgctaagtataaaaatctgccattagttaaagactttaataaacgcgaaaccactggtgaagctctctttttacaagcatcaaaagaagctagagagtcagttgctaaacgtcgtaatcaatcagaggcttaa

SEQ ID NO: 49310 - DNA, 2160 bp, Acinetobacter baumannii
atgaaagcaaagaataactcaaaagcaatcgaatttacgagaggttctgaaatatggattcatcaatttcgaatgtttatttcaagcatgatgaatgtcatagtttttggcctgatgattacgattggcattgtatgtgcatttctatacattaaattaaaggatgttcattttcttgctttaagtgtgcaatacgatatttggttaaagtcagtatttaataatccagatgcgagagtagcactgaagctaaatggtgttgtacgtgattacactcttgatcaagctcagcacattattaatccctattttaaccaattaaagttttatgtttttcgagcatttattttaggtattcttttaagctcatttctagtcggtggtcttatttattactggtttacttatggtaaggaagtaatgtctgatgaacaaattcgtggttcagaactagtttctaatgacgcattaatttataaaatccaaagtacgaaaggattcagtccatataaaatttctaacatacctatggtaaaaaatacagaaggtacgaatgttggtatttttggtgctcctggttctggtaagtctcaaatttttagagatcatttatctcaggttagaaacaataaaagaaaagctatcgtttatgatccttcaggagaattcacttcagaattttatcgaccaggtatagatattattctaaatccatttgatgaacgtatgccgtattggtcaccattttttgaaattcgtcatgatgagcatttcgatagtattgctaatgcttttgttccagttgagggtaaagatccttattttggcgaagctggtagaacagtattagctgaagtcatgcgtgaattacatgctaatggtatacactcaaataagactctccatgacacgattgcacattttactattgaagaaatatcgtctgtgcttgagggaacggctgcttcaaagcatgttgataaaaaagctgaaaagacggcactggctgttcttacaacagtacaaaataaattaagagcatttcgctatttaccagattccggtacacagttttctatacgtgattgggtaagtcggcctgaagaagactcatggattttcctttcgcttagagaagaacagaaaactactattgaaccacttattacgttgtggttttcaatattcattaaagccgtaatgaacttagaaccaatacatcgtgaactattatggatgtattgtgatgagttcccaactctaccaaaaatggatgatttacctttatctcttacaaatactcgtaaattcggtttatgtcattttttaggactacaagatattcctcaacttgaagaaaagtacggagaaaaaattgctcgttcaataatttcagctttacaaacgaaagtgttctatcgagttaatgaaaatgaaactgcgaaaagaatgtctgaaattcttggacagatggaagttgctgaaaaaaatatgtctagaagtatgggggttaatgattcaagagacggtgatagttttattactcaaaggagagaacgctttattgttttaccatctgaaattatgaagttgccagatctaacaggatacttaagagttcctggtgattatccagttacgaagattactcagaaatatcatcctcacttaaaaaatgttccagcatttatagaacgagaaaatatgggtttcatttctgcgtttgcggttgctgaagctttagaatcccaatcgaattctgatggaaaagagccattagtagaacaacaaaatgaagaaggcaatttctttgggaattctactgtgccacttgttggaaatagtagtttctttgggaaatctaatacaacctctgaaaatatttatgaaaattcacctttagatttatttcattctcaaacagaagatagtgatttatcacttaatgaaaaaaacggtattcaaccagacgaaataatcccggacgaagatgaaaagcctaaagttgttaataatgacagactacatacttttgccagctatcttgccgcaaccgatgaatcaagtgttcagaaaaataatgacgttactcctgacactaattcaagtaatgattctaatgaatctagttttaaagacttgttcaataacaatgattag

SEQ ID NO: 49311 - DNA, 3276 bp, Acinetobacter baumannii
atgctaagtgttaacaatgtagttgaatcaggaaaggctttgtcttactaccaattagataattattatactaatgagcaacaatcattggatcaaactgaatggtatggtcgtggtgctcaagtattaggtattaatggtgaacaaattgaggcaaatatttttaaagacttgctagaaggtagagtagaagatcaacagttggggcgagttaggaaagatgaaaatggtcaaagttatattgatcatagagctggtatagatttaacgtttagtgctccaaaatctgtttcgataatggcagaggtttttgaaaatcaagatgtgctacaagcacatcttgatgctgttaaagatactatttccgctattgaagatcattacacgcaaactagaatcagtgttgatggcacaattcaaaaatcagagagtgataatttagttgttgctctttttaatcacaatactagtagagcattggatccgcaaactcatacacatgcagttgttatgaacatgactttaaatgataaagattcatggacggcattaagtaacgaagtaatttatgataatcaggcaaccataggttcgatatataattctaatctcgctcaaaatttaagagctataggtcttgatgtagaggtaaaagataatcagggcaattttgaaattgccggctttactccagaaatgatacaagagttttctcagcgaagaactcagattattgaaagtttaaaaagtagaggaattgatattgaagatgcacctgctagtttgagagaacaagcagctttaaaaacacgggaaaggaaacaggcatttaatgaggctgaattacgtcaagtttggaaggaacgtgcaagtgaacttggcattacacaaagttttgtagataagctagaagataaaattaaaacgaatcagatgaatgcggatccgcaaccttcagaaaaaaaccaaaaagacatatggaaaaccggatcctcaaaaaatgatccgaatatatcatttgaagggaaaacggaagtttctagcgataaatctaataacgctgataaagaagcaccagataaacgaattgacaactctgaaacgcaaaatccgagcgatagcgccatatcaaatgaaaaagctagtcaagtgtcaggaaaatcccaaaaagagccagaaacgcaaaatatgggccaagaagcgcatattcaagatgaaggtagattgggtaagaaacaaactgaacctaaagcgagtaacaattcaaaagaccagactgtacctagagaacgaccttatcaaagaaagaatcgtgaatctcaacaagtactcataagccaaaaaacaaaagaagccgtttactacgctatagggcatcacaccgaaagagaaatgatgatacctgaaacaaagatactaaatacggctatgaaatttgacatacaagaagtaactcatgaacaagtacgagctgagttaaatagactagaaaaagaaaaaatcattgtccgggtagatgggaagttaacaactcagcgtttggcacatagcgaagtttggtcgttacaacatatacaaaatgaacaaaaaagcgtgagtccaatagtggatgaatctcaagttaaaacaagactcgatcaagaggaacagttgagagggaggaagtttacacccggacaaagagcaagtcttgaaacaatatttagttctgaaagtagatatataggcgtagacggtttagctggtacgggtaaaactacaatgctgcatactttgaataaagtagcctcagaaaacggttttattgttaaaggtatggccgccactggcgtagctgctaaaaacttagaattggaaactggtataccctcaaaaacaatggccatgtttcagattaaagaaaatgagcttcagaaagaaattgaaaagaatgggggagtaaaccgtaaaaatgaaatctggatagttgatgaatcttcatttgtaagccagacaaacttcaaagacattttgactttggctaagcaagctaatagtcgtgttgtttttttaggggataaattgcagcttcagtcaattagtgcaggaaaaccatttgaacttgtacaaaatagaggtgtgctaaaaacttcacaaatgcatgacattatccgtcaaaaaaaccaggaacttaaagacgtggtttctgttgtcgttgcaaaaaacaaagaaggtaaaattgatttaagtaacaacgataaagcttttgatttacttgataaacagcaaaggattcatgaagtagttgtagctgcaaagggtacacaaccagctctacatgagcagcatgacttatttcaggaaattcatgaagtacatcaaaaattagttggtgattatatgaggcttaataaggaatcaagagataatagccttatcattactccctttaactcagatagagtaatgctgaactcacttgtaagaagcgaaatgaaaaaactaaatgaattagatcataatgatcataattttgagatcttagtaaataccaatttcactgaagcggagcgtaaacatattaataattatgagcctaatatgacgatacgttttgggaaatcatttacagataaagacacaggaatcaaaattgaaaaaggtgactatctaaaagtaatgatgaaagacaaagaaggtaaattggtattaattgataaggataaaaataaaattaaatggaaccctaaaaaaggaagtgtagaagtatataaatcagaacaaagaaagatagctaagggagatgtaataagaattaccaggacaaaagatgatgaacagatcaagaatggtgaaagatataaaatcaaggatattcatgaagataaagtaatagtagaaggccaggatgggaaagagaaaagcctatcaagaagtgggtttaaacattttgattacggctatagtagtactgtttattcctctcagggcttaacacagggtaatgtatttttattactaaatagccaaaaattagcaaatgatctgaaaagtgataaggctgccaccaaagttttaggtaatacatttggaacaagatcattttatgttgctgtaacgagggaagagcataatttgcagatttacactgataataaacaaatgacacgagaagcaattacgtttaaacaagataaaacaagttatttggatacagttaaagaagttggtcaaaaagtaccagaacatatcatcgaaaatgaaaaaattggtgtaactaatgagctagaaagatag

SEQ ID NO: 49312 - DNA, 426 bp, Acinetobacter baumannii
atggtggtaacgagtaatgcagtaatgcacaatgtttcaaaacgtgtgtatgatgaaagagaaccatttcaggtcctactaagcccaactttgaaaatgatattaggtaactatcaaaagttgaaaaaattaccctttaattacgtgcttggaaagatcttagaggatacagtaaataatgagaaaattactgctgaagttagaaaattacaaccagcttataagatgattaaaggctcaagaactgtaataagaattgaagtagaaacagctaaaagaatccgggaaacagcagtacagaaaaagggtgaaacactatcgagttttactaatgctgcggtctattacttcttaaagaatggtgattttgaaacattgccagagcttaaacaaagcattgatgaaatagagaatattgaactttaa

SEQ ID NO: 49313 - DNA, 327 bp, Acinetobacter baumannii
atgcctaattttatttttaaccctgaaacttttgtgacaccaggccacggctctgatcccggtgagtggaatgatgatgatcgaaaggacattacaactcttagatatctttatcctgagatagcacattggggcgatttagctataggttctgcatttggctcttattctttcgatattcttgaagttcaatgggctgaatggatgattaagcgcgatgatagctttcttaattattgttgctggcgtcaattgtatggtgagtggcaattccatttagatattgataaagtagaccaagaagtctcgcatttatggaaaatttaa

SEQ ID NO: 49314 - DNA, 567 bp, Acinetobacter baumannii
atgaacactaaacttgattcgacctctaaagtttttttaactttatttggagcagtacaaccttttattttaaatttggtttttattttctttgctgttttagcttattatataaattttatcccaaagccagaagttttaatctttttcttatgctaccttaacgctcagtcttttggaaaaagtttttatctttttggtttattaaaatattccaaaggtcttaatcagtttccttttaaagagctaggggtaatcattataaatcttatttttatatttcttatcctatttttttcttattccttctctaatttaagtttttcttctgaaaatactaaaagtgcttttggtactttttgtttaattttaatgattgatttaattctaactccttacacttttaagtatttcagagagtattcttttattagtattaccgatagttccgctgataatgcaattgttgttgatgacaaaaagaaagggattttcaattttgtcttcagtatcgcttcattaactttaggtatgctcgttctcaattttgttaagggattattctaa

SEQ ID NO: 49315 - DNA, 279 bp, Acinetobacter baumannii
atggatagttttacacttactttatatgtatcaagtcttttattgttgcaatcactgagttttctttttaaggatgaagttgaagaatttgatacctctttaatttgtttaagtttaatgtgtgcagttggaattaaagcttcatttattttttttacaaccacactttcaataaacaaaatcgtaagtatcatttttttgatactatttacaattttttcattaatccatattctcactaatgtttacgtttctttcgtaaaaagaaaatacggatag

SEQ ID NO: 49316 - DNA, 453 bp, Acinetobacter baumannii
atgaaattacaacaaccattagacctagttaataattgtctaatttctctaccagtaccagacacttctttattaaatgatacatctatcgatatcggaatgtcttgtatttctataatgttaataacaactgttatatcactgataattcttaagatactaagttttaaggttaaaatcagtaatatagcagttttttcagtttcaatttttctaggtttatcagcttgttttatatcttggccccatcagtttaaaaaagctatgcaaccatatcaaaatgcgcttgacctagcagttccaactattaaatcagttaatgaccctatattaagctcattatataacaaaggtgaaaagttttcttttcctgaatatggtgctttagcaaaaaaatataatgaacgatctcaagtaattaaagcatttgcaattaaaaattcttgtaaataa

SEQ ID NO: 49317 - DNA, 171 bp, Acinetobacter baumannii
atgggtccatttttctatttaactgctcttgctcttttatttagctggcatatattttatatccatagatttaataatcctatgatactattccttgcagggatgttagttatatcatttatgataattcaaccatcccttcctcaagtatatttttttcaaattaattaa

SEQ ID NO: 49318 - DNA, 264 bp, Acinetobacter baumannii
atgaaaaaattactaattacttctatggtagctttaacgatagggttaaatggctgtgcaagcatcattacaggttcttcacaaacacttacttttacaagtgtgcctgagtcagcaactattgagattaaaaatcgtaatggggtaaaagtccatacggggcaaacacctgctaccgttagcttaaaaaaggtgccggttatttcaaaccagaaagttatcaagtatctttcagtaaacctggttatcaaactaaaacggtag

SEQ ID NO: 49319 - DNA, 795 bp, Acinetobacter baumannii
atgagagcttctactgttacaattaaaactgaacaagatctagaaaaattaagagtttctgggcgtttggctgcacaagttttagaaatgataggggagtatgtcaagccaggcgtaacaactgaatatttagacaatatttgtaatgattacatcgtaaatactttaaaagttataccggctaatgtgggttatcatggattcacaaaaacaatatgtacttcagtcaatgaggtggtatgtcacggtatcccttctcaaaataaaattttaaaagatggcgatattattaatattgatgtagcaattattaaagacggctattttggtgatacgagccgtatgtactatgtcggtaacgtaaatccacatgctaaaaaattagttgaaactacttatgaagcaatggtcgctggtatacatgcagttaaaccaggggcgactttaggggatattggttacgctattcaatcggtcgctcatcgcgaaggatatagcattgttcgtgaatattgcgggcatggtattggtaaagtttatcatgaacaacctaatattctgcattatggacaacgcggccaaggtcttgttttgaaaaaagggatggtctttacaattgaacctatggttaatgcaggcaaacctcaggtaaaagagctaaatgacggctggaccgtaattacccaagatcattcgttatctgctcaatgggaacatatggttgctgttacagatacaggatttgaattattaacgccgtggcccgaaggtgtgggaaattatccagaaatttaa

SEQ ID NO: 49320 - DNA, 903 bp, Acinetobacter baumannii
atgctcacagatcttgatgatttttattgttttgcccttgttgttgagcatggtggatttagtgccgccgaacgtgttacggatattccaaaatcaaaattaagtcgtcgtgtttataacttagaggaaaatttaggggttcgcttaattcagcgcagttctcgtcattttgcagttaccgatattggtatggatatttatagacacgcccaagtcatgatgaatgccgcacaagcagctcatgatttggttgatcacttaagtattcaaccaagaggtgtagtcaaagtaagcgttcctgtagatatagcacaaaaccagctacccaaaattttgccagcatttttaaaaaaatatcctgaaattcgattacaacttattgtaagtaatcgacgcgttgatgtaattaatgaagggattgatattgctctacgagtcagatctaaactagatgatgaccctagtctggtactaagacagtttgcactcatagaacaaagtctctttgcaagccaagcttatttaaatgagtttggtaatattaagtcacctgatgagttaagtgatcatcgtattttaagcttgtctgaagaacatttagatcaacaatttatattacatggcccagacaaccaactgaagaaagtgaaagttagcccaactatcatgggaacaaatatttatatgcttgcccaacttgcaagtcaaaattgtggtattgccttgctacctgacacagcagctgaggattttgtaaaatcaggtcaacttgtacaaatcttgccagattggaaagcagcccacggtatattccatgctgtttatccgtcacgaagaggtttactgccagctgtacgtgtatttattgattatttggtagaacatctttcagaacatccataa

SEQ ID NO: 49321 - DNA, 891 bp, Acinetobacter baumannii
atgagtataactgtcttacctagcactgcatacataacttctcatgagttaattagtggtggggtgatgggagcaacaagaaaagctagtattgaatgggatgatgggtcattgcgtaagtgctacgtaaaggtgtatccaaaacaggacaggataagaaaaatattcaatgaattgactggatttttaataggtaatgctttgggtatatttcagcctgatagtgctgccctaatgccattaaaccaattgttttatgctgattatgggctaaatactgctaatgaagaatctgagacctgggcatgggttacttctgaatgtgggcaaagcgtatctggaatctttcaacttaataaatcccaagcttctctagagagaaatattgaagacacaaaaaataaatatattaatgcaatttcattaatatgtgatcaaaaaaatattcctcaaataatcgcttttgatgatttcattgcaaatgatgaccggaatattggaaatctagtgatgacaggaaatggcaacatgggagtaatagatcatggagaaattctaggtagaatagattggataaaaaatctaactcagcttgacaaaagtcaatttttcttcaataaattgctttatattctcgatcagcataatgctattaagcagcaaacaacttttacagttaaaagtaaagcagtagaagctattggtgagcacgagcaagcttttatttctatacaaaagcaattactcacctggtggaaaaatattcttgaaatttcagacatacctgaaactgatcatccaagatacttggatcatttatttgattttttgcactaccgttgccaacaacctagtgcactatttgccaatcgaataggactggtggcttaa

SEQ ID NO: 49322 - DNA, 867 bp, Acinetobacter baumannii
atgtctttacttgaacgtctatctaaagcaaaaacaacacctttattaactggtgaatggatgacaataaagtggacgccagatccaacaacacgcgagtgttttaatcttggtgttgtattgaaaacagaaaatgagatttttgttcgcactattgatggtgatagctttaatagattctcatgtatgtttggtgaggagatgaaatttcatgcccaacgcattacaaaacttgcagaatcatgggctaatgaaggctgcctagaattatcaagtcaattgatttttgataatcatgggtttattcgaggcaaaagcggaagtcagcttattgatcatttatttgatatagctgttcctttgggtcgtcctattattgctaaaaaaagaaaaaactcaggatttaatgcttttaactttcaacagctcagtaatagtttattggatgaattaaagcggcaagatcatgatggatttagctttaataaacttataccaagctctcgctatattgaaatcaataatcaaaatattcatgctcctttaagacctgtagatagtgatgctgttggtaattgggcaagtgttgtattttctgatccagcaagaattagaattgattacttacaagcgatcaatgatttaagaacagcatcagatcacttaaaaaagaaaccatatctatttattttaaaacctgatagcgacaatctggagcacttaacaccatatagaatcgaacagatcgatgagattgttgacaaattagatagtacattgaagccacaaggtattgagttgtacagctcaacatctctagaaggtctggcaagtgagatatatgggtgggaaaaagaagtagcctaa

SEQ ID NO: 49323 - DNA, 270 bp, Acinetobacter baumannii
atgctaaaagatttgagaaatctatctgatgcagagcaacaagaatatttggatcgcttcataatggctaatgaagaacagaagtttcctcaagaggttgtagcactttatttagattgctcgccttggacattagctagaatgcgttgtgatcaatcatcactgcctttctcgaaaattgggagacgtgtttcatataaaaagaaagacgttttgaaatatgagcaaagcaagactgtgcttaatacagcacagcttgcaacagtttaa

SEQ ID NO: 49324 - DNA, 1263 bp, Acinetobacter baumannii
atgaaactcaacaaatctactgttgatgctattccattaactgaaaaaggtcaaaaaatatatagagatgcagaactgatcggttttgctgttcgggtaactaataaaagtaaaacctatattgttgaaaggaggcatgaaggtgaactctatcgagtgacaattggtaaaactaccgatattcctgcaacaaatgctcgagcaaaagctcagatgattctggcgaaaatttcaaacaatgaatatgaaaagcctatcaaattaaagaatgttgctaatcctttagatattacagtgaatgaagctcttcaaatttatattgatagaaatgactttaggccaaaaacaattaggcagtaccgtaagtactttgatttatatttggggtggggcaacaaaaagcttttccagatatctaagcaagaagtactggatcgatttattgaggtatcagaagtaagtgagtcgtcagcaaatggtgctgtatctcttttaggtaccttatggaagtatattcatgttctttattcaacagatgagaacccgattcttaaaagtaatccagttgacattatttccgtaacaagaggttggaataaaatagcaagtagggatagacatctccataaagacatcattcacaaatattacaatgcagtgcttcattatgaagatgagttaaatctggaaaatactgctaggtcaaacacgcatcgggatatcgtattgatgtgcatgtatacgggatgccgtaaacaggaggcatgttgtctaaagtggtctgatgtagatattaaaaatggtaccttaacttttagagataccaaaaatggttcagatcatacttttcctattggtgatcatctacacagtattttgcgtgaacgttggttattaagagaaaacgattgggttttcccagctactaagatgcctacttcgtggaatatgcatgcgactaaggtagatacattattgaatagagtgggtaaagaagttgactattacgtttcaatgcatgatttccgccgtacatttgccactatatgcaaccttttaagatttaatatttatgtgacaaaaagacttcttaatcacacggctaaaccaagaattgatgtgacaggtggatatgttcaaattccagatgaggaattaagagcttcaatgaacatgattgaagcggtgtatcaaggcaagattgattgctttaattaccaatctgtttgggcagaaagattaaaagaaataaaggcggtttaa

SEQ ID NO: 49325 - DNA, 252 bp, Acinetobacter baumannii; identical to SEQ ID NO: 48628

SEQ ID NO: 49326 - DNA, 372 bp, Acinetobacter baumannii
atgaacaagaatagttatcgcattatttatagcaaagcacgtcaaatgtttgtggccgtggctgaaaatgtacgaagccaaaccaagacttctggtcaaagtgaagcaagtacccagaacaatattgataacactgaatctcaggcatttcatcaactctggcaagtgaaggcactggttgctagtataagtttgtggatgcctttagcacctgtttatgcgggtattgtagcggacagtgccgcaaatgctgcgaatagagcagtgattggtgctggtaagaactcagcaggtacagtcgttcctgtagttaatattcaaactccgaaaaatggtatatcccataatatttataggggctgtagtagataa

SEQ ID NO: 49327 - DNA, 333 bp, Acinetobacter baumannii
gtggaagattcaacacttaatgagttaatacgtaatacagaattattctttgaacatcactggaatgtagatctattaggaaagcctcctgaatggtcaccagtacattttaattttgggaaaattcctaattacgataaacaaggtgtatatgcgtttatcaaaggggatttagtgacttatatcggtgttggcacttctagaggtgctggccgttatcgtggtaatggcttaagcgccagggtaatgaaatattgccgatggaatgaagataaaactgaatatattgcgatagatccaagattaaaagatgctggatccatggcagagtaa

SEQ ID NO: 49328 - DNA, 519 bp, Acinetobacter baumannii
atggaaacatttgcagaacctgttttttctaatgatttattagcgaaagcagaaaatggagatacttctgctcagttagaattagccgagatttatctatatggtcatggtgttgattcagatgaaaatcaagctgaagtttgggctcttaaatcagcagaaaatggaaatgtagcagcaatgttttggttagctgatggatatgttacttatgctagattaatggaagatgatgacaaaaacgattctttagaacatttccaaaaagcttttaagtggtttcagaaagcctcagaaaatggccattctgaatcaatggttgagttagctgatctatatactcgtgcagatagcggaatagaagttaatattaataaagcttttgaacttcgtgaaaaggctgcaaagttaggtaataagaaagcaatgcgaagtctttccgttatgtatcgtgatggtataggtattcctaaaaatactgatttagctcaaagttggtgggataagtctgaaaattag

SEQ ID NO: 49329 - DNA, 1734 bp, Acinetobacter baumannii
atgaataacaaacaagttcttcgttcggctgcctggtttggtacaacggataaaaatggctttatgtatcgcagctggatgaagaaccaaggaattccagatcatgagtttcaaggcaagcctatcattgggatttgtaatacgtggtctgaactcaccccatgtaatgcgcattttcgaaaaattgccgaacacgtaaaaaaaggaattttagaggcgggcggctaccctgttgagtttcctgtattttcaaatggtgagtcgaatttacgtcctaccgccatgtttacccgtaacttagccagtatggatgttgaagaagcgattcgtggtaaccctattgacggtgtggtgttactgacaggttgtgacaaaaccacccctgcattattaatgggagctgcaagttgtgatattcctgccattgtagtgactggcggtcccatgctgaatggtaagcacaaaggtaaagacattggtgcaggtaccatcgtttggcaaatgcatgaagaactcaaagcaggcaaaattgatttaaatgaatttttatctgctgaatctggtatgtcgcgctcggctggtacatgtaataccatgggcacagcttctacaatggcctgtatggctgaagccctaggcacttccttaccccacaatgcggccattccagctgtagattctcgacgttatgtgttggctcatctttctggcatgcgtattgttgatatggttcatgaagatttacgtctttccaaaatcttaaccaaagaagctttcgaaaatgccattaaagtcaatgcagctattggtggttcaaccaatgccgtgattcacttaaaagcaattgctggacgcattggggttgatttacaactcgatgactggaaccgtgttggccgtggcatgccaaccattgttgacttacagccttcgggtcgttttttaatggaagagttctattatagcggcggcttgccagccgtgattcgtcgcatgggtgaagccaatctcttaccacatcctcaagctttaaccgtaaacggtcaaaccatttgggaaaactgccaacaatcacctatttataacgatgaagtaattcgaaaaatagataatccaattcgacaagatggcggtatgtgtattttgcgcgggaatttagcgcctaaaggtgcggtgcttaaaccatctgctgccacacccgaacttatgaagcatcgtggtcgtgcagtcgtattcgaaaacttcgatgattataaagcccgcattaatgacccagatctagatgtcgatgaaacttgtattcttgtgatgaaaaatgccggccctaaaggctatccgggcatggccgaggttggaaatatgggcctaccaccaaagattttagccaaaggcattaccgacatggttcgtatttccgacgcacgtatgagtggaactgcgtatggcacggtcgttttacatgttgcccctgaagctatggcgggtgggcctttggccgtagttcaaaatggtgactttatcgaacttgatgcctatgctggaaaacttcacctagaagtgagtgatgaagaacttaagcaacgtcttgaaaatttagcaccaccagctccaccaagttttattggcggttaccgtaagctctatgtagaacatgttttacaagccgatgagggttgtgattttgatttcttggtcggttgccgtggctcagaagttccacgtcattcccattaa

SEQ ID NO: 49330 - DNA, 666 bp, Acinetobacter baumannii
gtggttttcaacaaacttgggggtaagcctgcactacaaattggtttcgactatgcaaatccgaatgggctatttgtgggtacttgggcatccaatgtaagttctaactatctccgtgatgcttcagttgaatgggacttttatgcaggttatttaaaaaccatcgataaattctcaattggaatgtctgttttttattattattacccaggtgcaaaaagtacggctgaaacggggagtacaagctataactatggcgaaattgtgcctcaaattggctatggtcctttaagtctcaaatattttattacttataccccagattacgcaggttataactcaaatacgatgggtggaccggaaggtaaacgttcacgaggaacaacttatttagacctcaactttacacagccgatcaatgaaagttggacttttggtgcccactatggctatgaaagaattaaaaacttctcagaagctaattttcaggatatgaaagtcgaacttattaaagatttaggtgatggctggactacagggttagcttataccaaagcatgggacaaagacggatactatagaaattatagtaatggtgaatcagatgcaccaatttcaaatccaattcactcaacctttacagtagctgtaaaaaaggtgttctaa

SEQ ID NO: 49331 - DNA, 507 bp, Acinetobacter baumannii; identical to SEQ ID NO: 46159

SEQ ID NO: 49332 - DNA, 1587 bp, Acinetobacter baumannii
atgaaatctaatcaatggttgactctcggctcgcatcttattttaaaaaaatggtgtgatgcatctgaccgtaatttccaaaaacagtttaatgctttagagaccacgcaacgtcaaattttgcattcgatattacagacttctacatttgccaaagataagaaagttcaaaactatgagcagtttgtaaaagcatttcctgcaactcgctatagcgcttggcgagaagacattcagcgttaccgtgaacaaaagctttcactctctagcagtaaactggttcgtttccagccgaccagtggttcgagtgaacaaatcaagtttattccatacaccaagctgtttttagatgaacttgaccatgcaattgcaccgtggatggcaagtttataccgcaaatgcctacagttgagttcgggtacacattattggtctgtgtcatggttgcctgaaagtcagcgtgaagttttaaaagacaaaaatctaaatgatgacagtgcgctactcggtataggtaaacgcatactgtctaagtttacccaagcggttccaagtaacgttgcctttgcagcaaatgctgacgatgcactgtttgctaccatttgctatttggtcgcaaaccgtaacttagccatgatgtcggtatggagtccaacttttgcgctgcaattacttgaacgtttggagtctatgcaacaagacgtggttgaggttttgcaaagtggtaaatggggcagtcgtcaggcttccttaaaagaagtcactgcaccgcatagccctgaaagtgctcaagccttaattgcaagttcaaacggcgaacagatcgactttaaaaaactttggccaaagttaagtctagtatcgagttgggatactgcaggttcaaaagcgtgggccgaaaaattaaaagagaaattgcccaatgttcagtttgaaggtaaaggcttatgggcgacggaaggtgtagtcaccattccctataatgaccaatacccattggcttaccaaagtcacttctatgaatttgaatatttagaaggtgagaaacaaggtcaaatcgttccttcatggcaacttaaacaaggtgacgtggtcagcccgctgattacttcgggtaatggcttactgcgttactgtctagatgactgcttaaaagtgactggctttttagagcaaattccgtgttttgagttccaaggccgccgttttggggtcgatctggtcggtgagaagttagcacctgaaaccgctcaacagttgttgtcgcagttaaacgaaacggaatcaaaagcaatttctttactggcgattgatacccaacaacaagttaaaccattttattgcgtgctttttgaaggtgaaattcatcacagcattagcaatgaatatatcgacagtattttacgtcaaaacttccactatgaacttgcacgaaacttagggcagctcgaccagcctcaaattcgccaagccaataatggctggaatgcgtacaaaaaactggtcatgtttgatggcattatcgaaggcaatatcaagcctgaaccactcaaaaaagtcaccctgaatagtttggaacaactatga

SEQ ID NO: 49333 - DNA, 822 bp, Acinetobacter baumannii
atgattaatacaacatataaactgatttcaaaattgaacctgaaaaacgcaacttatgggcaatattttgaaaaagagcaaatcgatactgaacgattaaaagtgatgtattccatttacgagcagtattatgaaaataccagattttctattttcgtagatgattttaaaaataaaagcggtgcgatcttaatttttgactcagaaacagatgagattgtcggtttctcgacggtagttgtgcagcatttctacttaaacggtaaagattacaccgtgctctttagcggtgatacggtcattttgaaaaagttttggggcacgcgcacattgcaaagtaccatgctcaaactcatgatcaaacttcgaattaaatatccttttaatgaactttattggcttctcatttctaaaggttataagacttatctcttacttgccaataactactatgtgtattacccaaacattaaagatgaaaaccaacatctttcggaagttgttgaacattactgtgaaaaattctttggcgaatactacgacaaagaagccggcttactcaactttggtgatgactatcaaccattaaaaggcgaagtcgcaccgattactgccgaaatgagagaaaagaacccaaatattcatttctttgagcagaaaaatccaacttggagagccggtacagaactgccatgtattggtcgacttggttggaaagatattgcccgtttccctgtaaaactgatgacgaagccgacaagcaaaggaaaatttgaagcgcagttaagccataaaacaaaacgtagagaggctatccaatga

SEQ ID NO: 49334 - DNA, 1548 bp, Acinetobacter baumannii
atgaatgagcatgttgaagccgagtggaggtttcccgcaaaaactgcatgggcaatttttgctgccatgatttttggcaacttcatggcgattcttgatattcagatcgtggcaagttctctaaacgaagttcaagctggtatgagtgcaagccgttatgaagtcacttgggtacaaacggtttatttaattgccgagattattgcgattccaatgtcgagtattgtctcgcgagtgctttcaacacgggtgtattacaccatgtgtgcaataggttttacggtcagttctttactttgtgctttgtcatggaacttggaaagtttactggtgttccgtggcattcaaggctttatgggtggcgggatgattccgacttccatgacggcgttgtatttactgtttccagaaccaaaacgctcattacctttggtcatgtttggcatgatcagtactttaggtccagcaattggcccaaccattggcggttggcttaccaataacttctcatggcactggatgttcctgatcaatattattccgggcattatcattgctacggtcatctactcaggtccaaatattgaccgtgccaactattcactcatcaaaagcatggattggtttagcttggtgggtatggcgatgtttttgggtgggcttgaatatttccttgatgaaggcgcacgacatgactggcttgcagacacaggcgttcggattgcttttatggtctgtgttgtaggcggcatgattttcttctctcgaagttttactcagcctaaacctttgctcgatttatcggtatttaaaaataaaaactttaccttaagtgccattacaacgtttgtgattggcatggcgctatatggcttgggttacatgattcctgtctttcttgggcaagtccgtgaaatgaacagtagccaaattggtcacgtcatgatggtgacaggtattgtcatgttctgctttgcgccatttcttgcgtggctcattcccaattttgatacccgcaaaaccgtatttgtcggaatgattctggcgggctttggtgtctggcttaattcacatttgagcattcatagtgattatgactttatgttttggccgcaaatttaccgtggtattggcctcatgatttgcctgattgtggtgtcacatttggctatgagtacattaccactcagtaaagtagccgatgccagtggtatttataacctgatgcgtaatatcggcggcgctgtggggttagcacttatcaattcatccttagattggctgaccgccatgcatgtcacccagattaatcagtcgatgacaccgcaaaactggatatttacagaacggcttgaccagcttacggcgcaatatcaggaagtcggtgcaaatgcccagcaaatcgcgctcagcgtgatctatcgcgatattcactttcaagcactgacatcgagtttcaatgacttattacgcatgctcgcaatcattatgtttgtgaccgcctttttaaccatatttatggatcgggggaagaaaatgaatatgtag

SEQ ID NO: 49335 - DNA, 3768 bp, Acinetobacter baumannii
atggctaaagagaatacacaacagaaagaaattaaaaaacaacctgctgttgaacttgctgtttttaacttaaatagcgtgacggatgtagcggacttgcaaatggtcgcaagtcaggttcagcgttatttacaagtgtgtggaaacacctcattagaacaaataaaaagtaaggccaatataaccacagttgctaatatctttgcattgacgggtagtgtactagatctaatgctctatgctacagataaaaaaactggtgatgctgctgtacaacgtggggcattacttgcggcaaatttaattggtttattttcagaaccgaataatgaagcacatgcacgaatggctttacgtccgatgtttggcttaatggcagagtgcttatatcgagaaaatggaaaaattaaagaaacggatattaagcgtttaggtttacatctcaatgcgatgatcgctggagatctagagaacttcttaaaagagactcaagcgaagttaagcagtttacttactagcgctacaacattgggtgtaaccattctacaaagcatggcgaccccagcaacaggtataaatgcaggaataaccactgcggcaggtgcaagtgcagaaaaacgagatccgaaactcaaatttaccaactgggctgttccactcattgatttattagggaagccgagccaagcaaatttaacccctaaaatacaaccaaatataacaagtcgtttgcaacaagaagcaactcaagctattgcggctttaagtcaaactttacagcaacaagcaaatgctggccaaaaatatactttggcatggctattacaagaaacactgaaagctatacaagcattagaaaataaaggtaatgcaagtgtgccagtcaaccagacgggtgaatatgaacggcatacgaaaggagacactttagaatttgtaagtttgcaggcagatgctttaaatgctcctccatgtgaaggtgctgattcacaatctggaaaaagtattagctattcaattggtgctgaacgggttcaacatgcagacttctatttaccaaaaataggtttttcttttacacggcaatataactcacaaatggatgagtttgatcaaagtatggtcggtgcacgttggatgatgccattttccaatatgattcaacaaaatgccaaaggctatctatttattgatagtaaagggcgaaagcatcaactgccagcttccattacatttgaaacatatgaagtgccttatgagggaataacaatacaacctcttaaaaatggagatctggttctaaactttgggggagactggacttttcaatttcatcagttttcagtcggacagccttatcaattgattcaacaattcaatgaaaaaacacaagaaaaaattgatttaagttatcttatttttgaaaaggttgcttatcttcaatatgttgtttttcagttagagcatgccaaacaccaattaaaatttgcttttaatgagcaagttaaaattatggcggtgtttttagatgataaagccgaaccattagcacgttatgaatacgatatccaagggaacttaattaaagctattgatcagaatggctatacaagaacttatgaatataacaactttcatcaactaacacgctatacagaccgtacagggcgtggacagaatattcgttatgaatcaacagacgccaaagctaaagcagtagaagaatgggcggatgatggtagtttccataccaaactaaaatggcacccgcgcttacgtcaagtggcggtttataacgcctatgatgtaccaacctactattactttgacctcaatgggtttacttatcgaactcgtttagcggatgggcgtgagtcatggtatagccgtgatgggaaaaagcgcattactcgacaaattgattttgaagggcgagagactcaacaggaatataatgatcaagatcaacttgttaaaattgtccagccaaacggcggagtaatacgttttgcatatgatgaacaggataacttagttgaaattaaagacccagaaggcagtatttggaaacgggaatatgatgaaaatggtaatcttaataaggaaatcaatccattagggcatatcacacagtacaaatataacaatgataatcaactggttgaagtcattgatgcaaaaggtggggttaagaaaattcagtataatgaattggggcagatgatttcatataccgattgctcaggtaagagtagtacatgggaatatgatgaagatggtgtactgacagctgaacaaactgcaaataataaagttgtacagtatttttacagtatcaaaggccgagataaaggacagctgcaaagtattatttatcctgatgggttaaaagaatactttgaacatgatgaagaaggacgcttacttaaacataccgataccaaaggtttagtaacggaatataagtacaatcaagttggcttattagagcagcgtattgatgccaatcgacatagtgtagcttatcaatgggacaaacaaggtcgcattcaaaagctaatcaaccagaatcaagccgaatatttgtttggatacaatccgtatggatatttgatacgtgaacaggcctttgatggagaggaaaagcactatagttacaatgagaacggaaggatatttcaaatccgtcaaccaaatatactgacccaatttgattattatgcagatggacaaattgcttcgaaaagctttacccatttacatacagggcagaaacaaacggaacaatttgactataacctcaatagccaactgagccgagccagtaatgaggttagccaaattgatttctatcgcaatgcacttgggcagttggttagagagcaccagcattataaaattccagaactgaaaccgctcacagcagtattacattatgaatatgatgagcttggaaatttaattaaaacaattcgacctgatggacatacactgaatcatcttgtttatggttcagggcatatttatgcaattggtttaaataaccaagaggttgtttcatttcagcgtgatgatttgcatagagaaacaacacgattactagcaaatgggctcatgcaaaccaaacaatataatgatgtggggttattgagttcacagttcattcaacctgagcaagaaactcaagactatttacaatatcaagcacatagaaaatatcactacgataaaaactatttgcttagtcaagttgaagatagccgtttgggtaaactcaattatcaatatgacccaattgggcgtttaattgcagctcaaagtttacataaaacagaaagctttaattttgacccagcaggtaacttaattgattctgactcggtattaagtcctgcacaaattaaaaataaccttattaaaagttataaaggtaaacactaccaatatgacgttcaaggtaatgtgacagagattattcaagcgggcaaaaaccttaaactgacttgggataatcaaaacagacttattcgaagtgataataatggtctagttacagaatatggttacgatgtctttggtcgtcgactctacaaaaaaacagccaaagaattaaccttatttggttgggatggagatttaatgatatgggagtcttttaaatctgcacagaccaattatacaaagcactatatttatgaacctgatagctttgttccactattacaaacaggttataaggatttcattcaacggcactgttgcaaatag

SEQ ID NO: 49336 - DNA, 1461 bp, Acinetobacter baumannii
atgttaaatacaaatgaaaaaaataatgcgatcgaatcacttgatctatcaaatgcttcagtagatatcattactaaactcattcatgagagaaaagtatcttgtgaagaacttgtgcatcattacttcgatactattgaaaaacagcaagctttaaatgcatttattagcacagataaagcttcagcaattcaacaagctcaatattgggataaatacctactgagtggaaaaccgtgtccagctttgatgggtattttaattgcggttaaagataatattcatgttgcaggttttccaaatagtgcaggtacgccagctttagctcactttaagcctcaaacttctgcccccgttattcaaaaactcattgatcaaggtgcaatcattgttggtaaagccaatatgcacgaattagcctttggggtaacaggttataatactgccatgcatatagaaggtgttgtgggtacacgaaatgccgtaaacccgttacacattgctggtgggtcttcttcgggtagtgcggtggctgttgcagtgggcatggttccgattgctatgggtacagacacaggtgcttctattcgactgccaagtgccttaaatggttgtgtgggttttcgtccaacggtaggacgatattcacaagaaggtattaccccaatttcacatactcgtgataccgctggcccaatagctcataccgtatctgatgttattttaattgatgagctcatcactcaagagccaagaaaagaatcattacagtctcatcaaattcggctcggtattaattcatacttttggaatcatttagatgaagacgttcatgaacaggctcatattgcacttgagcttttaaaaagtgcaggagtcgaaattattccagtcgatatgccaaatttagaacaactcaatcaagctatttcattccctgtggctatctatgaaggcaagtatgacctaattcaatatttgaaagatcatcatgtaaatttgaccatagagactgtagtcgatcagatctcaagccccgatgtacaggcaatttttaaactgaatattcttcctgagttaattcaagaccagacggggcaacttgttcctgttttaccttcgtatgaaaaagcgattagtgaagctcgtccacaattgcttgaactctaccaaaacacatttaagacgcataacttgcatgctttattatttccgacgtcaccgattgttgcaccactagcaaacgaggaagtctattcgattgaaactttccagacactcatgcgaaatacagaccctggcagtaatataggaataccaggactgagtttacctattgggaagggcgtgaaatcaaaactgccagttggacttgaaatagatggcttagctcatcaagatagcgaactgcttgccataggaataactttagaagaaatttttaaggttttaaatcaataa

SEQ ID NO: 49337 - DNA, 720 bp, Acinetobacter baumannii
atgaccgtacttttagaaaaagatttaagcccatctgagtttacattgttttctgaaatattatggaaacttggctcagggaaagggcaatacaatttacgtgaaagtattcttgcagatattgccatcttgttgcgggctgatttcgcggcatcttatatttgggattcaacccataacttatcgagagaaggcgttatatggaaaatcgacccaaaagccatgaaggactatgagtgtgtttggcaatttaatgatccgattacggcacagcttcgcaaacgtcaaaaaccaacctttgtaaatgaagtcatgcctctcgcagacctaaaaaaaacaccgtattacaatgagtttttaagagcctatggtttatatcacggcataaatatttattttgtccgaaatggtatggatattggtgatttacgtatttggcgtgcgaaagacgccgacacgtttggtgaacgtgaaaaaagaatattaaacctgcttgaaccttattttactcaagccttaccccttgatttatcaacccaatacggtttgacttcgcgtgaacaagaagtggttcgcttggtatctaaaggtttaagtgataaagatgtggccaatttactggatattagctttactacattaagaactcatttgaacaattctatgagaaaaatcggctgtaataatctcactgaaatggccttgctcattcgacattaa

SEQ ID NO: 49338 - DNA, 816 bp, Acinetobacter baumannii
atgttgaatatagtacagcctaatatttgcttcattggtagcagtaatttgtctttagctttaattggaggtttagttttaaaaggctttcaaagagaaaaaattaatctaatagaggaagtcaaatttgagaatcaaatcattctaaagcaaaagcaacatgaggtgaaaaaggcagatatagttgttctattactagacccaaaagacttaaaggctatactggcgcccttaaaaaaatggttagctgataaaactattgtgtcgatgatggccggagttaatattaaacaattaatgagtattacgggttcaaaaaaaattatcagagtcatttctaatccccctgtattaacctatacaggtactcatgtgttaattggttcagactatttagagcctttagataaagaagtgatagaaacaatttactcagcaacagggcgaacctattgggcaaattcagaatcccaaagtgatgcgattattgctttatcgggttcaggaccagcttacttcttctatattctcgacagtatggtgaaaacaggggtgtctatggggctagataagcaatttgctttagatctaatacttcaagctgcatcaggcgctgtagaaatggttcgtaaaagtaatgttcagcctagtgagttatgtggcaaggtcacattagcgaatggtattacagagtctgcattacgaatgtttgaattaggcaacctctctgatgatattcggctggctttaaaagcagcttaccatcgtagtaaagaaataagcttagaaattaatgcagaaattacgagacactag

SEQ ID NO: 49339 - DNA, 1107 bp, Acinetobacter baumannii
atgaagaatattactgaaaaatcactttttgatgtctttacccagcatcaagcttatctctaccgagcatcatcgcgatcggtaaatgaactttataagttttttaatagtgaaacgatggttatgcttgatcggttaagcaatttaatgaaagagctgaatgaaactgagaagtttgctcttgctggtggagagtatacaactcagcatctaaaaaacatccaacttgttatttcgaactggtttaattcaattaatactgttttaccggaaatgtttactcattcggcaactgctttggctatatatgagtcaaactatatggccaaactatttggtaaggttattaaagatttagagggagagcagctttatcagtcaataaaacgagtgcctttggctggaggtgccttggttgatgaatccttagctcaaattagtgaaaatgcccttcaacgcattgaatatgctattcgggatggtatgaataccggaatgacgcctcagcaaatcatcaaacgtattactggtacaaaacgccttaagtacgaagatggattgctcaacagtaccaaaatcgatattgaaagaattattagaacgctacgtagccatatatcaaatcaggtctatttatataacttcaaaaattttaattttgaatatgtaaggttcgtgagtgttttagatggtagaacttctaaaatctgtgcagccgttgatggttctatttggaaactgaatgactcggcgaaaagagtgccacctttgcatccgaattgtcgaagtattctggttcctgtcagtaaggatggaaggcttattgggaaccgatctttcgttatggatgaaagaaaagtacgagatattcctaaagatgagcggactcagttaatgggccaaatagatgcaaatatttccttcaaagagttttttaatctgaccgataattttttccaaaaagaatggttaggccctaaacgttataagttatataaagaagggcaatttgattttgataaattttttgatccaaaggggcggctctatactttggatgaattgagagaattagatgaacgaacttttaaaatacttgggttatag

SEQ ID NO: 49340 - DNA, 363 bp, Acinetobacter baumannii; identical to SEQ ID NO: 46789

SEQ ID NO: 49341 - DNA, 297 bp, Acinetobacter baumannii
atgaacagctttacacagcaaatcaaagattctcgtcagcaaagtgaaatccaatctttttacgagcctgcattgcgagtgcttgggcacctatttgaggtgaaaaagcaaaatttacgcaacaaaggttatgacgaaaataatgcagcggtaaccaaagttgaattttcagaggctatggctcgtcaatttcgcataacgcagtggttagcacaacagattgtaaccagcttaaccaaagcgtgtttggttgattcgtttggtggctatgttaagccaaaggatggtgaaaagtga

SEQ ID NO: 49342 - DNA, 273 bp, Acinetobacter baumannii
atgcaaaacaatttatcaaatcaaacaaccgaacgcaaccagccagaatttttagtgggtgacgttgtagtgcttactaaagagtgccgtactttcaaatcaaatgatttgtttgaagttaaaaacaaaactttgactagtttatggaccatcaaatcagagaatcatttgattctagtttcttcaaaagaaatccgcacagcaacagttgcagaacttaacgccaaacgccgactaacaagcgctgagcaagcattagcggaggtgtcatga

SEQ ID NO: 49343 - DNA, 753 bp, Acinetobacter baumannii; identical to SEQ ID NO: 48565

SEQ ID NO: 49344 - DNA, 225 bp, Acinetobacter baumannii; identical to SEQ ID NO: 46246

SEQ ID NO: 49345 - DNA, 423 bp, Acinetobacter baumannii; identical to SEQ ID NO: 46071

SEQ ID NO: 49346 - DNA, 1224 bp, Acinetobacter baumannii
atgcttgcggttgcagaaacttgggacaacggtaaagcagttcgtgaaactttagcagctgaccttccacttgcaatcgaccatttccgttatttcgcaggatgtattcgtgctcaagaaggcggcatctctgaaattgatgaagataccattgcctaccatttccatgaaccactaggtgtggttggtcaaatcattccatggaacttcccgattttaatggctgcatggaagctcgctcccgctttggcggctggtaactgtgtggtgattaagccagctgagcaaactccggtaggtattttgttggttgccgaactcatccaagatatcttaccgccgggcgtacttaatattgtgaatggtttcggtgcagaagttggccgtccgttagcgacaaacccacgtattgcaaaaattgcgttcacaggttcaactcaaactgggcaaatggtgatgcaatatgcgaccgaaaatattattccagtcacgctagagcttggcggcaagtcaccgaaccttttctttgaagacatcatggataaagaagatgacttcttagaaaaaacgctggaaggttttgccatgtttgccttaaaccaaggtgaagtatgtacttgcccttctcgtgctttagtacaagaaagtattgctgatcaattcttagagttggccgtcgaacgtgtaaaacgtattaaaactggtcatcctctcgatactgaaaccatgattggtgctcaagcatctttgcaacaacaagagaaaatcttacgttgtattaatacgggccgagaagaaggtgcagaactcttacttggtggtagtggccgtaaagaagtaggtgatggtttctatgttgatccgactatttttaaaggccacaatagcatgcaagttttccaagaagaaatttttggacctgtactggctgtgacaacatttaaagactttgacgatgcaatcaaaattgccaacgacaccatgtatggtttaggtgcaggtgtttggtcacgttcagcacatatttcttaccgtgctggtcgtgctattgaggcgggtcgtgtctggacaaactgctataacatctaccctgctcatgctgcatttggtggttacaagaagtctggtattggtcgtgaaaaccataagatgatgctggatcactatcaacaaaccaaaaacttgttggtgagttattcaaccaaaccaatgggcttcttctaa

SEQ ID NO: 49347 - DNA, 351 bp, Acinetobacter baumannii
atgagcaatcatgtttttaagcgtggtgacacattcaacttaaatttgcagctagttgatacggatgatgcactgcaatatccagccaatgatgtacgtcgagcaatcgatttaacggggtatacctttacttcgcaagttaaaactctggacggaaccgccgtagcaacgttgacttgtgcagcgttaagtcaaagcactcagaaaggctggctcaatattaaatcaggaacaagcactgcaacttggcctttagggctgtgtcagatggatattaaagctgtagttagtggtactacgcagcacactgagactctgacttttcaggtaattgatggggtaactgcataa

SEQ ID NO: 49348 - DNA, 705 bp, Acinetobacter baumannii; identical to SEQ ID NO: 8686

SEQ ID NO: 49349 - DNA, 834 bp, Acinetobacter baumannii
atggtcgctcaagctatccgaaatattatttctcctaaatcagttatagctcagtatcaaaagatagatttctcaaataaaggaactatcccaattcgccatttaaatatcggatttgatggtaaagaaattgatatcgagttttacgtcaacaaccagtttgcaactttgttttttgcaacgctttcggtttttttgacctatggtgaagatctggtgatagaaacagctcgtcaccaccgtgaatttattcaagatccgattttaaaacagcgtgttacatcgctgattggtcaagaagccatccattcaaaattgcataatgagttcaatgatgcaattaaagagctggaatatccggtcgatttttatcgtttcttgggtgagaacttctttaaatatgtgttcttaaaattcccgcagccattaaagctttcactcatggcgggtattgaacattttacggcggtacttgccgaatacatgatgaagcatgaaaagaatttctattataccgacgatgccaaaagtcgtgccttatggatgtggcatatgcttgaagaatccgagcataaagatattgcctatgatgtatatcaattactcaatggtagctacccactacgagcttctggcttcttcttagcattcttcactattttaggtctaatccctgcgactaccttgtttattccggttttaagaaaaccgcaggaaatgttgactagaaaattctggaaagacgcgcgccgtggtgtaggacttatttttggtccaaaagatggtgtattcggtagcaccattggccagattttggcactgttgcaaagttag

SEQ ID NO: 49350 - DNA, 585 bp, Acinetobacter baumannii
atggctgtcaaaaaggcacaaatgatgccgacttttgcttatgaaggggttgaccgtaagggcgtaaaaatcaagggagaacttccggctaaaaacatggctttagccaaagtgaccttacgcaaacaaggggtgactgttcgaaatatacgtgaaaaacgtaaaaatattcttgaaggtttattcaagaaaaaagtcaccacactcgatattacgatttttactcgacaattggcgaccatgatgaaagctggtgtaccactcgtacaaggctttgaaattgtagctgaaggtttagaaaacccggccatgcgtgaggttgtactcggtattaaaggtgaagtcgaaggtggtagtacttttgcctcagctttaagaaaatatcctcaacattttgataacttgttttgttcacttgttgagtctggtgaacaatcaggcgcactcgaaacgatgctggaccgcgttgcaatttacaaagaaaaaagtgaattgctcaagcaaaaaatcaagaaagcaatgaaatacccggcaacagttattgtagtagccattgtggtgaccattattttgatggggctgtag

SEQ ID NO: 49351 - DNA, 414 bp, Acinetobacter baumannii
atgatgcaacctactcatacacactcaacgctacaatatattcatatttctgtacctgaaattttactcagtaatattcaaataaaaaattcttggcaagattataaccaagaatggagctatagattagacccgcctcacgcaagccatccttttcagagagacttgtatattattaaatcaaaaaatattgaaacggaagatataaaaaaaatattagataatatagttgttaaaaacagtaaaaataaagatgacttaaaaaatatagtcgaagcggaaacagtaataaaagaaattttagatttatctaattatatacctatagaaaattggctaaatgatacaggtaatcgatcaattgttgaaagtatgattgataaaaacaaggttaaattattagatattatctaa

SEQ ID NO: 49352 - DNA, 315 bp, Acinetobacter baumannii
atggaagagtttgagcagtggtacttagatacatattacaagccttatggttttgttccgcccgctaatctatttgaacgctatgaagatacgtacattagagaaaatgtttatcaacacaaccttgtatggcagcacctgcaagcgaaagtagtggaattgcaaaagcgtttagatggggcattaaaggagactcaatatgctttgcagtatgttgaaggggacatgcgcggcaatcatgaatttcaacaaatgtcaatgattcgaacctttaaagctttagagcaagtgctcaatggtggtgagcctaaatga

SEQ ID NO: 49353 - DNA, 408 bp, Acinetobacter baumannii
atgagccatttccaagataagcatgtgattcatgttgatgaacaaaatcaagttatcaagttcacacgtagaaatgagattgtggagtgtgatcacgggcgtattcaaatatcaaaggaagataatgagatcctttgtatggactgcaaaacaaaacttaatccagttttatggattgccaaatatttagaccaattgaatcaagtcacccaacgtaataacagaatgctggcagaggtccgtgaaatacaggcaaagcttgaaaagaaaaataagtttatgtgcaaacactgccatgaagtaaacactattgattttaagaagcttccttcacaagcagctgtagtgcgcggtatgaccgtaattgatcaagagtttgacggtatgaaagtggagcatagccgatga

SEQ ID NO: 49354 - DNA, 198 bp, Acinetobacter baumannii
atggaacgtttaaaaatcaatggtcgtaaacctgcaccagtacaaaagcttaaggctaaggaaaaagagccagaactcaaacaagagctaggtccagatccttttgacaatccgcacgaatacgcagagatgtgccgtcgtgaaggtatgccaattcctagaaatattcttaagttaattgaaggggcgaatgtatga

SEQ ID NO: 49355 - DNA, 2268 bp, Acinetobacter baumannii
atgtctaatattgagcaagatacacgttttattgttaacaataatttgattaacaagggctggatcttggacattcaagatccaaacaaaaatgtcttttttgaatcagatatcttaagaattgttaataatgagtttctcaagaaaagtaaaaaaagacccgattatgttcttttcgattcacaaaataagcggccaatcggtgtaattgaaacgaaatcaggtggaaaaagcttaacaaaagcactggatcaggcaaccgaatatgctgaaatgcttgatgcacctttgatatttgcaatgaataatggtttctgcgaaacacggcatttgtatacccaaaaaccattatttattgatgaaaatgaggttaatgaattaataagagtaaatgaagctaaagagttcatattgcaggaaacaaatggtatttatattacacctaaagaaattttagtctctcgcaaagagttaattaatgttttcaagaagttaaataactcactaagaggtgaaggtttaagagctggtatagaaaggctttcagaatttgcaaacattctttttttaaaattgtatacagagaatgctaatacaggtatttggaattctctcaaaagtctcgataatgatttgctaattaatacaactaataacatactacaagatattgatagacaatatggtgcttctgtttttacaaatttacagctaaccaaccctgttgctgttaaagagatgatcaaagagttggataagttaaaactctcatcaatagataccgatattaaaggagatgcttttgagtatttcttacagcaagctacagcaactaataatgacttaggagaatattttactccacgtcacataactaaaaccattgttaacttagtcaaccctaaatatggtgaaaagatctatgaccctttttgtgggacaggtggttttttaacagaggcatttgatcatataaaagataacactttaattgcaaacaatagtagtgaagaaatcaagcttaaacataatactatttttggaagagaaattacctcaaatgcaaaactcgcaaaaatgaatatgattctgcatggggatgggcatagtggaatttgccagatagacacacttcaaaaccctattgaatctgaatatgatgtggttataaccaacatgccattttctcaaaaaacttcttattctcacttatatgagaataagttagctaaaaacgatggtgatggagtatgtgttctacattgctttaaagcaacaaaaaaaggagggcgaatggcattagtagtacctgaaggctttctttttaaagccgctttagctccagtaaggaagtatttatttgaaaacgcccaactaaaagcagtagtttcacttccaaaagaagtttttctgccatatgcaaaagttaaaaccaatatactctactttaccaactgtcataatggtagaacaaattctgacgttttttactacaatgtgacaaatgatggcctaagtttagattctttccgtagaaaaattgacgaaaatgatttaaaaaatttagattttgctgatttaaataagagcgactttgataaatattataatgaattaggtttcttaaaagttaatccagaattaatcagaagcaatgattatatttataattatgctcactatagtaattcacatataaaatcaaaattcccaactataaaactaaaagaactcctatccttgtctggcaaagtcaaagtgggagaggatacaaatatacctattatgagtatcactatggaacatggcttaattgatcaacatgagaaatttaaaaaacgagtcgcaagttctgatatttctgggtataaaaaggtttttaaaaatgaacttgtaatggggttccctatagatgaaggtgttctaggatttcaaaaatattacgatgctgctgccgtaagcccagcatacaaaatctttagattaaaacgagaagttaatgtagaatatttggatttgattttgagatctaattctctaagaaaaatatacaaaagtaaaatgcaaggcagtgtagagagacgacgcagtattcctgatgaaatgtttttgaatattgagatcccgaatcctcctgaagaggttaaagatcaaatagtaaaacaacataaactaataaaggaaattgagaatagtctcaaggaaaatcaaaaaaaattgcgtctaaagacagaagcattatgggaacttcctcaaaattacaactaa

SEQ ID NO: 49356 - DNA, 393 bp, Acinetobacter baumannii
atgagttatctatttttgtcgtgtacagaggtatttgcattgcttcaatcgaaaatgcacatggtttgggttaaaactattgcaggaaagttagaggaacgtattcgttacacttcagcaatttgctataacacttttcctgtgccaaagctcatgaaagcatcgatatttaagttaaatgaatctgcttttaaaatactagctgtacgtgaatcctattcacatttaagtttggctcaactttatgatcctgaaaaaatgccttttgacttaaaacaagctcataaagagaatgattcgttagtggaaaaactatataaatcaagtgattttaagacagatgaagagcgtctagagcgattattccactactacgaaacaatgttaaattga

SEQ ID NO: 49357 - DNA, 642 bp, Acinetobacter baumannii
ttgcagaatctgccagccaatgatgttctccttactggttcacgcggcacaggaaaatcttcaattgtccgtgcccttttaaccgagtataaagatcaaggattacgtttaattgaaattgaacgtgatgatctgtccgatcttcctgaaatccagaagctcatccagaagcgtccggaaaagttcattgtctactgcgatgatctggcctttaatgctgaagatgaaaactatcgcagcttaaaaagtgtacttgatggctcattacagtcaggtacaagtaattttattatttatgcaaccagcaaccgtcgacatctgttaccagaatttatgcatgagaacacgccagtgactcgtgtagatgtaccgcaatataccgagttgcatccacaagaagccattgaggaaaaaatttcactctcggatcgttttggaatgtggctttcattctatccaatggatcaaaacctgtatttaaccattgtagaacactatcttgctaaaacagatatgccaatgaatgacgaagcccatgctgaagccctacgctggtgtcaggcacgtggtcaacggtcaggacgtgccgcctatcagttctctaaacactggattggatcacaacaactaaaagcactgtaa

SEQ ID NO: 49358 - DNA, 822 bp, Acinetobacter baumannii
atgaataaatattttacttgctatgtggttgcttctctttttctttctggttgtacggttcagcataatttaataaatgaaaccccgagtcagattgttcaaggacataatcaggtgattcatcaatactttgatgaaaaaaacacctcaggtgtgctggttattcaaacagataaaaaaattaatctatatggtaatgctctaagccgcgcaaatacagaatatgtgccagcctctacatttaaaatgttgaatgccctgatcggattggagaaccagaaaacggatattaatgaaatatttaaatggaagggcgagaaaaggtcatttaccgcttgggaaaaagacatgacactaggagaagccatgaagctttctgcagtcccagtctatcaggaacttgcgcgacgtatcggtcttgatctcatgcaaaaagaagtaaaacgtattggtttcggtaatgctgaaattggacagcaggttgataatttctggttggtaggaccattaaaggttacgcctattcaagaggtagagtttgtttcccaattagcacatacacagcttccatttagtgaaaaagtgcaggctaatgtaaaaaatatgcttcttttagaagagagtaatggctacaaaatttttggaaagactggttgggcaatggatataaaaccacaagtgggctggttgaccggctgggttgagcagccagatggaaaaattgtcgcttttgcattaaatatggaaatgcggtcagaaatgccggcatctatacgtaatgaattattgatgaaatcattaaaacagctgaatattatttaa

SEQ ID NO: 49359 - DNA, 465 bp, Acinetobacter baumannii
atgggcatcattcgcacatgtaggctcggccctgaccaagtcaaatccatgagggctgctcttgatcttttcggtcgtgagttcggagacgtagccacctactcccaacatcagccggactccgattacctcgggaacttgctccgtagtaagacattcatcgcgcttgctgccttcgaccaagaagcggttgttggcgctctcgcggcttacgttctgccaaagtttgagcaggcgcgtagtgagatctatatctatgatctcgcagtctccggcgagcaccggaggcaaggcattgccaccgcgctcatcaatctcctcaagcatgaggccaacgcgcttggtgcttatgtgatctacgtgcaagcagattacggtgacgatcccgcagtggctctctatacaaagttgggcatacgggaagaagtgatgcactttgatatcgacccaagtaccgccacctaa

SEQ ID NO: 49360 - DNA, 660 bp, Acinetobacter baumannii
ttgatatcgacccaagtaccgccacctaacaattcgttcaagccgagatcgcttcgcggccgcggagttgttcggaaaaattgtcacaacgccgcggccgcaaagcgctccggcttaactcaggcgttgggcaacaagaaaaccgatatgaacgtacgcacttgcactgaatctgacgtcgcctctatcgcagtcgtatttactgagtctattcatgtacttggagcgtctcactatgacgcttcgcaaaggaatgcgtgggcaccgcgtcccgcagatatagaggcttggtcagctcgcttatctggcctacagactcttctagcaattgagggagatgcggttatcgggttcatctcttacgagcttagcggccacatcgagtttctttacaccgcaccgggttccgagcgtcggggcgtcgcgtctgttctgtaccgtgaggttgagaaagccctcccaggtgtttcgctcttcacagaagccagtctggtcgccaagccctttttcctgcggcatggtttcagtgtagttgaggagcaaaatgtctcccgtggaggcgtcatgttccgtaggtatgcaatgcgcaaggcagttgtcgcccaacatggcgctcaagccgaccggccagccctgcgggctgtccgtcggcttagctag

SEQ ID NO: 49361 - DNA, 780 bp, Acinetobacter baumannii; identical to SEQ ID NO: 16904

SEQ ID NO: 49362 - DNA, 798 bp, Acinetobacter baumannii
atgcagcgacttcatgaagatgatttagctggatggttgctaggtgatagaaaagacggcgttcctgtagctggtggtaacggtgaagtgtgggagcatctatgtctttcagctattcaggaagacggatccgcactgtggccagcaaaacacaatatccaaaagttaaggcaaatggagcaagctgcgccgtatgtttttgccgggcagtaccgacaaatgccatcaccgccagcaggcggtttttttaagcccgacaatattcaaattgttgatgctttgcctgcagatgtagtgaagcaagtaagggcatgggattttggcgctacagagaatgaaggcgactttacagcaggtgtgcgagaagctcttggtgcagatggttttacttacattgtcgatgttacaagaggacagcttggccctgacaatgtaaataaacgcttaaagcaaaccactgagcttgatggaaaaaacgtaactgttcgaattcctcaggaccctggtcaagcagggaaatctcaagctctggcatttacaaaacttctcagtggctaccatgtggttgcaaaaccagtatcgggtgacaagatcactcgggcacagccttttgccgctcaagtaaatgttgggaatgttcgaatgcttaaaggtgattggaacaaagcctttattgaagaacttcggaatttccctaatggaacaaatgacgatcaggtagacggtggatctgacgcttttaatgaattacatgaaggatttgaaaccttcttcgctgatatgggatttgcacgatga

SEQ ID NO: 49363 - DNA, 804 bp, Acinetobacter baumannii
atgaacattgaaatttgtactcctaattcagctacaacaaaagataaaggcgacttgcttgaaaaattaagtaaaaatatgctggaagctcaaaattatcatgttgatgaagaagtacgtaaaacaggaagtgaattagatttactatgtaagcataatgtctctaagaaaaaaatttatgttgaatgtaaagcctatcgggataaaaagattgatgcgacgataataagacagttacttggtactgttgtatttgaggactatgacgaaggatggctaattgggacttctgattttagtaaggatgcaaaagggctttgtgaagagttaccaaatcgacctcatggaaatcgagtaattatctacactcctaaagatattgttcagtcattacaatcttctagaatcattagcaatattccaaaagaacatttagaaagttatattgatctgaataaggttggagaatggtatttattaataacaagttttggaattttttgggctgttactatcttaaatgcaggtataccaacaaatgttatctgttatcatgctaagactggaactttagtcgaagatcaggcacttttagataatattgcctcaactgactgtagtctatctaaactagacttttccaaacttataaatacaaagaaagatattaaaagttctcttgattcccaaatagaagtagtagaagtgcaaagaggtgaggattggaatgactatcgacctgcacgacctcaagactttgttgggagaacgaaagatataaaagaaatatttgattttttttaa

SEQ ID NO: 49364 - DNA, 516 bp, Acinetobacter baumannii
atgaatatggcagcgcaacaacacattttacaagcggtcaattggtctaaatatagttttgaagaatggtgccgacagcttggggcatggcttaacggcgatactgaaacaatggtcaaaatagttaagacgatgccaactaaacgcatcactcaacagcaacgcgaaaagttaatggctatgtatatgggggatgagagtttaaaagatcgcttgtgtattcgccgtaagggtacttgttgtgagttaaatgacaatgaagcgcgggcaatacataaactcctacttgatcttcagactatcgaggatgagattgttaatgaatggattggggcaatctggtggcattatgtaatgggggagtctatacgagacatcgcaaagagtaatgatacttatgggtcgcaaatccaacaggacattaaatgcggtttagcatttattaaatctcgttatccccattttcaatttgataagtttataaaaacagttgtagttgaaaatcaattttcttga

SEQ ID NO: 49365 - DNA, 303 bp, Acinetobacter baumannii
atgaagagtgaaattatcgataaaatagaatcttttcttagttctcaaattcaaatgttcgaaatgtttggggaaagtaaacaattggaaaagctcaaggaacaattgagtcattttaaaatacgagaacatgttataaatgatggattgaagcaaggtctttctttggagcatatggaaagattggttctaaaatatctgagattaatgctgataaatattggttatccaagtgatgaagaattcataaaagagctagacaaggaaattgatgaatatacgaatattttgggttatcgttaa

SEQ ID NO: 49366 - DNA, 219 bp, Acinetobacter baumannii
atgaatatctgtgttggtggtgatttggatgggcaagtgatagaaaaagaaggcagattactaaaagcttctgacattgatccatcattcaaaactgagtactacaaacagatttacaaccgtgacaatacggtgttccatttctggttaccaattggatctgacttacatgacatgtcagagaaagtactaactattcttagagcacctaaaaactag

SEQ ID NO: 49367 - DNA, 435 bp, Acinetobacter baumannii
atgacagtagaaaatagaattgaagaggctagaaggaactatagcgaaaaatatggtactgaacctgaatttgttttaatagaagcagatgcggcctcattcattcatggtaaacgttttaatggtggggatatggctaataaagattatactttaaaagctgtaaatcaactcagtggttgtatacctattttagttcccaaatatggtcatgaatttaagttatttgaagaaaaagatcttcttcaagcaatagagcaatttaatcaaggtaatattgaaaatagatgtgtaaagattaaaaaagaagtacctacagcttggcttgattctcccctaaaaagatcaatagctaattataggcttgaagttgttgagattcctgtttcatatgtagatgcttttatgacgtataaggaatcgaagtctagttaa

SEQ ID NO: 49368 - DNA, 345 bp, Acinetobacter baumannii
atgaagcctattcttgaaaagctaggtggcattcccgtagaccgaaaagcaagcaaagatatcgtctctcaaatggttgaaaaattccaaagtagcgatacattcaatctagtgattgcacctgaagcaacgcgtgccaaagatggatcggaacgcaaacctattcgaaccggtttttggcatattgctaaggcagcaaatgttccaattgtactgatgtatgcaaatgcaagaaccaaaaaaggcggtattttaggtaagatttatcctacggatttacagaaagatcttgaaacgattaaagaactttatgcgcaatatgatattgatgtgaaaattaactag

SEQ ID NO: 49369 - DNA, 1245 bp, Acinetobacter baumannii
atgatatctaagttgtatcaatccacttcgctacatgcactttttagaaagtctcaatttacgatctttgctataactttctttatttgctcttttacatttgtatcaatttccgtttttacgatggaaacttatgcaaaacaaaatttgcaattacttagccatactcttcttgagcgtattcagcctgccgttgtgtttaacgataagatcacgatcgaacaaatcttaaatgaatacacaaatgatcactctattcgagcaattcatatttatgactctgaacatcacctgattgctcaaagttttaagttgtcgagtcaaacttcggtgttagagaaatggtttgatcactggtttttaaatgagccggtacatttgacgatttatcatcatcaacagaatgtaggtgaactcaccctttttggtagctctgaaaaaatattacaatttttaaagatgattatggtcggccttgctattgcgatgctgtttattgtttgtgcattgtggtggtcagtgaatttgacttatcgtcaaattatgcaagcgatttatccactcacaaatattgctcaaatcgtgagtgaacaaaaagcttataaccttcgttttccttataaccgaattaaagagtttcaagatctaaatacagtttttaatgagttacttgaagaaattcagatttgggataatcagctgcaaaaggaaaatcgtaaattatcgtttcaagctcatcatgaccagctgaccctattaccgaatagacattatttttatcaaatactattagatatgtttgaagataaggattttgataataagtcagccttattgtttatagataacaataacttcaaatcaattaatgatcagttcggacatttagctggtgatgaggttttaaaagagatggcgaaaaggttacaaacgcgtttacgtcatcaagattttattgcccgtttaggcggtgatgaatttgcggttattttgcattccattacgcatgccgatcatttaatatctattgctgaaaatttactcgaaagctgtaaagaacctttgcatctaaatgatcaaacgatttatttcagttttagtgtagggattgctttatcccaatttgcgtctagtccagaagattttattatgcaagcagatcaagcgatgtataaggctaagacttctgagcaacattggtttatttctctgtacacgataaaaatagataactcattgaaataa

SEQ ID NO: 49370 - DNA, 870 bp, Acinetobacter baumannii
gtggaactggaacctctggccaatgccttaaaacaggtggtactgcaacagcaggtgatccatgcagatgaaacaccggtgacggtcatgcagatgggtgaaaatgagaaaaagcccaaaaaaggttatgtctgggcctatgccagcacacagtacaatccagttcaggcagtgatctatgactttcaagatagccgttctggccagcatgctgaagacttcctgaaaggctggcagggtcatttggtctgtgatgattacagtggttataaagcacgctttagatcaggtcaggtcattgaggtgggctgcatggcacatgcacgtcgtaaattccatgaactacatgtgaccaagaaaagtcaggtcgctgaacaggcattagtgctgattcagaaattatatgcgatagaagcagaattaagaaaaaagacggatggtacagcggaagaccgctgcgaataccgacaacagcatagtcaaccggtcatgcaacaactatatgaatggctcaaccaacatcagctgacggtgccatcgagttctccaaccgcccgggcgatcaattacagcctaaaacgttggactgctttaagccgctatctggatgatggcaatctacccattgacaataattggatagagaaccaaatgcgtccctgggccttggggcgtaagaactggctatttgcaggttcgctgcgcagtggtcaacgagctgccaatatcatgactttaatccagtcagcaaagctgaatggcttggatccgtatgcctatttaagtgatgtgctgaaaaggttgccaacacataaagtgccccaaatagaagaattactacctcaccgctggaaacctgaaccccgttaa

SEQ ID NO: 49371 - DNA, 816 bp, Acinetobacter baumannii
atgactacgacagttaattccgacatgatcatctacaaccaactggcccaaacagcgtatttagaacgattacaagacaatttgaatgtctttaatgaagcttccaatggtgcgattatttatcgtaatgaaatcattcaaggtgacttcaataaaaatgcattctacaaagttggtggcagcattaaacatcgcgatgtgaactccaatgcaaaagtaactccggaaaaaatcggtgcaggtgagtcggtaggtgtaaaagttccatataaatatggtccttatgcatctactgaagaggcatttaaacgccgtgctcgtacaccagaagaatttgctatggttgttggttacgatcttgctgatgcattggttgcaggccgtttagagtacagtttagcttctttaaaagcggccatttctagcaatccggacatggttgcaaaaggtagtatcgtagttgatggccgcaaagcattaactcgtggtatgcgtaagtttggtgataagtttggccgtattggtttatgggtgatgaactcagatacatatttcgatattgtcgatgatgcaatcactaagcaaatttatggtgaatctgaaatcgttatctatggtggtttacccggtacattaggtaagccagtcttggtgacggatgctgtaggggaaaacgatgcttttggcttgcagtatggtgctgtaactgtaactgaatcacaagtaccgggctttcgagcttatgacatcaatgatgaagaaaacttagcaatcggtatgcgtgctgaaggtgcatttaacttagatattctgtaa

SEQ ID NO: 49372 - DNA, 774 bp, Acinetobacter baumannii
atgaatttagtatctatcatcacgccttcttataattcagcaaaatacattggtaaaacaatagattctgttatttcacaaacttataagaagtgggaattgattattatcgatgattgttctacagacagttcagttgagattattaaagattatgaaaataaagataatcgtattaaattgattcaattgaaagaaaattctggtgctgcagtagctcgcaatacaggtattcaattagctcgaggtcgctttatagcttttttagatagtgatgatagctggctacctgagaagttagaaaaacaattaaagtttatgttaattaataattattactttacatatacctcttattttaaaataaatgaaaataatgagattttaggtacaatgtatattccttctaaagtaaactattcgcaattactaaagacgtgtgtgattggatgtttaacagtaatatatgatgccgaaaaaataggaaaacaagaatttcctcttattcgtaaacgtcaagattttgctttatggttgaaaatacttaaaaaagtggattatgcttatggtttgcaagagaacttagcaaactatactattcgctctgattcaatttcagctaataagctcaatgcagctaaatataattggtttttatatagaaatatagaaaaactgtctttatttgtcagtttttattacttcttgcattatgtcatcaaaggtattattcgcagtaaatttcctaaaatggctcttttgtttaaaatttaa

SEQ ID NO: 49373 - DNA, 678 bp, Acinetobacter baumannii
atgatctctccacgattggttaactcaacctcactgtcttttaagaagtcagtgtttggaagtaaaccaatctgtacaaagatccctgcaagctctaccacatgctctccatcagttgcacggtctttatatttaagaccggttacttgtgaaccgtcacccaatacttctgtgcttaatgcattcataatcacagtggtgtttggcaagctgtttaacttgttttgcaagacttggtcagcacgaagtttagtgtcaaactcaaccagagttacatgctcaacaatacctgcaaggtcaatcgccgcttcaacacctgagttaccgccaccaatcacggcaacacgtttgcctttgaacaatggaccatcacagtgtggacagtacgctacaccacgggtacggtattcagcttcaccgggtacattcatttctctccaacgtgcccctgttgaaaggatcacagttttcgattcaagttttgcaccgttttcaagttcaacttcaaccaagccatttgctgtttggtctgcaccagtgattttgctgacacgttgcaggttcataatatccacatcgtattcacgaacatgtgcttccatttcagcagcaaacttaggaccttgtgttttttgcacagaagtgaagttttcaatgtccatggtatccatgacctga

SEQ ID NO: 49374 - DNA, 534 bp, Acinetobacter baumannii; identical to SEQ ID NO: 25686

SEQ ID NO: 49375 - DNA, 633 bp, Acinetobacter baumannii; identical to SEQ ID NO: 16794

SEQ ID NO: 49376 - DNA, 1014 bp, Acinetobacter baumannii
atgaaaaccgccactgcgccgttaccaccgctgcgttcggtcaaggttctggaccagttgcgtgagcgcatacgctacttgcattacagtttacgaaccgaacaggcttatgtcaactgggttcgtgccttcatccgtttccacggtgtgcgtcacccggcaaccttgggcagcagcgaagtcgaggcatttctgtcctggctggcgaacgagcgcaaggtttcggtctccacgcatcgtcaggcattggcggccttgctgttcttctacggcaaggtgctgtgcacggatctgccctggcttcaggagatcggaagacctcggccgtcgcggcgcttgccggtggtgctgaccccggatgaagtggttcgcatcctcggttttctggaaggcgagcatcgtttgttcgcccagcttctgtatggaacgggcatgcggatcagtgagggtttgcaactgcgggtcaaggatctggatttcgatcacggcacgatcatcgtgcgggagggcaagggctccaaggatcgggccttgatgttacccgagagcttggcacccagcctgcgcgagcagctgtcgcgtgcacgggcatggtggctgaaggaccaggccgagggccgcagcggcgttgcgcttcccgacgcccttgagcggaagtatccgcgcgccgggcattcctggccgtggttctgggtttttgcgcagcacacgcattcgaccgatccacggagcggtgtcgtgcgtcgccatcacatgtatgaccagacctttcagcgcgccttcaaacgtgccgtagaacaagcaggcatcacgaagcccgccacaccgcacaccctccgccactcgttcgcgacggccttgctccgcagcggttacgacattcgaaccgtgcaggatctgctcggccattccgacgtctctacgacgatgatttacacgcatgtgctgaaagttggcggtgccggagtgcgctcaccgcttgatgcgctgccgcccctcactagtgagaggtag

SEQ ID NO: 49377 - DNA, 768 bp, Acinetobacter baumannii
atgaaacttaaaacagtaacaatcgacggtaaagtttatgcggaagtagacggtgataagccgatctatattcatgatgacggcaaagaaatgccacatgatgcaccacactcggtagcaacaattgcacgcttaaacaatgaagctaaaacacatcgtgaagccaaagaagcagctgaaaaagcattaaaagcttttgaaggaatcgaagaccctgcggcagctaaaaaggcattacaaacaatccaaaatctcgacgataaaaagctggtggatgctggtgaagttgagaaagtgaaagctgaagctatcaaggcagttgaagaaaaatatgctccgattgttgagcaacgtgacgcactagaagcctctttacacaaagaactaatcggcggtggttttgctcgttctaagtacattcaagacaacattgcagtacctgtggacatggttcaggcaacctttggccatcacttcaaaatcgaagaaggcaaggtggttgcatacgatccgaacggcgaaaagatttattcacgtgtccgcccgggtgaacttgcaaatgttgatgaagctttagagtccttggttggtggataccagcataaagacttaattcttaaaggtggtaaaggaactggtggcggtttccaaagcgggggcaaaggtggagcgcctgcaggaatgaaacgcagtgaaatgtctgtttctcagaaagctgactacatcaaagaacatggcaatgatgccttcctaaaactgccgaactaa

SEQ ID NO: 49378 - DNA, 192 bp, Acinetobacter baumannii; identical to SEQ ID NO: 45978

SEQ ID NO: 49379 - DNA, 840 bp, Acinetobacter baumannii; identical to SEQ ID NO: 6027

SEQ ID NO: 49380 - DNA, 834 bp, Acinetobacter baumannii; identical to SEQ ID NO: 46183

SEQ ID NO: 49381 - DNA, 495 bp, Acinetobacter baumannii; identical to SEQ ID NO: 20174

SEQ ID NO: 49382 - DNA, 615 bp, Acinetobacter baumannii
atgccgtatttgcaataccagcgcaccgcccacaggatcacatcaccctggaaatggcgccacttgaaatccgtcatcgttccgtccgtccaatctccgccaagcatgctcaagcttcacgatttttgcaacagagcccacacgagtattgagcatagtcgagattggtgcagatcacttctgatattgaactgtcaggagctggctgcacaacagccattacgcccaatcaactggtgcagtcgtcttctgaaaatgacatttggtatctctcataaacggatgtttttgagagaactatcttcggccttcacacgcacgaaaggcggcgaagctccgccgttaatccgtccgccggagatctcgcccaggcaggctgaaggccgagcaagcctgacaggcccgaaaagcccggcacgggcgtcggcggcgatgacggcggcggcattatccagggttgatgatggaagtggaggatatcgacaacctctcgcgcaaccaagacatcgcggtcggactgcaagtgatcttgaagccacgggcccgtcccaccccgacatggacctcgatgcccgaacggacgttagatttcgagttctaggcgttctgcgatga

SEQ ID NO: 49383 - DNA, 717 bp, Acinetobacter baumannii; identical to SEQ ID NO: 45649

SEQ ID NO: 49384 - DNA, 357 bp, Acinetobacter baumannii
atgagcaaattatcagttgatatatctgcaagcgccagaaatggcgtatcccgcatattgcatggtcttgatataagcaatcaaaaagagattgctgaacaattaaaagttgatccaagcaccattactcggcttaaaacggataagaaaaacaatggcttgaatgaaattgaaatgttttgcgagctattgagtttgcttggattaaaagtcgttcctaaagattatcagagtattgataaggaacgtgttgctgcacttttagtcatgtctaaaagttggatgaaccgtatagaaacggtggatgacttatttcatgacgaaatcagtggtcaaaaagaaaagcttggatattaa

SEQ ID NO: 49385 - DNA, 660 bp, Acinetobacter baumannii
atgtgccaagcaccgtcttacggctttgctgtgccttttttctcccaaaagggcacaggctttttatctcatttagaaacaacaagaatttataacggtaaaactatgccaactttagaaataccttccaaaaaattacaggtggtccaaaccgcaatccaactctttaccacgcatgggttccataatgcaggggtagacctcattatcaaagaagccaaaataccgaaagccacgttttacaactacttccactccaaagaacgcctaattgaaatgtgcatcgcctttcaaaaaagcctactcaaagaagaagtgctctcgattatttactcaagccgttactacacccaaaaagataaacttaaagaaattattgtcttacataccaatttaaacagtctgtaccatttgctgcttaaagcggtttttgaaataaaacggctgtatccgcaagcctaccgtatggcagttgaataccgaaaatggctacatcgggagctttttgacctgatttttagctgtgagacccgtgcttttaaatttgatgcagacatggttttaaaccttatagatggcctgatgctacaggttttaagctctaaaaatttggatgaacgagatgtggttttggagaagttttgggggcaggtgttataa

SEQ ID NO: 49386 - DNA, 462 bp, Acinetobacter baumannii
gtgaaggtcaatggccgctgggcgtatctgtaccgggccgtcgacagccggggccgcactgtcgatttttatctctcctcccgtcgtaacagcaaagctgcataccggtttctgggtaaaatcctcaacaacgtgaagaagtggcagatcccgcgattcatcaacacggataaagcgcccgcctatggtcgcgcgcttgctctgctcaaacgcgaaggccggtgcccgtctgacgttgaacaccgacagattaagtaccggaacaacgtgattgaatgcgatcatggcaaactgaaacggataatcggcgccacgctgggatttaaatccatgaagacggcttacgccaccatcaaaggtattgaggtgatgcgtgcactacgcaaaggccaggcctcagcattttattatggtgatcccctgggcgaaatgcgcctggtaagcagagtttttgaaatgtaa

SEQ ID NO: 49387 - DNA, 216 bp, Acinetobacter baumannii; identical to SEQ ID NO: 42270

SEQ ID NO: 49388 - DNA, 933 bp, Acinetobacter baumannii
atgaataagtcgacaccaaaaatttatcgcacaaccaattggtcttcatataaccgagctctcattaatcgtggaaatattgccatttggtttgatcctgctacgcaatggtatgccccatcaaaaggcaaacaaggacgaaatcaaacttactccgacgcagctatccaatgctgcctaatgattaaatctctctttcgattatctttacgcatggtcactggctttgttcaaagtctcatccatctttgtgggttaaattggatagcgccagactacactacaatttgtagacgacaacagcatattgatattgtgattagctatcaaaaaagttgtgatggactatatctaatcgttgactctacaggtctgaaattcttaggtgagggtgaatggaagcgtaaaaaacatcagcctgaatatcgtcgccaatggcgtaaattacatattggtatagatgctaaaaccttacaaatacgcgctgttcagctcacaaccaacaatgtgagtgattcacaggtacttggtgatttactcgatcagattccacaagatgagagagttgactccgtctataccgatggagcttatgataccaaacagtgccgacaggtcattgcggatcggcaagcacatgcagtgattccaccaagaaaaaatgcgaagccatggaaagataaaaagatgggctcgctagaacgcaatgagttgcttcgaacagttaaacgtttaggaagaactatttggaagaaatggtcaggctatcatcggcgaagtttggttgaaaccaagatgcattgcatcaaattattaggggataaactcagtgcgagaaattttcaaagccaagtcaatgagattcatgcacgtatggcagtattaaataaatttacggacttaggcagaccacatacccgagttgtcacttaa

SEQ ID NO: 49389 - DNA, 432 bp, Acinetobacter baumannii
atggggaaacacacgtatactgacatgcgtgacatgcagttagaaaaggatggcgccgaggagcgaatcaaggagaaaggaattctccccgaacgcgaatcgttcgtgatctcctcgacgttaaaacaagaagatgtcataggcgctactgtcgttcctgatcttcgtgctgtgatcaacctgtatgagaataccgatcaacgcattgctgtcattggtggggagaagttgtacattcaagctctttcatcagcaacgaaactgcacatgaccataattccaagagagttcgactgtgatcgatttattcctgttgatccgatccagaacaattttcacattgattccagtgccagcgagactgtggaggcaaccgttgatgagactcaagagcgcattcactttgctacttacgtgcgtaacaatcagtaa

SEQ ID NO: 49390 - DNA, 819 bp, Acinetobacter baumannii
atggtggttgagcatgcccatggcctccgtcagcgccgagggcccaatgccaaaagctctctccacaaggcgcacctcgcccctgatgccgggctgcaggcaccaggggcgagcctgtcctttgcgcagggctcgcatgacttcgaatcccttgatcgtggcataggccgtggggatcgatttgaaaccgcgcaccggcttgatcagtatcttgagctttccgtgatcggcctcgatcacgttattgagatacttcacctgccggtgggccgtctcccggtccagctttccttcgcgcttcaattcggtgatcgctgcaccatagctcggcgctttgtcggtattgagcgtggcaggcttttcccagtgcttcaggcctcgcagggccttgcccaggaaccgcttcgctgccttggcgctgcgggtcggcgacaggtagaaatcgatcgtgtcgccccgcttgtcgactgcccggtacaggtaggtccacttgccccgcaccttgacgtaggtttcatccatgtgccacgggcaaagatcggaagggttacgccagtaccagcgcagccgtttttccatttcaggcgcataacgctgaacccagcggtaaatcgtggagtgatcgacattcactccgcgttcagccagcatctcctgcagctcacggtaactgatgccgtatttgcaataccagcgcaccgcccacaggatcacatcaccctggaaatggcgccacttgaaatccgtcatcgttccgtccgtccaatctccgccaagcatgctcaagcttcacgatttttgcaacagagcccggtatga

SEQ ID NO: 49391 - DNA, 324 bp, Acinetobacter baumannii
atgaatccgcatgaatatttggccaattctgatttatttatttcaacttctttcagtgaaagtttttctttagctatagctgaggctttggttgctaataagcccataattgcttctaaaacaattggagcatgtgaattgttagaaaatggtcgatatggtgtcttatttgatatagataatgaagaacaacttgcaaataggattattgagtttatggtacataaaggtattttagctgagtatcagctaaaaagtagagaaagagcaacgatttttgaaattgaaagttttgtaaagcaaatacaacaggttataaaatga

SEQ ID NO: 49392 - DNA, 684 bp, Acinetobacter baumannii
atgagttatctatttttatcgtgtacagagaaaattattgaaaaagcaggacgtgtgggtggcacttggcgtgaaaacacctatccgggctgtggctgtgatgtaccgtcagctttgtattcttattcgtttgcgcctagtgcaaaatggagtcacttatttgcgcgtcaaccggaaatcttaagctatttagaagatgtaagtaacgagtttaatattacgtctaaaattgagtttaacaacgaactactcaatgctgcttgggatgaatcacaccatttgtgggtacttgatacaactactggtcaatatctatctcgaactgttatttttgctacaggcccaattaccgaagcccagattccacgtcttgaaggtttagatacctttacaggtgaaatgttccattcagcgaaatggaatcatgattatgaattaactggaaaacgcattgctgtaattggtacaggtgcatctgccatccagtttgtgccccaaattcaacctaaagccaaagaattgtttgtattccaacgtacagctccttgggtactgccaaaaccggatacagacttaggtgagtttagtaaatcaattattgcaaaatatccagcgattcaggcaagttggcgggcactgttgcaaatagtcggtggtgataaacttatcatccccttttgctga

SEQ ID NO: 49393 - DNA, 660 bp, Acinetobacter baumannii
atgaaaatgaagataaatcgttgtaaattagataaaaacacccaaagaaagcttgtcgagttctttgttgctgaggtaacagctagaactgcggccaatttgctggatattcagcctaatactgctgcactattttatagaaaaatacgtgaaataatcatgtaccaccttgaccaaactgccgatgatatttttgagggagaggttgagttagatgaaagctactttggtggcactcgtaagggaaagcgtgggcgtggtgctggtggaaaagtggctgtatttggtatactaaagcgcggtggtatggtttatgtcaaggttgtccctgataccaagtctgatacattaatgcctgttattacacgtaaagtagcgcctgatagtgtggtttatactgatagctatcgaagctacaatgtgcttgatgttaattgtttttatcatgagcgaattaaccattctaaagattttgcaaaaggtcgaaatcatattaatggtgtagaaaatttctggaatcaagctaaacgcatcctaaggaagtacaatgggattgaccgaaatgcctttccattgtttattaaagaatgtgagtttagatttaactatgggagtccaaaacaacagctcgaaatactgttggattggacgggtatttga

SEQ ID NO: 49394 - DNA, 375 bp, Acinetobacter baumannii
atgcgtgaattcatttctgaatacagcgagtttcaatacgatttcatttcacttgctcaacaaagatttgtttcggtacctgaaatcgacttgagaaccatgattcaaaatttcggtgactggtactttgcaaacgaatcaagttcgttgaatacaccaagcatctggttggttaagtggttctcttgggttcaaaacaacgagaaacaagttgctgcaaaccgcaagaaacaagagcaaatcacttcaaccggtcaaaaaccacaagagtcgggttacttcgctaatctttttgaagaacagagcgaatctcaaatcgtggatgtaaccccagcaaaaaagcttccaatgattgaggaggtaggtcatgcatga

SEQ ID NO: 49395 - DNA, 639 bp, Acinetobacter baumannii
ttgacctatggtgaagatctggtgattgaaacagctcgtcatcaccgtgaatttattcaagatccagttttaaaacagcgtgttacttcattgattggacaagaggcgattcattctaagttacacaatgaatataacgatgcacttaaagatgttgaataccctgttgatttataccgtttcttgggcgaaaacttctttaaatatgtgtttttgaaatttccgcaaccgcttaaattatcgatgatggctggtattgagcattttactgcggtacttgccgaatacatgatgaagcacgaaaagaatttctactattcagatgatgccaaaagccgtgctttatggatgtggcatatgcttgaagaatccgagcataaagatattgcctatgatgtatatcaattactcaatggtagctacccactacgagcttctggcttcttcttagcattcttcactattttaggtctaatccctgcgactaccttgtttattccggttttaagaaaaccgcaggaaatgttgactagaaaattctggaaagacgcgcgccgtggtgtaggacttatttttggtccaaaagatggtgtattcggtagcaccattggccagattttggcactgttgcaaagttag

SEQ ID NO: 49396 - DNA, 426 bp, Acinetobacter baumannii
atgtggagaggaattgaatctaaccatgaagtttttaaaaaattaaaaatttttgatgaatctcctttagctaaaaattttttaaaggaaagtgttaagaacgagcgggtttttttaaccgaatgttatgatctcagaatttcaaaattagtaagtttgatagctccatttaatgaaatggaattagattttataactgatatttattgtaatattgataatatgcagcgaattcggtttttaactatttttgagggttactgttttgaattttttttcctaacagataaatcacagtctctttctggcttaggcgtacttaagaaaaataaaaggattcttaaaatgccatatattgatatattttccatccctgaatttcaaaaaagcctttcagaaatgattgagagtcaaaagcagaattaa

SEQ ID NO: 49397 - DNA, 429 bp, Acinetobacter baumannii
atggatttaaagacagttatagacagtgcaccaacgctaaaaaagccccgtcgaaccttcacagctgaatttaaacatcaacttattcagcaatgccagcagccagatacatcagtggccaaggtagcaatgcaacatcagatcaatgccaatctgctacataaatggattcgtcagtccagatcaatgccccctgcattaaaaaccccatccattccacagactgactttcttccggtcattcttcacccgactccagtcaaacaagaagcacctctaccacctgtgccagagaagaaagctgtcgcttatatcaggattccattacatgaggcaccaagttccgcaagggatcagatgatcgagatcgactggccggtggagtcagtaactgaattactgttgctgatccagggtttgactcaatga

SEQ ID NO: 49398 - DNA, 462 bp, Acinetobacter baumannii; identical to SEQ ID NO: 49386

SEQ ID NO: 49399 - DNA, 123 bp, Acinetobacter baumannii
atgctttctacaccacctgcaatcaccaagttcgcttcacctgctttaatggcacgggcagcaatggcaatggcatcgagtgatgaaccgcataaacggttaatagtggttgccggcacctga

SEQ ID NO: 49400 - DNA, 162 bp, Acinetobacter baumannii
atgtctgctgaaactgtgcctgtacctggcaatgaagtgttgcctgcagggtcagtcgctgttgcagtcactgtatcgccatccaccaggttacctgggtttggtactgaccagctaccatctgtgcctgctaccactgttgcagttgtgccatcaggataa

SEQ ID NO: 49401 - DNA, 192 bp, Acinetobacter baumannii
gtgcgtgaacctgaaacaaacccaattcaagatgcagcaattcaagctgtaaagattaaattgggcaatttggtttatatccagaacaataaagcttatgcaccccgcttagaaaacggctggtctgatcaagcaccacaaggtatttatggcctcacgtttaactttatttctcaaaagtacggtggttaa

SEQ ID NO: 49402 - DNA, 327 bp, Acinetobacter baumannii
atggatttgctatttgaggacatgaataaggtcgatcaattcttgtctattgaaggggctgcagctcaggttgatttctattccgaaggtgcatatgcagttgttcagcttggtgatacttcagaaagaaatcagattgaagtgtatggattgcttttacatgaagctgttcatgtctggcaaaagattaaaaagctcatgggtgaacgagaaccgagctctgagtttgaagcttattcaattcaggcgatcgctcaggatctctttaagatgtatgaggaaagcgaggttaaaagtcatggggtggaaggggaaaaagccgactag

SEQ ID NO: 49403 - DNA, 267 bp, Acinetobacter baumannii
atgtttccagcaattcgtaatggttggtacgttgtgtgcgaccctgatgcagatcttgtgccgaatgagtttgttcaggtgtgcttgaaggatggaagatgcacaattaaagaatttgtcggcatcaatggtggggttttaagcttactttccgtgaatggtggtgagcgatttttctttgaaatggatgaggtagaaagcattacagctattactgacatcgtaccaccaagtcagcacagacaagaacatccttattcgcattaa

SEQ ID NO: 49404 - DNA, 282 bp, Acinetobacter baumannii
atgcttgaagaatccgagcataaagatattgcctatgatgtatatcaattactcaatggtagctacccactacgagcttctggcttcttcttagcattcttcactattttaggtctaatccctgcgactaccttgtttattccggttttaagaaaaccgcaggaaatgttgactagaaaattctggaaagacgcgcgccgtggtgtaggacttatttttggtccaaaagatggtgtattcggtagcaccattggccagattttggcactgttgcaaagttag

SEQ ID NO: 49405 - DNA, 174 bp, Acinetobacter baumannii
atgcctaagttagctattcaaggtcacgatgttgaagaatttactggcgttgttcgtcgatatggagcaagtgaggatgttatgcggatagttgaagcagctaataaaagaccgcagctgtcacgggcagatgttcattatgcttgcggcacttgtaacttgaaggtggtttaa

SEQ ID NO: 49406 - DNA, 180 bp, Acinetobacter baumannii
atggtctttttaatgtggtgctgtaaaacaagaaataaggtcaaaattctttacggttctttacaagccatgggtattagcttaacggaatcaaacacccatcaagaaactgtaagctttgatacatatagctttgaagctgttttaatggtctttctactggtgtcctatcaaggatag

SEQ ID NO: 49407 - DNA, 666 bp, Acinetobacter baumannii
atgggcaaaatagaaaaaatttatgaaaatttaaaaactaataatgaaaacctgccgcaagaggttcatttttttttcaattggctattaatgagcaatttagaaataattacagaatcaagattcacaactgtttttatcataaaaatgttatatgcatttatgtgtggagctcacctagatagtattattaatgaaattagggaattagaaaaaccaagtaaacattataaacgaatgaagcctgcaacgaaattcattaaacagcccctagaagggttatggcataagcattatgagcaggtcgggcttaaatctatggcaatgaatattaagcagcagatgggattgaataataagcagcagaagatattcaataatactttttttaaagaattttgcgatatattcaataactctgaaattcctcaggataaaagaattgaagccttaggatacttgtgttctgggaagcaatatatagatagaattaatgatggaaagttaactggtgagtggattatttaccatcattgcaatgggaaaaattattacttaaatgttgggaatcatagcgatggcgatgatgctttggcacaagaaataagagaaatagcactttttgaattccctttttttaaagggagtttacctatcttcgattaa

SEQ ID NO: 49408 - DNA, 189 bp, Acinetobacter baumannii
atgaaagcattttttagaagtgtgagccttgcccctatccgtaaagcaaatcagaacatgattgatgggaaaagggcggatgtattgagcctaccaacaagtatccagcaagatatcttgaatcgccgttattctgcggatgagattaatagtgcttatgctagagctattagtaaaagagaaaattaa

SEQ ID NO: 49409 - DNA, 675 bp, Acinetobacter baumannii
atgattgccatctatttagatgaaagcggtgatttaggttggacttttacagccccatacgggaaaggtgggtcaagtagaactctcacaatagcatgtgtgatttgcccaagagataagacacagcatcttaatcgaattgtgactggattttataaagctagaaaacgccctctcaataatgaattaaaatcatatgatcttagctcaaaagaaaaagaacaatttgttcaacaaattatcaaattgcattcaaaccacccagatataaaattgctatccataaccgtaaacaaaaaacgggtaaaaacaaaattaagaaatgaccctaatgccctatataactatatggttaaaaatatgctcttaaaccatttatgcaatcataagcatatagacttcattcctgattctcgatgtgaaaaagtcaatgtaggctggaatttagaaatatatttaaaacagatgattgcagagcgttcgcaattagatgatgttctaaatgaaactttgaatgttaaaccattcgatagccgagtaacgaaagaacttcaattcatagacttctatgcggggcttgtttggagtaaatatgagtttaaagacgagcgtgtagatcaatattttgatgtcgcaaatccatctaatcaattgatgttctttgagtatcaataa

SEQ ID NO: 49410 - DNA, 1443 bp, Acinetobacter baumannii
atgtcagaacagcaattaagaaaagttaagggaatttggtgtaaatttaacaatcaaaatagaatgtcaacggttacccttgatgagatgcgtatatgttgtataaaaagggggatagagattattgagattgaagaatgtacttttggttttaaccaaagcattccagcaattaagatttcaattgtaaacaatgtaacggctttattacctcgacagaaactatcagaaattcaaatttatcagaacaatattataccattccaaaaacaagaagaattctgggctaaagtagactggttcccaccagtctttatgaatcgagaacaaataggtgaaggctttaaagtagctaatttgaaaattggttaccacgagtttttgcctaaagaggagttacaaaaacgttttcaagagtttttcccgactgtatataatttctccaacattattcccatcactgtacaaactttttcagactcaatagctatatcaaagcatgtaccattaattaaagaatcaattttagctttttatagcggaatgagagtagcttctatagcatccttaattccgatgatcgaagatattttaaatactatcattgaggattcctttgagaatcttgatttaaaaactaaagttgatcgatgcataaaacgtgctaaacacaatataaaacatgatcatatattaggtgcagattggattcccgaagagtatgttcaagatgatgtgctgaaagtaatgaatgtgcgtattagaattattgaactaataggtaattggcttaaaaatagtttttatgagaataccgaaaactaccaaaatacttcaggatttaatcgacatttttttgctcatgctaaatctgaaatttggcaaaatcagtctaatttttttcgcgccatgggtctaattcaagcattggcatttattgaatgttttgccatgaaagagtctaagttatcaattttcccaccaactccagatataagatcagaatcttttcgtaacgatgtttttgcttgcttaaatttacaagtcatcaaaaatactcttttgcagcaattacaaatcgatgggtgcttacctttcaacccaactgcttcagatgatggttggttaggtcgctctgcaactttatcaactaaaatgaatgatgaaatagttaaaagacttagagataatggatggcaatgtcattcttttgggcaacctgttaaatctggtggatatataacagtaagagcatcaaagcttggtaaagaaattggtatagctctattgtatagttgtgctacagataataaagtttataaagagttggaagtaacaaatgattatattctctatcaaggagcaccttatcaacaagaatcatttgcatatggaatcaacaagtatgtgggtccattgaatgcttggttagctccggattag

SEQ ID NO: 49411 - DNA, 306 bp, Acinetobacter baumannii
atgaaaaatgaattattcgatattgccaacatgcccaagtatggttatattaatcgggctttgagcaaaatctcaaagttagctttggtcggctataaatgtaacaaaggcgcacagtccgcttatcgggctttttttgtgcgtaatatctctatgcgttcgcatatctctatggcgaagctggagagggacaccttcgggtgtgcaggtttcctttgttccctgtcgaccaacccttttcagctttgccaccctcatttggtcgtgaatggcaaagctcttttaaaaaacgaaggagcgcattaa

SEQ ID NO: 49412 - DNA, 768 bp, Acinetobacter baumannii
ttgattggtgctaatgaagatttggataatattccaaagcaatttatttcagttaatgagttgctagagatttttgccgaccttgaaaaaactaccttagaaaagtccgcgcaatggcttataaacaataaacaaattttgaatgcagccaaaaagctagtccttaaaaatgaatatacacttgtcgaatacgaacatagcgataatgatttttataactgcccaattgaagcgttgtcgcttattgctagtggcgaagattgcgacccttttagtgattacgtaggcttttctaggtatgtaatattaatgagcttgaaggagcttggcttagatattggcgatgccttgattaataatagccgtgcttatattgccaaaaactgccatgaatatgatgataatttttataaaaagcaatgcgcctatttaataagtatgattggtcaaagtcctgcactagagctacctatccagcaagaaaaggatattaataatacctatctcttaaatccaagtaatccgaactatatcccagcatacgccttgcttctaagaatacatcatgatttaaatacagttggcagatttgagggtacaaaacagaaaagagttgccgattgccttgaggaatatggacagcactacggtgtacaaaatacaccgaccaacgctatacacttttcaaatctgataaaagttagaactacggccaaagatgaggccagcacagctatgaaaaaaatactttctcaagaacaaaaataa

SEQ ID NO: 49413 - DNA, 1569 bp, Acinetobacter baumannii
atgacaaatggcctagaagattttagctatgacgaagtttcaactgaaaatagtacgcagagtgaacaagccaaaaaagtgctagggcatttcattcaaggaagaattgtatctaaaacggcaagaaaacagccagtttacaatcctgcgacgggtgaaattagtaaagaagtcgaaattgcagatgcacaaacggtaaatgaagcagttcaggcagccgagcaagcatttcctgcatggcgagatacaccagtcattaaacgtgcacgtgtcatgtttaagttcaaacaattattagagcaaaatgccgaaaagatttgcgctttgattgggcaagagcacggtaaaatttctcatgatgctcaaggcgaactgcaacgtggtattgaaaatgttgaatacgcttgcggtgcaccagagcttttaaaaggggagttttcaaaaaatgtcggtccagatatcgactcatggagtgagttccagccgttaggtgttgtggctggaattacaccgtttaacttcccggccatggtggcgttatggatgttcccaatggcactggtttgcggtaactgctttattttaaaaccttctgaaaaagcaccttcagtggttttattccttgctgaacttttaaaaaaggcaggtttacctgacggcgtgtttaacgtggtgaatggtgacaaagaagcggtagatgctttattgcatcatcctcgcattcaggcagtcagctttgtgggttcaacaccaattgctgaatatatttaccgtaccgcgacttcaacgggtaaacgttgccaagcattaggcggtgcaaaaaatcatgcgatcattatggctgatgccgatattgataacgtagtgacttcattattaggtgcagcttttggctcttctggtgaacgttgtatggcactttcggttgcagttgccattggagatgaagttgccgatgttgtgattgataagctgactcaagaaatgaaaaaattgaagttcggccactatgcagatgcaagcaacgactttgggccacttattacccaagcgcataaagacaaagtgcaggcttatattcaaagcgcagagcagcaaggcgcaaaaattgtggtcgatggccgcgatgcaaaaccggcaggctatgaaaaaggtttctttgttgggccaactttaattgatcaagtcacaccaaacatgaccagttaccagcaagagatttttggtcctgtgttgcaagttatgcgtgtaaataccatgcaagaagcgatgcaactcattaatgaccatgaatatggtaacggtacttgtatctatacccgtgacggtgaggcagcacgctattttagcagtcatattcaagtcggtatggtgggtattaatgtgcctttaccagtacctgtggcttatcatagctttggtggctggaagcgttcactgtttggtgatttacatgcgtatggcccagatggtgtccgtttttacacacgccgtaaaaccattacacagcgttggccatctgctcaagtccgtgaagcaaaacaattttcaatgccaactttaaattaa

SEQ ID NO: 49414 - DNA, 1287 bp, Acinetobacter baumannii
atgcaaggctcatacgcgacagcactattaaaacaacagcaacttcctgaaagcttccaattctattttaaacaaaaacagcatttgtctaatactcaggaattgcaccaacttcacgagttggttcgtcctcgtttaaaaattgcgattgtgacagaaacatggccgcctgaaattaatggtgtagcactctctttgttgcagctatgccaaggtttacagaaacaagggcataaaattctacttgttcgacctgagcaaaaagccaaatgtcatgattttttgccagaacaagaatgtctggtgatgtcacaagcgattccaaaatatccaactttgcaatttggctggccccaatatttaaaagtttcaaaagcttttgaaaaatttgtgccagatgtcgtacatattgtgaccgaaggaccgttaggtttaacagccatgcaagccgcaaaagccaaaaatattccggtctctagtggctttcattcgccgtttcaagattttagcaggttcttcgatttggcctttttggtgaagccgattcaaaaatacctttgctggttccataacaatactcaggtgacctgtgttccgagcaaggacacggaagaggctttacgcggttttggaattacatgccctctagtcgttgttgggcgaggagtggatactactcgtttttcaccaaaacatcgctcagaaagcttacgccagcaatggggcgttgattccaatacacgtgtcatgttgtatgtaggtcgtttatcaccggaaaaagaagtccagctgatcgttgagagttatgcagctatgcaaaacattcagcaacagaaaactaaactggttgtggtgggagatggcccggatcttgctcgattaaaagcactacctgaggcgaaaaatgttatttttacgggtagtttgcgcgggcacgatttggcagtcgcatatgcaagtgccgatgtctttgtatttgcaagccaagttgaaacgtttggtaacgtagttttggaagcaatggcgagcggtttgccagttatcgcgtatgattatgcatgtgcacaccagtatttaatacatggcgtaaacggttggttaagcccacttgggcataagaaccattttatacaacaaatttatcagcttccttcaatacaacaacttagagaaatgggcatacaagcctgtcataaagtacagcaaagcggttggcaacttccggtacagcaattagaacaggcattttatcaggtagtgaaggaaccctcggcggacttcacctaa

SEQ ID NO: 49415 - DNA, 2055 bp, Acinetobacter baumannii
atgggtcatgttgattacgatagcacattgatcgtcggctcttttattgcggctggcgctatttgctatattgtgatttccatggagcagttaatatttaagcaaacttataaaaagattgagccgtttattctattactcaatggattattactcgcagcagcgattagtattgtccatattgtcggcatgcatgcttaccatttatttgaagcagcttcctcgaacgttcctttaattacactggcttttggaattagtgctgtactttcaagtgtcgcaatttggctgacttctcgttttacacttcctatatttagactcattttaagctcagtcattatgggaattggaatttctgcttcttattatgtgagtatgttaggctggaatattgatatttataagaaagactacacttcctttcttattttattttctgtcttaattgccatgagcgggtcggggctagctttcttgctggcctataaattaaaagaaagtgaacggcaccgtataagtttaaaattagcctttgcagtgatgatgaccctaagtattatggggatgcactatacggcacttatttcgacaaatattaccgataagtttgtaagccaatatcaggctgaacatgacttgctactatttacaattattttggttacctgtctggtgctggtcgcgagttttattgttgccgtgctggaacaacgactgaaccagcgaaatctagaactgcgcaaagccaataaagaattagccaacctttctattcaagataacttaactaaattaccaaaccgactttatttagtggattacgccgaagtcctcctgtcagatcaccgttataaagaccaaaaaattgcttttctctatattgatttagaccgttttaaatcggtaaatgatgcgtttggacaccacattggtgatcaactgcttatacaaatggccaatcggttacattggcaactcaatgaaaaatgtaaattgcttagaattggtggggatgagtttttactcattgctgaaaacactgatactgaagaggcaatgcaacttgctgaaaaagtattacatcttattcaagacagttaccaaatttccggtaaagaaattaatatttcagcaagtctaggtatcgcactattccctgaacatgggcaaaatgttcaagacctgctaatgaatgccgatgctgccatgctgatgtctaaagagcagggccgcaatacttataccgtctttagttattctacccatcaacaagaaacaagaagtcagtcaaaactgatcaatgatttatacaaagcagtcgaagaaaaacaatttgttctctactaccagccaaaatttaataccaatcttgagatttgtggggtagaagcactcattcgctggaaccatccatctttaggtatgctgacaccgcatatgtttattggtggcgcggaaaagacaggtttaattattccaatgggatattgggcgcttgagcaagcttgccaacaaattcaggaatgggaacgtagcaatacgcagttttatccaatcgcagtcaatttatctgccttgcggttcgaaaataaaaagctctttagtactctcgaaggtttgttaaaaaaatatcaaattcagccgcatcacctcattattgaaattaccgaatcaaccgcaatgcggcatatcgacttaagcattcgtgcttgtgagcgactgcgcgatatgggcattcgtgtggcaattgatgactttggaacagggcactcaagcttcttatatttaaaagatttaccagtcgatgaacttaaaattgaccgtggatttattgtcgatttaaaaccgggctcaaaagaagaagtcattttagaaagtattattcatttggcgaaaaagttaggtttaaccgtaacagccgaaggggtggagacacagcaacaagttgagattttaacacgcttgggctgtcagcagttccaaggttatttgttgggtatgcctgtaaatgtagggcaactgattcagtcgcaaggtgctcattttgtttaa

SEQ ID NO: 49416 - DNA, 1020 bp, Acinetobacter baumannii
atgaaacgatcggcacttggtttaatctatttaattcaaggaatgcgcaatgcgggcattgatgtcgactcacgtttggcagatataggtattaaagtagattccttggacccaagctcaacaattcatgacagtttggaatgggatatacagcaaattattagtgagaatgttgacccagagaaaggattatttattggacaacattacgcattggcaggttatggtcctttactcatgttacttgtgaccagccatgatatacaaacagccttagaaaaaggcatacagtatcaaaagcttacgcatttatttggtactttgagcttacaagaaactgaaaatcacatcattttaaactatttaccggtcgatttaaaaacagaaatcggtttactccgtgcccaatgcgaaatttcgggcacttataagtttattcaggatatttataccatgatgggcttaaaaatgcctgatatgcgtatagatttaccatttccgaaaccctctgatccagataccgttactcaatattacgcatattatggagatgatctacattttaattctacacatgcagcatttagcctaagtaagaatgtgctggaaataaaaattccttcagcagatattattactcatcgtatctatgaggctaaatgtattaaagaaatagaaagattaaatgaacaagatcatcaaataccgcctattattcaatatgtgcaagattatttagagctacaacaaggaattatcccgagcatggcggaaaccgcttttgctttgaaaatgcctgaaaggacattaaggcatcaattgcagcagcttaatacgagttataaacaaattcgtgaacagattattaagaataaggcgcttaaacttatggaatataaagagtattcaatagaagttattgcagaagcacttggttattctgaacctgccgcttttaatcatgcatttaaaagatggtttggacagagtcctcggcaatatggaaaagagttttactga

SEQ ID NO: 49417 - DNA, 444 bp, Acinetobacter baumannii
atgcagtccattagtctcattattcaaatttttcttgtattagcatttggttattttctaggtcctaaactttcactaaatattcggcattttatttttaaaatcctgccttatttttcttatattttactaaccagtgtagctttagaactaacactcgcccttgaccaaattgataatccctcaactatacttccacctgctctattaattgcattaaccacttctcttggttctttttttacttgcttattcgcttatacaatttttgataaagaaagtgttaaagggaaaatttcgcttcaactttttatgaatgcattaaaaaatattgccaaggcatttttagctttaacaataggcgtgattttaggcattcttcttacccaattacatacccatattccctttaatagttggtatttactactctgtacacgataa

SEQ ID NO: 49418 - DNA, 357 bp, Acinetobacter baumannii
atgagttatctatttttatcgtgtacagagaaacacattattcaacctgaacacattgcctttttacgtttggttattgaacaaactcaatgtaatgcaactttgagccaatacttatatgaaaaatgtgctctggatgtccaaaatacaattgctcaagccttactcatatctcatcaatcaggtgaaattacctgtacatctcctgatcattcctctcttatgtattttggaattttacgtgatattgaatggcgaatgattatgggaatgcctcttccacccaatgagacagaagttattgattatattaactattgtgttgatattttcttaaagggccatcataaagtctaa

SEQ ID NO: 49419 - DNA, 1275 bp, Acinetobacter baumannii
atgtctgaagcaactggcaaaaaagccgtattacatcttgatggcaaagaaattgaattaccaatttacagtggcacattaggtcccgatgtaatcgacgttaaagatgtattggcctcaggtcactttacttttgatcctggttttatggcgacagcttcatgcgagtctaaaatcacatttatcgatggtgacaaaggtattttattacaccgcggttacccgattgaccagttagcgactcaagcagactaccttgaaacttgttatttattattaaatggcgagttaccaactgctgaacaaaaagttgagttcgatgcgaaagttcgtgctcatactatggttcatgatcaagttagccgtttcttcaatggtttccgtcgtgatgctcaccctatggcaatcatggttggtgtagtaggcgcattatctgctttctatcacaacaaccttgacattgaagacatcaaccaccgcgaaattactgcgattcgtttgattgctaaaattccaacgcttgctgcttggagctacaaatatactgtaggtcagccattcatctatccacgtaatgacttaaattacgcggaaaacttcttacacatgatgtttgcaactcctgcagaccgtgactacaaagtaaaccctgttcttgctcgtgcaatggatcgtatctttacgcttcatgctgaccacgaacaaaacgcgtctacttctacagttcgacttgctggttctactggtgcgaacccatatgcgtgtatctctgctggtatctctgctctttggggtcctgcacacggtggcgcgaacgaagcagttcttaaaatgcttgatgaaatcggtagcgttgaaaatgttgctgagttcatggaaaaagttaaacgcaaagaagttaaacttatgggcttcggtcaccgcgtttacaaaaacttcgatccacgtgctaaagtgatgaagcaaacttgtgacgaagttcttgaagcattaggtatcaatgatcctcaattagcgcttgctatggaacttgaacgtattgcattgaacgacccgtactttgttgaacgtaaactttaccctaacgtagacttctactctggtatcatccttaaagcgattggtatcccaacagaaatgtttactgttatcttcgctcttgcacgtacagttggctggatcagtcactggttagaaatgcacagcggtccttacaaaattggtcgtcctcgtcagctttacactggtgaagtgcaacgtgacatcaagcgttaa

SEQ ID NO: 49420 - DNA, 417 bp, Acinetobacter baumannii
atgtattttgtttatgaaggtcaaaagatcacccttgacccaaataagattcaacaatttggcaataacttagtttatgcagacacactactgtgcaatacaaatgaattaattgttagtaaacataatggtcaagaaatctcaatttctactaaaaaatttacacccttttttaatgctacttttcctcaaatgaatgttcaaatccagtggctgaatattcaaaagactgctgagttaaacacgttaatcgatatcgataattctctagttaataacaaaaacgataagattccattgacactagctcaacagaaagttctcaatgtaaaaaatccaaaaacttttgattctcgctatgaaagagaattaattattaaaaatctctctagagcaattcaagattttgtgaaatga

SEQ ID NO: 49421 - DNA, 942 bp, Acinetobacter baumannii
gtgaaaaactatacagttgctgtaaagattacagaatctaagtctttctttaaaaaagatatttatgaggctgcactttttgataaaccgaatattaatgctactggttccagttatgacgaggtgattaggaaggtatatgagaagacgcttgagtattttgattttctaagtgaccaaggtcttgatattcctgagccgactgaaattaattcagtaacatttaaaaaacgtgataaagatgttttttttcatgtcataacaattgatacatcaatctatgcggaaaagactgaaaagattaacgttacaattcccatatctttaacacgaaaaattgatgactttctaaaagataaagtacataactcaaatcttttctcctctagatcagattacataaccaaatcttgccaaagatatttaccctatgcgaattatcttgcctcgctctacaataatgaagatttaataattgctcacagatatcacgaaagtaataccacgagaaattgtcttaatttgctcgactatttgaagctacctaattgtcaagaagtaatcttatttgcgacttatcgtacacctactgatgggtttagtagagatgacgggcctgaaactaatttgcccctcatgggagcaattgcgaaagtccaattaccaggattaaacgagatttatattatttttgatggacttttcctaaccgcgcaaaggaagccgcgctacaatgaagtaaaagatgtgctggatacagctttggaaacagataaaacatcatttattcaattatcagttccatttacttcacagttagatcctgtggaagcagtcaaaatattaagtgaatttcctagacagaaattaactaaggaaactcgacctactttttttaatttattaagtaatctaacagaagaacaatatgtaaatttttaa

SEQ ID NO: 49422 - DNA, 1320 bp, Acinetobacter baumannii
gtgaaattcttcctatctctttttacgctgtttagtattttctgtactactcttaccaatgctgctctacttaatattgcttctgaaagtgttgaagccgctgcatggacaattgtagatacccaatctggtcaaattattgctgagcataatagtcatgtacaacgtgcgccagcatctttaaccaaaatgatggtggcctacattgcattaaaagagattaaggctggaaagttaaaactgaacgaagtcattactgcaacaccagtcgtaagcgtggtgcagtgggatgaatcacaaatgtacctcaaagcgggcgagcaaatttcagttgatcagctcttggctggtttaattgttatgtctgcaaatgatgcagctgtgactttggctgaaaaaatttctggtgatgtgcctcatttcgtacagcgtatgaatcaagaagcacaagcactgggtatgaaagacacgcactttagtaatcctgctggtattacaatgccggatcattacacgacagctcatgatttgagcttattaagtcaggcagtgattcaccagccccctgaatatttacattattcgaaaatgccgagctttagctacaatcaacgttttcaccatgcgacgaaccttgcgctcaaatatgatccatctgtagatggcttaaaaactggctataccaaagcagcaggttataacttggctctaacagcttcacgcccttcattttcaccgaacttaccgcaaagacgtttactggtaattgtcttaggtacaccaagtgccgtgaaacgtgctgaaattgcagataaattaatgaatcttgcttatgcttatacacgtgatgaagtagttattcctgagcaaaaattaattgctgaattgcctgttattaaatcaactttaaaaatgtttaaagtagaaactaagcagccaaccattgttacgacttctttatatgctgagccaacaccaattgatttaaatacgtttgattatgctacacagcgtattcaagttcttgatagcaatcaacaacctaaagttattgctccacttgaaacaactcaaacacgtgtaaatattcagttaaatgagcaaaagttaacagcaccgttaatgaaagcgatgaatttggcaacagtttcaatttatcaaaacaaccagctcattcgcagtcttcaaattgaaaatgatgtacacattgaagaagcaaatattttccaaagaattatgatgtggttctcaagcctattctcaatcttttcatcaagtgagcacagtgcagcaaaactctaccctatagattcgcactaa

SEQ ID NO: 49423 - DNA, 1704 bp, Acinetobacter baumannii
atgttgcattatcaaattgagttcgatgattacaaacaacaccttgttcacgtgacaattcgctttttagcgaatccaaatcaggaactatggttaccaacgtggattccgggcagttatctcattcgagagttttctaagcacatcgaggcagtaaaggcctatgatgaagctggacgcatgctcaatattaaaaagactgaaaaaaatcgctggcgtttatttaacaccgatcacgagttaattactgttgaatatgatgtttatgcatatgatttatcagtacgtggcgcttatgtagatcaaacgcgtttatatattaaccctgcctgtgtgtgtttaggcttagaaggccaagaacaatctgcatgtgaattagaaatctttttgccggatgaattaaaacactttcagttagcaacaggattagcttcaaaaagtttagtaaaaggacgttttactttaaaagctgatcattatgatcaactcattgatagtccatttgaactggctgatcaaacgcgttttagcttcgaaacgcatggaattgaacatgagtttgtaatttcaggtactcacgctacgaatgttgatcgtttaaaaacggatattgaaaaaatttgtgcagccgaaattgatctgtttggttcggcaccgtttaaaaactataccttcatgaccatggcaacagggaatagttacggtgggctagagcattgcaatagcacaagtctgattactccacgagatgatttgccgaaatcgaatgaacctactgaaccttcgaaagattatcaacgtttcttaggtttatgcagtcatgaatattttcattcttggttagtaaagtttatccgtccagaaaattttgcgaactacaacctgcatcaagaaggctatacctcgctactgtggatttttgaagggtttacttcgtattacgatgatttaattttattacgtagtggcgtgatttcccaaaagtcttatttagatttgttgaagtcacagattgatcgctatttgcaaaacccgggacgttttgttcaaacagtagcagaatcaagttttgatgcttggattaaattttatcgtcaagatgaaaattcgaataatgcaggcacgagctattataacaaaggtgcattagttgccttgtgtttagacttaggcttacgtttacgtggttctagccttgatgccttaatgcgtcgattgtatgaaaatacgcaaaacggtgttcaggttaatgagcgtacaatttttgatttatgcgaagagctaacaggtgatagttggttagagcaaatcaatcatttgattaatactactgaagagttaccactcgatcagttattccctgagtttggtttaagttatacgcttaaaaatgataagactttagcttatggtttaaagctagctgataagcctgaaggtgtgttagtacaaaatgctcaccgtgagggagctggtgctaaagcgggtatttctgctaatgatgtcattattgcaattgatggactaaaagcgaccacaaaacttattgagaaatatgctaaacaaaagggtaattactcagtcttggctttccgccgtgatgagttattgtcgtttgaagttacaagtgacagcataaacttaactgaagttgaacttattattgaagatcaaagcaaagctgacaaatggttaaaagcctaa

SEQ ID NO: 49424 - DNA, 1155 bp, Acinetobacter baumannii
atgaataatgcacagtttgatttaattgttgtcggagccggtattttaggtttgtccgctgcaatacaggcacaagaacaaggcttgaaagtttgcatcttcgagaaaaatgccaagcctgtgggcgcaactcgccgtaatttcggcatggtcggaacatcgaccttaacccatccagagcaacagtggcgaaagtacgcgcttgaaacgcgttctttttatcagcgtattcaaactgaaaccgatatttcgtttgctcaacgccaaggtgtctatctggcaaacacggcacttgaatggcaggttttaaatgagtttgccgagcgtgcaaataattaccaaattccagttcatttgtttagccatgaggaattggtcacccaattttcttatttaaatccttcgcagcagtttcaaggcggtttggtttttgaagaagattattcggtcgaaccgcatgtggttgggcagcgactattggcatatgccgaaagaaaaggcgtaaatatttataccaatgcttgtgtcgttcaaacccaatatcaacatgaaatttgtcaggttcgcttggcaagtggcgaggcatatcgggcaaataaagttttgatctgccacggtgaaatcatcgatgttttatatccggatctcttacaaagcttgaatctgaaacgctgtggcttacaaatggccctgactcaacggtttcaccaaaaattaaatgcttctctttattcaggcttatctatttcacgttatccggcttttgaaatttgcccaagtcatgctgagctggttaaagcgtcacaacagggtttcattaaagaattcggtattcatattctgattaaacaaaacgaatttggcgaactgatcgtaggcgatagtcatgaatatcattcgattaatgaagcgcctcagttcgagcagcgtgaagagattaatgaatttatccaagtttactgccatgaaaaactagggctgaatttacctccaattcaaaaacgttggaatggttattacctgacccatgaacatgagttggcctgtgtcactgaagctgaaaaaaatatctttctggtgagtgcgattgctggcaaaggcatgactacaggggctggctttatgaaagaaatattagaacaaaatatttactag

SEQ ID NO: 49425 - DNA, 1197 bp, Acinetobacter baumannii
atgttattttatgattttttaaaagaaggttttgatttttacttccaagagtttaaaaagaaaaatataaataattacgataaaaaatatcataccaattatatttcaattaaagagtttgaaaaagatattaaagttaattcagaaaatattttcaattctataaaaaataacaattataaatttcaatctctataccctatagttattgaaaataaaaaggaattaaacaaaaagccacgtttaatttgcataccgacagttagagatcgcctaatacagatgatcttaatttattatatttcaatacatttaaaaaatgaattagctgttcttaaatcccaagatttttctgtttctggtgtaggaattttaaaagctcgtcaaaaagcaaaggatttgagaaatactaaaccctatgtattaaagacagatatatcttctttttttgacaatattgatcgagcaaaattattaaatgagataaaggatgtaatgccaccagatatactttatttattccagtcaattatttattgtgatccaagcattccttatgaatataataaagattataaaaaactaatttactctaaattaaggaaaggcgtaaggcaaggtatgcctatttctccactccttgcttctttctatttaaatgattttgatgaatggttaattaagaagaaatacaagcatgtacgttatgctgatgacctaattttttttcttgactcagaaaagcaatgtaaagaagtctatagagaagtttctcaagagttacttaaattaaatttaactttacccacacttgaagaaaatacaaagactcaaattatttctcctaaagaaacagtcaattttttaggtttagatctgcgttatgaaaatgaaaaatataattggtatattccaccccatgtaattgaaaatgtaaaatataatttattacatctaactaatattcaaaataatctcaaaatgaaattaaatttctccaaaactataagtcgtatggaacaaattatttctggttatcaacattgttatagtgatgccgattctttaaacttaaaagatttcaataaaatactaattttagaaaagcaaaaagctattaatttactttttaaaaatttaggaattgatattagcacagtacattcacaatatttaaaatatttattagacaattaa

SEQ ID NO: 49426 - DNA, 1341 bp, Acinetobacter baumannii
atgccaaaaataaagccaattaaactcgtaattattgtcgtctgtatcgccattattgctgtcttagcttggaaattcttaaagcctaaacaacagcaacctcaatatattacagcagaggtaactcgcggggatattgagaataatgtacttgcaaccggtacacttgatgcaaccaagcttattagtgtgggtgctcaggtatctggtcaggtcaaaaagatgtatgtacagcttggtgatcaagtaaaacaaggtcaacttattgcacaaattgactcgaccacccaagaaaacagtttaaaaacatctgatgctaatattaaaaatttagaggcacagcgtcttcagcaaatcgcttctttaaacgagaaacaactcgaatatcgtcgtcaacaacaaatgtatgctcaagatgcaacacctcgtgcagatttagagtcggctgaagctgcttataaaacagctcaggcacaagttaaagcattagatgcccaaattgaatctgcaaaaataacgcgttcaacagcacaaactaatattggctatacacgtattgttgcaccaactgatggtacggttgttgcgattgtgactgaagaaggtcaaacggtaaacgcaaaccaaagtgctcctactatcgtcaaaattgcaaaacttcaaaatatgacgattaaagcacaggtgagtgaagccgatattatgaaagtggaaaaaggtcagcaggtctatttcacgaccttaggtgatgaaaccaagcgctatgcaaccttacgtcaaattgaacctgctccagattcgatctctagtgaatcaaacagcaccacaagttcaacaacaagctcagctgtttactacaacgctttatttgatgttccaaatacggacggcaaattgcgtattgatatgactgcacaagtttatatcgtattaaattcagcaaaaaatgccttattggttccatcttctgcgttaagtagcaaacaattttctggccaaagaaaacagggtcaatcagcagataaagcgagttctactccaagtgcagaacgcaagcatcaaggtaatggtgttcgtttagaacgcttaaatttaactcctgaacaaaaacaacttattgaacaaggcaaagcaacactaagtgtagttcgcgttttacaagcagatggtacgactaaaccaacacaaattttggtaggtattaataaccgtgtaaatgcacaagtacttgccggattaaaacaaggtgaccaagttgtgatcgctgatagttcagaaaactctgcagcttctgcaaacagtggtaataaccgtcgccgtagcggtccaatgggaatgtaa

SEQ ID NO: 49427 - DNA, 927 bp, Acinetobacter baumannii; identical to SEQ ID NO: 45498

SEQ ID NO: 49428 - DNA, 840 bp, Acinetobacter baumannii
atgattgatgtcaataaagaccttaccaatactgtttcaaaaactgatgaaaaaaaccctcgtcctcgtgaaaaaagtcaaaataaaaatgagcatatcaatacacaaaaaccaccatcaagaacaagcggtgaataccgtaagcgttctgatgtggaaactggaaatacacaaaatattttgaagtattcttttaatgaaccagccaatgacccaattgaagttggcacatccaatcatccatattcagataaatcagaggatgttgaaacatcatctgatgaaccatatggcaataaaaatactaaaactaaaaagtctgaaacaactgataatccgcctagcagagatgaacgctttgatattcaatatattattcaatcacttaaccatttaacactagatacaacctctccattagaacgtgtgtattcaattgatatattggggaatgagatacacggattcaacttacttcaaataaagaaactcgttcctcaaccaaagcatccatcttggattgatgcagaatttggaaggaaattgttatttttaaaactggaattgaaagatcagcatgatcaatattatttaattgatatacataaaaataaaagccatgaagcattctgtgcttttattatcgtgtcaccacataagttaacccgtgagcaaataaaaaatatatgtatagagcttgagaatgcaaaaggaattaaaaaatggacgctacgttgtgaaagttttaccaaaaaaattatttcgattaaacattcatctgctactcccgatgagtggaaaaatagatttaaaaatttattttcaacattaattaattga

SEQ ID NO: 49429 - DNA, 1311 bp, Acinetobacter baumannii
atgcattccaatgatggaactcaagtcatcacatcatcaattcatgtattgcatagcttattcgtcaatcggaaggatattaggggacttttattaggaacttcgagtcaatccatcattaatcgttttttagaatcttatacaacagaaattgtggacgataatgttgaatataaaattaaaatcagaaagccatatgaagatataggcgagactgcaattatttttcttgctaatcttgccttaaacccatatgtgcaaacgatagttgataaaattcaacgaagtatggaaattaccgagtttaatcatcttcagcagggtacaggcaaaaggtatcccattgtgtttccaccacatcccacaaagcttttccttgaagcagaaggaatttggctagatgacaataagactcgtttttttatcactagagtgaaaaaatttgatcctattaacgatcacatgattgatgtcaacaaagacctgaccaatacaatttcaaagcctgatgagaaaaatcctagacctcgtgaaaaaagtcaaaataagaatgagcacatcaatactcaaaaaccaccatcaagaacaagcggtgaatatcgtaagcgttctgaggtggaaactggaaatacacaaggtattctgaagtattcttttaatgaaccaaccgatgatccaattgaagtcggagcatctaatcaaccttattcagataaatcagaagaggttgaaacatcttctgatgaaccctatggtaatcaaaatactaagatcaaaaaatctgaaacgacagatacaccacctagcagagatgaacgttttgacattcaatacattatccaatctctccaagaacttgcttctgaaatgggttctcctctggaacatctgtctgcaattaatgaacatggtgaaatgatagcgagtattaatttgcttcaaatcaaaaaacttgtgcctgaacccaagcatccctcatggattgattatgataaagggcgaaaattattgttcttaaaattagacttaaaagatcaaaatggattttcctatctcatcgatatacataaaaataaaaatcatgaagcattttgtgcctttcttatttttactcagaataagttaacaagcgaacaaattaaaaaaatctgtattgaactagaaaatgccaagggaataaaaaaatgggcactctactgtgatagtttcattcataaaatgattgcaataaaacatttatacgcaacaccagatgaatggaaaaatcgctttaaaaatttattcataagcttacagaaggacaaatcctaa

SEQ ID NO: 49430 - DNA, 1092 bp, Acinetobacter baumannii
atgaaggaatttttaaaggcttacgttcaaacatttaaagatattgtgagtaacagttcagttttcacaacacttattttatccgtcattctttatagctttttttatccgacagcctataaagctgagcgcgcagaatcaattccaattgtcattgttgatgaagaacaaagtcttttaacttctcaagtcattggtcaaacagccaatagccctcacgttaaaattgttgatgtcactgctaattttcttgaagctgaacaaatggttcgcgaacaaaaagccgatggtattttacttttaccaagcaatttaacgaagagcttacgccgcggagaaactggcggaatcggcttatacttaagcacaaccaactttttaaaaactaaagaaattgggttaggtcttgccacttctattgaagcaaccttaaaggaatatattgaaaggtttggacaacgtacacacttccagcctgctctttctattcaccaaatgcctttatttaatacgctttcaggctacggtagttatatttttcctgcagttgcatcacttattattcaccaaacaattgtgttaggactggccatgctggttgcaagttaccgcgaacaacatgaaaaaattacccctattcgttttgcaggaatttttgccagtatctttacaattggttgtttaggaagtttttatctttttggttttaccttgtggttcaatgactatccacacggtggaaactttgtcggtttgctagtcgctgttcctatttttattagctgtgtaattggattaggtatgctgattggctcacttttagatatgccggaacgtgccggacatattattgtatttagctcagttcctcttttcttattaactggcgccgcctggcctcatcaagccatgcctgaatggttgcaatggtttgcttggtgtttaccctctacacacggcgtacagatgtttgtacaacttaatcaaatgggcgtgcctttaaatgtcgtggtcccgaaattaatttttcttgcgactattggggttatatttttaattactgcctattcacgtttaaaagtatttaaataa

SEQ ID NO: 49431 - DNA, 387 bp, Acinetobacter baumannii
atgtggttcaagtttaaaacagtgcggacagccataccaaaagaactcacgaacttcgattttccccggtacttccactttgcctggattggcgattacggtgtagtctttaccagcaacaaaatctgctgccattgcactacccgatacggccataattgctgcactcaaaccacccaaaaccaattttttcattgttacagcttttcctctaagttgttatgcattagcttatgccctaaatataaaacaaatatgctaaattcgttttgcttctgtgaagttttttattgggtttatcgcttttttcccaataatcgctacactaacggcgaactacatcaaaaagataacccaagtttagaggtgacaccatgtcgcaattga

SEQ ID NO: 49432 - DNA, 696 bp, Acinetobacter baumannii
atgaaaaaaatcagtttggttattgcagcgtcaacgatgagtttatctgtttttgctgctacaccgataacaaataaaagcccggcaaaagatcagtttagttatagttatggttatttaatgggccgtaataatactgatgcgttaacagatttaaatcttgatattttttaccaaggtttacaagaaggtgctcaaaataagacagcacgcctaactgatgaagaaatggcgaaagcaattaatgattataaaaaaacattagaagctaaacagctagtcgaatttcaaaaacaaggtcaacaaaacgctcaggctggtgcagcttttctggcagaaaatgctaaaaaatctggtgtgattacgactaaatcaggtctgcaatatcaggtattaaaagaaggcactggtaaaacacctaaagccacctctcgtgtaaaagtaaactatgaaggacgtttactcgacggaactgtatttgatagctcaattgcacgtaatcaccctgttgatttccagttaaatcaagtgatcgctggatggaccgaaggcttacaaactatgaaagagggcggtaaaacccgtttcttcattccagcaaaacttgcttatggtgaagttggcgctggggatagtatcggtccaaatagtactttaatttttgatattaagttgctacaagttttgccaaaataa

SEQ ID NO: 49433 - DNA, 2187 bp, Acinetobacter baumannii
atgaaccaacagaatactaataccgaagatacaattgacttaaaagaactgtttttttcattgattgctcagtggaaactcattgctctatgcgttattttaagcgttgtatgtgccctactctatttacgtgtaacgccagatacctattcggtagatgctttggttcaggttgaagacagtaaaggggcttctgctgcacttttaggtgatctctcacaaatgattgagcaaaaatcaccagctcaagcagaaatagaaattttaaaatctcgtttggttttaggttctgtgattaaagatttacatctgaatatacaggtctctagcactgagaatacatttacacatcgcttattgagtgatactgattataaaactgaatatgctaaaaaatcggttttatttaaagatggtttaaaaagttttgatatacgtcagtttgagattccagcttattatctagataagaacttacttcttgactttgataaacagtctttacgtttaacagacccagatactgaagaagtcatcttaactgttccattaaaccaagctaacagcgttacaggaccgtatggtttatggaaagttgctatatttacaaaagaccaatttgactcaacttataatattaagaaattatcacttcctttagctataaaatctatcagttccgactattctgtagaagaaaaaggtaaactcacaggtatattaggacttagctatcaaggccaagatcaagaacatattactaaagtcttaaatgctattttagcgacttatagtgcacaaaatattgagcgccgttcggcagaatctgctcagaccttaaaatttttagatgaacagctaccggacctgaaaaaacagctagatgatgctgagcgtcaatttaataaattccgtcagcaatataatacagttgatgtgactaaagaatctgagctttatttaacccaaagtattactttggaaactaaaaaagcagagcttgagcagaaacaagctgaaatggcagcaaaatatacagctgaacatccagcaatgagagaaattaatggccagctcgctgcgattaataagcaaattggtgagctcaatagtactttaaaacaattacccgatgttcaacgccagtatttacagctttatcgtgaagttgaagttaaaacacagctttacacagctcttttaaattcatatcaacaacttcgtattgccaaagctggtgaaattggtaatgtacgtattgtcgacactgctattgaacctgttcagcctattaaaccaaagaaactattagtccttattttatctgtatttgtgggcggttttattggaacattgattgccttattacgtaatatgttacgtacaggtattaaagattctggccaaattgaaaatgaattggatttaccagtttatgcaactgtacctcgttctccaattcaagaaagccgtatcaagattttaaagaagaagaagagtattcctattcttgcggttaaaaacagtgatgatattgcgattgaaagcttacgtagtatccgtacagctattcactttgctttagcaaatgcaaaaaataatattattatgattgctggtccttctcctgaagtgggtaaatcctttatttcaactaacttggcgaccatttttgcccaaggcgataaacgagtactattgatcgatgccgatatgcgtcgtggttatatgcataaatatttcgatgttgatgtgaaaccaggtctatcagaacttttaagtggacaagctgatttacaaaaagtattacacaaaactcaggtaacgaatctagatgtgattactcgtggtaagagcccaacaaatccttcagagattttaagctcaaaccagtttaaagaattacttgagcagctacaaagccaatatgaccacatcattatcgatactccaccagtgcttgcagtaaccgatggtattattatttcgcaatatactggtgtgaacttaattgttgcacgctacgccaagtcacaaatgaaagagcttgaactaactgttaatcgttttgaacaggcgggtgttaaagtcaacggctttattctcaatgatattcaacgtgctagcgctggctatggttatggctataactatgcttatgcctataaggcacaaaaagaagactaa

SEQ ID NO: 49434 - DNA, 483 bp, Acinetobacter baumannii; identical to SEQ ID NO: 49291

SEQ ID NO: 49435 - DNA, 1989 bp, Acinetobacter baumannii; identical to SEQ ID NO: 46156

SEQ ID NO: 49436 - DNA, 264 bp, Acinetobacter baumannii
gtgattgttctcggtgaaagaccactcgatcactttagttttccatcaggtcatacgttacatgctgtcatggtgacaattgtgttggggtatatccaacctgtgttgcttgcagcgatgttgccgttcatggtgcttgtggcattgtctcgtatggtacttggacttcactatccgagtgatgtgattgtgggcgcacttattggtgcagcagtagcaagtctgattatttttgtcgcgccattattgagcattgctttataa

SEQ ID NO: 49437 - DNA, 219 bp, Acinetobacter baumannii; identical to SEQ ID NO: 49366

SEQ ID NO: 49438 - DNA, 1842 bp, Acinetobacter baumannii; identical to SEQ ID NO: 45991

SEQ ID NO: 49439 - DNA, 1476 bp, Acinetobacter baumannii
atgccggataactttactgataaccctttagctggtttcaagcaatatcgccgtgcaaatgagcaatctggtcaacctgtcagtaacgacacactaacgtgtccagcatatgatgaaaagattgatgtgactcaaccactttacaaaggtattgccaataccatgccagacggtggttttctaggaacttttaaagctgatattgcgcagggtaaattaccgcaagtgagttggttagttgctcctgcaacttacagtgaacatccggggccatctagtcctgtacaaggcgcttggtatattcaggaagtattaaatgtattaactgaaaaccctcaagtgtggagtcaaaccgttttattggtgaacttcgatgaaaatgacggtttctttgaccatgttccttcaccaagcgcaccttctaaagatataaacggtgttgtatatggaaaaaccactttaacggaccaacaagtatcttttgaatactttaaccatccagcagtagcgacttcaaaatctcaacccgaaacagacggacgggtgtatggcccaggtgtacgcgttccaatgtatgtgatttcgccgtggagccgtggaggatgggtaaattctcaagtctttgatcatacttctattttacaattcttagaaaaacgttttgatgtgcaagaacctaacattagcccataccgccgtgctgtatgtggtgatttaacaacggcatttaattttaaaacaccgaatcttttgcctgttgctgaactagatgggaagaaaacaaaagccgaagccgatgcgattcgtgtcgctcaagaactattgccgcaagtttctgttccgagccagcaacaatttcctcagcaggaaataggaattcgaccttcgcgtgctttaccttatattttgcacactagtgccaaagtcgatgccactcaaaaaacggttaagctgatgttctccaatacgggtaaacaggcagccgttttccatgtctataatcgattagatcttacggcaattccacgccgctatatggttgaggcgggcaaacagcttgatgacgtgtggaatactatcaatggacagtatgatttatgggtccttggaccaaatggttttcaccgtgcgtttaaaggtaatttaagtcaagctaatcagactcaagcattaccggaaattagagtatgtgtagaagaatgtgatgcgaatttatatttaaaagtgcgtcatgatggtaataagacagtcaagctcaacgtcaaagctaatgcttatctaccaaacaagacatgggtgatagaaaccaatagtgttgaaaaagaactggtttgggatatgtctgaatttggtggttggtatgattttacggtgacattagcggacgatgcgacgtttagtcgccgttttgcaggacgtatagaaactcaagaagattcaatttctgatccatatatgggatatttagagtcttaa

SEQ ID NO: 49440 - DNA, 648 bp, Acinetobacter baumannii
atgactgtacgtccaattttatttaattcagaaatggttagggccattttaaatggcaacaaaactcaaactcgtcgagttattaagccacaacctacacttagtcaatcttctggttttaattggaaaggtcactcttacggtattaattctacatataaaggtacgattaaaaattttgtagatagcaatcaagtatgtcccttcggaaaggtaggtgatcaactttttgtacaagaaacttacggtaccaaaattagaagtttaggtggaactcctcatgagtcatttgtctacaaagcagataacccaaatgaaattgcttattacgactgtaagggaatgggttatccggttagatggaagccatcttctcgtatgcctcgtaaagcatcacgtattttgctagaaatcaccaatataagtttagaacttcttaacaacattagtgaagaaagtgctaaggccgagggaatagttgagacaattaaaggatggaagccttaccaagctagtaagagactctgtagttcacctgaattagcttttaaattgctttgggaacaatacaaaggttcgaaatcttggaatgaaaacccttgggtatgggtaatcgaatttaaggttattcaagggggtgatcaatga

SEQ ID NO: 49441 - DNA, 1008 bp, Acinetobacter baumannii
atgagcacacgtaaacttacgccagaaggttttacagagaaaacccgggaactcgatcagaaacacagtggagaaatcgatcactggcgtgaacactttgccgatatctgcaatgtgcacctgaatctggccggatccacagcccgggtcgaccaccgcagctacaaagaccaggagaatggcctggaagccaccctgcacgaaggaccgaaagtcaccgaactacgtagaagaggcatcgaaaccgaaatcagccgaagcaatgatgaaatcaaacagagaaatcaggctcagttgcaatacgacaaaaatatggacgttctaattgctgaaaatgagataaaactcagcacactgaaaacagaacagcagatccaaatcaagaatagcgctaaaacgccaccaattgacgaaaaatccctgtttgaggaaaaacagaggggaacccttggcaaagtgctaaaacgcgaaatcagcgcaaaagacgcgaatctagacctggattttatgcagcgcaatctcaaacaagccgaaataaacctgaccaagcaccacaaacatcaaaacgagttcaatcagcagcttgcccaggagatcgtgaaaagcggactcaagcaaagtcatgacaaattgcaaagcctggtcgatcaacacaacgaattaacccagaacaaacccttactgtttggaaaaaaagcctgggaagcccaacgtgatgagatctaccaggaacacaaaaagttgaaaggtcagcatgaacaccagaaaaaacatggtgtgaaggatttattggagaatgaaaagttcaaagaacatgcctggaagaaatatcaaaaacagcatccggagaaagccaagcaataccagaccctctaccagtcctacaagatcgttaaaaaatgtgtggatgagattaaagcagaacaacagatgaaaatcagacaagaacaacaactcaaagcacagcaacatgcgcctaaaatgaaatctcgtggcatgagtcgttaa

SEQ ID NO: 49442 - DNA, 1170 bp, Acinetobacter baumannii
atgatgcagactcaaatatcagtagagcaaaatttagatcatatcggtcaaaagaaattttcatgtttttctacgaagaattattatctcgaggtcaacgaattcgttaaaacgttaaatacacctgcagcaaataccgcactattgaatgaagagattgcaaaatgctttgaagaaattaaaaagcaaggccatcaaaatccagttttaattggtgctataccttttgatattacaaagaaaagtagcttaaatttttatgctgatcataaaaaaataacacaatcatcttctacgattaattcattaaaaaatcgtaataacattgagataattaataaatcattgctcattcaacgacaaaaatttgaaggtacagtacagctagctttagatgcttttgagaaaaagaaggtagaaaaagttgttctctctcaggctgttgaatatgagtttaaccgtcatcaagagcctgaaaatttattggctgctttattaaaacaaaatccaaatgcttataattttgtgattccagtcgagcataataattatatcctaggtgcaagtcctgaactgcttttgtcaaaacaagggcgtattgtaaccagtaaccctttggctggctctcgtcctaaatctcaaatttctgaaaaaaatttcgtcagccaacaagaattaaatcattccgagaaagatcaacatgaacatcgaattgtggttgaaaatattattagaaatttagctactcattgtgtagagcttaaggtttctgaatttccagatattttagaaacttcaacgatgttgcatttatcatcagaattccaaggtgtgcttaaacaacaggctcccgatgccttaaaccttgcattagaattacatccaacaccagcagtttgtggctcaccaactcatgttgctaagcaatttattttagatcatgaaggttatgaccgacattattacacggggttagtcggctggatggatgcggagggtaatggtgagtgggtagtgacaattcgatgtggtctactcagtgaaaataaaatgcgcttatatgctggtgcggggattgttgaagggtcagatgctgaagctgaatggctagaaacagaagctaaaatgcaaaccatgctaaatattctaaatacaaaagttgctgtgtaa

SEQ ID NO: 49443 - DNA, 444 bp, Acinetobacter baumannii
atgagttatcaccatattttagttccggtcgatggttctcctacttcacttattgcggttaatcatgctgcaagtcttgctaaagcctttagtagtaaagttactttggtatatgcactcactattgatccatttatttcagttgaaattattgatagtacagaaattgcgcaagattattttaataaagcgagagcttcgattcagagcattttagatcaagctaaagaacaatttagccaacatggaatttctgttgaaaccaaaattgttgaaggtcaaacaattcatacagaaatcatcaaagcagcaactgagctaaaagctgatttattagtgattggttctcatgggcgaaaaggttttaaaaagttcttcttaggaagtgtaactcaagcactgttaggagaaattcatgtgccagtattggtcgtaactgaataa

SEQ ID NO: 49444 - DNA, 249 bp, Acinetobacter baumannii
atgattaagaataatattattgccttacgagataaggccggcatgacggcgtatcagttagcgaaacaatgcggatttatttcaaataaccatgtactgggaaagaagataagtgacgcagaaaaaggaaaaaatatcacaattgaaacggcttttttaatctacactgaactcaaaaaagctggtgtatgcgagaagtttgaagatgtcttttggcttgaatgtgatgataaagatatcgaaaactaa

SEQ ID NO: 49445 - DNA, 1056 bp, Acinetobacter baumannii
atgactttaaaattattaaaattatctttcttagttacggcagctttttcaagttatgttcaagctgctacaagtgttaatgatattctgaataaacaaataattgctaccaacagtgaaaatattaattcgacaaaggtagttagtgaactttgtatttttagttgtgatttattaagtacaaaccctgaagtgtcttatggtggcatggacgaactttatgttcttttacgagaaaaatatggtttagattctaagcaaagttgtaagttctataaaaggacaactggcaatgtaatattagatacacaatataaaattgcagccttacagggaacgccaaatcctgatgcctattcagattcaatttttaataatttgatatataagcaaggaatatatagttcttcagatgtaaatgtggacatttattatgatttagttgacattgctagaatcaataatcctgaattagatgaaaatagcaaaaacaatctagtaaaaacttttcaaatgcgccatcgttttattgccaatagttgtggtgaaaaatttatgatggcttatgacaagtacttaaataaagttagtgagttaagagaggctgaatatattgaagcaattaataaaaagaatgctaaagaacgggaaaaagaggaatgggaagaagaaatccgtttagcaaaacaagcaagagatcgagccgatgcggagagggaggaacaagcccgtttaattgatgctaagaagcgggaaaatagacaaaaaattaatctatgcaaaagtactaataattataagctatttatagaatcctctaatgttgttagtgcacgaaatagtattaaagttgcacaagacgttttaaaagaagaagataggttacaaagttttagcggtgtcactcgtttagataggcgttatgcagctgctcaacggatcgagtatgggcaaaaaactctaaatcaaagctttgccaagtataaacaattgggtggaagtgcaagtagtgttgctactgtgacacctctaaataatccatgtaagggtttgtga

SEQ ID NO: 49446 - DNA, 435 bp, Acinetobacter baumannii
atgaaaaatttaacccttccaaattatgaagatgtcgcagccgctgctgaacgtataaaagattttataaataaaacccctgttttaacttcacgtacggtcaacaatgaatttgaagcagaagtgttctttaaatgtgagaattttcagcgtgtaggcgctttcaaatttcgtggtgccatgaatgcacttttacaatttaatgagactcaaaagaaagcaggtgtagttgctttttcttcgggaaaccatgcacaagctattgcgctttcatcaaaaattcttggtattcctgcaaccattatcatgcctaaagatgcgcctgctgcaaaaatggcagcaacgcgagaatacggcggcaatattgttgaatttgaccgttatacggaagatcgggaaaaattggaaaagagattgctgaaaaaaatggtctga

SEQ ID NO: 49447 - DNA, 375 bp, Acinetobacter baumannii
atgaaaccagaacagtttattcgtgagtttgggcctaacactttcagaatatcaatgtcatttgtcaacactgctaagtatttggtggttcatgaaggtgaaattgattttacagatgaaatcaagcctcaccatggcgatcgtgtatttgagcgtgatgtggttaagcgtctggtggagtcggttgagctaatcaacttgtttggcagcatcaagatagcaaaagacaaagtgaagatggctgattttaatggattcttacttgtctcagttccaatcgaaaacggcttggcagatgtctatatccataaagtagaacaagccatccgcgaccacgaatcaatatacggaggcggtgaatctcatgccaactag

SEQ ID NO: 49448 - DNA, 177 bp, Acinetobacter baumannii
atgaacgaatttgtagattacacctcaatgatgaagctgcgcagagcgtacaacctcggtactcgtaatgaagaaacaagagcagcagcgaacctatacgagaaattaagaaagctgaaaatgctagaccagcttaagcaggaagccattactaaacgttacaaggaggcggtatga

SEQ ID NO: 49449 - DNA, 1374 bp, Acinetobacter baumannii
atgattgaattattttctatccctgttgagcaaagcatcttgtctacgttcatgacaatcgatcaggcagcagatgagtttatctctcagatcgatgcacaagatttctatgcatcacaacaccagatcatctttgcccacatcaagagccaattgaataagggtgaagcgtttgatgaggtgactgtattcgagttgattaaagctaatccgcttgaagcaaaccaaatcgatgagcagtttcttgtgaacctcatgaaccgcgcaagcaatgtgagcttgttagtaacacacatcaaaaagctaaaagatttctctactcgcagaaagcttcaagagactagcaagttgattagttcgatcgctaacgacatggcaactcacactgctgaatctgctgtgaacaaagcacaatcgttagttcaaaacttagattttggtgctggtgaggaaaagcttaaacatgctcatgagttttcaaaagaagctgtaaaagagttccttgatcgccacatggcaattcataaccaaatgccttatgagggcggtatcaagactggctttactgctctggacaacaaactaggtgaaatcagcaaaggcgatctagtcatcattggtgcgcgtccttcaatgggtaaaacaacgtttgctcaaaacattgcagcagacatgatgattaaccagtctttaccagttctgtttatctcaatcgaaatgaagggcagacagattgcacagcgtttaattagtggcattggtggggtagagctacgcaaagtattaacaggacatattgatccaaatagcgacgatacacagaaggtgaataacgctgctctggtacttgagaaagcacctttgatgatcgacgacaacaaccgcgcaactgtggcaactatccgcagatcagctaagaaggttcaagccaaatacggaaagattggcgcaatctttgttgattacatccagaaagtaacaccactcactaaaaacaactttggtcgttctgacaaagatatcggtgaaatatctaatgagcttaagcgtatggcaggtgactttgattgtcctgtgatcgcactagcacagcttaaccgtaacttagagaaccgcccaaacaaacgccctgtaaatgcagatctaaaagaatcaggcgacttagagcaagacgcagacatcatcatgtttatttaccgcgatgaagtctacaacaaggattctaaagaagcaggtacagcagaaatcatcataggtaaggctcgtaacggctcaattggcacagttcgattagctacagacttgtcacgcgcaactttcgctgacttaagccctgagtattaccagtctatggaagagagaggtgcagcgtga

SEQ ID NO: 49450 - DNA, 891 bp, Acinetobacter baumannii
atgggtgcatcaattccaattattaagttgattgaagctatgaacgaacagccaatagcattcaacaagcactatgtatttttaggatgtgggatcaatggggcattaatgctctctcaattggtctactggacttctcgcactaaagacagtgaaggttggatctttaaaacacatcatgagtggactcaagaaactggtcttactcgtcgtgagcaagatacggccagagcaacacttaaatcacttaaattcatctctgagaaaaagatgggtgtgccttgtcgtgtttactaccgtgtagagcgtgaaaacctatatcaagctttgatcgaatactctgaaagcattgatattaatagtatgcacaattccgccatactgaatgcacagaacagccatactgaatgcacaaatccgccagactgtatgcacaattccgccatactgaatgcacaagtccgcccatctaatacagagaatacatacagagaatacacagagaatactacagatattatttgtgctgattcagcaccaaaaacacaaaaattcaaagcgaaagatttcttgttgaaaaacggagtatctgagcaaacagcaacagaatatcttgatcttcgcaacaagaagaaaaaaccagtaactcaacgtgctttacaacttgttttcaaacaagctcaggaagcaaagctaagcaatgagcgtgtattccaaattatcgttgttcgtggttgggaatctttcaaagctgcttggaactggcaagagacaaatgcagagcttgagcaattagaaaatccagttgctgagcagcaacaaactatccctgaacaaccagcaacacaattcaaaggtgttgctaagaaatttaaggggatggaccaatga

SEQ ID NO: 49451 - DNA, 663 bp, Acinetobacter baumannii; identical to SEQ ID NO: 47237

SEQ ID NO: 49452 - DNA, 249 bp, Acinetobacter baumannii
atgctgaagtggtttgaaaaacttgtagatccttatccaaccaaaggtttggatgagcccttaccaacacgctttttcccatttgtttggcaagctactgaaggtgtgcgtccatatttattgctacttattatatgtacagctggtgcagctagctttgaagccctgctcttttcaaaaattgggcaacttgtagattggcttagtaatagtcagcctgaaagtttcttaagccaacatgtcgcctaa

SEQ ID NO: 49453 - DNA, 660 bp, Acinetobacter baumannii
atgctgatcggatatgcccgcgtctccaaagccgatggctcgcagtctctcgacctgcagcacgacgccttgcgcgccgcaggtgtcgaacgggacaatatctatgatgatcttgcttccggcggtcgtgatgatcgccctggcttgactgcctgcctcaagtcattgcgtgacggcgatgtgctggtggtctggaagctcgatcgcctcggacgatcgcttgcccatctggtcaacacggtgaaggagctgtcagaccgcaagatcggcctgcgggttctgactggaaagggcgctcagatcgacaccacgactgcgtccggtcgcatggtgttcggaatcttcgccaccttggccgagttcgagcgggatctgatccgagagcgcaccatggcgggtctcgcctccgcgagagcgcgcggtcgcaagggcggacgaaaattcgcgctcaccaaagctcaggtgcgtctcgcgcaagccgccatggcccagcgcgatacttcagtttccgatctctgcaaggaactcggcatcgagcgcgtcactctctaccgatatgtcggtcccaaaggcgagctcagagaccatggaaagcatgttctcggactggcactgttgcaaatagtcggtggtgataaacttatcatccccttttgctga

SEQ ID NO: 49454 - DNA, 2889 bp, Acinetobacter baumannii
atgataagtttatcaccaccgactatttgcaacagtgcccttcagctgactacggcgcgctttctgggaacgtttcttcctgatctccttcaaattccctcattcatccgtttttacattgcggcacagttgaacatcagccgaccagagatcctttcccggtatgctgaaagagacaatacccgctgggagcatcaggggcttatcaagctctattatgattatcatgattttggtgatttcccctggtcattcagactgaagcgtttgctctatactcgcgcctggctcagcaatgagcgtccaggtctgctgtttgattttgctaccgcatggttgctgcaaaataagatcctgctacccgcagcctcgactctgacaaggctgattggcgaagtacgcgaacgggcaagtcgacgattatggcgaaggctggctttgttgcctgacagctggcagaaaacacaactggacggtttacttgaaatacctgaagggcagcgtatgtcggtgctggaagagatgcgaaaaggtcctgtcactatcagtgggccgtcatttacagacgccctggagcgatatacccgactgcgtagcatggagttttcccggctgaatttctccggtctgcctgccatccagctgcggaatttggcccgttatgccggaatggcttcggtgaaatacatttcaagaatgcctgacgaacggcgactggccgtgcttactgcgtttgtgaaagcacaggaaatttcggcgcttgacgaggccgtggatgtgctggatatgcttattctggatatcacgcgttctgcaaaaaatatcgggcagaaaaagcggctcaggacccttaaagatcttgatcgtgccgcgctattactggcacgggcatgcacgttattacttgatgagaacaccgatgaagcagctctgcggcaggctatttttcgccgcataccaaaggacaaactggctgaatccgtcggcaaggtaaatgagctggcgcgcccgcaagatactcattttcaggatgaaatggtggaacaatatggacgggtgaagcgcttcctgtccgcgatgttgcgtgacttacactttcaggccgccccggccggggagcacacgttgtcagcaatccattatctggccgaactgagtggctcaaaaaagcgaattctcgacgatgcaccagagcaaatcatttccggcccctggaaacgtctggtctacgacagagatggtaggattctacgagcgggttactcgctgtgtcttctcgagcgccttcaagattctttgcgccgtcgtgatctctggctggagaacagtgaccggtggggggacccgcgtcaaaaattgcttcagggagctgaatggcaggcacaacgcatcccggtatgtcgggcgctgggtcatccatcagacggaactaaagcagcagaacaactggctacgcggcttgatgacacatggaaatcagtggcttcacgttttgcctgcaacgcagcggtcagcataagcaatgaaggtaagcatccctcactgacgattagcagtctggataaactggatgagccaccggcactgatacaattgaatcgtcgggtaagagaactgatccctccggttgatctgactgagctgttgcttgaaatagatgcccgaaccggttttacccgcgaattcagccacgtcagtgaatcaggtgctcgggcgcaggatctccaggtcagtctgtgcgcaacactgctggcagaagcctgcaatatagggcatgaacccctgataaagcataatattcccgcgcttactcgccatcgtctgagctgggttaaacaaaattatctcagggcagaaacgctggtcagcgctaatgcacggctggttgattttcagtccacgctgccgctcgcggggtactggggaggtggtgaggttgcctccgcagatggtatgcgttttgtcacaccggttaaaacggttaattccggaccaaatcgtaaatactttggttcaggacgcggtatcacctggtacaacttcgtctccgatcagtactccggtttccatggcattgtcgttcccggtacgcttcgtgattccatctttgtactggaagggcttctggagcagcagaccgggctgaatccggtagaaattatgacggacacggcaggatccagcgatatcatttttggcctgttctggttactgggctaccagttttcccctcgtctggccgatgcaggcggggcgatattctggcgggcagataaaacggcacattatggtgccctgaatgagctggcccggggatgtgttgaactgtcaaaaatagaatcccaatgggatgaaatgatgcgaatggcgggctcactgaagcttgggaccatccatgcatcagagcttattcgttcactgttgagaagtagccgaccatctggtctggctcaggcgattatggaagtgggccgggtcaacaagacgttgtatcttctcaactatatcgatgatgaggattaccggcgtcggatcctcactcagctcaaccggggagaaggacgccatgcagtggctcgagccatttgctacggacaacgtggtgaaattagaaaacgctaccgtgaagggcaggaagatcaactcggtgctctgggtctggtgaccaatgcggttgtgctgtggaacacactttacatgcaggaggcgttgtcacatcttcgcaaatcgggggaaacacctgaagaggagcatctggcaagattatcgccgctgatacatggccatataaatatgctggggcattatacgttttcgttaccggaagatattctgaagggcgagttaagaccattaaatttcaatacaaacaatgaattaacctcttag

SEQ ID NO: 49455 - DNA, 2412 bp, Acinetobacter baumannii; identical to SEQ ID NO: 46112

SEQ ID NO: 49456 - DNA, 2430 bp, Acinetobacter baumannii
atgtctgaacttattatgaatgaaaaaactgacttagagcctcaggttccaagtgtattaccactattagccttacgtgatgtggtggtttatccacacatgcagattgcgctatttgtgggtcgtgaaaaatcgatcaatgcagttgatgtggctcgtaacagtgacaatttagtatttgtagttgcgcaaaaagattcgcttacagaagaaattgatcacgacaatttataccagtacggtacagtcgctaagattgtacaagtagttaatcatgaaaatgatgaaaactgcattaaagtacttattgaaggcttacatcgttctaagttgaaaaaaattatcgatgaagatagttatttgactgccgaacatgaattaagtccaatgacgattaatgtagataaggcaacgcaagaaactcgtttacaagagttacgtaatttatttgctcaatatgcagaagcaaaattacgtaatgcacgtgaactggttgctgctgccaacaaaatcgaagacttattgcaattgatgttcttcgtagcaactcgtgtgcctctaaatattgaaattaagcagaaatttttagagtacgatgagtttgaagctcatttgcaagagttgatgaactacttgatgaatcaatctgctgaacagcaaattgagcaaactttacatgacagcgtaaaacgccaaatggaaaagaaccaacgtgaatactttctaaatgaaaaaatgaaagtcattcaacgtgaactttccgatatgaatggcggtgctgaagatgacgttgctgaaatagagaaacgtcttgctgaagctgatttacctgaacacgtacgtaaaaaagccgaagctgagttccgtaaacttaaagcaatgcagcctgcatctagtgaagctgctgtggtacgtaactatctagaagtgattctagatacgccatggaacaaagcgagcaaagtcagtattaacctgaacaaagcgcaagagattcttgatgccgatcattatggtcttgatgacgttaaagatcgtattgttgaatacctagctgttcaatcacgtgtgaaaaaactcaaaggccctatcctttgcttggttggacctccaggggttggtaaaacttcacttggtgaatcagtagcgaaagcaacaggtcgtgaatttgttcgcatggcgcttggtggcgtacgtgatgaagcagaaattcgtggacaccgtcgtacttatattggtgcgatgccaggtaaaatcgtgcagtctttaacaaaagttggtgtgaagaacccattgttcttactcgacgaaattgacaagatggcacaagactaccgtggtgatcctgcttctgctttgcttgaagtgcttgatccatcacaaaacagtaagttcaacgatcactatttagatcttgatcttgacctttctgaagtgatgttcatctgtactgcaaacagcatgaatattccagaagccttgttggaccgtatggaggttattcgtctaccgggttataccgaagatgaaaaagttaacattgctgagcgttaccttgttcctaaagcaattaagaacaatggtctacgtccaaaagagttaactattcatgaagaagcgatccgtgacattgttcaacgctatacacgtgaagctggcgtacgtaatttagaacgtgaagtttctaaaattgcacgtaaagtcgtaaaagaagcggtaagtaaaaaatctaaaaacttacagcttgacgttacctctgccaatcttcctgaatacctaggtccacataaatttgactttggtatggccgaagatgaagcacaagtaggccgtgtaaatggcttggcatggacttctgtagggggtgaattgcttactattgaagttgccgcagttaaaggtaaaggtaaattcattacaaccggttcactcggtgatgtaatgaaagaatcaattaccaccgcaatgactgtagtacgcacacgcgccgatgaacttggaattgaagcatctcgctttgaagaaactgatgtacacgttcacttacctgaaggtgcaactccaaaagatggtccatctgctggtttggcattaacaactgcacttgtatcagcatttactggaattgcgattcgaccagatattgcaatgacaggtgaaacaagtctaggtggtcgtgcgatgcgtatcggtggcttgaaagagaaacttcttgctgcacatcgtggtggaatcaagctcgtctttattcctcaagataacgttcgtgatttggcagaaattccagacaatgtgaaagaaggattagaaatcaaagctgtgaaaagcattgatgaaatcttacctttagcattaacttcgatgccaaagcctttacctaaaacaccgattgtaaaaccggtggaaggctcaaaagcagcgcgtcactaa

SEQ ID NO: 49457 - DNA, 1218 bp, Acinetobacter baumannii
atgggtgctttaaatggaattcgggtgcttgacttaagtcgggtattggctgggccttggtgtgggcagattcttgccgatttaggcgcagaagtaatcaagattgaacggccgaaagttggtgacgatacccgttcttggggaccaccttggatgaaagatgactcaggccaagatactcaagaagccgcttattatcagtcaaccaaccgcaataaactatcggttgccatcgacattgccaatcctgatggccaagaattgattaaagcgcttattcaagataccgatgtcgtgattgaaaactacaaagcgggttctttaaagaagtacggtttggattacgagtctttatctgcgattaaccctaaactggtgtattgctcgattactggttttggtcaaactggcccaagagcagaagagcccggttatgactttattattcagggcatgggcggactcatgtcagttacaggtgagcgtgatgatttgccgggtggtggtccacaaaaagtaggcgttgcattttctgacttagccacgggactttattctacgattgccatacaggctgctttactcaaccgccatgtgacgggtttaggccaatatattgatatggctttgcttgatgttcaaattgccacaatggcaaatcagggaatgaattatttgtcatcaggaaatatccctaagcgttatggcaatgcacacgctaatattgtgccttatcaagtgttcaaagcttctgaccgtgattttattatcgcgtgtggaaatgacactcagtttattcaactctgtcgaagtattggtttacccgatttaccaaacgatgcacgttttgcccgaaatgcaaatcgcattaagcatcgcgatgaaattatcggaattttacaaactcactttttaacaaaaacagcagatgaatgggtagatgcaatttatgctgctaaagttcccgtaggtgtaatcaataacttggaacaagcttttcaagaaccgcaagtgattgcccgtgaaatgttagtcgagatgaaccatcctcaacgtgaaaaactgaaggtaattgggtcaccaatcaaactttctagaacgccagttgagtacaaaacagcacctccgctgttgggtgagcatacgcaggccgttttggggcgaatagtttcttcagaaaaactagcagagcttaaagaaaagggcgtaattgggtag

SEQ ID NO: 49458 - DNA, 882 bp, Acinetobacter baumannii
atgagtaattttgtgcctaattcctttcaagtgcctaatgcatttgttgacgaggttttaaataaaatctctgatgctgcatgcaaaatttatttagttatttgccgtaaaactcgtggctggaataaggagatggattccatctctttaactcaatttgaagagattacagggaagagtagaccgacagttgttaaatgccttaatgaattaattaaagttggtttagtcgtggaacaaccaagcacaattcatggaaatacattcaaattaggtaacgatactagcgttggtttagtgcttaaattccctagtaaaaattttttactacctgaaatttatggccaaactagtaaaaattctttaccactgctagttaaaaattttaactacactagtaaaaattttttaccgctactagtaaaaatttttaacacacaaagtatcactatcaaaaacaactctcaaagtaataaaaaaataaataaaaaaagagagcctgtttctgaaaaacctaaatcagaaaaaccaactgaatttaatccacgtttagttgaactacctgcatgtgtagattcagaactgtggaacaattttgttgatatgcgtatcagcatcaaaaaaccactttctgaaaatgcagtaaagctaatccttaaaaaacttatctcgtttggccctttggctaaccaatcactggaaaactcaattatcggaaattatcagggtgtatttgagcctcgccaaaatcaaattcaggaaaacccacaatctcataacgttcctgaagaaccgggttatttcactcaaatgtacgctgagagcaaccgttcaaacgtgattgacgttacgccagtgtcacaagattttggaggctattaa

SEQ ID NO: 49459 - DNA, 393 bp, Acinetobacter baumannii
atgatgcttgatttgaataaggaaagagaggcttttctggataccttccaatattacaaaggaagaagagacattatttttagtaatgagcatgaactgtttatgactagatcaaacaatccttctgaaattgctcagaaagaaataagcaacatgaatagacgttgggatgcttggcttagatgtgcaaagcatcgtgatgcagagctagaaaaagccaaagctcaggcggtgccagagggttactgtttggtaccgaaagagattccagacagcgttgttagctgtttagaaaatagtggattccattggggcgatgggactcgtgatcattacacgcctatttattctttgatggttgaagtggcaagcgaatcgggagctgagggatga

SEQ ID NO: 49460 - DNA, 354 bp, Acinetobacter baumannii
atgagtgaattatatagcagtcaagctgtcaaagatgttcttaatgaaagagaacgccaaattataaaagaagggtatttacctgaatttgataatctctatgaagcaaatgaattgccacgagctgcatcttgttacgttgatcatgtagtaagtagaggttgggtttataacagcaaagatttcggccccgaagtgtatatggatgaggatgctgcaggatggtggccttttgctgatactttctggaaaccaaaaagcccaagacaagatttggttcgtgcagccgctttattaattgcggagattgagcgtcttgatcgagaagttaaagcggaaagtaaggaggggtaa

SEQ ID NO: 49461 - DNA, 276 bp, Acinetobacter baumannii
atgagcacaccacaatatcaaacaatgaaagaaagtgaagtttgcaatgccatcggatgggggttaattgttctaggtattatatctggatttatttttatacttgtgtttggccgagttgaagttccaagaacttattatggcaccgagaccgtatggtcaggaatcatggttattacaggtatcgggataatcttaaatggattcttagtgggctatctgttccaaaaggttgccagcatattgagatatcacgagaacaagagcgcatcttaa

SEQ ID NO: 49462 - DNA, 522 bp, Acinetobacter baumannii
atgaaaaagattttattagcgggatttcttggattgggcttagcggggtgtgcgacaactccccaacaaccctcagagcctgtaaaatttgaaaaggtttatcaaattgatggattaaaccaagcacagatttatgatggcgctagacaatggttcgctgtagcttttgcttctgctaacgcagtaattcaatatgaagataaggcatcaggcactatcattggaaagggcaatatgcgatatccttgttcgggcatggagtgcttggcaatgacaggaaacgaacgtgttgattttactgtaagagtggacactaaggatgggaaaatgcgcgtgggttatgatggtttaacctatagcgctccatcgcacatgagtgctggaataatgatgcctgcacaaaattaccctataactgaaagtaggaagtccacaccactgattattagtaagattaatactctatcggatgatatggctgaaaagattaaaactcagcagaaagtaaattcgaattggtaa

SEQ ID NO: 49463 - DNA, 237 bp, Acinetobacter baumannii
atggaagtaaagaataatgttgcttgtttgcgtgaaaaagcaggcttaacggtttatgagctatcaaagcggtgtggttttgttagtggtagcagagttctatcaaactatgtgacaagagccgagcagggacattctgtcaagatcgatacagccttacttatatataaagaactcaaaaaagtaggtgtatgtaaaaattttgaggatgtattttggcttgaccacatggactag

SEQ ID NO: 49464 - DNA, 900 bp, Acinetobacter baumannii
atgtatgaggtatcttctgataataccaatacagtaacgcataatgaggctagccaaaaagtcacatttaaaaacttttcatcaactgcaaagaatgaaaaattagcgcctcaaatacttttggctcaaacgaactctcttaattctgccccagtttgccaatacaattttgacgcgactcaagaagattatgatctatttaatacccaatatcctgatcgaccacctacaatgagatttcctctaattaatgggcaaaaatttggctttaaagtagagcctgtcactgaagacaagtatggttatttagtttatacagcaaaaagtaaagtaaaaatgaattcaaccagttatgagggggatttcttattacccaataaaggcattattgcttttgaaatgcaacttaaagtacccacactttcttcaagcacttcttcttattcagccgagattagttttaatggtataactgataataactatacaattagatcaaattatcattttgatattggtgttcatgattttgaatttggtgaaaatcctccccgtttatatcatagcgtatcatctgagatgggagattatcagttttttgataattactttaaagacaaaaaaatgacggataacacaaatgaatatcaacgcctaggtgtttatattaatcaggatacgaaccaagtcggatttatttctaatggtgttgatgaaggatatcaatttaaactaccgggtgcactacagaaaatagcttttacagttgagggaattgcatatattgaatctacaaatttatttggatatgaattttctaatgaactgattacagaccgtaatgcgctaaagtttaactatcctcagggcacaacagatatgtgtggtaatgctatttaa

SEQ ID NO: 49465 - DNA, 792 bp, Acinetobacter baumannii
ttgttttttgcaacgctttcggtttttttgacctatggtgaagatctggtgatagaaacagctcgtcaccaccgtgaatttattcaagatccgattttaaaacagcgtgttacatcgctgattggtcaagaagccatccattcaaaattgcataatgagttcaatgatgcaattaaagagctggaatatccggtcgatttttatcgtttcttgggtgagaacttctttaaatatgtgtttttgaaattcccgcagccattaaagctttcactcatggcgggtattgaacattttacggcggtacttgccgaatacatgatgaagcatgaaaagaatttctattataccgacgatgccaaaagtcgtgccttatggatgtggcatatgcttgaagaatctgagcataaagatattgcttatgacgtctatcaggttttaaacggtaattatccgttacgggcaacgggctttttaatggctttcattaccattttagggcttattccaacagcaactttatttgtacctctactgcgtaagccaaaagaactgttgactagaaaattttggaaagacgcgcgccgtggtgtaggacttatttttggtccaaaagatggtgtattcggtagcaccattggccagattttcgattatttacgtcctgacttccacccaaatgatcatgacaccactgaatatctagagtactacaaagacaaattactcaaagaaggcggcgcgattgcaccttactttgtgaaggaatttaccccacctgtacgcttgtcttaa

SEQ ID NO: 49466 - DNA, 834 bp, Acinetobacter baumannii; identical to SEQ ID NO: 46183

SEQ ID NO: 49467 - DNA, 306 bp, Acinetobacter baumannii
atgctgggtgatctggaccagacattaacagtctctatatctggtttaggtgatgtaatgccggatgagtttgaacgggtaatcgaaggccaatatcccgatgtaaagccaacagtaaattaccggatttacagttcagacaatctgaattctccaatgttttatttactcggactgcaactctccagtgttgcaatgaaccataaagctgtgacattcaaggctgaatcaccaagattaaatactgcgaagactggagatatcttttcgcttgatcgttttagtggtttgaagggggctatatga

SEQ ID NO: 49468 - DNA, 363 bp, Acinetobacter baumannii; identical to SEQ ID NO: 44144

SEQ ID NO: 49469 - DNA, 402 bp, Acinetobacter baumannii
atgaaggtggaggaaggtgatgtcattctggtgaagaagctcgaccgtcttggccgcgacaccgccgacatgatccaactgataaaagagtttgatgctcagggtgtcgcggttcggtttattgacgacgggatcagtaccgacggtgatatggggcaaatggtggtcaccatcctgtcggctgtggcacaagctgaacgccggaggatcctagagcgcacgaatgagggccgacaggaagcaaagctgaaaggaatcaaatttggccgcaggcgtaccgtggacaggaacgtcgtgctgacgcttcatcagaagggcactggtgcaacggaaattgctcatcagctcagtattgcccgctccacggtttataaaattcttgaagacgaaagggcctcgtga

SEQ ID NO: 49470 - DNA, 633 bp, Acinetobacter baumannii; identical to SEQ ID NO: 30074

SEQ ID NO: 49471 - DNA, 624 bp, Acinetobacter baumannii
atgaagctggtctccggcggttccggcctcgccatcggcctcgcccgcgactgggcgcagcgccatggcgccaggggggaaagcgctcaggccggcatgccgctggccggtccggcggtggtgctctcgggctcctgctcggtgatgaccaacagccaggtggcggcctatcgtcaacaggcccccgcccgcgccgtcgacttaagcgcctgctttaccgatctggagagctacgtcaggacgctgactgactgggtggacgcgcagcgcgatgcgccgctggcgccgatgatctatgccaccaccgagccgcaaacgctgcagcggatccaggcgcagtatggcgacaaggccagcagcgaacgggtggaacagctgtttgccgctcttgccgccgccctgaaggcgaacggatttacccgctttattgtggccggaggggaaacgtcgagcattgtggcgcagaccctgggggttgaggcgttccatattgggccgaccatctcccctggcgtgccctgggtgcgtgacacccgccagccgctctccctggcgctgaagtcaggtaacttcggcgatatccagttctttgcccgtgcccagcaggagtttcgtcatgactga

SEQ ID NO: 49472 - DNA, 432 bp, Acinetobacter baumannii
atgactgagcaacaactgcgagaggaaatggtgcagattggcgcctcgttgtttagccgcggctatgccaccggctccgctggcaatctgtcgctgctgctgccggacggcaacctgctggcgacgccgaccggcgcctgcctcggcgaactgcaggctcagcggttgtcggtggtgacgctgcaaggggaatggatctccggcgacaaaccgtcgaaagaggtcacttttcaccgggcggtctatttgcacaacccggcctgcaaggcgatcgtccacttgcacagccactatctgaccgcgctctcctgcctgcaggggctcgggcactgttgcaaagttagcgatgaggcagccttttgtcttattcaaaggccttacatttcaaaaactctgcttaccaggcgcatttcgcccaggggatcaccataa

SEQ ID NO: 49473 - DNA, 765 bp, Acinetobacter baumannii
ttgacctatggtgaagatctggtgatagaaacagctcgtcatcaccgtgaatttattcaagatccagttttaaaacagcgtgttacttcattgattggacaagaggcgattcattctaagttacacaatgaatataacgatgcacttaaagatgttgaataccctgttgatttataccgtttcttgggcgaaaacttctttaaatatgtgtttttgaaatttccgcaaccgcttaaattatcgatgatggctggtattgagcattttactgcggtacttgccgaatacatgatgaagcacgaaaagaatttctactattcagatgatgccaaaagccgtgctttatggatgtggcatatgcttgaagaatccgagcataaagatattgcctatgatgtatatcaattactcaatggtagctacccactacgagcttctggcttcttcttagcattcttcactattttaggtctaatccctgcgactaccttgtttattccggttttaagaaaaccgcaggaaatgttgactagaaaattctggaaagacgcgcgccgtggtgtaggacttatttttggtccaaaagatggtgtattcggtagcaccattggccagattttcgattatttacgtcctgacttccacccaaatgatcatgacaccactgaatatctagagtactacaaagacaaattactcaaagaaggcggcgcgattgcaccttactttgtgaaggaatttaccccacctgtacgcttgtcttaa

SEQ ID NO: 49474 - DNA, 834 bp, Acinetobacter baumannii; identical to SEQ ID NO: 46183

SEQ ID NO: 49475 - DNA, 918 bp, Acinetobacter baumannii
atgagttcaggcgcaaaaattcgattatatgcttgtgaggaagcagttttaggaacaactcctgcaaatccagtctggtacaccgttcgccgtgttactgatagtttgactgaaaatgttactactgaagatagcagtgaagtagttgattcacgttttcgccaaggcgctgttgtaacggaagccgaagtaactggtcaactagagtttgaattatcactaggtacctttgacttattcttaaatgttctcgctttcaataactgggctgcaaatgctttaagttttggtggtggagtacgtaagtctcttaccttggtaaaagtctttgaagatattggtcaagtctttatttatcgtggtattcaagtgaatacaggtgaaatgacgatccagaccacaggcaaaatcactggtaactttggtttagtaggtagctcatttacgcgacagcaggttaatcctgttacaaatcctattccagcatcgactcgccctctggtgagtatgccaaatgttgaaaagctacttattaatggtcaatcaattcagggtaaagcttgtctgcagacacttaccatcaactttagtaataatctggaagcgatccgttgtatcggttctggtaagtacacgcctgagttttacttagagaaaatgatggatattggcgtaaatgctaatttcatgttttcagcaacatctgcttcttggattgatgctattaaaacccgtgatgtatttacattgaccttcgatattacagataccaaaggcagtaagtactcgtttaacttcccgcaacttgaagttaaggaagcaaatcaccctgatggtggtggcgatgacattattacaatagatatcaattttgcccaagtgcgtaccagtccaacgattgtacgtgctctcgtgtaa

SEQ ID NO: 49476 - DNA, 522 bp, Acinetobacter baumannii
atgatggctggtattgagcattttactgcggtacttgccgaatacatgatgaagcacgaaaagaatttctactattcagatgatgccaaaagccgtgctttatggatgtggcatatgcttgaagaatccgagcataaagatattgcctatgatgtatatcaattactcaatggtagctacccactacgagcttctggcttcttcttagcattcttcactattttaggtctaatccctgcgactaccttgtttattccggttttaagaaaaccgcaggaaatgttgactagaaaattctggaaagacgcgcgccgtggtgtaggacttatttttggtccaaaagatggtgtattcggtagcaccattggccagattttcgattatttacgtcctgacttccacccaaatgatcatgacaccactgaatatctagagtactacaaagacaaattactcaaagaaggcggcgcgattgcaccttactttgtgaaggaatttaccccacctgtacgcttgtcttaa

SEQ ID NO: 49477 - DNA, 519 bp, Acinetobacter baumannii
atggcgggtattgaacattttacggcggtacttgccgaatacatgatgaagcacgaaaagaatttctactattcagatgatgccaaaagccgtgctttatggatgtggcatatgcttgaagaatccgagcataaagatattgcctatgatgtatatcaattactcaatggtagctacccactacgagcttctggcttcttcttagcattcttcactattttaggtctaatccctgcgactaccttgtttattccggttttaagaaaaccgcaggaaatgttgactagaaaattctggaaagacgcgcgccgtggtgtaggacttatttttggtccaaaagatggtgtattcggtagcaccattggccagattttcgattatttacgtcctgacttccacccaaatgatcatgacaccactgaatatctagagtactacaaagacaaattactcaaagaaggcggcgcgattgcaccttactttgtgaaggaatttaccccacctgtacgcttgtcttaa

SEQ ID NO: 49478 - DNA, 711 bp, Acinetobacter baumannii
atgcgaacatttatatacttggatgaaagtggtgatttaggttggaatatggaaaagccttatcaaaagggtggttccagtcgaatgcttacgttagcagcaatctgtttgcctgagaataaggttaagtatgttcagcgtattgtaagagcattatatgaaaaaagaaaaagacctttaaaaaatgaattaaaatcagttgatttgaatctaaaagataaagaaatattcgtcaaattgactgcgaaacttatcaaagaccatccagatatacaacttcgctcaattacagcaaataaagaatttgttaatgcaagattcaagaacgacccaaatgctttctataattatatggtgaaacttttacttcttgggactatctgcaagcataaatatgtagattttatgcctgacagaagaagtgagcgggtttcgttgaaatggaatatgggtgagtatttaaaacagatggttttagagtgtagcattgaaaaccaaattgttaaccagtcatgcaatattatgccaatggatagctcaaagtgccttgagctacaatttatagacttctatgcaggtttagtctggtcggcatatgaatttaaagacatgactgcaagaaaattcatggcagaaaaccgaaataccaaccataagcttttctttccaaaagaagacaaagtggataacattgttgatgaagctgtctaa

SEQ ID NO: 49479 - DNA, 189 bp, Acinetobacter baumannii
atgattgctagagataaaaattccgttgcttggaatgtaagtttaattgatagccaaacatcattcgttgaatttgacgaaagcaaagatacaagtgactttgatactgttaaggataatcaaacaaaacgtcgtttcaaagggaaatccactggcggtggatttaaaaaagcagaaggtgaatcgtga

SEQ ID NO: 49480 - DNA, 1080 bp, Acinetobacter baumannii
gtgagtaatttgacctttaatcctgagttattaaggatagtaaggcagtttagagggtttggacaaacagctcttgctaaaatggcttcattgtctcagggaactctgtcaaaaattgaagcaggattgttagagcctaatgaggaaatggtttcaaatcttgccaaagttttaaactttcccgtttcaatattttatgagacctataagccatttggtttaccgttaagtgttcatcccatgtacaggaagaactcttcaatcggtaaaagggctattgaacaacttgaagctgaacttaatattcgattatttaactctatgaagttagttaaagctattgagtttgaggaggatttaccacttccttttttaagtttagatatatatgaaactcctgaaaaagttgctgaattgctcagaagaacttggttaattcctaatggcccattaaagaatttaaccgattatgttgagagggcagggtgtctcgtatttcattgcgatttctctcaagaaggtgtgtctggtgtaacaataaaagtacctggtttaaacccttgtatttttattgataaaaatatgccctcagatagacaacgtttcacactggcgcatgagttaggtcatgcaattatgcataaactcccttcagaaaatatggaggatgaggctaaccgttttgcaagtgctcttttgatgccttcaaaagatattagaccatatcttactgggaaaattactttagaaaagctcgctaccttaaagttggtttggaaagtttctatgaatgctcttcttaaaacagcagaacgagaaggcttattaacaccatcccagaaaaagtatctatggatacaaatgactaagaatggttataggactaaggaacctgtagagttggattttcctaaagaaaaggctgtaactatagatcaaatttttgaatactatagagaagacttaggttactcaattgatgagttatctaatttattgcaaacaccaaaagaagacattgattcactctactcattaaatatagttaagaaaaaaccaaatatacgaattttagaataa

SEQ ID NO: 49481 - DNA, 522 bp, Acinetobacter baumannii
gtgagcaacaatgccggtaatggcgattatggtctggctaaactgctcaaagccggttcaattaaaaaagtgatttgctctttcccacgtcagtctgactcttatgtgtttgatgaactgtaccgtgccggaaaggttgaacttgaactggtaccgcaaggcaatctggcgtgccgtattcaggcagcaggtatgggccttggggcggtgtttaccccaactggctttggaacacttttggccgaaggcaaagaaacccgtcatattgatggtaaagattacgtgcttgagtatccgatcaaggctgactttgccctgattaaagcctataagggcgaccgctggggaaatctggtttaccgtaaatctgcacgtaactttggcccgatcatggccatggctgctgatgtcaccattgctcaggtttctgaagtggttgaattgggtggattagacccggaacacatcatcaccccaggtatttttgtacagcatgttgtacaagtacagcccgcacagtaa

SEQ ID NO: 49482 - DNA, 555 bp, Acinetobacter baumannii; identical to SEQ ID NO: 48633

SEQ ID NO: 49483 - DNA, 321 bp, Acinetobacter baumannii; identical to SEQ ID NO: 46215

SEQ ID NO: 49484 - DNA, 573 bp, Acinetobacter baumannii
atgaaagaaacttatcctgataataaatatgcagataagacttggagatcttatactattagacttattcgctggttagaattaacaggtttcttacagccagctacagagccaaatacatggatttataaagatttaggaagtcccaaaacttctgtgatgagtagaagacgtacttctaacttttttgtgccaagaattacacctcagttatttatatcgatatatcctcagattgcaggtaagaatcttcaagaattaataaatgatggtagaactaataaggctttagaaattttaaaaaaatttgaattaatagataatgaatttatttcagatattaaagattttgagtctgtggtttatgctaaagctaattcagaatttagtatccaagctatgcttgaaattaaagagctatattctgctgataaactatcaggacaggctttaggtaagttgcttaaagaaaaatatgatttaaaatggactgatgtaactactcaatattcaggcaataaattgaatagttgggctaaatgggttaaatcttatgaagtgaaaaatgaataa

SEQ ID NO: 49485 - DNA, 159 bp, Acinetobacter baumannii
atgcggatacagcgtgaaaatgtaggtaaagttccgcggttacgtccagaacaaatggttggagcatgttgtgtttttgattatgagctagttgattttgatacagcagatagtgcagcaataattgttttagagcaattagaagcgctaggttgttaa

SEQ ID NO: 49486 - DNA, 399 bp, Acinetobacter baumannii
atgtacaagttaaagctaaatcctcagaccagcggctatggcgtaacaccgggtgatgatgtgaaacgtcagcagatggacggcggtcgtggtcgctattacatcgatgtaaaacgtaatagccacattgttgatgtgaactggaatttaagtaaaaccgatttcaataaaatgatggcgttctggcgggtataccagaacaagccagcctcattttatgcggatctggtgattgatcagggagctcgtcagcaatacctgtgtaacttcattccgaactcgttcaagaccaatgaagtgaatggcaacctttaccgggtaaatgcacagctcgaagttgttcaaaaccagcctaaccttactgccgatatcgctttgattaaggattgggaggtctaa

SEQ ID NO: 49487 - DNA, 747 bp, Acinetobacter baumannii
gtgattgaaacagctcgtcatcaccgtgaatttattcaagatccagttttaaaacagcgtgttacttcattgattggacaagaggcgattcattctaagttacacaatgaatataacgatgcacttaaagatgttgaataccctgttgatttataccgtttcttgggtgagaacttctttaaatatgtgttcttaaaattcccgcagccattaaagctttcactcatggcgggtattgaacattttacggcggtacttgccgaatacatgatgaagcatgaaaagaatttctattataccgacgatgccaaaagtcgtgccttatggatgtggcatatgcttgaagaatctgagcataaagatattgcttatgacgtctatcaggttttaaacggtaattatccgttacgggcaacgggctttttaatggctttcattaccattttagggcttattccaacagcaactttatttgtacctctactgcgtaagccaaaagaactgttgaccagaaaattttggaaagatgcacgtcgtggcgtcaacttaatttttagtccaaaagatggcgtatttggtagcaccattggtcagatttttgattacttacgtccagacttccatccaaatgatcatgacaccactgaatatctagagtactacaaaaagaaattacttaacgagggcggtgcaattgcgccttactttgtgaaggaatttacaccaccagttcgtgcagtttcataa

SEQ ID NO: 49488 - DNA, 306 bp, Acinetobacter baumannii
atgttagggatggtttcccagaatgatggtattggattaatgagcgttactgaaacactagacagcaaaatcaaggcacaggaagaaaagctaaagcagttaaaggctcaaagacaggcagcactggcaagagagcgtaccaaagagaaagaacaggcacgaaaggacgataccagacgcaagattttaattggatcctgtatgttaaaaatcactgaagatgatgaacaagccagagctaaactaattgctcagatggataagtatttaacggatgagcgtgaccgaaagctatttaatctataa

SEQ ID NO: 49489 - DNA, 135 bp, Acinetobacter baumannii; identical to SEQ ID NO: 48639

SEQ ID NO: 49490 - DNA, 699 bp, Acinetobacter baumannii; identical to SEQ ID NO: 48630

SEQ ID NO: 49491 - DNA, 522 bp, Acinetobacter baumannii
atggcgggtattgaacattttacggcggtacttgccgaatacatgatgaagcatgaaaagaatttctattataccgacgatgccaaaagtcgtgccttatggatgtggcatatgcttgaagaatctgagcataaagatattgcttatgacgtctatcaggttttaaacggtaattatccgttacgggcaacgggctttttaatggctttcattaccattttagggcttattccaacagcaactttatttgtacctctactgcgtaagccaaaagaactgttgaccagaaaattttggaaagatgcacgtcgtggcgtcaacttaatttttagtccaaaagatggcgtatttggtagcaccattggtcagatttttgattacttacgtccagacttccatccaaatgatcatgacacgacggaatatctggagtactacaaaaagaaattacttaacgagggcggtgcaattgcgccttactttgtgaaggaatttacaccaccagttcgtgcagtttcataa

SEQ ID NO: 49492 - DNA, 525 bp, Acinetobacter baumannii
atgatggctggtattgagcattttactgcggtacttgccgaatacatgatgaagcatgaaaagaatttctattataccgacgatgccaaaagtcgtgccttatggatgtggcatatgcttgaagaatctgagcataaagatattgcttatgacgtctatcaggttttaaacggtaattatccgttacgggcaacgggctttttaatggctttcattaccattttagggcttattccaacagcaactttatttgtacctctactgcgtaagccaaaagaactgttgaccagaaaattttggaaagatgcacgtcgtggcgtcaacttaatttttagtccaaaagatggcgtatttggtagcaccattggtcagatttttgattacttacgtccagacttccatccaaatgatcatgacacgaccgaatatctggagtactacaaaaagaaattacttaacgagggcggtgcaattgcgccttactttgtgaaggaatttacaccaccagttcgtgcagtttcataa

SEQ ID NO: 49493 - DNA, 570 bp, Acinetobacter baumannii; identical to SEQ ID NO: 46232

SEQ ID NO: 49494 - DNA, 441 bp, Acinetobacter baumannii
atgaacgtaaaagctcctcctttcaactcatttgcatttgtcagcatggctgctcttgcaatttctggtggttctttagttgcttgccaattgcagccagctttccaaacaaaagaagtacctactctttttacacctaaaattcaaccaagtacttacggtgtgttaaccgcgaaaatcacaggtaaagattctggcgttgccgtcatcaaattagatagcttccgtttaaacgttagctttgattttgaagcctatccagacagctacggcgttccaggttctgaattcaccgctgttgatattacccaactcactgtaaatgaaatcactgacattaatggtaagtcatataacgatttcaccgaatttgaagacatccgaaacatcaatggtcttctaaaaggcttcatcgaacgtaacaagttggtggaggcttaa

SEQ ID NO: 49495 - DNA, 477 bp, Acinetobacter baumannii
atgcatgtaaatctgtggggagttattcatggctgtcatgcatttgttcccaagtttaaaaagttaggttacggcgcgattattaatgtggcatctgcggcatcttacacggctgccccagaaatgactgcttataacgtgactaaagcgggtgtgcgtgcgctttcagaaacgctttcggctgagcttcgtaaattcaacattaaagtcaatgtgctctgcccgaccttggtgcctaccaatatcattaaaaatggtcgtattccgggccgttattcaaaacttgcagaccatgcgctcatgaactacgcactcaccacaagtgatgatgtagccaaactcacacttaaccgccttgatcaggatgagctttataccatccctcaaatcgatgcgaagttgttctggctgatgaaacgtgcatcaccaagtttgtataccaagttccttggtacctcttacaaattatttaaataa

SEQ ID NO: 49496 - DNA, 411 bp, Acinetobacter baumannii
atgcttgaagaatccgagcataaagatattgcctatgatgtatatcaattactcaatggtagctacccactacgagcttctggcttcttcttagcattcttcactattttaggtctaatccctgcgactaccttgtttattccggttttaagaaaaccgcaggaaatgttgaccagaaaattttggaaagatgcacgtcgtggcgtcaacttaatttttagtccaaaagatggcgtatttggtagcaccattggtcagatttttgattacttacgtccagacttccatccaaatgatcatgacacgaccgaatatctggagtactacaaaaagaaattacttaacgagggcggtgcaattgcgccttactttgtgaaggaatttacaccaccagttcgtgcagtttcataa

SEQ ID NO: 49497 - DNA, 216 bp, Acinetobacter baumannii; identical to SEQ ID NO: 42270

SEQ ID NO: 49498 - DNA, 234 bp, Acinetobacter baumannii
ttgaattgcacgtttgataagcaacgtggcacttggattagtccaccagaatttaacggtatctcagatcaacaaagagatgaacttcaaaactttattgctgaacgtggcctcgatgtaaaaacagtttgtgagcacttaggtatcgatgcccttatccaaattgaagcggcaaaacttaaggcagttaaacaagaaattgaaaccttagcgaaaacggggatgacagcatga

SEQ ID NO: 49499 - DNA, 405 bp, Acinetobacter baumannii
ttgtgggtacttgatacaactactggtcaatatctatctcgaactgttatttttgctacaggcccaattaccgaagcccagattccacgtcttgaaggtttagatacctttacaggtgaaatgttccattcagcgaaatggaatcatgattatgaattaactggaaaacgcattgctgtaattggtacaggtgcatctgccatccagtttgtgccccaaattcaacctaaagccaaagaattgtttgtattccaacgtacagctccttgggtactgccaaaaccggatacagacttaggtgagtttagtaaatcaattattgcaaaatatccagcgattcaggcaagttggcgggcactgttgcaaatagtcggtggtgataaacttatcatccccttttgctga

SEQ ID NO: 49500 - DNA, 162 bp, Acinetobacter baumannii; identical to SEQ ID NO: 46255

SEQ ID NO: 49501 - DNA, 273 bp, Acinetobacter baumannii
atgaagcctatccttctcgccactcacaaacgtcttgaagagctagaaaaagaaaaggcatctgctaatgagccaccctctttaatggttcaaatccaaactgcaccagaccttacaacgctagatgctttggaaatagacgtggctgcacgagatccgcagattcaaccgaagctaatggggtatgtgagaaaacgccgctatgaattagagaatcctacacctactcaacaagaatctacccctgattatttattagtggacggtttctaa

SEQ ID NO: 49502 - DNA, 324 bp, Acinetobacter baumannii
gtgcgtgcgctttcagaaacgctttcggctgagcttcgtaaattcaacattaaagtcaatgtgctctgcccgaccttggtgcctaccaatatcattaaaaatggtcgtattccggggcgttattccaagcttgcagaccatgcactcatgaactatgccatgacgaccagcgatgcagttgcaactttaacattgaatcgattagatcgtgggcagctctacaccacgccacagatcgacgccaaattattctggcttatgaaaaggacatctccaacgctatatgcaaagttccttgggctttcgtatcagttatttaaataa

SEQ ID NO: 49503 - DNA, 225 bp, Acinetobacter baumannii
gtgactgcaacagatgcagcaggtaacgtaggtaacgatactgcagtggtgaccattgatacggttgcaccaaatgcaccagtacttgatccgatcaatgcaacagacccagtgagcggtcaggcagagcctggttcaaccgtgactgtgacttatcctgatggcacaactgcaacagttgtagcaggacctgatggcagctggtcagtatgcaccggtgcttga

SEQ ID NO: 49504 - DNA, 285 bp, Acinetobacter baumannii
atgttccattcggcgaaatggaaccatgactatgaccttactggaaaacgtattgccgtgattggtactggtgcatctgccatccagtttgtgccccaaattcagcctaaagcaaaagaactgtttgtattccaacgtacagctccttgggtactgccaaaaccggatacagacttaggtgagtttagtaaatcaattattgcaaaatatccagcgattcaggcaagttggcgggcactgttgcaaatagtcggtggtgataaacttatcatccccttttgctga

SEQ ID NO: 49505 - DNA, 147 bp, Acinetobacter baumannii
atgagtgagtttaaagaatacaaagttggtgaaaagatcgtatatcacagcttgccgcatcaaagattgttttatgtcaaagctgttttggacgactcaattgttgttcgtgaatgctgggatgaagcaggagctaagtgtttttag

SEQ ID NO: 49506 - DNA, 336 bp, Acinetobacter baumannii
gtgtttaaaacacttctggttacctatgagaaaaattattttgttgcggttataccagttaaccatcaactcaatttaaaaaaagtagctacggcagtagggtgtaaaaaactacagatggcaaatcctaaagatgccgaacggttaacagggtacttagtgggcggaattagtcctttaggccaaaagaaacgtttgaagacagtaattgatgcctctgcgcaagagctcagcaaaatttatgtaagtggtggtaagagagggttagatattggtgtaaatcctaaagatttagcacaaatattaacggcgcaatttgtagacgtacttgattaa

SEQ ID NO: 49507 - DNA, 162 bp, Acinetobacter baumannii; identical to SEQ ID NO: 46251

SEQ ID NO: 49508 - DNA, 345 bp, Acinetobacter baumannii
ttgttattaagtgggtgcacaattaattctaagttattatcaccagcaaaaagtgatgatgagaaaattattgtagaagcagaaaagtacaagcaacaatatcaaaaaaagatctttaaaatttggaatgttccgccttcttcagtgggaatgagtgctagcgttaaagtctttttaagtgatactggtgagattgagcaaattatttttctagataaagaagaccaaaagtttaagtcgagtattgaaaaggcgatatggcgtgcaagtccctttgttttaccttttaatccggaagttagaaaacaagtaagaaagttcaatattaaatttactgcaaagtaa

SEQ ID NO: 49509 - DNA, 162 bp, Acinetobacter baumannii
atgtctgctgaaactgtgcctgtacctggcaatgaagtgttgcctgcagggtcagtcgctgttgcagtcactgtatcgccatccaccaggttacctgggtttggtactgaccagctgccatctgtgcctgctaccactgttgcagttgtgccatcaggataa

SEQ ID NO: 49510 - DNA, 210 bp, Acinetobacter baumannii; identical to SEQ ID NO: 45728

SEQ ID NO: 49511 - DNA, 819 bp, Acinetobacter baumannii
atgaagtctatagatgaaataaaagctcaagaggtatgtgtagctattctattagataaaaaagctactaatacgcaagccaagatacttcctagtgaaaatataatcattgataggttacttgagcgtaaagttgagttacaacatgcttatagtgagttgtattcaaaactagggaaatatcatcaagccctcacaaattttttagatttgttagtagaaattacttcaatgcatagtccagaggaagtaataaagtctagagctgctcagaaaaaattgaatgagattaatcagcaaatttctattaaagctcatgaattagcagctctcctagaaactagatccgagttaataaatacttctggctttatgacagatacccattatcacattggtaatgtaattcgtgaagcatctcagaataatccgtattttagaacatctttgctagataaattaaagcaactccaaggtcggtttgatcttaaatattggcctcggttagatgatgtaatgaaagttatcgctgaagatgcaagaatggccgtacctattgctattgattctattactgaagtggcaacaagaggtgagagagcttccttagttgattattttagagctttatttgaagctattgaatgtaatcgtcagaaagaatatggtttcttacctaatgactttaagttaacagataatacaattgctactttagctaattgcgccttagctttagagccaaaagaaatgattgatggcctatatgtgaaaaattttagaagtcgtgaacgcaaacgcataggtagtgactcctaa

SEQ ID NO: 49512 - DNA, 1068 bp, Acinetobacter baumannii
ttgtctcaattacaagctgaagtagatgtagtcattattggtggtggacaagcagctcttgctacagcctattttttaaaacgtaagaaaattccatttgtgattttagatgaccaaaatcaggcaggtggtgcatggttacatgcttgggagtctttacgtcttttttctccaaatacttggagttcgttgtcgggctggatgatgccaaaaactgaacaaacttatccaacgcggaatgaggtgattcaatacttatctgcatacgaacaacgctatcaatttcctgtcattcgacctatacatgttgatcatattgagaaaaaaaatgactgcttagatgtatatgcgggtgataaatattggcgagcaaaggccgttgtcagtgctacaggtacatggagtcagccttatattccacattacgaaggattagaaagatttaaaggaatacaaacccattcagcacattatgttaatccagaaccttttattaataaaaaggttctagtgataggaggaggtaactctggtgctcaaattcttgctgaagtttcagaagttgcagacactatttggatcacagtaaatcctcctcaatttttatcggatgatgttgatgggcgtgttttattccttcgagcaacagaacgtttgaaggcacaacaggagggacgaatagttgatcaatccattggtggtctaggggatattgtcatgattgatagtgtcaaagatgcacgtgaacgtggggtattacatagcagagaaccctttaaagcatttaaagaatattcggttgtttgggaggatggttcaacacaattggttgatgctgtgatttggtgtacaggcttcaaagcatccctaaatcacttaaggagtctaggagtgatagaacctaatcagactgttgctgtcaatgatgggcgttcaataaaaataaacaacctttggctagttggttatggtgaatggacaggcatggcatcggcaacattaattggggtttctagaacagccaaagcagtagtcgatgaaatagctgtttacttagctatagattaa

SEQ ID NO: 49513 - DNA, 954 bp, Acinetobacter baumannii
atgcaaagtagacattcacgtctgataattctcggttctggccctgcgggctatagtgcagctgtctatgcagcgcgtgcaaaccttaaacctactttaattgcgggtttacaactaggtgggcaacttacaacaacaaccgaagttgacaactggccgggcgatcctgaaggtttaactggtcctgcattaatggatcgtatgcaagcacatgctgaacgctttggtacagaactcgtctatgaccatattaacgaagtggacttaaatgtacgtccttttgttttaaaaggtgacatggaagagtacacatgtgacgctttgattattgcaactggtgctacagctcaatatcttggcctagagtctgaacaaaactttatgggacaaggcgtaagcgcatgtgcaacatgtgatggtttcttctacaaaaaccaaaaagtaatggttgtaggtggtggtaacactgctgttgaagaagcgctttatttatcaaatattgcttcacatgtaacgctagtacaccgccgtgatagcttacgttctgaaaagattttgcaagatcatttatttgctaaagaaaaagaaggcaaaatcagcattatctggaatcacgaagttgaagaagtattgggtgacaatactggtgtaacaagtgttcgccttaaatcaactcaagatgagtctaagcaagacgtagaggttcatggtctattcgttgcaattggccacaaaccaaatactggaatgtttgatggtcaattaaacttacgtgatggctatatccaagtacaaagcggtacttctggtaatgcaacagcaacttctgtagctggtgtttttgctgctggtgacgtcgctgacagcatttatcgtcaagcgattacttcagctgggtcaggctgtatggctgctctagatgctgaaaaatatctagatcaattgaacgattga

SEQ ID NO: 49514 - DNA, 705 bp, Acinetobacter baumannii
atgaatctcccaaatgttgatatgaatcttcttgatcgacctactttagagaaagttcaagctaaagcactggatcatgcaccacgcatcttattgttatatggctcgaatcgtgaacgttcttatagtcgtttagcggtgatggaagcaggacgaatcttggaggagtttggtgctgaggtgaaaatctttcatccgaaaggattgcctttgccagaagatgccgatactgaacatccaaaagtaaaagaattgcatgaacttttggcttggtcagagggtatggtttggtgttcacctgagcgtcatggttctatgagttctatttttaaatcccaaatcgactggattcctttggctggtggtgcaatacgtgcgacgcaaggtaaaactttagcacttatgcaagttagtggtggttcacaatcttttaatagcgttaaccagatgcgtattttggggcgctggatgcggatgattacaatcccgaatcaatcttcaattcctaaagcctttttagagtttgaagaagatggacgtatgaaagcatcttcttattacgatcgtatagtagatgtgatggaagaactctataagtttacattacttacgcgtggacaaagcctgtatctaactgatcgatattctgagcgtaaagaatctgctgaagaattatctaaacgtgttaaccagcgtagtctgtaa

SEQ ID NO: 49515 - DNA, 1632 bp, Acinetobacter baumannii
atgattgcccgtattattcgtttttcaattgcaaatcgtgtatttgtcctgttggccgctttaattctggctgcttggggaacttgggccgtaaagaatactccggtcgatgcattaccagatttgtctgatgtacaagtaattattcgaactaatttttctggtcaggcaccacaaattgttgaaaatcaggtgacctaccctttaacaacaaccatgttatcggtgcccggtgttaaaactgttcgcggttattctttttttggtgactcatttgtttatgtcatctttgatgaacatactgacctttactgggcccgttctcgtgtattggagtatctaaatcaaattcaagggaaaatgcctgcaaatgcgaaatcttcattgggaccagatgccactggcgttggttgggtttatgaatatgcattagtagacccaacaggacagcatgatctttcggagctgagaagcatacaagactggtttttaaagtatgaactgaagacattacctaacgtggctgaagttgccacaattgggggaatggttaagcaatatcaggttgtcttagacccaagcaagatggctactttaggtgtcacacaaaacaatgtcattgaggcgattcaaaaagctaatcaggaaactggtggttcagttctggaaatggctgaaacggaatatatggtgcgggcttctggttatttaaaaactttagatgattttcgccaaattcctttacgaacaaatagtttcggtgttcctgtttctttaggtgatgttgcaactattcaacttggtccagaaatgcgtcgtggcatcagtgaattgaatgggcaaggtgaaacggttgggggtgtcgtgattttacgagcaggtaaaaatgcacgtgaaacgattactgctgtgaaagcgaagctagctgaattacaacaaagtctaccgaaaggtgtacaagttgttcctgtatatgatcgcagtcaattgattgatagagcagtagaaaatctcagccataaattaattgaagagtttattgtggtggctttagtctgtggactattcctctggcatttacgttcagcaatggtggctattgtttctttgccgcttgggattttatctgctttcttggtgatgcattatcaagggctaaatgccaatatcatgtcgttgggtggtattgctatcgcgattggcgctatggtcgatgccgcaattgtaatggttgaaaatgcacataagcatatcgaaacttggcaacacgaacatcctgagcaagtcttggaagcacaagtccgttggaacatcattacacgttctgccagtgaggtcgggccaactttatttttctgtctactcatcattaccttatccttcattcctatttttactttacaggcacaagaaggtcgcttgttctcaccactggcatttactaaaacctatgcaatggcagcagcaggtttatccattaccttgattcccgttttaatgggttattggattcgagggaaattaccttctgaacagcgtaatccactgaaccgttttctgatcaaaatatacagccctatgttggataaggttttgctcatccaaagacaattttacttggtgcattgctaa

SEQ ID NO: 49516 - DNA, 393 bp, Acinetobacter baumannii
atgaaattgttgctattacgattcaattctgtaaaactaaaaaagcttaaaatttggtctatgtctatgcagtggttaaaaacatgcctatcgctgtttttatcgtttgctatcctgttagtaggatcggctgctgttgcctcgtctgtacataaacgatgtttaatgccatctgaacagatgcaatccatgcaaatggaagagtcgaaaaatcagaatatgatgcatactgattgtatgaaaggagaagcaaagtccaaaaaaactctgcatgatccatcctgtctgtctgaacaagattgcattatgtcttttaccaagcttgtatatgctaatgacgttcagggtagagcctgtaaattattttgtgtaagttccattttttataaatga

SEQ ID NO: 49517 - DNA, 732 bp, Acinetobacter baumannii
atgtcttcaatgaaaggtatggatcatgatatgtcttcaatgaaaggtatggatcatgatatgtcttcaatgaaaggtatggatcatgatatgtcttcaatgaaaggtatggatcatgatatgtcttcaatgaaaggtatggatcatgatatgtcttcaaaaacagtaagctcttctggatctgatcaagtggtttacggatgggcgaatgcatcaacaccagctggtctaaaagcacttcaatatagtgatttacaatctttaaccccccaaaaagatacccgtgctccagaacgtgaaattgaaatccgcttaggtggaaatatggagcgctatatttggacaattaatggtaagaagtttaatgaaactgaaccatttaaagtgaaatatggtgagcgtatacgcttgaaatttgttaacgatagtatgatggctcatccaatgcatttacatggcatgtttatgcaactggaaaatggccaagatcctagcaatatgccgaataaacatacagtaattgttccaccaggtaaaacagttacaactttattaacggctgatgagttaggtgaatgggctatccattgccatttgctctatcacatgtctgctggaatgatgaataaacttattgtggcaaatgtcgatagtaatagtactgattcgaaagatgttgttgctcaacctaatactaatgataagggggtaaatcaacatgcgcaccactaa

SEQ ID NO: 49518 - DNA, 297 bp, Acinetobacter baumannii
atgcatcaatgtccttactgccattcgagacatctgaaattactacggcagtcagaacaaagccatcaaggtgtatttgcaaaactttcatcattctcccccatgtctctggcagcagcctgtatgcaattgtcaaaacgtagtcctattcacccactagtcggtggctttgttggtttagttgtagggggcatgtttctgctctacgtccagcatcaagacaatacagtgtccttgcattatcagtgtgagcagtgtctgcaacattttgaaatccagcaatcaagcttttcttaa

SEQ ID NO: 49519 - DNA, 330 bp, Acinetobacter baumannii
atgaacccaatcaaacttatcgcatgtggaattttaagtctttcactcagttctattgcttttgctaaaactgagcagattacacttaaagccaatgtctattacggcgaagaatcggtggtttttccaactactaaaggcgaagtcattttaaatagctacgctataccagctaaagtcgttccacaagttaaaccttttaagaaggggcaatgtttagaaatcaaatcaaaacatggtttctttaaagacactggagatggtcaatatattgaaagtatccaaccttgtagcaagaaaggtttagcgactccaaaagtaactcgttaa

SEQ ID NO: 49520 - DNA, 699 bp, Acinetobacter baumannii
atgaatatgataaagaacagcactaactcaactaaaaagataccaccgttatattggttgttaactgtagtcatgatggcggtgttaattgcaggcggtattttatttaatcaacatcaaaaacgacaaactgaacttcagttagcacaactcgctttagaacaatctaaggtacaaaatcaatctgccacaacacaagcagcatcggaacccgttgaatcaggtttcactggaattgaaagtatggtggaaaacccggaatcagaatctgctcattcacaagctgaagatgaggttgttgcgggggcaatagccgcggttgatcaggcaaaagcacaagatacaagtctaggtaatctcagttcagaagttgatggtgagtaccatgaagggaaaaccttaagttccaatgcttctcgctatggattaaagccaatcaaatctgctccagctgatttaaagtcaaccatcccgaatattgatcaaatgttagcgtcacatctcatgaatgtatggggccgctcaagtccagatcaggtgagtaaacgagttgaaggatggagccagcaaggtaataccatgacctatcgtactgcatgggactctgaccgttaccaatgtacttggtatgtggtgagttgggataagaacagcaatcaagtccttcacgaaggataccagccatgctttggtcactaa

SEQ ID NO: 49521 - DNA, 1113 bp, Acinetobacter baumannii
atggcaacttcagctaaaaaaaatgctaaggctaaacaagaaaccacatctacgagtaacatcaaaaaacttattggcttaattgaccaacttgaagaacatattattaaaagacataaatttccctatggtttgccatcagcctatgccgaacactacaaagcttatttacccgaacaaatggaacctatcagtgaagaaatgacggataatgaccgaaagtggttttatgaacagcttgatcaaggcttattaaaagaatcgccagaacaaaaggctctccgtcaacaggcatggagattacccccaccattacttcgaggtaaatcggaaatttacatctacattcccgaagaggaccgacttgcccgacactatggcgaaatcgcgactgaaattcgtaaattcaaaaacttggtatcaactaaaaccagaatattcaaaaaaacagcacaacaagctgagaaacattttgaagaagcatttcgtctctactccaaacattatgattgttctttctatatctacacgctaccagaagatatctataaacagattaggcaatctcaattagcccgaaacagccataaaaaatcccagagggtaaaaaaaacttacctctcacttgttcaacgttttattaccagtaatcaaaaaacttactcaagtatggatacggttctaggagccattgagcagcaagctatctcaaaaattccagaatacctcactcaagaatacaatgctgaaatagaacattgtttacgaaaaaaagaagaagctgaatattttctttttgcagctcgaaatgatctatctacagctgaagtcaaagaaattgaagaatatggtaaaaaaactgtaatcatacaagctcagaaccgtgatcaacccctaacttcttttgcaggtcgccctatcgaacgttataaggaaataagagtattttatcagaaaaagatttctgccttagaaactcaaaaaagtaaaattagaaccgacgatcagagaatgaagttactgaatagcgctaaatcttggttaaaggaaagcgagccaagcctatatgatgcgctgaacatttttatagaaaagaaaggtagaaaactttag

SEQ ID NO: 49522 - DNA, 1236 bp, Acinetobacter baumannii
atgaaatctctgaacaacacagctaaaccaattcttccacctatcgcacagttctcagttgcagatagagatgcattcctagaacagctcaaggaagatttttcaactcatgagtacatgacagaaaacggtaagattaaagtattcaaaacgagtataaaccctgaagttgaaaaaatgctcagtcgtgttgagttcatcaagtattttgagaaagagcgcccaatcgctactcttaaatctgttcaaagttttaagggcaaagagcaactacgtgttgaatatgcgaaggatattccacttttgcttaagtgccagcttacaacaatctttgtgtctgctcactctggcaattacaagatgggcatagagttacaggcctttaaggattcattcttagaactttcaaaggaagaacaatataccctttatgaattttctctgatcaatcagtgttacacatctgaacaggctcaggcttatgttgcagctttaattaaatttcagaagttgtttgcaataagaatgagcagtgcctcaattcgtaaacaactttcgaatcgtgctagtaatcgacgccgttctaaagagcgttgtgttgagcttgtagagactctactcaagatccattctcgaatccttgttgttcgagtagacctaggattaatacgcgatccagctaagcttcaacagcttgctatctcaactgattttgctcaggctgaacatgatagtgagtttatgcaagagtcttttattcggttctatgatgcatctaagcataatcagcttaagcaagcgctcgggtatatcctgcgtattgaacacaccccaaccaagggattccatggacatctttattacttcttcaatgccaatgaccatcgtgaggacatcacgtgggggcaatatattgctgagaaatggagggttgctacaaacaatcttgggactgcttttatctgcaatatgaagaaagatgagtaccgctatcgtgccttaggcattttgaagtataccgaccatgaaatgcttaagaatctcaaggctacgtttgactacatatgcaaaaatgatcagtacttcgcctttactaatggagaacaaattcggagcttccgaacaagccaaataccaaaagttcctgctaccaaacttggccgtccacgcaagttcgagcaacttaacctactagactctgatcagtcagatgatgctcaagtaggaggacagtaa

SEQ ID NO: 49523 - DNA, 981 bp, Acinetobacter baumannii
atgactaagtacgcatcagatgctttacttgcagctacacattcgtcatgcagcattcaacctatttgggcttacgatctgattggttttgagaagtcagcaaaagctcttgggagatcaaaaactacaagcatgtttgcaaaacaaaattctcaaaatagtaatcaggcattatctctcagtaaacctgttgagttgattagatcagcatatccattagtgacaggctcccctgtcactaatgggatgttatctgttcgactaaagccagagaacgaattgtttattcagtttattaaacatatggggcctatgcttaatggggggatttactgccacgatcagtatttttctaatcaaattacgggctaccaatatatgctcaacactaggcagtttagtgaggatttaacagcttggaatacagaacaaagtcgtgctgaagagttatttgattcgacaatgaaggttctattcagagactacgcaggcttcgaaacacatgagctatatttgccaatgctatttacgctttcagcgaatactccaatgtattcgaaacaacaatatttagatcagcagaaaaaagagatgatcgccattttccttaatgaaggtggaaataatgaaattattgccgtattttcgaaatgggaacttacaccccaaggacaattagcacttaggctggtgtttttactggaacgccagttcatagatgatcctgttggttcttctgatgaaaatgctttcattgccttacgaggtaatctggaaggcctatttaattgcaaagcatatcctgtatctatgccattaaacgggtttatgcaaactaatcatttttttaaaagtgatctaaggtgcaaagatcttattaagctgctcaaaacgtacctgataggcagtgatgcagtccttcgaatttgggatacacagtccaattttgatgtgttgtattcaaagtttaaaactaactag

SEQ ID NO: 49524 - DNA, 915 bp, Acinetobacter baumannii
atgaatgatgttaaatcgaaaagtgaaatatcccctgacaatggaaaagataagtacttaagtataaatgattgtattgagtatttgagaatctcaaaatctgagtttgctgaattgatcatacaaaattcactagaaccaaaatttcattggtctggatatcttgaaactcaaatgactataagcttacttgagtacacccgattatttgatagcaaaaaactgaaaacttgttcaatagaggaatgggaggatatttctataagtacagagaaattcacccttgatggttatattaattttgaaggatacatatctattacaggggcagaatatttcgtaatggagttattaaaaagtggggcatcgaaaaagctctgtattaatgacatatatttaattgatgatcttacacgtgattcagttgttactctcttagatcataaacagaagctttctaaaaaaataagatcttgtaaaaaagaattaaatagtagtgagatttatacaatttattcagattcacccaatcaagagttaaatgtaaaagattgtaagtttttgaaagaggaaatttttcaagttattaaaaagaataaagaaattgaaattgagttaaaggataacgagagaaacaaatatagtggtaaagagctatttacgatgattgtcccaagtattattcgttatattcgggaaagggatcaaattaaggataagcctcagcaagacgatggtgtgggtggtttgaaaaaagcagttgaagattatatcgaacgtgatgaatcattgaaatttcttaccagtaattttaagaagaattggcaaacagtgataaatggaaaaaaaggggttcaaggtaaaagtattttggataaaatttttgaagaagaaataagaaatacaaaggtttga

SEQ ID NO: 49525 - DNA, 246 bp, Acinetobacter baumannii
atgcaatacagtgttcaacagaatgataacgtagagtcagccacgctacctaaaacaggttacgcaagcctaaacgatatgctcccacatctacctattaaacggtcaactgtgtggaaatgggttaaggatggtcgatttcctgtaccagtgaaaattcatacattaacacgttggcggtgtgtagaaatccatgcttggttaaatcagtatgctgatacgggagcatgtaatggaggagtatga

SEQ ID NO: 49526 - DNA, 1212 bp, Acinetobacter baumannii
atggaggagtatgaaaatgaaaaaggctatcaagagatagcccattcacctgatgaacagaattgcagttctgttcatttagaacctgatcaaattgagagtcaatcagcagttcatcttagcattatagatgtaggaggtgagaaagaagattgtaaaacagatgatccgccagtaaaggatggaggaaatcaactttattttcttcttcttgctttaattgatcgatttattagttgtgatgaacatcaaaaatgtgcaattgccttatggattattctgacttggtgtatcaacgcatttaagatcgctccaattcttgcaattacagcattaactaaaggtgcaggaaagacacaggtactcacactaatatctaaattgtgttacgagccactttcagcaagtaacataacagcagcatctttgttccgtgcaattgaaaagtttaaaccgacttttttattagatgagtttgatacttatctaaaacagaatgaggatatgcgaggggtaataaatgcagggtttgaaagtaatgggtatgtgattcgatgtgatgaagatttcacccccgttaaatttaatgtgtattgtcctaaagctttagctggaattgggaaattgcctgagaccattgaagaccgttcagttgtgattcaaatgtgtcgaaaacgaacgagtgacataaaggaaaaattacgtcatgcggatgatgaggattttgatagtctcaaagatttaatagccaattgggcacaagagaatctagaagcattatcaaaggctcgacctgaaatcccaagtcaattaagtgaccgaaaacaagattgttgggagtcactattaacaatagcagaccagttgggagcagatgttgcaattcaagcacgaagagcagcaatagccttatctggaaagagtaatgatgaagcacctgtatttgaggaggtattaattgcaattaaagtaatatttgagaaacatggagtagataaaatttctacagcagatttaataaaattcttatgtgaagatgatgaagcaccgtggaaatattttaataatggacgtgtgatcactgcacggcagttagcaaagatactcaaagaatttgatattacatcaaaacaaacacggtttttaaatatgacatgcaaggcatatcatttagctgatttcgaggggagttttgctaagtaccttgaataa

SEQ ID NO: 49527 - DNA, 630 bp, Acinetobacter baumannii
atgaaacctaataaactaattttaggcgttattgcctgtgcattaggcgcgtctatgtatgctcatcaattgcatgcagagaatagtttacaagtacctaataatggcaacagcaaagatagccaaccccataatctagtctttattgatgaacatcaaaaaagggttgatcgtcctccacagcttgtgccttctaatttatataactcaacgaacacctttacccaaagtgaaaagggatatgctcctataccttatgaatctattttgagagctgtaaattatgggcagatcgattactgggtagaaaaagggattcgtgcttatcaaccttcagagaaaacagaaaagttttttacatggaaagtaaaaggaacgaaactttttggtttagatgttattggcattgagcgcggtgtttgtgacataagtggaaatgatagatgtggtgatgcacgtcataccgtcattatctttgatgctagcacggataaaacaagaaaagaaatcaaagataaaacacgtattgattatggaaatttaacaactgatcaaaagaaatcgtatccatatttaggttcaattaattttgaaggtaaagaaaaatccgctttatattttttaaattaa

SEQ ID NO: 49528 - DNA, 1791 bp, Acinetobacter baumannii
atgaaagatataaatgcggttgaaccagttaatttaattattcaaaagccaccattgattaatagccctgtctttctaggtgctgtgattttttatacatccattatgggtattggttttttagtagaaccaacatatggtttgatagggctgtgcttaattgctttaatttctatttttaaaattctgtttaaaaactttgcacttattgttggtatgatcgtattgggagtggtttgtacggctattccatttttactcatcatttatatacctatcctaatattctttttcatcgcgagattaggatacttcattgagcattggcgtgtagttctagttggtctgattgtttatttcttgcctgtatttatccttgtacaagggatgaaatcacaatctttcttgatatttctgattattccaacaattttatttccaatcgcaattcgttacttttacaagaactatgattatacggtagggaaaatattagagttattttctgaagcacctattttgatcatatcaatcttattaccatttctgaaactgggcttttctgtcggtgatgcacctgtagcggtggaaagtcatgtaatacctgatgggcatacaatgccaacagaagctttagcagctaaaccaattagccctgttatgacaccccttgtaaataatgtaccagtgggcatagagcatgttgctcttgatccagttactccagtcgttgtacctagtcacattaatccaaatttcaatttagatagcttttatcaaactttgtcacaaagtcatcacttgtttggtcaagcaggtagtgaaaatattatgtcatttggagataaagtacagattggtgtaggttcagatcatattgcgctggtcaaggatggttttcatgtcaatgttttgaatagtgaggggcatcaaattggaacgattgaaaataatttatcaggtcacggtgcactagagattaaagatactcatggtatgaaaatgggagaaattgaattctctcaagagcaaaatacaattgtgtttaaagatgctcataatcttgtcgtagccagtgttgatcaatcgattcaatcagatttatctaagagcttcttacaagcagagcttgataaaacacaagctgctttagatcaactagacaaggggcgggctcctatagatcaactagggaaagagcaaattcctgtagaccaaattgatcatgctaataagattagtcttgcaatgctttctattctagcagtagctaaggagcgaaagagtacagacactgctcaagcaataataaaagatgttagtgaaactacaacagtttcaggttttaaacaggtggatttgaatcctcttcatccaatgacatttgcaacatttattgagaaaaattgttcaaaagatattcgtaaacatgaaaaaatattcttacctgaacgatttaataaaatcgcaaatggagattggaaggggattttagaaaaatataaagtttctaaagaggaaataggatttgttgcatctacactttatctttataaagactgtgacagtctcattattactaaaaatgatgtaattcatgcacgaatatcagggcatgagcctattagttatcatctatctcaaattgaaggtattaagaaaggaagttttttagaggaaaatcatttggatgatcagaaaatatttttaattcagttcaatgaaagttggatgaagccagtttttagtgaattgcatgagctatttgtggagtatcgtaatttgagatga

SEQ ID NO: 49529 - DNA, 1299 bp, Acinetobacter baumannii
atggaatttcatgacatcctgcacggacatatccagtttgcagatgaagatgagctaacgaaacttctgtttgatctaattaatagtccggaaatcaatcgtctgagaaatatgagacaaatgaactttgacgttcctcttattcaagagcttgggcgatctagacgtcttccgcattcagttggagtagctcatcttgcatataggctgtcaaaaaaagattttttaaatattaatgattcaaagacactattagcagcagcaattatgcatgatgctgctattcctccatatgggcaccttgttgagtcagaacttaaagctacagcatcaggttttagccatgagaagagagttgaggagttagtacgaggggaaaagaattctcaagggaattacatagaaattattcctgggaaagttcctcaggtattagaaatattaaataagcataaaatagatattaatgctgtaatttcagtaatttgtccatcgaatggtatgaaaacacctatatcggcagatatcgaccttgataatgttgataatgtacatcgaatggctgcgatgttgggttgggataatgcgaaagagaattttaggaaaatagtaaactcaattaccttggatggattgagagaaatgtatttctctgaaaatgcatataaatatataaatcaatggcttgattttagatctcgtatttatactttgattattgcccatcctgagtgtatcccttataacgctttacaggcagatctagtacgtttatctgtaaaaaatgagttaatcacatctcaagattggtggttaagtgagccagaatttgaagaaaaattaaggaattcaagccaaacagaaaatcttgcgaaacaacttatttctggatgtgaatatagccttattgattatgtatggattaagaactttcatacgaagaaaaaatggcataatgctgatattattagtgagctaacattggataatccaccgagagagggctacgggtactttgtgtggaatgaaaaggggctaatttcaagagaaattgagataaaaggcaagttaggagagagagagacattgggttataactctacaagttgcatgattgcttatgttaagaagacacaaggaattgcaaaattcacaaaatcagagctaaaaacttggcgtcaaaaaacagtagataagtttactcaaatgtttgaaacttctaacttcagagttgatttcccagaaaattattcaggaacttttttagctagtaataacaatgaatttgactttaactaa

SEQ ID NO: 49530 - DNA, 1209 bp, Acinetobacter baumannii
atgaatttgactttaactaaatcaccattaattcatgaattggaaagtattgattggtcattttcaagtctttcaaatacaggccttaattcatttcattggtatccagcaacttatgtggctgccataccaggggcaataatatcaaaaatcacctcggtaggggatacagttcttgatccgttttgcggttctggaactacgggaacagaggcggttcgtttaggccggaattttattggtattgacactaatccagtagctattttaataactgaagcaaaagtaagctttccagatagggataaattactaaaagtattagaccaaattataaatcatactgattctttatatgcatctggtgaagtggtagatcatcctaatcagaaagagttattgcagtggtatcaccctcagacaatgcatgaacttaatagaatattaatctcaattcttgagattgaagatatacttttgcagcgaagccttttatccgtattttctgcaatacttaaaaattgttcatcacaaggccgtcactggggttgggtatgtgacaacgtaaaaccaaaaccaggcgagatcttgtataaagatgctaatttaatattttctaatgcagttagagcttatgcagatgcgtctgagcatacatttaatgaatgtaaatatcataatcaagagataactagggaaagtttaagatcaaaatctaaacttatgaatggtagttgtttagacaatttcttaaatataccaacagaaagtattgatgccatagtcacttctcctccttattatggggtggctgattatgtaaaatcacagcgtttgacttatttatggtttgataaagatgagcttgctaataataagcttggatttagagactttaagtcacttagggctagtgaaatgggagcaagagcgaatagatataaggcaaatagtcattatgaatatataacgtttatggagaaattctttatcgatagttatcgattactaaaaccaggtgggcgaattagtttagtgattggagagtcttcttctcgaaccggaactattgatttactcattgaacttgctattaaacatggttttgaatttgaaactcgggtaggaagagatatcaaatctagtaaacgtcgtttaatggcaaaagttaaaaatgaagatatcttgtttttcttaaaaaaagaataa

SEQ ID NO: 49531 - DNA, 711 bp, Acinetobacter baumannii
atggatggtttatctaagatttgtgaaggtgtatttcagtgtaatgaaaataatggaccttcagaaattgtagtgcaggaaagaacacttaatcgtatcatggattttttctatattgatggtcctgctgatcagcttaatcggaaccaagtctctgcactttgccatgctcgagcgaaggagccgcgatgccttactggggcgaataagattattaaagatttgtttaagacctttttgattaataatcaagcaaaaagtattcttgaagttggggcaggaaaaaatccaattcttactgctgaggaagtgcgacagaatggaattaatcagtatataactgcggatttagatgatgattatgatcaagttaatatccaatttactgaagatactcaactcaaagcaccgatgaatcttgatataattattgccctttttgtattacattttaaattctatgagtcgcaaattaaggaaatatttttacacttaaaagatgacggagtgtttctagcaaatgtatataatcgtactgagcaagctcgcgaacgattaaaaaataaatttgaaagagcgggcttttttactcaattaatagaagatccaaataaagtctgtaaaaatcattattatttatttgctgcaaaaagtgatgaggttattacaacgaatatagctaaattactaggatacataaaaagtaactag

SEQ ID NO: 49532 - DNA, 555 bp, Acinetobacter baumannii
atgtatccaaaaattattgggctagtagggcctatacgtgctggcaaatcatctgtagctacatatctatgtgaaagatataattatagacttgcttcaaactctgatctacttaaagatattgcagcaaatcttggtatgtctccaacaagagagaacttgagaaaactaggcgactcaattttctctgtccttggaaatgatactttagctagatatcgattaagcaaaccacatcactttccaattgttgtcgatggtatccgttacaaagaagagatcgaaatttactcacaagaaccttcttttaaacttcttggtgttgaagcatttgaagaaattagacatcatcgaacgaatatcctagcaagtgaggggaaagatcaaaaattaaatatcatgcaattctcccaactacagtcagttaggagtgagttgcaagtagaaagcttattagaacttgctgatgctaaaattaataacaattttgataaagcacatctgttccatgaaatagattatcttatgaatagatggctaaacaaatatggctag

SEQ ID NO: 49533 - DNA, 909 bp, Acinetobacter baumannii
atgcataaactacatgatctggggggactaatggctacatccgcatcgcaaaactcaccacaaagtgagctacaaaaagcatttattattatgatatttgcatttgtagtctctttccttgctcaagagattgccgagttcttaattgttctaacagataattggcagttcaagtcctcccctgaaagctggatgaacttaatacctattgcatcgcatatggcacttgctttattaatgatttcaataagttggatatcctggtcaaaatcaaaagcagctggaaatattcaagatatagaaaatatattcacaattaagtttatttcatttattttagaaatattacttgttactttgtactattctctagcaaagtctgttgaagtagattttgctaattatggaaaagataaaaccatttctagttatattacaaagttatccgcacgaccagagatattacagatgatgctaatattctcaatgtttgctttatgggattttattgcggatgtagtactgagcccaagaaacccgcctattacaaagaaattaaaaatctatcaaagttacattccaggcataatagtttattgtttaatatcaatattatgtggtttagccaccattttactttatcttagtctcccagaaaccgaatctgcacttgttgtaactgttgctgacttcgcactcatcatattactttttctattcatgaaagctaaaaagcttgaatattatctatgtaaatggttcccttcagaagcatcaagagttaatactaatagaaataccccacctacggtttctaactggtgtgtattagtatgctttttttcactattccttttttcaattttaatcattaagctagaaccatgtatccaaaaattattgggctag

SEQ ID NO: 49534 - DNA, 411 bp, Acinetobacter baumannii
atgattaatccaaaatacctattaaaaaccacaacattcaaaggatatgaagtaaatccacattactcactaagaaaaagttcattagaaaccatacactcttcaatgctttggtctttaaagaacatatcaaagcctagagcaatgcacatcactataggacttacagataaagatacttttagtattgagaagtttaatcgccgtctaaaagccaagtttaaagatgaaggcttagtacatctctatagctttgaactatctgaaaatgataaccatcatttacattgtatgttcatttacaatgctgaagtacatcgtagctactacactgtttataagatgatttatgagtgtgctatgttggatggggtgagaaaagaagaactaataatggaacggacaagctaa

SEQ ID NO: 49535 - DNA, 561 bp, Acinetobacter baumannii
atgaagtttctaggtgagagcgaatggaaacgcaagaaacatggacctgaatatcgtcgccaatggcgtaaacttcatattggcatagattctaaaaccctacaaatacgagcagttcagcttacaaccaataatgtcagtaattcacaggtgcttggtgatttacttaatcagattccacaagatgagaggattgactctgtttataccgatggagcttatgacaccaagcaatgccgtcaggtcattgcagatcggcaagcgcatgcggtgattccacctagaaaaaatgcgaaaccatggaaagatacaaagagtagctcgctagagcgaaatgaattacttcgaacagttaagcgtttaggcaggacactatggaaaaaatggtcaggctatcatcggcgaagtttggttgaaactaagatgaactgcattaaattattaggggataaactcagtgcaaggagttttgatagccaagtgaatgagatccatgcacgtgtagcagtccttaacagatttacggaattaggtcgaccacttacccaagttacgccttaa

SEQ ID NO: 49536 - DNA, 705 bp, Acinetobacter baumannii
atgaatcccttccatggtcggcactttcaaggtgaaatcattctttgggctgttcgttggtattgtaaatatggcatcagctatcgtgaacttcaagaaatgctcgctgaacgaggtgtgaatgttgaccacaccacaatttatcgttgggttcagcgttatgctccagaaatggaaaaacgcttacgctggtattggcgtaatcctacagatttacattcatggcatatggatgagacttatatcaaagtgaaggggcgatggacttacctgtatcgtgcagttgatcaacgtggtcatacgattgacttttacctttccgctagatggaacagtaaatcagcctattgttttttaggaaagatcttcaatacggtgaaaaaatggcaaattccacgggtcatcaatacagataaagcagcgacctatggccatgctttatcacggttaaagcgagaaggaaaatgtccagtagatattgagcacaggcagattaagtataaaaataatgtcattgaatgtgatcatggtaagttaaagcggatcatcagggccacattaggattcaaatctatgaagacggcttatgccacaattaaaggtattgaagtcatgcgtgcactacgtaaaggacaagcatcgtcattttattatggtcagcctcaaggtgaagtgtgtctaatcaacagggttttcggtctctaa

SEQ ID NO: 49537 - DNA, 156 bp, Acinetobacter baumannii
atgcataaaatactgattattgaagatgactttatgattgccgagtcgactgaaacattgctcaagctgcatcaatttgatgtgcattgggtcaataatgggattgagggtttaaaacagttacagcagcaggtctacgggcactgttgcaaatag

SEQ ID NO: 49538 - DNA, 1677 bp, Acinetobacter baumannii
atgcttaagctgccttcttttcccggtctacgccagatcaaacccatcagccttgcacgcttcaaccttttactcgccatttggctgggactggtcttaaactttgctttctatcagaaaatccatcaattgacgccttataccaacctcaaggcaggcgcattattggcggctacagtcctggtagttatcggcttgtacaatctggtcttgcagtggctgaactggaaatggaatgccaagatactggccagtgtgctgatcattctgggcggttttagtgcttattttgtcaatagtctgggggttgttattacgccggaccagatccagaatatgctgcagaccgatgctcgggaagtccgtgatctctggtcaatacggctggtgatctggacgctggtctttgtgatttttcctttgtgtatcatctggatgctgaacattcagcctgcatctttcgggcgtcaattgttgcataaaagccttagcagtctgctttcggccgtattgattctaggactgttattctgtttttatgtcgattatgcagccatcttccgcgagcaccgcgatctgaagggcatgatttccccgcaaaatagcattgcatccaccgtatcctactataaaaagaaagcacctaaagccaatttgcctttgattccttatggtgaagatgcccatctgctgcagcaggctcaaatacagaaacaacccaaattgatggtgctggttgtgggagaaactgcacgtgccgagagtttcgctttaaatggctatgcgcgcaataccaatcctgaactgagcaagttaccagtaattaatttcaatcaggtcagctcttgtggaactgccacagctgtttcagtcccttgtatgttttcgggcatgtcacgtgaaacctatgatgaacagttagccagccaccgagaaggtttactggatattgctcagcgcgccgggtatcaggtgacctggattgataataattcgggctgtaaaggtgcctgtgaccgggtacaaaaataccagattccggcacaactgaaacagaagtggtgtgatgccggtggtgaatgttttgatgaaatcctggtggatagcctgaaagattatctggcacatctggataaaaacaacccgaaaccacaattaattgtactgcatcagatgggtagtcatggccccgcatattacaagcgttccaaagcgccatatcagccatttcaaccgacctgtaataccaatgctattcagggctgtagtacagaagaattaaagaatagctatgataattcgattgtatatacagaccatgttcttgcccagatcattgaaactttaaagcagcagactcaatatcagaccggtttctggtacctgtctgatcatggagaatccaccggagagcatggtttatacctgcatggtgctccttatagcatggcaccgacccagcaaacccatgtcccgatgctgatgtggttctccgatgcctggaagcagcagaatacccagcaggtcagctgtctcaaaggacagaccgaacaggcccgtagtcaggatcatcttttccccagcttattaagtttactggatataaaaacgcaagtgactgaagctaaaaatgatatgcttgcacaatgctcaccatccttaaagaacagagcttga

SEQ ID NO: 49539 - DNA, 285 bp, Acinetobacter baumannii
atggatgaatttcagcatggtggtgcccgtgaaggtgctggtcgcaaaccagttcatgaaggcccaaccaaagtgatccgggttcccgaagcccgtgtactggagatcaggcagtatctggatcagataaaaaaaccagcccgcaatgatgttgcttcgattactccggttgaagccagaacacattatgagattccggttgccttgcaaaaggtggctgcaggtttcccttcccccgcacttttcccatattgctctttttgtcaatgtgctgaattcttttaa

SEQ ID NO: 49540 - DNA, 609 bp, Acinetobacter baumannii
atgattgaggctgcaatgtcctcaaaaatcgattacttttcatatcactcggtacttcattcagttcttcaagaaatgccacaccatcagaagaaattgaaagttgaagaattagttatagactctggtttaccttattcgattatccagccatctgtttttatgcaaaacatatttgaatcttggaatgtgctttatgaaaagggcgttttccgacagaagttttttgcgaattctaataccaggatgtgcctgcttgatttagaagatttggcagaagccgtttctatcctgctaatggataaaagctatattggagcaacatacgaaatttgcggaccagagaatttatccttatcggatatgatcagcatatttgaaaagcaacttcaacgaaaaattatagttgaaacaccatcggatgagttgatggctcagaatatgaaaaaaagtggttctgatgaatataggattagcacattgctaaaaatgtttcaccattacaatgaacatggatttataggtaatcctaaaataatttccatgatccttgggcgcaaaccaaatgactttgcatcttttctaaacaaggcaataaagagcgtatga

SEQ ID NO: 49541 - DNA, 189 bp, Acinetobacter baumannii
atgagtttgaaaaatggcatagtcaactccttaaaaaatggagttctaccaccgaattaccgcgaattaattagggtggtagaacgaaagggggttgacagactggagctcatagacccagcacgcacagggcgtccccctcccgtcctaccgcaaagaaaggggacgcaagggtctaacggattatag

SEQ ID NO: 49542 - DNA, 237 bp, Acinetobacter baumannii
atgagttggcaagataaagttattttattggagaatgaagtaattaagcaggggcaacgaaaagagaaaggtcatttagggcaaactgaaatactttcttttactattgttaatacaaaaggggagatcgttggaagtggtcagtatacagagcattttaatattagaggattgagctcttcttatatattagaatataaaaaaaatgatggtacaaatttttcagaacgatggtag

SEQ ID NO: 49543 - DNA, 1587 bp, Acinetobacter baumannii
atgaaatctaatcaatggttgactctcggctcgcatcttattttaaaaaaatggtgtgatgcatctgaccgtaatttccaaaaacagtttaatgccttagagactacgcaacgtcaaattttgcattcgattttacagacctctactttggccaaagataaacaggttcaaaactatgagcagtttgtaaaagcttttcctgcaactcgctatagcgcttggcgagaagacattcagcgctaccgtgaacaaaagctttcactctctagcagtaaactggttcgtttccagccgaccagtggttcgagtgaacaaatcaagtttattccatataccaagttgtttttagatgaacttgaccatgcgattgcaccgtggatggcaagtttataccgtaagtgtccagagcttagctctggtacacactactggtcggtgtcgtggttgcctgaaagtcagcgtgaagttttaaaagataaaaatttaaatgatgacagtgcgctacttggtataggtaagcgcattttgtctaagtttacccaagcggttccaagtaacgttgcatttgcggccaatgctgacgatgcactgtttgccaccatttgttatttggtcgcaaaccgtaacttagccatgatttcggtatggagtccaacgtttgctttgcaattacttgaacgtttagaggcattgcaaaaagacgtgattgaggtgcttaacagtggcaaatggggtaaccgtcaggcttcattaaaagaagtcactgcaccgcatagccctgaaagtgctcaagccttaattgcaagttcaaacggcgaacagatcgactttaaaaaactttggccaaagttaagtctagtatcgagttgggatactgcaggttcaaaagcgtgggccgaaaaattaaaagagaaattgcccagtgttcagtttgaaggtaaaggcttatgggcgacggaaggcgtagtgactattccctataatgatcaatacccgctcgcataccaaagtcacttctatgaatttgaatatttagagggtgagaaacaaggtcaaatcgttccttcatggcagcttaaacaaggtgacgtggtcagcccactgatgacttcgggtaatggcttactgcgttactgtttggatgattgcttaaaagtgactggctttatagagcaaattccatgttttgagttccaaggccgccgttttggtgtagatctggttggtgagaaactcgcgcctgaaaccgctcaacaattactgtcacagttaaacgaaaccgagtcaaaagcgatttctttactggcgattgatacccaacaacaagttaaaccattttattgcgtgctttttgaaggcgaaattcatcacagcattagcaatgaatatatcgacagtatcttacgtcaaaacttccactatgaacttgcacgaaacttagggcagctcgaccagcctcaaattcgccaagccaataatggttggaatgcgtacaagaaactagtcatgtttgatggcattatcgaaggcaatatcaaacctgagccacttaagaaagtcaccctgaatagtttggaacaactatga

SEQ ID NO: 49544 - DNA, 546 bp, Acinetobacter baumannii; identical to SEQ ID NO: 48162

SEQ ID NO: 49545 - DNA, 4338 bp, Acinetobacter baumannii
atggcacaagaatcccgtttggtcattgttattgattcgcaaaatgctgaacgtaatgcgcgtaatctaggcaatgaactggatagcattgagcgtaaaggtgattatgcttctaagtctatggatggcttatctgtagctactcgtgcactagctgggtatatggctgggctagttacagtaagttctgccatttcgaagatggatacatatactggactacaaaaccgccttaagctggtcactaataatcaagttgaactaaataaagcaacggaagacactttccgaattgctcaaaaaacctattcagcttgggattctgttttacaggtgtaccaacgttttagtgacaatgctaaaacactgaatttaaccatggatgacactgcacgtttgactgaaacagtgtcaaaagcagtggctattagtggagcaagcgcagaagctgctgatgcagctttagtccaatttgggcaggctttagcaagcggtacattacgtggtgaagaactcaactcagttatggaacaaacaccagctctagcaaaggctattgctaaaggtatggggatcaccgtaggagagttgcgttcagttgcggctgaaggaaaaattacttcacaagaaattgtaaaagcgcttagaaatgtagaatctgatgttgatgctctttttgctaaaacagatatcacaatcgggcagtctctcacactcctaaacaacgagatcacaaaatttgttggcgaagcaggtaagggaagtggtgcggcacaggtattagctggatcagttcaaactcttgcaagtaatttagatttaattgctgatggggctttagtagttggtattggatatatcactcgtgcaattttgatgaagagcgctgctattaaagagggaatggcttcaactttagcgagccgccaagcatctgtattaaatgctcaagcagaatatgcagaagctaccgctgctttgaatgcagcaaaagctcatctcgcgaatgtgcgagcaacaaatgcagaaacccaagctaaatttggagcaactgcggcagcaactcgatacgcacaagcacaggcagcagtaactgctgctacaaatgcacaaactgctgcgcaaacacgcctctcagcagcttcttctttagttggtagtattggtagccgagcattaggacttatcggaggtccaattggagcaattaccttaggtgtatccgctctggctgcaacttacacttattttaaaggtaaggcagaagaagcgaatagaactctcgctgaacaagccgaagtggctaaccgtacagctgaagaattaaaaggcttaaaaggtgaggcaaaaactaaagctattaatgacttaacaacggcctttaaagctcaaaatgaggagttgaaaaaaacagaaatggctgttggttcagctttaattgatattcaaaacttcggtaaaggtaatgttgaacttacaagaatttctaatgaagctcgattgggcacaattagctacaaggaggctatggaacaacttgctaaacagaagttacccccaagcttaagagatgcattgaaggagcaaatcgacaaatataatgaagcttatgaaaaggctgataagaccaaaacagccattaaattgtttggtattgaagttaccttaacgggtaacaaagcacaaaatgcggctattgagcagcagaaacatgctgatgctatcaagaatacaaaacaggctgcagatgaggctcaaaagtccttacagaaaatgtatgcagataaattgtgggattctcaatttgtcgagatagtaatgaaaaaggggttttctgagtctcaggctaatgatttactgaagctttataaagattcaatatctaagggtcttaaggcagcagaccgagaggctatgaaatcattagcggatacttggaaagctgaagaatcaatcaaagctatgactgatgctagaactgattctatacgtgagcaaaacaaggagcttaaaaatcagcaaaaagtactaaatgtaaatgcgaaagtcctagcaaatgcttcaaaattcggctttgcagatctagagtctaaatacaaacttccatcgggaacattatccgcgattcatatgatcgaatcgaaaggtaatgcaaaagcctataacaaagaaaccggggcgactggtggatttcagtttctcgaaggtactgccaagcaatatggcgtaaaagaccgcactgatttagcacagtctgctgaaggtgcggctaagtacatgtcttatcttttgaagctttttaaaggtgatttagaaaaggctgtacgtgcataccatgcaggtgaaggcaatgtaatgaagggtaaaggtattggtaaaaataataatcaatactggaaagactatcaaagttacatggctggtattaatggctattctgctggtgatatctcatcaaaagactttgataagcttattcaagataccactaaaatggccgaggagcaggcaaaacttcgtcttcaattagagaatgaggttgctaatcaagtaacaaagattaggtatgatctggccaaaaaacttgaggatgttgataaagctaactttagcccagaacgcaaggccgaaattaaagcagaacttcaagcacgtgcagataatgatattgctattgctgagcaagctacaaagactaagcttgattcattccgagactacacaaagacggaagagcaaatattaaaagatagctatgctaagcgtcagtttgaggccgagcatgacctagatttaacgaacgatcagcgtaaagaggctgttgatcttttagctcaacaattaaagcaagaacttgggttaatgcaattagctcaggaacagcgtttatttcaggcacgtttatcattgctttctgaaacgcaagccatgcaggaacgttacagactcgaacgggaggaaattcttaagaataccaagctttctatagaagagcggcaaaagctaatcgcattgtctaaagccagtcaggataaagagactcgtgataaggtgaataatgctgttcaaaattggggtaatatccaagccgatatgaatggtaccggagaatttttcagacaggatcaggagcgttttagtcgtttaaatgctgcaaatgatttagcagatagtcagtttgctgctactgatctgaatgagcaaaactctttagatggtcttgatgctcaaatggaagcaggactcattaagcaacaagattacgaaaatcagaaaacagctattattcaggctgctcaagatcagcgtaatcagatttctgccgaatatgcaaagaatgctcaggatattgaagataagtaccaccaagatcgattgaatgctcaaattgcccttggtggccaaatgatgggttcacttacatcgatgtttggttcaatgtttggtgagcaatctaaagcatacaaaataatgttcgctgcagataaagcttatgcgattgcagctgcaggtattgcgattcagcaaaatattgcagcagcttcaaaagctggttttccacttaacattccattaattgctggggcggttgctcaaggcgctagcattattgcaaacatccgggcaattaaagatcaaggctttgctgatggtggttacactggtcgtggtgggaaatatgaagttgccggagctgtgcacaaaggcgaaattgtatggtcccaagaagacattaaaagatggggcggagttggtttagttgagaaaatgcgtaagagtgcaaaccctgaagcttttctcaataacaatgcctcggctgatagtgtcatgcgccgtgcaatgatgagctctagtgcctttatagaaagccaaaagcaagctgacatctttaatcaaccggttcaagatactcagattatttataaaggtaatggtagcgtacctactgcagcatcttcggcaagttctgacctattccatgatggcaaggtctacttctcatccaatggcttagttcaggatcgttcaaatctggatgatgttcaggattttactttaggacgtacttcacgtcctaaagctgagattatgccttcaattgagcgtgcttcaccgacagtcaatttcaaaattgaagtgattaatcaggtaagtggagcaactgttgaagctgagcaactggatgagcaaactgtccggatcattgttaaagatgaactggataagcagcttccaagaacggtaccgaagcttgtaagtgatcaaatcgcaaatccaaactcaaccattagtcggtctttgactgagaatacgacagcaagacggaatcgtacttaa

SEQ ID NO: 49546 - DNA, 423 bp, Acinetobacter baumannii
atgagcacttcacgagtaaagctaactaagtcatttatcgatcaacttgaactcacaccggctatttatcgtgacagtgagattattggctttgctattcgtgtaaataactcttataaaacttacattgtggagaagaaagtaaaagggaaatcaattcgttgtaaattaggggattatgaaaaaattactgttgaagacgcccgtatacttgcacagcagaagttaaaagagttaactgactcaaaccctttaagcattaaaaataataaaatattaaaaaatagtttaaatgagaaaattgatcagccttatctcaaagaagctttccaagtatatataaatcaccacgagttaaaagaaaggacattagccgactatagagaagttatagaaaaatatttaataagttcatctcgatag

SEQ ID NO: 49547 - DNA, 507 bp, Acinetobacter baumannii
atgcctaaaaaatttgaggactttaataatcctaggaaaaaagcacttgcagggatgaaacaaagcatttcagctgaactttgggacaaaaatcttaattttttaaatcaattaagagccaagatcgcgaaacatccagtatctcatcatcctgcaatagaaactttaaataacggtgaaattaataaagaaaacttaaagcgtattcatttagagtatcgccatgcaatcgtacaaacatttacagacgctttattaatggctcaataccagacaaagcagttagaacctagattgcatgcaggtgcaaagatgtttccgcgctgtcttttgagtcttaatatatttgatgagtttgggtttcggcctgggaccgacaaagacagttattatcaaggtaacccagaatatgcacattatcctttatttgaagatgtccttgatgattttggagtgacggaggaagagcgccggagttatcaccaacagaaattgcacatcaggtga

SEQ ID NO: 49548 - DNA, 210 bp, Acinetobacter baumannii
atgcttggttttatgtactacttgcaattgctgggctacgtaatagtccggcaaggcatggatcaagcaatgtttctaaccaaacattatgcggtaccagtctcttggcggcgaataacaatcgactatcacaaccgattaaacaaacctgctcagcagctttataaagaatttgttgagtggactaaagaagaatatttgagggcttaa

SEQ ID NO: 49549 - DNA, 960 bp, Acinetobacter baumannii
atgtctaacttactaactgcagctgaagcatttgcagctcttcaaaacggtaaaactgttctatgtcgtccagccggagacatgttggactttgccgatttagatcaattccccgcttctgtttttggcaaaccgggttttgaattctgcatcaaaatcgaaactattgagctggctggcattacattcacaaagccattaactattgatgagtatgaagagggtcaggaagtttatgtaatcagtacatattcacctacggtttatgttttagatttcaaaactaacgcattaattgattctattaacagtggcttcgttcaacgtgatgcagaaaacgccaagcttcaattaaaagcactgtccaaagcgttaggttttgaagttagtgacgatttaagtgttattcgcttaggtgatgaaaaaaagaaacagcgtggcaagaaatcaaaagcagaaaagcctattgaagttatttctgcagaaattcaaccaacaattgttattaccgaacaaacaaatgtcaccacatctgaggatctgttagttccagaaactaacgagcctaaagtagatccagaatatcagcaaaccctagatactcttctacagcgtgtaaaagagtcaaaaacacctgcagaagtaaatgcggtttatcgttatacccgcacatgggatgacgaacaaatgaagcctatccttctcgccactcacaaacgtcttgaagagctagaaaaagaacaggcatctacgaatgagccaccctctttaatggttcagatccagaacgcaccagacctcacaacattggatgcgctggaaatagatgtggctgcacgagatccgcagattcaaccgaagctaatggggtatgtgagaaaacgccgctatgaattagagaatcctacacctacacaacctgaagctgatcctgattatctattagtggacggtttctaa

SEQ ID NO: 49550 - DNA, 384 bp, Acinetobacter baumannii
atggttcctaccacgttcttaactgttactgttgcattggcctcagtcacacctgtaattgctttacctgcggcatcaatcgttgcagtcagacttgatggtgctgtggtatccggtgcaacaattgtttttggtacggtagcattacccgctttatccgcaaccgttacatttaagctttcaccatttaaatatactttaactagtgtaatcgagtatttacctgcggtatcagccgtagctgtaccaactacaattcctgcagcattcttaactgtcacaacagcattggcttcagttacacctgtaactactttacccgctgtatcaattgcaactgttaaacctattggcgcagttttatcgtcagccaaaattgtttga

SEQ ID NO: 49551 - DNA, 1023 bp, Acinetobacter baumannii
atgaataaaaaagtgattgccggcattttagtagttatggctgtagttgccatcggcttttgggtatggggatataataataaaaaacaattagataataatgtattaactttatatggaaatgtggatatccgccaagtttcacttgcatttgaacaatctggccgtattcagaaacttttagttcaagagggcgataaagttcaagttggtcaagtactggcgacccttaataccaatgcattacaaattcaggcaaagcaagctcaagcacaacttaaagctcaacaagaggcaattgttaaacaagaggttggagctcgccctgaagaaatcacccaagcaaaagctcaacttgcgtctgcccaagctgagcttgataaaaccaataaaaacttgcaacgcttacaaattttggtaagcagtacggatggtcgagcaattagccaacaagagctcgattatgccaaaagcaatcaacatagtgctgaggcagcggtccgtgaaagacaagccaatttagaattattaattaaaggtgcacgaaaagaagatcgtgaagcaaccagagcacaatatgaagtgactaaggctaatttagatttaattaagtataaccttactcaagcagaactaaggtctcctgtaaatgcagtggtacgagctcggttgcaagaagttggcgacatgacaactgctcaaaaggccatttatacattagccttgaccaatccaaaatggattcgtgtgtatgtaaatgaacaagatttaagttcaattaaaatgggaggcacggctcaagtcattcgtgatgcttatccgaatcagcctatgaatggaaaaattggctatatatcttcagtggctgagttcacacctaaaacagtacagacagaagagattagaacaacacttgtttacgaagttcgggtgtatgtaaatgatccgaatgatcaattaaaaatgggtcaacctgtgacagtaaaagtcccacttgctttaagtgagaaagcccatgattga

SEQ ID NO: 49552 - DNA, 444 bp, Acinetobacter baumannii; identical to SEQ ID NO: 48420

SEQ ID NO: 49553 - DNA, 354 bp, Acinetobacter baumannii; identical to SEQ ID NO: 48456

SEQ ID NO: 49554 - DNA, 1233 bp, Acinetobacter baumannii
atgtccagagcaataaatagactaacagccttaaaagtaaaaaatttaaaatttgatgagtctactagtaacaagtacaccgatggggatggcttgtatttgcagatcaataaaaatggtagtaagtactggcgcatggactacaccaatccaatcactaaaaagcgtaatacacttgctctaggagtttatccaacaattgcacttgaacaagcaagaaagcgccgtgatgaagtaaagctacaacttgcagaaggcaaagacccagcgagcgaacgtgatattaaaagagaacaagctaaattaagcatgagcaatgctttcaaatttattactcaagattggcttgcactacgagaaaaagaaggcaaaaaagatagtgaggtcatacgccgtttaaacaaagacgtactaccctttattggagatatgcccatatcgcagctttcaattgaagttattgaaaatgaagtcacaaaccgtattgtagagcgtggtgcgcttgaattagcccgtaaggttctcatttcagttaagcagatactggaatacgctagacggaaaaagctcatattgatcaatccagcgcatgacgtgatactccctaaaccgattagtggaaactttgcagcaattacagacccctctgctctttcagaactcatcaaagctgtatgggatgatacagatactcgaatgactttcgtcacacgttgtgctgtcaaaatttctttattcatcttttcacgtcccacagaaatcagaacaataaaatggacagactacaatagagaagatggagtattaaacatatacccgttaaagcaaaaggctacaaagcaagatacagataaacctaaaatagttatccccttaccaacacaagccattgaactactacaacaactctatccacttacaggacaccgagaatacatatttgcaagtaatcgaggtgaagaaccttacattagtgaaagcactgttaatgaagcactcaagcggattggatttaaaggagagcaaactgctcacggctttcgtgctactgcaagaacaatacttgaggaagaacttgatattgaaccaatatggattgaaagacagcttgcgcataaagtaagagacgctaatggagaatcttacaatcgcactaagcacgtgaaaaacagaaaagctatgctacaaatatgggcagattatttgactaaaacattacttaatgaaatataa

SEQ ID NO: 49555 - DNA, 240 bp, Acinetobacter baumannii
atggagttaaaagataaaatcattttaaattctggagaaacacttgttgaaattagccataaaacaaaaggcccagtaggtgaaactgatatttacaaatacaaaattattaactctaagggtgatattgttggttatgtagaccataccgatcatacatctattagaggtttccaacggactcaatctgctattcagtacgatattaataaaagagtgattatagatattcattggtaa

SEQ ID NO: 49556 - DNA, 1452 bp, Acinetobacter baumannii
atggaactgttaggaatttggggtgttgagaaagtagtaaaacgatttagaaagtgggaaaaatcagagatatataaatatgtggatgcatcaaaaaatattatagagccgataggatatatttttaaaaaatctttaaaacatcttaactcacccaaagtttctttagaaaattgtgaaaaaatttttaaagaagttcttgagttatcatcgcattatatatcaatgtacggcgtgcaaaaatatagctatgcacagtttgaatacatatatagttctcctaaatctatgattgatttacttagtaagcaggcgcttgctgatcaagcttttaaggttgaacaatatgattcggaatcaattttttcctttattagttatgttcgaaagcaatatgattataaagagattgagtatttgtatgaaatttcaaaaaatatattggagtgtaagaataatattcccattctagttaataagaaattggatgacttggatagaaaatatcataataatcttgagtttaaagtaaaagatttgttggtaaataaaaatgtaaatttagatttcgtcactattcatgattttggaaatcttaattttcttgaaaaacctttcttaagcaatgaagagggaaatatattttttctaaatcataatttcttttatgtaggattttataatgttttgtttaaaattttatatttaaaaaagcaagataaaaaacagggtgagctaattgaaagatttgcagagtcacaattacataaaacaaatgatttatttattgagggagaaaagaaatataaggtatctaaaactcttagaggaaaattgaatattccatcacatgagcttgagtcggatatgattgtatacaatgataattcaattgctttttttgaaattaaattaagagaattggtaaaaaaatctaaggcaggaaatccctattctattttagaagatttaactcaatcacttgttaggtctcaaacacagttaaataaacatatgagatttttggtggaaaacaaagaaataaaatttaattcagataagtatttaaattataataatcaaaaaatttttaaagttagtgtttcttctttagattatatgggtttgagttcaaggctagtatatataaattttcttaaattaattgtaacttttagattggttgttgatagtaaatttaagaaggaaattgattttataaataaacattttgatgaattcactaacgagataaaaaataataataaagatgaggatattttgattgggcatgcatttagggatactgcttatcttaatgtatttcaattaattttccttattcatagaagcagtttgaaaaaagttagcttaatcgatgaaataatggaaactagagctttttttccagatcagacagacttttattactattataagttttttgattaa

SEQ ID NO: 49557 - DNA, 327 bp, Acinetobacter baumannii
atgaattaccactttgcagattggttaatcaacgcatgtggaaaataccaagcacgtgaacaatctaaaaaaccaaattctggaacgcaggtccgagtcccgcagggagaatcaaatactcttagttcaaaacagatttactcatttgctcaaaaactttctgtacatcctgagtttgcaagcaaatacgctgaaggtaacgagagctatgaacaacttgctgcacgtgtcgcagtgaaacttgcagatccagagcaacaacaaaaattgatgccatacctcattcaggttggatttcaacaaaaaggtaaaggagaggcggcttga

SEQ ID NO: 49558 - DNA, 1044 bp, Acinetobacter baumannii; identical to SEQ ID NO: 48325

SEQ ID NO: 49559 - DNA, 219 bp, Acinetobacter baumannii
atgaatatttgtgttggtggtgagttagatgggcaaactatagaaaaagaaggaagattgtttaaagcatctgatatcgacccatcatttaaaactgagtactacaagcaagtttttaaccgcgacaatacggtgttccatttctggttgccaattggatctgacttacatgatatgtctgagaaagttctaaatatccttagagcacctaaaaactag

SEQ ID NO: 49560 - DNA, 1353 bp, Acinetobacter baumannii
atgtttaaggagcgccgtggttataaatggatgcaaaattggcaccacttagaaatctgcgaagctttaatgaaagtttatcgcggagagataaagcggttaattataaacgttccaccacgatattctaaaactgaaattgctgtaattaatttcatggcttggtgttttggaaagaaacctgactgtgagtttattcatatcagttactcggcaatgcttgccgcaaataatgccttccaaatacgaacccttgtgcaagaagaggcgtatagaaaagtctttcccgagcttacattgcgtgatgatagtaaggctaaagacttctggagaacttcccaaggtggtgtctgctatgcgactggtacaggcggcacgattaccggttttggtgcaggaaaacttcgtaaaggctttggcggctgcattattattgatgacccgcacaaagcacatgaagcttcatcaaaaactattcgagaaggggtaattgattggtttcagaacacactcgaatcgcgtactaactcgccagatacgccgatcattgtgattatgcagcgacttcatgaagatgatttagctggatggttgctaggtgatagaaaagacggcgttcctgtagctggtggtaacggtgaagtgtgggagcatctatgtctttcagctattcaggaagacggatccgcactgtggccagcaaaacacaatatccaaaagttgaagcaaatggagcaagctgctccgtatgtttttgccgggcaatatcgtcaaatgccatcaccgccagcaggcggtttttttaagcctgacaatattgaaattgtggatgctttacctgctgatgtagtgaagcaagtaagggcttgggactttggtgctactgagaatgaaggcgactttactgcaggtgttagagaagctctaggcgcagatggttttacttacattgtcgatgtaactagaggacagcttggacctgacaatgtgaataagcgcttagaacaaacagcaaaaatagatgggaaaaaagtttctgtgcgtctaccacaagatcccggtcaagctggtaaatcgcaagctagttcatttgtgaagcttcttgcgggttatagcgtgatagctaagccaatttcaggtgacaagcttacacgtgcacaaccatttgcggcccaagttaacgtaggaaatgtacgaatgctcaaaggtgaatggaataaggattttattgatgagcttcgtcattttcctaatggcacacatgacgaccaagtggatgcagcttcagatgcgtttaatgaattacatgaaggttttgaagccttctttgctgatatgggatttgctcgatga

SEQ ID NO: 49561 - DNA, 1137 bp, Acinetobacter baumannii
atgcttgccgcaaataatgcatttcagactcgtaatatggttcaagaaaaggcttataaaaaggtctttcctgatcttaagttacgtgaggatagtaaagctaaggatttctggcgcacagatgcaggcggagtctgctatgcgactggtactggcggtaccattacaggttttggtgcaggcaaaatgcgtgaaggctttggtggttgcatcatcattgatgacccgcataaggccgatgaagccaaatcaaaaactatccgtgaaggtgtaattgactggttccaaaatactctcgagtctcgtactaactcaccggaaacgccaattattgtcattatgcagcgtcttcatgaagatgatttggcaggatggctgctaggtgatagaaaagacggcgttcctgtagctggtggtaacggtgaggtttgggagcatctatgtctttcggcaattcaagaagacggatctgcattgtggccagcaaagcacaatattcaaaagttgaagcaaatggagcaagctgcgccgtatgtttttgccgggcaatatcgtcaaatgccatcaccgccagcaggcggtttttttaagcctgacaatattgaaattgtggatgctttacctgctgatgtagtgaagcaagtaagggcatgggacttcggtgctactgagaatgaaggcgactttacagcaggtgttagagaagctcttggcgcagatggctttacctatatcgttgatgtaaccaaagggcaacttggtccagacaatgtcaataagcgcttaaaacaagtcacagagttagatgggatgggcgtaacggtaaggattcctcaagatcccggtcaagctggtaaatcacaagccagtgcattcgtaaaacttcttgcaggatatgacgtcaaagccaaaccagtttcgggagacaaactcacacgtgcacaaccttttgcggcacaagttaacgtgggtaacgtgagaatgcttagaggtgattggaataaagactttattgaagagcttcgcaattttccaaatggaacgcatgacgaccaagttgatgctggttcagatgcatttaatgaattgaatggaggttttgaagccttctttgctgatatgggatttgctcgatga

SEQ ID NO: 49562 - DNA, 456 bp, Acinetobacter baumannii
atgacacagtatctcatgtttgcggaaaatatttataacaaaattaaagatgaggaattgttttcacatgactgtattgaaaatatgaacttacttatgacatgtatacgcagagaaattaagggaacaaaatttaaattaaaatataattttattgattttgttgaattgtttagtaaacaattagatgaatgtaaagtaaaaatagatgtgagtttgattcctcctcataattcagaaggtgagtatattttatggttagctggatttatcgaaaaaattacagaaggtggacctaaaccacctccgcctataaagaaatttattccagagtatatgagcttcaaatctgaattagattttttacccttaaatgaggaaaaaattcaaaacgaaggtaaagaaattacggattactttaattcaaagctttataaggcaacttttaagaagtaa

SEQ ID NO: 49563 - DNA, 501 bp, Acinetobacter baumannii
atgtttaaattttttataattagtatattagcttgggcgaatgctgctaatgctgagtttaatatagaaaataatcaagatcagccagtaaatgtcaaattagggtatcggagtgttttaaattcttcctttatatatactgatgtcagcaaaaatgtagatttgaaaaaaaatatcattactgttccatatggcgaagttacagttttactaaatccggttttgaataataataatgaaataaaaggaaagaattattactttataagctatcaacctacaattctattaggggaaagtcaatataaacttccttttgttatttcagatgttggagcaattggtactagtattatttataatgataataatatttctattttttcaattgaaagttatacaaatcctgtgtccaataataattcaaaaaaatttaaaagtgatatatatgtatttaataaaaaagtacagggatatacaatccatcatttttatcaataa

SEQ ID NO: 49564 - DNA, 687 bp, Acinetobacter baumannii
atgaatgcttatttgcatcgtagtgaagatcgtggtcatgttaaagcaggctggttagagtcttatcatagcttttcgtttggtagctggtataaccctaaatatatgggggtaagtgcacttcgagtcattaatgatgaccgaatcgatgcccacaacggtttcggcactcactcgcatgacaatatggaaattttaacctgtgtgcttgatggtgcaatttcgcaccgtgacaccatgggaaatgaaggccagattaaagcaggtgaatggcaacttatgagtgccggtacaggtgttgctcatagtgagattaataacaccgatacgccagtgcacttattacaaatctggattattcccgatgtaaaagaagccgagccaaattatcagcaaattagtttagacccacgtaatcaacctaacgaatggcatttgattgcaggccctgacgcaaatgcaccaatgcatattcgccaagatgcacaggtaaaatctgctgtacttgaaaaaggtcgtgaactgccagttgagacttcaaaacgagtaaattacgttcatgtaatttcaggtgaagtgcgtattggtgagtacgaagtgaaagcgggtgatgctctggtctttgaagataatgctgtgattcatgcaaatgaagacagccaatttatctggtttgatttaccttaa

SEQ ID NO: 49565 - DNA, 420 bp, Acinetobacter baumannii
atgattgatatcgttatttgtattgttgctgcacattttatttttgaagtacccatgcgcggttcattattctcaattttatctgcttcatttctatatttaatcgtttcattattacttggtttaactatatctggctttgctcaaagtcagtttcaggcgagtcaaattgctttgttggcaagttttatgccagcactgatgctttccggatttgtttttgatacacgcaacttgcctttggttgtacaaattattagccagttacttccagcgacgcattttatggttttaattaaaactttatttatgggaggtgatgattggaggctatggtttaaagagtgcggtattttattgggatatatcgttgttttgatatgtgctgtgaacttttcactgaaaaaacggttgagataa

SEQ ID NO: 49566 - DNA, 666 bp, Acinetobacter baumannii
atgagctttgcattttggaatcgcttgaaagccttagttcggaaagaaactaaacagcttcttcgtgacaaaagcagtctcggaattggcctagttttgcctgttatcttaattttactgtttggttatggactttcttttgacttgaaccaagcacgagttggtgttgtagttgatcagtcctcgccgcaggtcaatcaggtcttagctggcttaaatggatcgctatatttaaccagtctaaaatttcataatttgcctgaagcagaacaggccattcgaaatggcaaaattgatgcaattttgcatttgccttccgattttgcaagtcaggcccaacaaggtaacgcaaaggttcaattgctattaaatggtagatcgaccaccatagcaactgctttagaggggtatgtcgcgggtgctttggctaccgcgccatcaatacaaattgatcgtagcccaatattagcatctgcaagcgccgttaaaattgaacaaagaatatggtttaacgaatctggtaacagtacttggtttttagtaccgggtttaatggtactcattttaactttaattggcgcatttttaacgggtctgcttattgcccgtgaaagagaacggggaacattagaagccttattttgtcacaccagtacggccatttga

SEQ ID NO: 49567 - DNA, 174 bp, Acinetobacter baumannii
atggttaacgtcataagtagccgcattgccatacaagatgcaggaaagttattagccctaggttctcctcaacaggtccgcgaattggcaagtaaagataaacatattgttgatatgaatgaggcttttattgcaattgtggaacaagcacgtgcattaaggcatgcgggttag

SEQ ID NO: 49568 - DNA, 462 bp, Acinetobacter baumannii
atgattccaccatggaaccacgatctaaagttttcgaaatatacttataacgctagaaccgagacagtcgataaaaaaccaagctttcgacatgcatgggctaaaagccagtttgcactaataccagtcgaaaagatctatgaaccgagatatgtgaatggtaaagcagaacgttggggaatttatagagaagacggcttacctttcaccgttgcagctatttacgattctactgtcattgatgggcaacaagttcgatcaatgtcaatgctgactattaatgcagacaaccaccctttcatgagtcagtttcacaaacccgaagatgaaaagcgttcaattatagttattcctgaagagtatcgtgaagactggttgaactgtaaaaaagaagatgctgatcaatttttctttgagatgccactaaatgaatttacatcgaaatattttcaaaaatattga

SEQ ID NO: 49569 - DNA, 468 bp, Acinetobacter baumannii
atggattctacagaatacttttggctaacacggaaaaaagaacctaaaaccaagcctaaatccagaccgctacctaaagctactcaaaagtacttagaggcagaggaagaatttactgaagctttagacaatcttgaaattaaatacgaaaagaaattccagtttaaatcaacaaagcattggcgttttgattttcatttaattgaacatcgtattttagttgaaatagctggcggtccttggtcaggtggccgaaagggcaagctggctacaaaagcgtggagtatggaacgttacgatgttgctgaatcaatgggatataccgttgttcggttagaggcagtaccaagatttaagattaatgaatctggtccattacagatccaagctcatttcgcaagccaatggcttaaaaacttaaagaggcaaatattcaatggatcagatcagaccatttccaccaactga

SEQ ID NO: 49570 - DNA, 642 bp, Acinetobacter baumannii
atggatcagatcagaccatttccaccaactgattttattgatcaagctgaagaagaggaagcaattcgtttaatacccgctccagatctaaaaaaatgggttgtagctaattacttaactattggtggacctctttataaccccgatcattatcacatagctgagctgcttcacgataatgaagaatttttagcattagcttgggcctcttctgcatataaaagcaagcaagctatggtgttaggccagtgcgaaaaagtcatgttcaatgttggtggatggcgtaaggccagacaagagcaacagatgcgtgattggttcggctttgtgccaacttatttaataactgtcgacgcttctttctgtgagcgtgcaaacgatacagagttctgttacttacttgaacatgagctttaccacattggagtgatgagagacgaggacggagaaattgtttatagtgatagttctggtcttcctaagcactatcttgcaggtcatgacgttgaagagtttattggcgtagttaaacgttatggaccaagcaaaaatgttaagcgacttattgaagtcgcaaagaatccgccgtttgtttcgaatcttgatatttcaaaatgctgcggaaactgcgtaatcaattga

SEQ ID NO: 49571 - DNA, 390 bp, Acinetobacter baumannii
atgagctttattactgtagaagacgcaaattcaattttgggcagcgattttgcaccagacagtgataaagctcgtctggttaaactgtcaaatgtctggatgaaaaacagaataggttttgtacctgatcctattgatccacttcttaaggacgcggcttgtgaaattatcaaaggaattctggccaaagtaatttataacggcaaagaccagcaattgaagcgtaaaaaggtcaaagctgattctgttgagtcagaaaaagaataccaagacggatctgaagcaatttctagctttgaacagatagcaattgattttattgattcacttgatttgaaagatccaaatgcaagttttaatggctttggcataccactttacagggcatga

SEQ ID NO: 49572 - DNA, 312 bp, Acinetobacter baumannii
ttgttatctgagaattcacgattaaaagatgcagcagtcttagcagataaagctctcaaagatgctgaagctcaagtggtcggtataaaaactgaatttgaagcttttaaaaacgatattcctgcaatgcaggcacgtattgctgaattggaagctggaaaagcggaagaaaatccagctacaggaacggcagctaatgattttgaaaactggtcaaatgatcaattaaaagagtatttggctagtaaaaacattggttacaagccgtctgcaactaaagcagaacttcttaaattaatcccgaaggaataa

SEQ ID NO: 49573 - DNA, 372 bp, Acinetobacter baumannii
atgatgcgtggtggtcaccttgatattgcggtgcttggggcatttcaggtagcagccaatggtgacttggcgaactggcacacgggtgcaccggatgcgattcctgccgtaggtggtgcgatggatttagcggttggtgccaagaaagtatttatcactacagaccatgtgaccaaacaaggcgagccaaagattgtcgctgagctcacttatccggtaacgggtaaacattgtgttgaccgtatttacactgacctgtgtgtgattgatgtgaccagagatggtttaaaggtgattgagaaggtggatgggctgagttttgaggagttgcaagggttgaccggagcagtgttgattgatgcaacgaattaa

SEQ ID NO: 49574 - DNA, 162 bp, Acinetobacter baumannii; identical to SEQ ID NO: 48445

SEQ ID NO: 49575 - DNA, 375 bp, Acinetobacter baumannii
gtgtttcactcaacggctcatcaggctccggctcaggaaggctggtacatcgaagtgcctaaagatgctaatggcaatacggtagtagcagttgaatattcaacattagaaaacggcgatctttcaattaaaacttataaacgtaagtttgatgtggaaaaggcagccattgtagctgatctcgaaaatccactcgatattccagaaggccgctggattgatatccgtctgcatgaagaacctgagccggagcctgatgagccgttgagtgaaacaccagtggatttccagccgactaacttatctcaggcagttgctgcagcaatgaatggtgtagaaccgcccgaaatctcagatacaaacgaaacactttaa

SEQ ID NO: 49576 - DNA, 162 bp, Acinetobacter baumannii
atgtctgctgaaactgtgcctgtacctggcaatgaagtgttgcctgcagggtcagtcgctgttgcagtcactgtatcgccatccaccaggttacccgggtttggtactgaccagctaccatctgtgcctgctaccactgttgcagtggtgccatcaggataa

SEQ ID NO: 49577 - DNA, 222 bp, Acinetobacter baumannii
gtggaaaaggcagccattgtagctgatctcgaaaatccacttgatattccagaaggccgctggattgatattcgtctgcatgaagaacctgaaccagagcctgaagagcttttgagtgaaacaccagtggatttccagcctactaacttatctcaggcagttgctgcagccatgaatggcgtggaaccgccagaaatctcagacacagacgaaacactttaa

SEQ ID NO: 49578 - DNA, 1410 bp, Acinetobacter baumannii
atggcagctcatcaaaatggttctgaagccaatcactcccaaagtttaaaacatggacttaaatcacgccacttaaccatgatctcgattgcaggggttattggtggctctctctttgttggctcaggcagtattatctacaacaccggccctgtagtttttctaacttatgctttaggtggtctactcgtttggttcatcatgcgtatgttaggcgagatggccgttttaaatcccgacagtggctctttttcaacttatgcagaccgtgcgattggtcgttgggcagggttttcaattggctggctgtactggtgtacgctggcgatgctcatgggctgggaggcttatgtggcaggaaagattttaaacaactggttcccgtttattccgatctgggtttatatgaccgttgtcattgtcgcactggttgttgtcaatttacaaaacgtcaaaaactatggtgaattcgagttctggtttgcgctcatcaaagtcatcgcgattgttgttttccttgtgattggtagtttagccatcatgcatttatggccttggggcaatccggctgcatctggtataagtaacttaacctctcaaggctttatgccaaatggcggttcgtcagtgattacagccttgcttggggtgatgttcgcctatattggtgctgaaattgttaccgtagcagcagcagagtctgcaaatccatctaaagaaattcgtaaggcatcaaactcggtggtttggcgtattattttattctacgttggttcaatgttcgttgctgtatgtcttattcctcacaacaatgaacttttaaaagattcgacttggggtacttatagtgtaactctgtctgcacttggtattccgggcgcgcgccatatcgtaaattttgtagttctaacatcggtatgtagttgctttaactcagcgctttacacgtgttcacggatgctattctcgttgtctaaacgcggtgatgcaccaaaaagttttggttctgtaaacagtaaaagcagtccttgggtgggtgtgattgtgtcatgcttcttctctgtaattgcggtaattttaactgcaacagagagtatgaatgtttatgacttcttcatgctaacaacaggtgcagcaacactatatgtgtacctgaccattgcttattctcagcttcgtatgcgtaaaaaattagaagctgaaggcgtgaagattgactttaaaatgtggatgttcccttacctgacctatgtggtgatctttgcaattattggtgcaattcttaccatgttgattgaaggcacctattttaaagaagtgatttacaccacagcattgttcggcattattgtgttcttcgggtggctttgttgcacaaacctatctgtaaaggctttttcagcgatataa

SEQ ID NO: 49579 - DNA, 411 bp, Acinetobacter baumannii
gtgcttggtgatttacttaatcagattccacaagatgagcagattgactctgtttataccgatggagcttatgacaccaagcaatgccgtcaggtcattgcagatcggcaagcacatgcggtgattccacctagaaaaaatgcgaaaccatggaaagatacaaagagtagctcgctagagcgaaatgaattacttcgaacagttaaacgtttaggcaggacattatggaaaaaatggtcaggctatcatcgccgcagtttggtggaaaccaagatgcattgcatcaaattattaggcgataaattaatggcaagaagctttcctagtcaggtgaatgaaattcatgcacgtgtagcagtcctcaacagatttacggaattaggtcgaccacttacccaagttacgccttaa

SEQ ID NO: 49580 - DNA, 549 bp, Acinetobacter baumannii
atgaattttaagaagcaagtaaccctaacttataagcatcttcaagcaacaagcctttttgctgcacatcgtgaagtaaggttctacttaatgggcgtgttggttaaagatggaatgatggctgccacaaatggtcactgtgctcttatttgtgatgctccagaagtaaaagatttagaggtgattatcccaattgaaatagttaaatcttttattaaaaaggtcggtaataacccaaaagtaaagactatcactttaagccaaattgatgatgaattttggttgctggattacgaaaatgggatgtttgaattcttccgaccaattgacggcaagtttccagatataagccgtgttgatattccaaaaccgaccgaaccccctaaagagtttgtacagtggaatttagaatatgtgagcaacttcgcgaaatgctccaaaattcttaattgccgattccctctcttttatccatctggtgccactacttcaacttatgtggaatttgtggacggcgtacacggcctattgatgccattgcgagtttga

SEQ ID NO: 49581 - DNA, 234 bp, Acinetobacter baumannii
atgctcgatacaaaaaaaaccagtagcgcaataaaacaaatcattcacttgctaggaagtttcttagagcgccgatctaaagaggaatggaagaagtaccacgattctatgacattagatatgcaagcagcagcaagagctatcgcctttgaggaagccaataacatcttgccagaattagcgggcagtacgtttgccaatgtgtttgcaaataaaaatgaggtgcgaccatga

SEQ ID NO: 49582 - DNA, 228 bp, Acinetobacter baumannii
atgagtaatgtaattcgatttagacggaatgggcttgcacataagatcagcccgcaagatgtgaaacaaaggttaatcagcccaagcaaagacttggatctaaaaaaggcagatcaattgcttgaaattgattttgaagatcttccatatgaccagcttttggacttggctcgtgtagcaactattgacctactggagacagatgctcgatacaaaaaaaaccagtag

SEQ ID NO: 49583 - DNA, 222 bp, Acinetobacter baumannii
atggacaactcaaaactaccaatcaaccagattattgcacgtattaatgatgctgctgaaaatagtgaagcgttagtgctaactgctgaagaagtaaaaattctttcaaaagaagttggggactgtttctttatcccagtgctgtcaaatgaacaaattacaaaaatggtaaaagaaggaaaattaggacagccaatgttctcggaaaaaaaagaaaaatga

SEQ ID NO: 49584 - DNA, 297 bp, Acinetobacter baumannii
atgaatgaaccaatactagcacaaaattcaatctgtgcaagcccagacgttgaagaagatcaggtctttactcaatggcaagtagatcatgctgcttatgttgaaacgcttgatgcttatagagaaacacacagggatcttgaaaaagctttaggtattgaaaaggactttgacaaaacatctcacagcgccaaagaagtcattgaagacttgcgaaagaactggcacctgtacgcactaatcaaccgctttgagagcgccgtaatcaatcgtttaagagcaaaggataagttgtaa

SEQ ID NO: 49585 - DNA, 651 bp, Acinetobacter baumannii
atgagccataaaataattaaacccgaccttgatttggtttttgcgagaattgccatttttggaatgttggcaagtctttttgctgtttcatatgtcaatggacatccatcatggctgacatgggttgtcatgttattgggtgtgttctcaatctttgaagcagcaattaaagctgatgaagatgcattggcagctaacggccttgcaaagatcattatctctcactctggaaaacttgcctcgcaaagggatgaatacaagtttgttgctgagtcaccagatgatctctatgtgcgcgagtgtaaaaagacgaatgagcttaagaaatcaatacaaggcaatcagggccgtattgcagaactcgaacgcttaaatcaagtgaaggctcgaactattctcaatttacatcaagaaattaaagagcttaaagcctctcatcatggagaaatgattggtcatgaagtgcatctaaaacaagttaagaaaaatcgtgatgagttgcgagttcgggtggatagcttggagcaagctttaaacaaagtgtctgactgggatgcgcatccagaaggttatgaggcaaattttggtgcatggggtgttcgtgatttttatcgcagtctggcaaatcaagcccttacaaagaaggaatga

SEQ ID NO: 49586 - DNA, 231 bp, Acinetobacter baumannii
atgaaagctaaaaaacttttagagaagcttggtgctaagggaattaaaaagattcttgagagtgcacaccaagaagctgtttattttgtggatgaatggaatgagcattttaaggtacatgggttttacacagataagtgtattgtcggtgttcacaatccacattcacactacaaattgtcagaattaaaacaggcattgggtggcgaacatggatacaagcgaagctaa

SEQ ID NO: 49587 - DNA, 249 bp, Acinetobacter baumannii
atgaccttaagtggtgttatcaaaatgagcaatgattcaaatttgcaagacgtggtgcttaagctgatagagcaaacaaacaagcttattgaccaaaacaataagctgactgatcacaacaatagactgatcgaacagaatagcttactcgttcaaatcaatgcagaacaatccgctcagttatccgaagttctattaatgcttgaagatagtgaaccggcacaacggtcaggatcactagatgggtga

SEQ ID NO: 49588 - DNA, 363 bp, Acinetobacter baumannii
atgggtgatgttatgagcacaagtgaatgtattagctttcaagaggcagtagagattgggcttcagaaagcagcggatagtgaaagaataaaggctgaggttcaaagcattttacaagagttgaattcagtagctgcaaaagcaactaacagaaatttcattttatttgatttgtctgaaccggaagttaaacaactgtcacctcttaaatttgacttcaataactatagctttcctatcgccgtaaggtgtggagcattagaagttgaatgcaatagcatttgtgaacttgttgagtcaataaagcaatttctaagatcagcctattttggtgactttataaggatgaatatcaatgcctag

SEQ ID NO: 49589 - DNA, 558 bp, Acinetobacter baumannii
atgcctagaattgtatcgattataccgcctaaagatgactccaacattactaaagcacagggtacaaaaatattgcttgataatggcgagtacctacgatgtgtccacaaaatcactttagtagcagaagttgattcgccgtggaaagcaatcattgaagtgtacccatctaatcaagagcaaattaatgcattgcttgcagatgttgaggttattaaacgtgaccaagaatacaaccgcttggatgagattgaaaaggaaatccagcaactacaagacgagaaggtgctcattgaacgcaaacaccgtccagaagtaacagggctttcaatagctggtgtagcgaatgtaccaatggaagggactttcttggttgataaaggtgagagagttttaaagccgcctaagaacgatgctttaacggagttccttaaaaacaacccttctcattcaacaatcattccaccagtaacagggctggtgaaagatgaacagggtattgttcgcaccgttccagattctaaaggtgagcacgatgataccgaagagcattattaa

SEQ ID NO: 49590 - DNA, 291 bp, Acinetobacter baumannii
atgataccgaagagcattattaataaccgcttagggttttatggattagatgatcttgaacagccgcatttaatagttgagccagaaactccagaagtccagcgtaaacaattggaacttcgtttagttagattggtccaagagtatcaacgcaagggtttagatatcgattggatatccattgacttacttaatggtgtagatgcgcgagtaaacttaaatgaaactccaaacattcaagaacaagttacagacgctacaggcacccgcacaaacccagaagaactctaa

SEQ ID NO: 49591 - DNA, 177 bp, Acinetobacter baumannii
atgaacgatgaagaactattagcgcagcttgaatcggtagctaactttatgcgtggtatgcagttcgatactcgcctgccaagtgatgcaagagaagcactgcgtgatcgagcgattgatctggatgattttgtggaaaattattccaataaaaatatgcatcaaaatggtgcgtaa

SEQ ID NO: 49592 - DNA, 375 bp, Acinetobacter baumannii
atgattaataacgatataacaaacgcataccaagaatactttatgaattatgggtcttaccctgatgagctatttattaactttgcttctagaggtgatttggaaaggctagtgcttatgccaagatcaaataactccaaaataggagagattttcggaaaaccaatttatgttctacatatgcccaagccatatatgtggcttggtaaaggtgaattaagcaaggcaagggaaactatacttgatgaagaatgggaatcaagagctataccaatttatgtgccttcaattagaaaaaatgaaactgtggtaagagaaggtggttggaaggaaattataattccacgagagattatacaatttgattacccataa

SEQ ID NO: 49593 - DNA, 1677 bp, Acinetobacter baumannii
atgaccgcaatgcttccagaatggacaaccgcttgcccagactggcaggagagaattgtcaataaacagtcgctcatgccttgtgaaccattattcccacaggttgcagatgtagctgagcgtatatttaaagaattgattcttgttgatgtgatgggtagcccaaagatgggtgatgtcacattggaatgggtaattgagtttgttcgggcaatttttggtgcttatgacccaaacactaaacgcagactaattcgtgaattttttcttctaatttcaaagaaaaatacaaagtccacaattgctgctggcgtgatgcttgtcgctttgcttttgaatgatcgtctttctgctgaattaattatcttggctccaacaaaggaagtagcagacaacagttttaatccgattcgtgacttcattcgtgcagatgaagaacttagtgcaatgataaatatatcggagcacacaaagacagttactcatttaggcactggggcaacacttaaagttatcgcagcggaatctaacgccgcagcaggcaagaaagcttcaattatcttgatcgatgaggtctggctttttggcaaacgtgccaatgcagaatcaatgttccgtgaagcaaaaggtggtttggcatctcgtcctgaaggttgcgtgatttatctgtctaccatgtcagatgaagtgccatgtggtgtatttaaacagcttttagattatgcccgtgatgtccgcgatggggttaaagaggataaaagttttttacctcttatttatgagtttccaaaacagttgattgaagcaggtgagcatttaaagcctgaaaacttttacattaccaaccctaacctgggggcttccgtagaccttgaatacctgatttccgaattcaacaaagttaaagatgctggtgaagaatcgctaagagattttttagcaaaacacttaaacatcgaaattggcatgaatttacgtgcaaatcgttgggctggtgctgagttctggaatcaacaaaagcatgtttttagtctggatcaattgattgagcaatctgatgtcatcacattcgggatcgatggtggtggtttagatgatttacttggggcggctgcattagggcgtttaaaaaaggaccctcgcatttggtggctttggaatcatgcatgggcaaataaagttgctttggaacgccgtaaagaaaatatacctaagtatgaagacttcaagttagaggggtctttaaccgttgttgatcgcgtaggggaagacattgatcaattggcagcaattgccaagaaagtctatgacagcggcaagctttataaaattggactagatccgctgggtttaggtggtctactcgatggcttgctaggggttggcattcccgaagactcaatgcttgccgttccacagggtcacaagctcatgggctacatcctcactactgagagaaaacttgcagaaggcaatctattccatgctgggcaacagcttatgacttgggcggcgggtaatgcgcgtgtcgtaatggtcggcaatgggatgcgaatcaccaagcaagaatcaggggttggaaaaattgatcctttgattgcaacttttaatgctgtggctcttatgactatgaacccagaacctataaacaaagattacaacgtctattttttctaa

SEQ ID NO: 49594 - DNA, 591 bp, Acinetobacter baumannii
atgcctgctctacagaaatcatttagctcttttgaaatcaagagcatcaatgaagaaaagcggactttccgaggggtagcgaccacatcggaccctgaccgggcaaaagacatcatggtgccagaaggtgctgtatacgacttgcctatgccattcctttttcatcatgaggctaaagctccagttgggattattagctttgctgagattgggaaaaaccaaatcgaaattgaatttacctttcctgaaatcaaagaagaaggccgactaagagaccgagtagaagaggcttatcaaagctttaagtacaacctgattaaaggcttatcgattgggttcttagctgattggaacgatgtcgagcagctagaaggtggcggtttcaaattcaataaatggcaatggtacgagacaagtctagtcaccatcccatgcaacaaagatgcagtagcagattattcaaaagcatttgaggaacataaagccgcgttgggcaatttacctcaagacgtttcaggtggcgtttcatctgagcaaaaacacgtaaccgtaaaacttggtagcccaacaaagggtggagtatctctatga

SEQ ID NO: 49595 - DNA, 168 bp, Acinetobacter baumannii
atgaaaattgaatatttaaaacaaatgcatgacgccaaagttggtgacataaaggaggtggcagatttagcggccaatgtcctaattagattgggtgtagcgaagccttatgaagagcaaaaaaaggcaccagttaaacctaaaaaagaagtagaaccaatcgaataa

SEQ ID NO: 49596 - DNA, 330 bp, Acinetobacter baumannii
atgaataagtttttaattattgttattctgggctgtttgttgcttggatgtggaaaaacagaacaagaaaaactcaatgacgaaaggcagaaactcgacttacaagtgcaaaaaattgttagagatgtgttaaaagatggtgatacagctaagtttcgtaatcaatgggagctatgcggtgaggtaaatgctaaaaatagttttggcgcctatactggctttcagcgctacataatcacaaaagaaaaaatatactttgaaaatgattataactctgacccaacatctatagcagccttcaatcaagtttggaattctgactgcaaatag

SEQ ID NO: 49597 - DNA, 489 bp, Acinetobacter baumannii
atggcattgaatattttaaatagatgctctactcaatccgggtattcagtagcgtatagaagcggggttattgcacaagagcttgatggtggtgcaccccgctttaagcgccgtttaaaaaatgcttatcacacaattaatgttcgctgggtggtgggtgagattggctttcaatatctagacgctttttataatgtttggtgtgaaaacccaagccaaccattttatgcgaatttaaaagtgaacggtccagaatataaaccttatgagtgcttctttgtgccagatagctttcaactaaccgaagttgagggtttattttttaccttgactgctcaattaagaactcgcccaattgttgatagtagtttgaataaaattattgttgaaattgggaataagtcggaccttgcaaaattagtcaatccgcttgaaaagcttgtaaataaagatgctccagaatcaatggagggtattattaatgactga

SEQ ID NO: 49598 - DNA, 507 bp, Acinetobacter baumannii
atgactgattataccgctttttatttaaaccgttcaggctcagttaccccgatcgaatgtatcgaaatgtctcacccaaattttgatgattcatttagatatacaagtgacgacacttatggtgtgacggtcaagcatgaaaatgggggagctgatttttattatcaatatcaaccaatgacgattaagcgttcaacagtctcaaacaatcttgatcaaaaaatttcactaacaattggcgatgttgatgacaagttaattattgctgctgataaagcgagattgagtgaatattggaagagtagaccaaaagttaaatggcgattatatcgtgacgacaacttaactagtccattggttactttgcaaacactagaagttgcaagcatctcaaaagatgatactgggaactgcacttttgaggcagttgcaccagagttaaatagtgtaaagacaggggaaatctacgaccttgagcgcttccctttattgcgtggcttaatatga

SEQ ID NO: 49599 - DNA, 321 bp, Acinetobacter baumannii
atgaatattaatcacttactatcaagagtctggaaagaagattacacatgtaatgaatttgcatgtgaagcatggaaagacatcacaggtgaagatttaacattacgattaaatcggtttttaaatggagagggggaatttaagtcattagatgaaccaatctcgccctgcattgttttttttactaacggccagaaaagctcgacacatgtcgggcttttttttgaagacaaacttttgcacctctctttgcgtggggcgcaatttattccactcgaagtggtaagcatgcattttcgtgagacgaggttttacacatga

SEQ ID NO: 49600 - DNA, 2853 bp, Acinetobacter baumannii
atgagtttgaaacgagttgtaattgttcctgatcagtataagcgagaaacatgggcttatgctgatgtagaggacgtttcagcgtaccttgctcaacagtttgcgccatgcctaccggaaggcgcaaaaatctatcacggggcaattgctgagtcaaaaaatatcacccctaaaaataagagtgatatcgaaaagcttcaaaaactagaaggtgtcttttacgttgtaattgtgccaagggaaccaatctcaattgcaacgtggatctattatgcaattgttgcgattacgactgcctacacactatacacagtgcttactatgccgaagccgccgtcaccaacggctggatcctcaaacaatgaattagcacaacgatcaaaccagccgcgcattaatgggcgaatccctgacatttttgggagattgcgttcatatccagacttaattgcacaaacgtttacgacttatgtggatggggtggaaatagaggaatgtgtaatgtgtattggtcgtggtttctatcaaattttagatatgcgtgatggtgacacggatgtagcaaatatcgctggcacttcagtttcagtatatgaccccttcacatctattgtaggtgttccagtgttcagggttggtgaagaattcactcaattgccaaaatatgtaattaattcggattcaatcaatggacaaaccattgaacagcctaatgatgctaagatcgaaaccgaaaatgtatggttccaaagtccaaatttaattaaagcaagtggtgttgattttacccaatactttgctgctaacgacaaaatttactttagtggcgcagtgtacggggttcaggatgcaaatatttcaggctcaataatggtgaatgagaataacactgtaattattgagtcatcgacaaatattgataacccaaatctttataaaggattgcagctttcaggtgcagttgtgaacatcgaaacaacagtaggtgaccctcctgttactgaaacagagtctgtagttttatctggtcaatttgatgttgagagtgttaccaaaacatttatcagtggcggttatcattatgaaattattctcaaaaatccgcatgcagtaaatgcaaactgggacaagattaatggatcttacacacttaattctgatgtggtgttgaacaaaaatacaaattctatttctttagatgatatttatacaatcaacagcatatctagtgacactattgcattggttagcccttcatcaataaattccgattgggataaattattgacattaccaaaccaatcaacacaaggacaagctgctcttgtgcgttttgactcaataagctcaaagtatgttggctggtttaatctggaaatgtcggaagcaacacaagcagtatttaatcttttctttcctaacgggttgttttatcaagattctaaaggtggggtgtgggaggaaggctttacattagtaattgagctccaagcagttgataatgcaggtgtgccaattggtgaaatcactacaaccactcaaaacattagagcaaaaaacaagtctcagtttggccgtacactctatattgatttgcctaccactggttcatttcgctttcgtttgagtagaacaacaccaactcaagctggaaaaacccaagatacttgcaaggttaaatctgtttgtgggatggctgaatcaactattgataagtacggaaatgttaccgttgttcgctccaagaccgttgcaactgatggagcattgtcacttaaagaacgtaaactcaattgtctagtaaatagaaagttgccgttgaatggtacaggtcatttacaggttacccgttcggctgggcaagctttaattaacatagcacttgatgaatacattgggcgccgtactcttgatgagattgatatccctcaaattaatgctgagattgaaaaagtaaattcttactttggttcaagtgtaatgtccgaattcaattacacaattgatgacgataatttaagctttgaagaaattgcagggatgattgccagtgcagcattttgtgaagtgtaccgatatggcagtgtaacaaggttcaaatttgaacagccgcaagaaaatgctgttttgctatttaatcaccgcaataaggttccgggatcggaaaagaggacaacccgatgggatgacaaaaattatgatggcattgaactagaatacacatctgaccaagacgatgcacgaattaagtattctttatattgggatgaagcaactaaaaccacaaaagagggtggtgctgcaaaaaatcctttaaagatatctactacaggtattcgaaatgaagagcaggcgaaaactagagcttggcgtgagtggatgaaggtgctttataaggcatttctttgtgaatttgatgctcttgatgaatcagagctgcttttgagaaatgatgcaattttaattgcagataatatgggggatcttacacaagatggagaaattaggggtgctgagggcttatatctaactacttctcaagcatgtacttttgaggtcggtaaagactactatgtttatgtacaactaccagatagaacagttgacatcatcccttgtgtagccggtgatgatgaatattcaataaagcttttacggactccactgattcctattgttattaatccatcaaactatattcaatatccactttataaattggttaaggctactgaggccaaatcttatatgtatatgcttgatgagagcacccctagatcacctatgacaaataaccttattgcctctaattatgactcacgtttttatcaacatgatcatgattttgtctaa

SEQ ID NO: 49601 - DNA, 1788 bp, Acinetobacter baumannii
atggcagattacctaacgcctgaaaagttagaaattgcatctttaaattgtgacagttgggagaaattttttcacggcactgaacttgaggaggtagttactcacttagggaaagttttcccaacactatcaaagatccttaaactgttttttgataatggtttatttagaccattttcaactgaatctgaattacttacttatatacctgctaccactcctagtgccgcatatgcttttgacacaaagaaattatatttttggaatggtacacaatggcttgatgagggattaagtcccttggatcaagcaaaagcatacgctgatgcaaatccaaatttcaaaatccagactatttctggatcgatcgactttaacactaagaagaaggaaggtcggtacaaaattaccaccattgattttaataactccactaataagccaccttttacagaggggggtatattaatagttgaagggtctggtgaagattactttacaaagcaacgtttttgtacttctaataatcaggaggcggttcgttctttaaaaaacacatggtctgcttgggatattgtaatcaaagctggtgatttaaaggcaaaaccaattacagctccaatcgattttaatacttataagacaccaggcccttatacaatcactacagcgatacttatccaatgtacaaataaaccacctgttacagctgggggattttttgaagtaaaaggtacaggggctgactatctaacatctcaggaatttaagtcctacgacaatattgatgcatcacgtgcacttacaaatgtttggggggcgtgggatacatttataaagtcaatagatataaagccaaaggtggttgcagcagcaatagattttaatgcctttaatgtaccggggccttattcaattacaaacaatgttcttgccacgtgtacaaataagccatcaacaacattcggggggattttcgaaaataaaggtactggtgcagcctattacactcatagaacatacatcagttacaaaggggagtttttctatcaagcccttgagactacgtggggaagttggaaaaaagtcgcaacaacggatataacagacaaccttgcccaacaaattgctgcaattcaaacaccaagtacaggcttaactggtaagaaatggttggcagttggtgactcaattacagttgggttgaatgccactaaaagttatgcagatgtgcttgctgaacgttacagtgcaacattaacaaaacatgctacatcaggggcttggattagtgctggcactggcacaattgcaattcccaatatcctatctcagacgtatacatcattacctgattcagcgaacttcgattttattacgattgcagctggaacaaatgatcgaattaatggggtagatggtaatcttggaactccagatgaccgtactacagcaactttttgtggagctctacatactctagctgctggtttaaaagctaaatatccaaatgcgcgcatgttgtttattactcaaacgccacgttctggcttgagaacaaatacaacaaacccaacagatcttgataagaagtttaaagccatcaaagatgtatgtgattactactctattccagtttgggcgggtcatgaaaactttgggttccacccggatgacaacgctacttttaaatcaacttatatgccagatggcttacatccaagtgatgcgggtcatatttggtacgcaaaccgtttagaacaagcaatcttaagtaatgcaaaataa

SEQ ID NO: 49602 - DNA, 267 bp, Acinetobacter baumannii
atggcagataatcagcaaattattgatacatcaaccgctattgtagtgggcaagggggcaacctatggggggagtgtggtaggtgcagtttcagcatatgtcgggtcaattgatttagctttttggctcagtgtcatcattggtctagctggtttctttatgaactggtactacgccaaaaagaagaataagcgcgatgaaattgcacataaagcttatttggatagcctagaaaaaaagggtgactgtaatgtcaaacaagactaa

SEQ ID NO: 49603 - DNA, 513 bp, Acinetobacter baumannii
atgtcaaacaagactaaatatgtcgcagcatttttagcagcttcggctgctttttttgtgggcgtaaaaaacgatgaagggtttacatcaaagccagtaattccagtcaaaggggatcgtccaacgcaaggccatggctctacattcaagccagatggttcacccgtaaaaatgaccgatccagcaattacacgtgcgacagcagacaagtggttgcgaaatgatgtggctaaacgtgaagtggcatttaaagattcattgaagggcgtgaaattatcacagactgaatatgacctttatttggatttttcttatcagtacggtgtgccaacatttgcaaaatcttcaatgcttaagcatttaaaagctggtcaatacaaagcagcttgtgactcattgcttaagtataagtacgttgcaaagcgtgattgttcaattcgtaaaaacggttgctatggggtttggttgcgccagatcgatagacatcaaaaatgtgtgagtgccaattcatga

SEQ ID NO: 49604 - DNA, 309 bp, Acinetobacter baumannii
atgactgaaagtgtaaccaagctaactccatatttagagtattggagcagcgggatgtatttatttaagtgtccgggctgcaaatatttacacccctttcatgtcaattcacatcccaatggcagcaaatggaattttaacggggatgtcaataatcctacatttacgccgtcattacttgttaatgatcatcatccagctagtcgatgccacttgtttttgactaatggaaaaattcaatttttatcagattgtcatcatgaacttgcagggaaaacggttgatatggtgcctataggagatctttaa

SEQ ID NO: 49605 - DNA, 369 bp, Acinetobacter baumannii
atgtggattgttgtagctgcaaaattctggcgaggaatcattattggttttctcgcttttttattggtcataactttggccctacttaatcacaaagaaggtcagctaaaagaagctgatcaaaaatgcttgtctcagatccagaaaattgaaaagaaaaaccttgaagcacttgccgaaaagcaaaaccaaatcaataaagtgagcgcagactatgaacgagtcaaagcagagcaaagcacaaaagtcgaaacaattacacgtgaagtgcaaaagatcgttgagcgtcctgtttatctcaatcgctgtattgatgatgacggggtgtaccaaatcaacagccttattaaagccggcaataccagctaa

SEQ ID NO: 49606 - DNA, 657 bp, Acinetobacter baumannii
atgaaggtgctaatttgtgatgacgaaccacttgcagtggaacgattgtcacgtttagtttcaaagatgggacatgaggttgtcgcaacagctcatcatggccaagatgccttggaacaggcacggcttcatcacccagatgtgattttacttgatatccagatgccgggtatgaatggtctcgtctgtgcggagcaattaagccaacttaatcctcgacctgccatagtgttttgcacagcttatgatcagcatgcattggaggcatttaagtcacaagcacaagcttatcttcttaagcccattgatcctcaagagctggagcagacatttaagcaattaacccagctaacacaagcgcagctcagcgctttgcctaaacctgagcttttacaggatttaaaaacacaacgtcatcaaattgctgctaaaacctatcgtggggttgagctaattcctgttgaaaatatctattactttttagcagatcagttcatccgtattcaccgtaatgcattggtctcgattgcttatttagatggtttggagctagtaagttcgggccaatatcaggttcgcttacgtggcttagatgaaagactttccgtaagccgccgtcatttatctacccttagagagcggatacaccaactttaa

SEQ ID NO: 49607 - DNA, 165 bp, Acinetobacter baumannii
ttggatgatttaaacacagcagcactttgtgtagtcggtgctatgacttatgtggtggttgaacccctagacccagctcaaaatacaaagtttgatcatgcgcataaagactatttttcaaaacagattgctgacttttgtgtagatgctgtgcagaaaaaatag

SEQ ID NO: 49608 - DNA, 906 bp, Acinetobacter baumannii
atgtcttattttgatatcaatcgttctggcgagttggcaatttttatacgggtggtcgagcttggaagtttttcagcggtagcaagagcgtgtaacatgacgccttctgccgtaagcaagttaatttctcgtttagaaaaaagactgggtgtcaggttactcaatcgttcaacacgtcagtttcagcttaccagtgaaggatgccagttttatgagcaaggcattcaaatactcaatgacttggacgaactggaacaatcggttaccgcaaatcatataccgaaagggcgaattagaatccataccagtttttcatattggacgcactttttattgccatgcattagtttgtttaatcaacgttacccggaaattgaattagaagctcatttgagtgatgaagtaattaatttggttgaacaaagaattgatgttgcgattcgaacaggacctttgaaaagttccaatctggtggcccgctcgcttggcagtacttataaacagtatgtttgctctcctctatatattgaaaagtacggttgtcctgagcatccagatgaactacatgaacatcagcttttagatgtaagttatcaacgccagaacaaaacctggttatttaaaaaagcaactcaggaaatcagcctaatcccctctaaagttttaaaagtaaaccatggcgaagcaattttacagttggcactggcaggtgctggcattgctcaactaaatgaattccagattcgaaatgctttacagcaaaaacaactcgtcaaaattcttgaagattggaatattcatgcttctgaagaatttcatgctgtctggattggccatgataagtatgttcctaatcgcgtacgtacattcttggattttttggtagagcatgcctctataaattag

SEQ ID NO: 49609 - DNA, 2151 bp, Acinetobacter baumannii
gtgaataatctgactcaactattcaatcgttttaaagcgaattcaattttaatttattgcctgcaaattttaattgtactcacaggcacaactttaggtttactttggttaggacataatgagctgatcgttcctgtgactttaggcgcgattgctgctgcacttactgattttgatgatcgcttaagtcttcgtttacgcaacttgctctatgtctgcctactctttttcactgttagcactattcttggttttttagcaccttataaacttttatttattttatatctttcaatttccagtgcctgtttcattttattgggcgctttagggcaacgctacgctaccatttcttttggtacgattttactctcaatttatagcatgtttggtttaggagaatatacacactggtaccaacagcctacttattttgtctatggtgcgttgtggtacggcctaacttctattttattttttattcttaaaccaacacttcctttacaagataaactttcacaaatttttgaagaaatttcagccttacttcaagctaaagcacggttgttcgacccggataataaagaaaatgttgaacagcttttatttgagttatcactacaaaatacacaagttgcgcaaagtcttaaccaaatacgcagctctctgctaactcgccttaaggcatcacgagtcagtaataaaagtatttactggttaaacttatacttttttgcgcgagatatacacgagcaggcaacttctaattatttacactacgagcatatccaacaaaattttagccgtagtgatctcatttttcgttttcagaaaaacctacgcttacaagctcaagcttgccatgatttagcccaatgcattttgcataatcaacaatatcagtcttctcaagaaagccaaattggcctaaaccatttggaaagctctttgaaagactggatacaacagcatccacaaaattttgaagttaaaaatttaaagctgatttttaataatttaaaaggaatgcatgaacaatttgaacagcttcaatatgctcaaccgtttaatgaaacgctaagtcagaacaagcaagaacatctcaatttactagatgatgatatccaaggtttttcagaccttgttttaaaaatccggcagcaactgacgccacaatctgccctatttagacatgcaatacgaattgcggttgtatttgccgcaggttatgccatttccctcctaccttttgcccaacatggttactggattttgctcaccagtttatttgtttgccaaattacttactttgcaaccaaaagtcgtttaaagcttagaactattgggactttactcggcgttttattgggtattcccattttatattttgttcctagtattgaaggtcaactcattcttaccattatttgtggagttagctttttctacttacgccagaaaaaatatgctctggcaacactgatggcaaccttaatggtattgctcattttcaacttaaaaggtgcaggttacagcattattttacctcgcctaatcgacaccttattaggctgctttattgcttggcttgctgttaattttatttggccagactggaacttccgtaatattccaaataatattaagaaaagtagccaagcaactttcgattacttcaatgtgattgttgagcaatatcagcacgggaaaaatcaagacattgaatatcgtagaattcgccgagctgcacataacgcgcaaattgaactgtcgaatatgatttcaagcttaagtgccgagcccaacccaaatcccgagctgattcattacgcctttcgttatttggtttatagccacagccagttgagttatgtcgcagcattaggcagccaaagacaaaaaattgatgatcaacaggtattacaacttttactggattgtcagcaaattcttaaacaaagtttatttgaacaagctttggttaactttaattttcttgaacagactttaaagcaaattcaaagtttaataactcacgaacatttttcagagaactacacacttgtcttaaaacagatgagtttattattagaaaccttgcctgaactcttaagcttaaaaggcaaacttttagagcatgaaattaaatag

SEQ ID NO: 49610 - DNA, 588 bp, Acinetobacter baumannii
atgagcaatattttagtcattaatggtgccaaacaatttgcccactcaaatggtgaattaaatgacacactcacgacattagcaacgaatcatctcactgaactaggccatgaagtaaaagtcactcgtgcagatagcgactacaatgctaaagctgaagtagaaaagtatttatgggcagatgtcgtaatttatcaaatgcctggctggtggatgggtgcaccgtggaccgtaaaaaaatatattgacgatgtatttacgacaggtcatggttctctttatgcaagtgatggtcgtagccgctttgatgcctcaaaaaaatatggttcaggtggtttaattcaggacaaaaaatatatgctgtcgcttacttggaatgcgccaatggaagcatttgacgatgcggatcagtttttccatggcgtgggtgtagatggtgtttatttaccatttcataaagcaaatcagttcttaggtatgagtaccctaccaacatttattgtaaatgatgtaattaaaatgcctgatgtagatagttatgtggaagcatacaaagcacatttgaacacactatttgcagcagcctaa

SEQ ID NO: 49611 - DNA, 1788 bp, Acinetobacter baumannii
atgtcaattgattggggcgcggcaggcgttggggtgttggctggatatagcacttttaagcaagaacaaaaggaaaaggagcaacgtgattatgagagagcacggcaggacgaagcagaccgccaaaaactcgaattacacaatcaagctgtaaagcagaatcagcagacccttgataccaatgctaaggcaatggccgaagccaatagacgcgagctacttggtcagaaaattggacaatatcaacagttcaagcaagcaaacaatattgatgccgctgcaaagctatacattgacacagctaattctgacaatattgggcgagaaggttttgatcctaatcacgccttatcttatgtggtagatcctaagactaataccgcaacgattaaccttgttgatcgaaaaactggcgctgtcattaaggaggctagaaaaggggtaggcattgatgattttattagtgcaacataccagcaaatagatccgacagcttattatgaaactgcgagaagtgctgcagctaaacaggcagaggaagaacgtaaaaatgcctttgacctgcgcaaaattggcattcaagccatgattgatatgcagaaagataataataaatttaacaatgaacttgagttggggcgtacaaaatttgggtatgactcaatgctggagcaataccgccaagaccaacagaattacagaacgaatgtaactgtagatggccagaaatatgcagccgactcaaagagtggtggcaaagggggaaactattcaccccttgattatgcgcgatttaccatacagcaagaatcgaagggccaacactatggacctaatggtcagttattgccgtcttatgatccaaaaagcacggcaagaggtgcgggacagtttacgcaaggtacacgtgatatggttttaaaaaactcaggtattgatgcgtacaaatcaccagaggatgcgctaagggctacagtgtggttacaaggctataatgaacgacttttagggggtgactctaaagcggctgcaatagctcactatgctggtgctggtgaagtacaaaagtggatgaaccaagcgaaaaaggatggggttagttgggaagctagaataccccctaaatatcaagagcgagcaagggcatttgatcaaacgttcggttcgggcaaccctttgcctcagcaagaaccagcacaaccgacaaaaaaccgttctaattttgccactggtttgacgtctaccgtcaataaaaatgtgcattccgttgccacgaaaatggccgaagaacttggtttggccaaaaacaccgctggtttaattggtgggttgtcatccgctcaaaattcaattgttaaattcactacagccacatcaactgctaaacgtgcccaagcttttaacgatgtttattctgcagttttaaactctgtatcgaccacggaaaaaggtgcattgatgacaccccagcaacttaaaggctacgctttacaaaaagctgctgagcttacaggagcatcaagtctagccgaggctggtgaatggattaataaaccaaatgttacggccagacagaaggcagaagctaacagacctaaagcaaccatgagcggcgatgatattgataaaatcatttcgggtagtgttgaagaagctaagccggcacaaaagccaacaccaaaaacaggaacagttataaatcctttcatgaccgaaggcctacaaaaagcattaaataatgcaagccctcaaaacggaacaccgttttacctacgcaaaacaagctag

SEQ ID NO: 49612 - DNA, 777 bp, Acinetobacter baumannii
atgagttgggttgccgtaggagttggcgtaattggtatggtcggaggattggctggtaataaatctgcccgaaaaacccaaaaagaagccttagcacttgagcgccaaaaatttgagtacgcacagaaaatccgtgaacaataccaaaatcagtacgggggattaatcgatttagttattgccgatgctgaaaaaggggtagatccagatttaggacgtgttactgccgaggcgtctgcagatacagctacttcatttaaaaatgctcaaactgctttagaaaaccagcaacaacgtatgggtatcaatcctaacagtgggcgggcagattcagctaatcgacaacttgctttgaatcaggcagttgcgactgcaggtaatgtcacacatgcacgaaataccgaaaggaaaaacgcatctgatcagacttggaataggcgttttggtgtgtatcaagtgggtacaaatctaatttcaggtgctcaaaatgctgttacgaactcaatgagtagtttggctaatacattaagtaatagtgctggccagcaacaacaaaatagcagtcaggctatagcaggaggactttcaacaatcactcaaggggtgcttggccaattgaatcaaaacactcaaaaacctgccacaaccataccaatttcagacattggaaatgcaacacaaggcttgaaagtaaacggcacaaacgtaagtagcggtgtgatttatgacgatacaaaaggcataacgcctgcaatgtcgggttcatttttaagttaa

SEQ ID NO: 49613 - DNA, 471 bp, Acinetobacter baumannii
atgaatgaactcgtaaatgttcatgaaactttaagcagcttaactggtgcagacttcgttgactgcctgtatcagttgcaaaaccacattatcgctaatgcagatccttctgcgttaattgatccccctattaagcactattttgcgcccaatatttacgtgcgtgagatgtatgcgcctgcaggttcggtgatcattggagaaatgcataagactgaacatatttgtacggtcatttcgggccgcgcgaccatttattcagagcacggaaaagttgaaattaagggtggccaaacatttgtatcgccaatgggggctaaacgtctttttgtcattgaagaagatctagtttttcagaccgttcaccacactaagcttactgatctggatgaaatacgcaaagagctacttgttccggatgaagaatttcagaaattcaggctggccaatagcttggaggtgaacttatga

SEQ ID NO: 49614 - DNA, 708 bp, Acinetobacter baumannii
atggccgatgaatatggttttagggtaattaattcggatggttatgttcaaatcgattcaaaataccgaaatatttttttactacgaaccattactgtaactcaagatcaatttaaaggaagtttcctagatgtaccaatcaaaaaagattgttggtatgtctttagaccaatgggtaaggacccaaaaccttatatctggtcttttggcccagatagaacatatgctttaagagttacaagcccatgctatatatatgaatttggctttgtagatctatctaaaggaagtggttatggtttgcaagttttaaatgagaaaggggaaaccgtttttcattccgatttcaggccacttaaagtcattggtcgggctactgcaacattaactaatgatcaaatgtttagtcaggaaccacagcaagtttatgaaactttctttaaaggtattaaatcagtagggatgtgtttaagtgtctcaccccaatcatggatgtatagaaattatgcctattataaggccatccactttgcatgtgagtggcttgatattggtagcggaaatggggcaaaagtaacactacattataatattgccgctacttctggcgcatatatgcatcttggtaatgtcaggggttccagcggcttagatgcagcatttggaacaaaatatgatgttctattcgttgactgcagttatttataa

SEQ ID NO: 49615 - DNA, 414 bp, Acinetobacter baumannii
atgacagaagctctatatggttgccgctgctgggatcctagcggcaaccttacgttagatattaccgataggattaccagaattatttacacgggtacgatagcctttccaatagatgcacctacacgatggccaaacggaacattagttgatattagggggtcagttacggttgaaagtgaggagtttttaaaaggaacaccttttgtttcagcaaaaaactttaacttctgtatcggtgacgttgggaactgtaatggctttctttctatgccaacgcggatttattacgaaatgacaagtccaacaactatgttggttggatttgtcgcgtttagcccagggtggagccaaaacgatattcggtgggattatccatgtttagatattgatgtgatggtaggagtgtattaa

SEQ ID NO: 49616 - DNA, 9150 bp, Acinetobacter baumannii
atgactggcacaacgaaaaatgcccttctatctgagttgagaaagaaaaaactcatcaccggttcgtcaacgaactctaaaaccaaaagtgtaggtgcaattcccgttgttcaggataaaaccctgcagacgtggattaaaggtattaccaaccaactacaggaaattgataaatcatttgttcgctctaaggatctggccaaaactggtctggttgatgttgacggtaacggtaatatctctctacctaagccagaagataactctacaatcgttcctaaggcagttgaagaactaaaagcaacaggtgcttactctacagtcacgctggattggaaaactccaaagagtaagttttttggccgtaatgaagtgtatcgatcagaaaagaatgacttcggtactgcagttaatatcggttcaagtacaggtgatgtttatactgactatgtgggtaacaatagcaaagcttactattgggttagaacaatttctaaggcaggggttcaaggggcactttcatcatcggtctatgctgaaaccagtattgatattgattacttactcgaaaatttatcagaacaaatttcggaaggtttattaagtcaaagtattaaagaccagcttgcaggcattgataagaatgctgaatatatcaaatcagttgaggctcaagtccaagataaaattgcagaagtgaaggatataatcggtagagatattatcgaatctaaactttctgtaagccagcatttaaatgatgctcagataagaatgagcgaagctgaaattcgtattgaagactataaaaaatatagtgaatctattgttgatgctgctaaaaaattggcctcagaagcagatctagatttgcaaaaatatattaaagacgtacaacagtacgctaatgaccaagttgcactattaagtgagagtgttaacgaagttagaaaacaggctgaactagctcaacaaactgctgacaatgaaattattgaacgcaaagtacaagttgatgaagcaataactaaagcatcaaatatgattgatgccgctaaagtagaaatggggaaccaaaccaacgtactcattgacgagaaattagttccaattaaaactcagaatgaaacagcaataagagatataaaaaaccttggaacccaatatataaatttagataagaaaattgatgcgggaatattaaatgaagcaacaatccgtagtgataaagacgatgcattatcacatcgcatggatgtacagtttgctgaatttacaagtgaattaactaaagctaaaagtacaattctgagtgaatctgaaacccgtgcaaatgagaaccaggcactaactctacaaataaataatgcaacgtctgaaattggaaaaaataaatcctcaatttcagaagtacgacaaacgctttctgactttcagacttctactgcatcaaaatttgactctattgaaagtggtattacaaccaacaatggaaagatccaagggcaaattgcagaagtagaaaaaagtgtaagttctttggagggtacaactaatacaaaattatccaaccttagctcatcactaaaagaaaccgacgatatagcaaaaacagccataaataatgcagcaagagcgcaagaaactgcgacaacagcggtaaataaagcagaggcaaattctcaaaagattctaacaatttctgcgaaagcttctgggcttaataatgctattcaagcgactgctacagaagattttttaaatgaatggaaaattacgagcggagtcaatgaattaaggcttattgatgagcctacagcaagaggtggtaaggttttacgcgcggggaataataatggtaacgatactatttgggcacactggaatgcatttataccatttgatgagaataagacatatgcgattaagtatcgctatagacgtgtaaacggtaacggtggagtttatgttggattggctgttaaagactctacacaagcatcgtttgttaatattgcagataaattagatacaacattaggtagttcgcattatgcggaagtaaatgcaatgcctgcccttggtgactttgttactggtatttcttatttcaaagggcgtgagctagctggtgtcaacgtaggttatggtaagtctccactacaaaacccacgtaagctaccaagtaaggcggcctttataagtgttatgtttattgcaaactataatgccttcgctggtgaggttgatattgattatatcgacctagtagatgctgaggcggccgttataggatttaatgcagaagccaaagcaacagatctatttaaaacagcatcaactgctacacaagtggttgcagatagatcaactttacttgagacacaaatgcgcgatgctcagggcaaaattgaaagcaattcattagcacttaataaaacagctacaaagagtgaattagatgctgcaatggggcaagttgcgacaaatattaatgcagctatcaacggcttaactttggggggagtaaatgccgtagcaaactcagaggccccacgtacttcgactgcggcttcaaacaaagaatacttaatgtatgaacgcagcgctgagctaaaggcgttctatgatgagaatctaaataagcaaattaccatctcattcgagatgtctgtgccggttgtcggtccagttcaagtttattcatcgaacgcttctgctcacacatttagcgtaactgtaaacgtagtaatccctaatgaatggattaaatacattgttacggtaattccgaagcctcatacttcgagtacaacagtatcaacaatagaattttacggaacttatggtagtggccgaatcccaactattcgcaaactgcagattgaagcagggaataaagctacagcttggagtcctagtccacgtgattttaatgcacttattgatgctcaagcacaggcaataaaagaaacaaatgcagaagttaaaaaacaaggcgatacaatctcatcgcaaggtgtagatcttacaaagctaaaaaacgacttgattactactaatcaagaagtaagtaaacgggctaccacagaagctttaaatattactaatagcaaagttgaagaccagcaaggcaaacttaaagctgttacagagcaagctacggctctatctgctagtttaaagcgagttgcggctgcaggggcaaatttactcatacagtcaaatgtagtaggtacatataacggaagttcatatccgcatcatcgttataagttaggtgaggattgggaagttggagctacatatactttgatgtggtgtgccgagcatcaacgaaacaatacagatacaagctcatctttatcagtttatgctggtggaggtcagcaagttttacaatcggttgttaatacaaacggcaaagttattaataaaattacatttgttaaaaatagccaagtgcttgaacaacgtgttttaaatttctacatgatcaaccgcccaagcgcagcgcaaggctctatcggaacagtttattgggccgtgctcgttaaaggtgacttaatcactactgaatcatggatccctagcgcatatgactataacgttgcagttgaccaagttaatgcaaattttaatgatttcaaacaaacatatgtgactgacaaagaagcgctaactaagagaacatcaagtcttgaaactggcctttcaaatgcggaaaaaaatatcgataacaccgcaaaagcactgcagaactatgccacgaatgcgaagttagatgaggtgactgccagccagactaaccaactcaatgctgaaattaaaaaagtgaaagggtctattgattcagctagtgatagtaattccttattgcccgactttaacttaaaaaatccagaagactggattaattactataactatgatttgagccagcactttaaaaaaactacgactggtaaggtaggtaatactgttttcagaaaagatacctccaatcaagcaggttgctgggttaatagccgcaaagcattgccaacaaatcggccatataaagttagcttttgggttcgccgaagcgcggattcaacaggtacatgtaatattactgctatgtacggtaaggctgacgggattttctcaaatgccgcaattacagcagtgtatatcgacacaaataaaatacctgctgacgagcaatgggtactaattgaacaggtcgttaattttaatttgcatccacaagttaagttgggcttttcaattggacataatgctactggtggctggtgggaattacagggttttagtgttgaaaatgtagtgactgaaaaagatgtagattcaacgcttgttcgcgctacacaactacaaagctactcaacaaaggtagacaccacaaaagcagttgccacggcaacagatgcaatggaatcaaaatttaagcaaaagttcgggaatatgtggacggatagtacagctactcttgatagtacccgatacacaaaatctgaaacagatagagcgattgcagatgaaagcaaaactcttaaagcagccttatcccttagtggcggcgacaatattattaaaaatggtgatttctctaaacctttagatggtacaaattggcgtcagaatgcagttgtagctggtaatacttttgagatattcaaagatgcaaacggagcaacttatggaagatttacatcttcaaatacaactaccatgtttaaaggcgtagttgagcaaattacacttgctgatgggctagaaatagatcaaacatacacattatcatttaaagcaaaatctctaactgcagcacaaataagcttattgctaatcattcatagatatgatggttctagcaataatcagcttcaatcatcgtggcaactctacacagacaaagagactatctgtacctatacatttaagacgaatgttgccaatcttagatctataaatatcattctttatgcaccaactggtatagcaccagactttttaattcgtgaagtacaaattgaaaaaggcgaactcgcaacaggctttagagttaatcctagagagttaaaagatagcctaaatgcgactgcagagaagctggaaggcactagggttgatgttaagaagcagggtgaatcaataacttcactcactgaaaactacaacattttgaaatcaaatgttgaccttaacaaacaagcggtagatggaaaatttcaggaaattaacaccactattagtaataatcagcaaaatattactcaatcaattaatagtttagattcgagttataagcagttaaatcaagatcttggccaagtaattaattaccgtgtttattcttcgggttggaacaatgattttactggaatcaagaacttaaaaggtgaaataaaatccactgcttcaaatcgaggattctcagttcatgtacttgctgccaatggaggcatagcttcatctactcgatacgatacttatggtgatgcagctaatgctgtggctatgagtaatgcattacaagcccttccaaataatacatatgtgattattacaaattatgatcatatcgcactaaatctaaaacaactaaaagattcattagttgcggtaggcgcgaatccattaactattgatcagtttactggtcgtgatgcttatattctggtaggtcagaagggtattggtgcagggcgtggaattgagttacatgcaacacctaattctggcattaatggtgctaaacaaataatgcttgctgttcaagtagtaagtggtgtgccaataggtttagccaacaatagcggcaacttacaaaaggttattgaaaatcaagctcagatgattcagcaaaaaatcacacgagctgacgctcaggaggtttttggccaagagattaagtcatattcagcaaaaattgatgcaatccagtatgcagaagacaactggatactcgcaaatgatgagccaaagtcagtaagtatttcaaccggcactaatagaactgtggcgatgtgggatctaatgtataaacataaagatctacctatacagaaaggtgatccaatcgttttacgtcttcaatatactgcggctgcaggtttagttggagctacatgctcaatccagtttcatggagctacttattcaattggcataccaagttttattgttgcagcaagtggggaagtggaattaaaaggagtattccctagtgatgttaaagcgacagctttcgattttgtaccactagggctgcgctttgataatgcacctgcaggcggattatttacagttacaaatgcatttattagccgtggtaactcagcaccaaattttaaaggtggctttaaaaccacactgaaacaaaacgcccaatttgtagaggatactttcgttagatcggaagcaaataaacaagttattgctcagcaaattcagcaatatgatgcatcaattccagaaggaatggccactgtagttaagagcactaaagttacggcagataatgctgcgaaagacttagccacttttaaatctgtagattttaaggagcttcaaaacagcaccaataatttaggctctgcacttgaaaataccactatgctggcgatgatgataactaacggaaagctgctctatggtgatgttaattttaaaaatgggatgaacaatgtcgggatttataacaatcttggtaacggcaatgttaatgtcacacgtgaagctaaaaatgcggataatccgacaacttcaactcatgaattaaaaattaaaacgattggtgcagctaatccaaattatggagggttccaccaaatattttactcacgaccaaatgctattttcattattaaatacttaattaagttacccgtaggctacaagctattgcctgcagcaaatttaattggcgatggtacagtcgataagtttattggaaatagtgaaggtactggaaagtatgaagtttatattcgtatggttaagtgtggggcaactggaagatttgataccactggatttgtacatgtggcaggtggcccagtacctacaccacaaagccctctagagtggtatttagcacaaatagaaacttacgatgtaacagactatgcgtctgcagatccgaatctacaagatttcgtatcacgtgcttcggattccttaacaaccttgactaattttaaggagtcttgggcggcaaaactaacggagatgtcatcaaagttagataaaacaaatagtgcatatatccttaattccgatctgacaaatactaatattgagagagctattgcagcttcttcaagtcaattaaaatctgaatatatagtccccctgcaacaaaatgcagaaagcctaaaggaaaacatagtaactaatgttgatttaaccaatttaagtccagatctctattatcccgttgttttcgggctatcgacagctaaacaaagatataactttaaggtgttttgtaccctcggaggacaaaacaacagtaatatttcttggtctactcatggttctcgaacttttggtctaaattgcgagtggagcgtttcagcaaatggatggggtacacaagctgaaaatcgattaattgagaagttttcatttagttggactgctcaatcacctttactcaatattaaacagatgtcaaatgcatccgtggaagctgttttcctgcggggaggtgcaaggtatgatatttctcactataaaactctaacccccgcagttaaaaccgagccttacacagcctttaatcaaactattgaacctatccaatataatgcggcgcttgttccagttcctttttttgcagaaattgtaaaagcgcaagatactgcaggaagcgctgctcgttcagttgcagacattcaaaaggattacatcacttcatccaaactaaacgaagctttcgcatcatcaacagaaagaatgtctgctttatactccgcgaacagccagacaattatgacctcagttcagagtacctatgaaaaagattggctaaatagaacgccaagcggaaatagagccgaactaaggttaatagaagatcaaagctgccgtggcggatatgctttaagagtgggtaacaacgctggaaacgatgaagcttggctaaattggttctctaccctaccaatcgatgataataaaatttatcgcattaagtttcgatataggagggtatcaggtgcgggaagtgtttatgtcggtgtaacttgttttaatgcctctaagacgcgatttatcaattcagcaaatgctgaaagtaacgatatttcatcaagtcattatgctgatgctggatcttatcctgctttggggacttgggtaacaggccttgcctattttaaaggaagatcagcaggtgcaagtacaggaacaggctcattaactaatccgagaacatttgccaataaatctgcattttttaccccagtatttatcgctaattatttaaatcagtcaggcgaagtcgatcttgattttatcgatattgaagatgctgacaatctagctgattttgagtcttttaaaactgcttatgcatccgacaaaacagcttacacaggtgttattgaaacgctaacaaacacctttggcgataaggctattgggcttacagaacagaaaaaatttgtagatggtgttaaaggggttgcaaccttcttaatcaataacaatggtattgcaactggatggggtactacctcagagttagtgaatggccaagttaaaactgaatttggtgtttattcttcaagattctttgttgcaagcgatacaaatgcaaaaacatttccgttcatcgtggatggaaacaacgtaatcatgaatacagcaatcattaaagatggatctattcaaagtgccaaaattggcactttaggcgctgacaagattacttctggtgatattgctgcagaccgaatgaaagccaatattgttgaagcagcccgtggccaatttcagtcattaagttccattactgcaacaattggccacttacggacaagtgaaacgggtgcccgtatagaaattgcggatcagttcattaagtcctttgataacaatggagttaaacgagttcaaataggtaacttagaattatga

SEQ ID NO: 49617 - DNA, 1677 bp, Acinetobacter baumannii
atgaaaattaaggtgtctaactttttggcaatgttcccgcgtattgatcaatctaagctgaaagatacggctgcaacactggccaataatgttgatgttacgagcggcgttttacgaccgttctataagattacaaagcaaactcagcttaaaacgataggatctgccacaaaagattttagattctataaatttccagataaacaaggtttttttcaatttcctagttacgtggacctaacctattcaccaattgccgatgatcaatatagacgtgtctattggtctggtgattcacgcgatgcgggttatattctttattcgtacacgcctctgattaccgctggtacggaatacaaccctaaaaactggtatcgccttggtgtgcctgcgcccactcaagccatgattattgatagccaaacaaccgaatatacagaagaagaattagaagacctttctgacgaaagccgtatatatgtttatacatatgtgactgaaatcggcgaagaatcggcaccaagtccagccagtccattggtgcacataccccatgacaaaagctctgttactttgtcaaacatggtgctcgatacgaccgcctctcaaggccgaaatattaagaagaaaaggatctatcgttctttaactaattctgcaggtctggcagatctttatttcgtagctgaaattgacgtgagccaagcaacttatacagatactttaagtgctgaccagttaaatacagcggatcctttaccttctattacatgggatgcaccgcgcacaggattaagtggcctaggtgtaacagcaaaaggggtgaactatgcgtttacgggcaaaacagcatgtttttctgagccgtattatccatatgcttggccacgtgattatgaagtcactttgcaatacgacatagttgctatgggtcactatgaaaactatgttttgtgcgcgaccacgggtacaccttatttgatttcaggcattaacccaaattcttcaacggtcgatgaattgccattaaatgaggcctgcgtatctaagcgaagtatggtgagcatgtctacttgtgtttgttatgcaagtccaaatggcatcgttatggcctacggtgcgaccgctaaactcgttactgagtcattctttgataaagatacatggaataagcttaatccatctagtattcatgcgattgagtacagaggtaaatatttatttttttatgacaatggccaagagaaaggcggttttatttttgatccgctacaaacagagtttggcataacaaagttagacttctggttccctgcagtaacccgccatcatgagactgaacagatctattttcttgataaagatctgaatgtttacatcttggatgataaggataataccaaccgtctaccatacacgtggaaaagtaaactattcgatgtgggcggggatggagcacgatttttagctggccaagtgattgcagatgactataaaaacctaaagattagaattttttgtgataacagcctcttatatgaaaaaatactaacaaatagaaggcctttccgattgccaaatcattcaagacattttgattggcaactggaaataaccggcacggaaaaagtgagggaaatttgtctagctgagtcaatgttggagttgaataaatga

SEQ ID NO: 49618 - DNA, 576 bp, Acinetobacter baumannii
atggctaattatgaagatctagtctcatgtgtggcgatacatgtatcgccatgtcctgaacaagcaattatagatgctttaaagcatattactcgtgacttctgcaaagagtcgctggtgtgggtgcatgactgtaaaactgcaacccctgctgcattgaatgatcaattcatacttgaacttgatacgccagaaaattcaataattgtgcatgtttggggaatagagggcagatctggcaattaccacacaaatcaaagtgattacttcttttcattgccaaacaaattgacattcagtaaagcagtgaaggacgtaaagcccattgtttctttgatgccttcgcaaaagagcaatgagtatcctgattttataagcgaatactttgaagactatatcattgctggtgctgtagcttatctgcagttacaaccttacagggaatggtcacagcctaatgcggctggtccacaccagcaaaagtatttagatggcattcaaagcgctattcaattgcgtgataatggcttgaatctggcacgaaagcgggcgcgtgtagtgccacgttatttgtaa

SEQ ID NO: 49619 - DNA, 657 bp, Acinetobacter baumannii
atgcctattacttgccaagctttgattgatggggttcaagcaacccaactaaatgattctgagaaaattgcatggtctgaaaacctgctaatgtcagcactaaaccaagcacttgctatcttggcgcttgttcgtcctgacgcgactgcaaaagtagctcagcttacatgtgctgcaggtacacgtcagaatctaccgcctgatggcctgcgtttgctaaaagtagtgcgaaatctatctgcagatggtgctattggccgagcagtacgcctagtaaatatttcagatttagactctatctcaccaaattggcactcggaggcacctaaagattttgctaaagagtacatgtttgatgagcgtgcaccgaaatggttctatgtttatccaccagcaaaagcgggaaataaactagagattgaatattcacagcaacctatggaaattactgacttaagccagccgttaccagtggatatggtttatatgcagccattgcaagaatttattctatataaattgctgtctggtgaaggtggtaatggtacaggtatgcagcattacaacacaggcatgtcactattaggcgcaaagctgcaggttgaccgctttgctaaccctaataccgaaaccaatagagcaggcggtgccggttaa

SEQ ID NO: 49620 - DNA, 537 bp, Acinetobacter baumannii
atgagtaaaatcaatcttgaatcagaaactttagttgagtgcttattacgtcgtaagggcggtacaaaagtgccttttggccgtcacggatcaaatcatacggtatataactttcagccaattgatgctaatgatcctgaatcaccacatgttgcagatgttccaaatgaggaccattacgagcgcttattatctattcgtgaaggttatagagcctataaccatgaagactacgaacctacttatcaaatccctgcagctaatccagaagcccaaaattttgattcaaaaaataacatgcacgacattctttccgtagatccaaacacagtcagcaatgattggctggcggcatttgcaaaagaagttttagagcttccacctaaaaccaaatctaaaattgctgaatatgcacttacaacttatgaagttgagctatcaccacaattaactgctaatgaaatgattcgtgaagtcttgaagttacgcattgatgaagaaaaacgttctgcagatgcagcagcaaatgaagaataa

SEQ ID NO: 49621 - DNA, 450 bp, Acinetobacter baumannii
atggctcaatacatcaccgaatcttttgaaaaaagaagtaatttcccgaccaattcacatgcaggcatggttatgtcgcatagatctgcagtaacttttaaagttgctgcagctttggcagtaaatgatttacttgtttttggacaattgcccgaagcatatgttcctaattcagtacttattgatagtgatgcaattgcgaatctagttgccgatgtcttattagtagattcgctcgacaaccctacatttacgcttgaactgtcaaaaggtgtgacctttgctaatgcagaagcaaaagaagcaggcctttctctagctgcgtctcgttttaagggtgataaccgccgattatttattgttgctaaggtgaaaacggctggtagcgtaactgcaggacagcagatcggtttacgtttggattaccgcttccgtcaaaacacaaattaa

SEQ ID NO: 49622 - DNA, 1146 bp, Acinetobacter baumannii
atgacaaacgctagtaacatcccttttggctcaaagttagctaaaaaacactttgcaggcgcgttgtttgcttcaacatgtcaaaaatcatggtgggttaaaaacatgattgagaatgcaaacagaacggataaaggtgcacaaatggcaaacgcgccagttgtggtgcttaacgaccttacaaaaggtgaaggggatgcagtaagttacgacatttacatgcaaatcactggtacaccgacattcggtgacgataacttggaaggtaacttagaaacgcttgacgcgttctctgatgaaatcactatcaaccaagtgcgtcatggtgttgacattggtggtcgtatgtctaacaagcgaactgtgaatgataaccgtgccgtagcaaaagccaagttaaccgaatggtttgctaactttttcgatgaagcgtgtcatatggaattggcaggtaagcgcggtattaacccattcttaatgcctaaaggtgttaattatgcggtccgtgatacacacacgttctctgactacgataaagaccatattttctatggtggccaagcgaactctaaagcgacattacaagcaagtgatacgttcggccttaatattcttgacgaagctattgtggcagcacaaacagaaggtggcgatgcagataaaaaagttcgtattacaccgttagataaaaacggtgaagacactttcattgctttaattcacccatatcaagcccatgatctacgaaaagatgccggcactgcaggttggttagaaatccagaaagctgcggctggtgcggatggccaaaactcaccattgtttaaaaataaactgggtgcataccgtgatatttatatcaagcagcataaaaaagttgttcttgatgatacttatggcgctggtggcaatgtacaagcggcacgtgctgcacttttaggccgtcaatctctggtagttgcgttcggtaatgcatctagcgcgaatttgcgtgctgactggacagaaaaaacagtcgatgtagatgataacaagcatgttatttctggccgcatgatgtttaacgtaaaacgccctcgttttgacgataaggacgttaattcgtttgcgcttgatactgcagcgactaaaccgaaaaagtcttaa

SEQ ID NO: 49623 - DNA, 1089 bp, Acinetobacter baumannii
atgtcagatctaaacaacataccgactactattgatgaagatggtaatgaaatcttaaatgagtttgagtataccgatgaagaaaaagccgaaatcgagaagttgaataaaaaggcagattctgacaatgaagacgaagataatgacaacgaactagacgatgattttgtagaggatttactaaaaaatgatgaggaagatgaggaagataaaaccgatgaaagcaatacaccgccttcgtcagaggaagatgaaaaccaagataatgacgatgaattagatcctggtacaaaaacggataatgaaaatgaaattgatgataaagaaaatgggcaaaacgaccctttagttgaagaagaagttgaacctttacctaatttcgatgaacagttagaagaactcgaccagcagcgccaagccgtacagggcaaagtaagtgatgcatttagtaaattagaggaactgggtgaacagtttgataatggcgagatcggccaaggtaagtatgacactcaaaaggctctattagagcgtgaaatacgacaatatgaaggggaagtatcaaagctagatgctaagtatgaagcattaagcaatacggcagcagaaaccattgatgcttataataaatcacaagctgataaatttaatcaagaattattaaatttcgtaaaaaaagaagaaaacaattacttgatgacgaatcctaacttagctggtgaatttgaccagttgttaaaagcgttcggtaatgcaggtgtatttgatggaatgtctaacattcaaattattgaaacagtaaataatacgttgcttgttcgccatcctgaattaaagacggttagacctaaaactaaggcagatccagaacaaaaaattgaaaaaaatgccaagccgcctaagccaaagcacgaaaatccgaagattccaacttctctatcaaacattccagccgttgaagtgaacgaccaaacggacccttttgcacacattagaaaactgagcggcattgagtacgaagcagctatccaaagcttgactccaaagcagtaccagcagttctttggtgaagaatttttagatcattaa

SEQ ID NO: 49624 - DNA, 201 bp, Acinetobacter baumannii
atggcagtgaaaaagaacacggctcttgaactagactttcttaaatggctccaacagcaggttgaatatattcaaaatgcccgtggaataacgttacaaagtgctcaattaacatatgaaattgatgaaaatggagagccaagcttcggtattgaggttgttccgttagtaattgaagccactgcagaaggcaaagtttaa

SEQ ID NO: 49625 - DNA, 2187 bp, Acinetobacter baumannii
atgtcagagtttgataaaaaagaccttgatcaagacttcttaaaaagccaagaagggcagtttttaacatgggcgcatggtttatatcagcgtgagattgatctgcagtctgaggctcgtacacagcgatctattgatgctgcttactatgatggtgagcagtttactcaagaggaaattcaggaatatgaaagacgcaatcaaaagccacgggtctttaacgaaattaagccgactgtagactggatcctaggcggtgaacgccgagttcgtacagattgggctgtaatgccacggactgaagatgactcaaagcaaagtctagttaaaagcaagctggttaaatacattgacgatattaacaatgctcgttggcatcgttcggaagcctttgctgatatggtcaaaactggtgaaggctgggtaagaatttgctatgaagcaaaccaagacggcgattttcaaatcaaaatcttgcatgagcactggcgtcacatcgtttgtgattcaaatagccgcaagccagatatgactgatatggggtacatgtggtgtgtaaagatcatcccgctaaacactctcattaattattttcctgaaaaaaagagtgaattgctcaaccttgccgaagatatggcagacctgcaggaagatttaattaatgaaggcatgaatgatgaactggcacaaactggtattttgggccgcgatggttcatttagcttagctcataacttaaaccagtctagtggtgagcgtgagggtgtgcgggtttatgaaatttggtacaagcaaaatgagcgtgtaaaggtactgcgtggtgaaggttcatataatggtgaggtattagatttaaaaaaccccgaccatgtaacgcttattaatcactatggctatcgtgccgtagagattgtaagagaacagatgtattgcgctttatatactgatgatacggttttgtatcgccagcgctcaccatacaaacataaccgctttccatttgtaagacgctatgcatatctcacagacaaaaaaggtgagccatacggcgttattcgttctattcgtgaccctcaatctgatttgaatgttagacgcaatagagccttattcttaatgtctactgcaagggtagtcatggataaaggtgcggttgataacgttgaggcgttagcagatgaactacagcgctatgacggcatcattgagaagaatccaaatacacatcttgaaatccacgaaggtacgaagcttgcaagtacccatttagacgttggagaacaaaatagctcgtatatacgtcagattagcggagtaacgggcgaaaaccgtggaatggacaccaacgccacaagtggtattgcgattcaagcaaggcaagaacaaggcacgattattacaacagtgctttcagatatgcattctttggccagaaaaattgaaggtgaactggttttatctttaattgaacagttcatggataagccaatgcagttccgcataactgcagacaatttaaaagacaaaatggagtttgtgcggattaatgaagatgggaagccagaaacagatataacccgcactcaagcggattttgtagtcgctgagcgtgattatcggacaacaatgcgccaagctttatctgagcagcttatttctgtggctggaaccattgcacagcatactgggaatccaaagcttgcagtcgcaatgctgacttcggcaattgaacttcaagatctaccagacaaagaccgcttagtgagcgctctccgtcaagaggctggtatgcctccgcttactgagacggaagaagaacgtttgcagcgtgaagaacaagaaagacaggcacttgagaaacagcaacaagaacaagaagaactcaaacagctagagattcgccaacaaatggcaaaaatcagtcagcaagaagctgcagcacaaaaaatagcgagtgacactaagcgagcagaggaaatgcagcaaatcaccatgcttaaagacaaattggaagtgctcaaatctggtgtttcaactgcagcggaagccgttcaagtaaacgggatcctgcctattgtagaccaacttattgagcatgttgacagcatacttaatttatcacctgcggaagttcaacaaattccgcaaccacctgcagaaatgcaaaatcaatcttaccaaccttga

SEQ ID NO: 49626 - DNA, 426 bp, Acinetobacter baumannii
gtgattgaagttgagttcgggattttaaaagagatccccgtgctgcagaaatatggcgttgttgttgcgatagcaaatgtaacgattaaccagaatggacagcaagaagatgatgctgctttgattttagcacgcagatcctttggctttggccgtacacacctaattttacggcagaacatgcacggcatattggataccgaaagcctagtaaagatggctactaatgcatgtactgaattgtttggccacgcgatgccagatgtaacacatcgaatatgcgatttgattcttgactatgtagacgaggtgattatgcatccaccagaagacgtcatgattgaacagaaacgcaaagaaaaagagatagagcgtagcggaatcattatcaagtgcaacgatactgtattactggatgctagctaa

SEQ ID NO: 49627 - DNA, 1437 bp, Acinetobacter baumannii
atgccaagagataaacgattaaaactaagaaaattattaaaagaatacgaaaaaagaaagaattgcaaactctttggtttgtttccagatgaaggcccattaaagcgtgctctctataccaaacacatggctttctttaaagctggtgcagagttcagaagccgtttatttatggcgggaaaccgtgtaggtaagacggtaacaggctgtactgaggatgtttaccatttaacaggtttataccctcactggtgggaaggtaagcgctttgaccatgagatcagagcgtgggtggctggtaaaagtaatgaaacaacacgtgacattatccagcttgagttacttggtaacgttatttatgaaaaaggcaaaaagacctttgacggtactggtcttattcctaagcacttaattggcaaaatttcgtggcgtcagggcgttcaggatttagctgataccgttttaattaaacataagagtgggaagtggtccaagcttggcctcaagtcataccaacagggccgtggttcttttgagggtacagcacagcatcttatccatcttgatgaggaaccaccgcaagacgtttacacggagtgtttgacgcgtacagcgaccacagaaggtattgtaatcattacgtttaccccgttagagggtattactgcaatgattctcgacttcatgaaaaaagccgagaaaggcattaccaaaatggtgcaggcggggtgggatgatgcgcctcacttaacagaaaaaactaaaaaagaattattagctgagttccctgagcacgaacacgatgccagatcaaaaggtattccgattgcaggtacaggttctatttatccggttgaagatcgggatattacttgtgagccgtttgagataccaaaacattggccacgtatcacaggaatggatttcggttgggaccacccaaccgcggccgtaaacctagcttgggaccgagacaacaacattatttacgttgtttcggagtatggccactcacgtagaacgccagtagaacacacgccaaacattaaaggcctttgtacttttgcaccagttgcatggcctcacgacggcgtgaataccgagaagggcggcggtaaaccgattaaagatcagtatgagtccgaaggcctaaacatgctgcctgagcgagcaacatttgaagatggttctaactcagtcgaagcgggcctcagtctgatactgcagatgatgaaaaagggtgagttcaagatcttcaagacgtgcaccaacgtcttagatgagaagcgaatgtatcaccgtaaagacggcaaaattgtaaaacttaaagatgacttcttagatgctatgaggtacggggtaatgatgatcagatttgctattaccgaaccaaaaccagttagcaagacgagaaggcagggcaggagcgcattgtga

SEQ ID NO: 49628 - DNA, 669 bp, Acinetobacter baumannii
atgtctaagaagtgtggtgcaaaaacgagaagtggtaagccttgccagcacccagcaggttacagaactgaccatgttggtactggcaagtgctacctacatggcggtgcatccaagggtgcaccaaaaggcaataaaaatgctctcaaacatggcatttattcccgcttattcaccaatcaacagattgatgaagcgaaagaaatgcagggaagcgttgaaacagaactggcaattgcccgcatacaactctttaacttactgcagtggcacaaaaacacaaatgatgcacccgttattgatcgaatcgaagaaaaaacaattgttactgagggaaaagaaggtggctttattcagaatatggaaaaaagcgccgaagaatgtgacgaatattatgatccagacggtgacgaagatctggttaaagaaaaagaaagcgaaatttttgaaagaaaacgcatttatcaacgcagagacttcaacaatgagtttacacgcctaacggcccttatcgcacgattagagcaacagttgctcttaatgcgtaagacacaagcagagatcaaagtaattgaagcaggcgaaaaaccagacgaagacgaacgaaatatgtctgacgaagaactggatagcgaaattcaagagcttatcgaaggattcgagatctag

SEQ ID NO: 49629 - DNA, 531 bp, Acinetobacter baumannii
atgacagtcgtgcagagtgaattgagttggttagctgcaggtcgtgcacgaatcgggacacatgaaattaaaggggttaagcataaccccttaattgtttctatgtgggaggtggcatttcaagctaccaatcaaaagacgtggattagagacgatgagacggcttggtgtggcgcttttgctggttattgcattgccaagggaagtgatcctaagaagatcccgaaagacttctatcgagcaaaatcatgggccgaagcaggcacaagtctaagtaaacctgcttatggctgtgttgttgtattcagccgttcaggcggtggccatgttggttttgttgttggtaaggaccagcgcggcaacatcatggtgctgggcggcaatcaatcagatgcagtcaatatcaaaccgttctctacagatcgtgtcattgcttaccgttgggtaggcactcaaaagttacctttagcttctcgatacaacctacccgtccttaacagtgacggcaaagttagtacgaatgaagcttaa

SEQ ID NO: 49630 - DNA, 252 bp, Acinetobacter baumannii
atgaatagccttcaagttgcgtggttattagttggaataacaatgggaataatcctattgattccaattaaacgttgtttggcaacgcataacggaattatttcaatgctcattggttcgctaatgggcattttttctgtgagttatgcgtggattgctttagtgataagcctttgctgcttttcagtcggtttttacaagaaccatcacaaatttatgggagttgttcagcatgacagtcgtgcagagtga

SEQ ID NO: 49631 - DNA, 447 bp, Acinetobacter baumannii
atgttcggcttattagtgagattgggtgttgttgtaagtattcctgcagtatctctctttaggagagcgaatgcagggcagctttataacgatgccatttctctttattcaaatgagctaatcatcggcttgtgtctattaatgatgtgtgtcggctgcttagcttctgtcttaacgccagatccagacggcgtgacacctatcaagcctttggcgaagtttgtttattcgctattcggctcgttaggtgcacttttctatatcgcttattacgaaagtgacttatcaattgttcaccctgcatgggtgggtggtgtttcgttcgtagcgcctgcaattgttcctagcttgaaggctttagtcttcgatgttttaccagtagctatggattttgcgaagaaatggattgaccgctggttgggtggcaaagggggtaatcatgaatag

SEQ ID NO: 49632 - DNA, 468 bp, Acinetobacter baumannii
atgcctaagttcgttaaaaagcctgtagaagtcgaagcggttaaatataacggttctagcgctgagatagatgatattcaacgttggattagaacgggtgtatacactccatctgcagtcatgatttatgatggtcgctcatttgaattagctactatccacggatctgtaaccgttaatgctggtgactggattgttaagcagaatcaagatgatttctatcccgttgccccttctgtatttgagcagaactacgcgaaagtgccagaaaattggttagagcgtgttgagcttgagcaagctgaattgcagatcagaactgatgcactaaataaaatgcttaatgtaaccagtaagccagagtttatttcggagccacaatggatcttactaagtcgtcaaaagttccatcaaaatcagttgaataacatactaaaagaacgtattcaggctgaaaaagccgaataa

SEQ ID NO: 49633 - DNA, 531 bp, Acinetobacter baumannii
atgattatttacggcaatccaaaatatttatatgtcggtattaaatctgtcctagccttacctcaaactaagcaagaatactgtgactatcgtggttggaaagtccctgaaaatgaagatcctgcagaacaaggatttttagttgaatacatggatggtggaaaaccaaatcaccataaccatgtaggttatatctcatggtcgcctgcagacgttttcaaagagtcatataaagcaagtggtgctttacgctttggtgatgcggttgaattacttaagcgaggcgcacgtgttgcacgggcaggatggaatggtaaaggcatgtttgttgtttaccagaaaggataccctcaaggcattccatgcaacaagcaaactgcagaagcttggggaatgaacgagggtgatttattcagagttgagccttacttacaaatccgaatggctaacggttctcatgcaatgtgggttccttcggtcacagacgttctagcggaagattgggagattgtagggggtgtgtatgcctaa

SEQ ID NO: 49634 - DNA, 360 bp, Acinetobacter baumannii
atgagtatgaagcaaaaagtagagcgtctaactgagcaagttaatatgttggcaaaaatggtagaagacataagtaaaccacaagagcctgtctatggtgaaacgattaaagctcattcagccagtattgatgaaacaactatccagcgtcttgaaaatgctgaattaaccgcttctagtgcaatttcagcagctaattcagcacatgcaatcgctacagaagcactcaataaacagaatcagagccaagaattaactacagcggcttttttgcttcgtgtggctcaagagaatggtcttgatgtaaatgtaggcttggcggcacaaaataaactaatagaagtgatgaatagactatga

SEQ ID NO: 49635 - DNA, 396 bp, Acinetobacter baumannii
gtgattgttgtgctttgcattgatttaaaaacaaaaattcagggttcagactgtgctgcagctatagaaatgccgccaaagattcatactttattgagtttggaattgggtgtggacttttgtgatcttaggtactttgagggcctgcctattgtatttatatctagtggtgagcctaacattcttaatagtgatcaatacaagatgcgagtaaaatataatgaaatattgggcatatataaagaaaaatacagggaatatataaattttataaataacaaaaataaatttgtgaacgttgattttagagcaggtgcgttgttgtccgagctaaccagattgtcggatagactagttaaaattgagaatcagatcaaaaaaataactaatttttaa

SEQ ID NO: 49636 - DNA, 261 bp, Acinetobacter baumannii
atgaacatactgacttacagcgaggcgagaaataatctcaaagaggttatagatcaggtgattaatgatgctgacgtgactgtaattactagacgagaaggacaggatgcagttgtaatgggtttagatcattacaatagtatggttgaaacactatacctactttcaaatccagctaattcggctcacttagcaaaatcaatctccgagtaccgcgctaataaagcaactacgagagatttaattgacgatgaaacgtaa

SEQ ID NO: 49637 - DNA, 261 bp, Acinetobacter baumannii
atgaaacgtaatatcgacttcacccctactgcttgggatgattatttatattggcaaaaccaagacaaaaagacgttaaaacgtattaatgcattgattaaagattgccaacgtgaaccatttagtggaattggcaagcctgagggtcttctaggtgatttgtctggattctggagcagacgaatagatgaaaaaaaccgcttggtttatgccgtagatgatgccgctattacaattatttcctgcagacaccattactaa

SEQ ID NO: 49638 - DNA, 183 bp, Acinetobacter baumannii
atgaaacttgaaactttaaaattagaaaatagctgggcttctggttactggtatacggatcctgaaacaaatacaaaaacatttgttaaagctcaggaccacgacacacaggaagatgctcttaaatttatccagagtcaggaacaagaagataagctcttaaatgaaacaacccagcattaa

SEQ ID NO: 49639 - DNA, 267 bp, Acinetobacter baumannii
atggcatatgacttagagaaggttttaagttatggccaaaagataggtgcagaaaaggctttgattattgatgattctctaagtaggtactacaagaaaggagataaagctagtaaacattgcatgtacttctacggtaaatctggtgaggctaagcttggctggggtaattcttttgaattttgcttagatcgagtggtgaacttttataaaaatcttggccataccgtagaagtaatagatataccaaaagaaaacccagcttaa

SEQ ID NO: 49640 - DNA, 600 bp, Acinetobacter baumannii
atgcttgaacaatttgcacggttaaacgctggtacacaaagtttagttgtgtcaaataaagttcccttgctggatacagccgatttgtgtggtgtattggcttcattagaagatcatcattcatggtatgtgtacgcaatgattgatcaacgccgctcatacaatatggagttactacatacttatctgatgcagcttttactgcaggaaatgcttttaagacggttctatccaaagaaagtaaaaccaagcgaatttgcttatggcgttacaaaggctgtgatatacgctcattttcaccctaagggcaaatgtaaggcttgtaatggctttggtgtggtaggtgcaaaaccatgtgttaaatgtgatgggaaaggtacaaaagaacacaattggtctgagcgcttagaatatggattccctatgcataagggtttaacaagaagctggtatcgtatagtttgccagccttatgatcgtttcttagagtcgaaattagctgaaattcaaaatgatcttcatgagaagcttttaaagttaaagaaaattgaaaaagcttatcgcagggaagaaaacgagagtcttttcgatggcatatga

SEQ ID NO: 49641 - DNA, 201 bp, Acinetobacter baumannii
atgaaaccagaacagattattcctgaagaaatttcaaaccaacgtcctgaaggcgcgacacattggcaagctggagtgtattaccgagaaagtagatacggcgtatgggcaagatggtatagaggcaattggattactacatttgtgtggccagatggggtcatgacgcctttatcaaacaaaacaaaggggggtggctga

SEQ ID NO: 49642 - DNA, 348 bp, Acinetobacter baumannii
atgaaacgcaacctatttaaattatctcttattgttttgggttttgctgcagcgagcaatacgtctgcagtcgttacagtatcagcgcgacctgtagtggtgtcacgaccttctgtaagtatttctcgtccagttagtacagttcgtactactccggcacgttcaagttattcaccaagttatccacgaccaaacacaacaaaacgtcctgcagtgactcaacctgcttctacatatgcatcagtaccgactcttaatagacctcactatgagtattaccccctaaaggattgtaagcgccatgtgagtggtggtttcaatggctggaagtgtgtagaccgctattaa

SEQ ID NO: 49643 - DNA, 279 bp, Acinetobacter baumannii
gtgattatttctttgcttggtgtacttcatggcttaggtgttctggctataggctttataacagcttttatatttgcagttttggcacatttaattgttaaagcaaaaactaaggttcaagtagtggcgctggatatcactatgttcactgcagccagctttatagttttaagaattgaccaagaattaagataccacggggatttatttgatttacatgtccttgtgtttgcatccgttgcatttctttattttattaatagatggattaagaaatga

SEQ ID NO: 49644 - DNA, 210 bp, Acinetobacter baumannii
atgcttaaaatcattattacttcattagctggttttggtatcggctatttggtaagcctgctacatattgaatataaggcgcttaccaaggggcattttagaatttttggaactacatatagagcttttattagccgcaatattcgtgatggtgcaaaaggtgtaccagaggtcatagaagaagcgcatagcaatagccttaaacgttaa

SEQ ID NO: 49645 - DNA, 471 bp, Acinetobacter baumannii
atggcaactaacaatacggtaaatcgtccacgtaaaaataaacgctggacggctgcagaggctcaacgcttcgttaaaaaggcaaatagccagagtagagcgatattgtctcaattgggcagtgttggcgaagaaaagttagcagctaaccttaatatttttaatatcaactacgtgcgggaatatcgtttccatccaagtaaaagatatagagcagatttttacctgcctgattacaacgtacttgttgaagtggaaggtgggaccagaggtgtaagtagacatactacccatgaagggtactctaaagatttaatgaaatataacgatgctcagatccttggctttgctcgtttagcttttactactgaacaagttaataaaggcttagcaatagagaaaattaagcaatacatagctgcatatgaacaaagacaagccgagacaaaggagggggtatttcatgcttaa

SEQ ID NO: 49646 - DNA, 516 bp, Acinetobacter baumannii
atgagttattttgcatttaaagctttggcatgtcgttatagagaagctagtaacacagaaatttccgcatttgctatgcaaacaagctataccgaatatttaaaagggaataaaactgtcttgcttcgcaaaattgaaaattattttgagaagtctatagatgaatgtttggcaaatagtagggccaaaatcgaagattcagagaatactagaaaaaaacaaagccacgcatggaaaaaagatttttccaatgtgcatgagtctattttagatccaagcaagaatagttctttaaagcttgaaacagcattaattgcaaaagaaaacggtaaagaatacttcttagaaaaatgccatcgtcatggtgagacattattcaggatcagaagtagtaccaagccttcaaaaaacgcgagttattgctgtatttgtaaatacggttataagcgtgaagatgaaattaagcgcgcaattaaaaagtttttagacagtcggcaagctgctcctaaaaactaa

SEQ ID NO: 49647 - DNA, 648 bp, Acinetobacter baumannii
atggccggttcaccgaaaaagcgtaataaaaaatatgtacccaaagtagatcttcattctaaacagattaaagagatcctcagaactaagggtgcagagggtttgatgggtgtttataaacaaatgaaagcaccacatacccgttatttagaaatgacatgggatttcctagaagcagaacgaattttggttgttgcttctgcgcttcatgatgtgccagtacatgagttgccgctggatgttactaagaatgtttatagtggtgatctgcttatagcgctgtcaaagcatttaatttcaccaaagcagaaatttgaaatttcaattaatacaaacgttagaaatttaaaaacgggcgagatatttacggttccttatcactatgtttttaaagagccaattaactatgcagagtttatggatggtgggaagcataaggttgatagaggccaaggcataaagactcgttggcgtggattgtcagatgaatggtctgacgctgtacaagggaaatttccaagtaatgactatgagtttgctggtgcaaaagcaaagttatcagttaatgcgcgcatccttgcacatgcatatgagactgatttaagaaaaaccaagttcttaaatagaatcaagttgttgataaaatga

SEQ ID NO: 49648 - DNA, 243 bp, Acinetobacter baumannii
atgaagaaattcattgataaaggtggggtggttcaagaaattccaaacgatgagtaccaggataaaaagcggagagaaattgcgaaggtccttcacttttccgtccatcatcggttttacgctagaaagactggtttaagtgttcaacgtattaaggagataaacaaaaacattcaattaatgaccgatgaagaaactgaaaagctgtggtcatttataaaagaccgccgcgaaattgtataa

SEQ ID NO: 49649 - DNA, 729 bp, Acinetobacter baumannii
atgagcgaccaagatacagccgtctatgctgcagaagctaaaaagttaaacgaacttttcaagcagaaaaaaaggattgaaaaggaaaggggtaacgactttaaacaacagaccattgctgatgctgctggttggacacaacccaacgtaagcgcttacctgcggggtgtggttgtacttaaagaagacgctgcccaagtttttgctgatacgcttggcgtacccatccgagcttttagtcctcggcttgcggcctctatcgctcaaagagagttattggaaaacaacccgatgcttgcaaaagctcaggtaaattatgtacctacaataaccccctcaatgatggacctcatccgatctcaactaaaagaccccgaatttacaatgcctatgtctgaatcagtagttcccgtatgccaaaaagtttcacgtaatgcgtttggaatagagctaacagacgctagccttttacccgattacccaataggcactatgtttgtttttgacccaagcataaaagcctcgcctaccgatttggtttatgtagcgaacaaaaatggtgattctgattaccacatacgagagtataaaattaaggaaattacagaagatgggaccgagaaatatgagcttatgcctatcaattcggccttcccaatattaagagaaaattatgagattcttggtgtagccgttgctgcaacaaagaatttaaagaaaattgaataa

SEQ ID NO: 49650 - DNA, 300 bp, Acinetobacter baumannii
atgcataatagcacacgtgaaaaccgtttaaaaaaccttttagtttcaagtcaatccctattacgtccaatctataccaacattgcagacataactttaaatctagcaatcctttcgttaaatatcgcaattctatttaaagcaatttttgcaactacattaatgcgttatgtagttttatttctcgttgccagtattgctttcatgttcatgattcgtggtgctctttatatccatgattatgaatttgatcatagaaacccgtcttttattcttttccagttgtctgcaaataaataa

SEQ ID NO: 49651 - DNA, 579 bp, Acinetobacter baumannii
atgacattcaattcaagcaatgcaggcaaatacgaaggcctgttaaatactgatcttgtctttgaagctctctctaagggtattgcagtagaagtagctgaaatcaatacaaatgactggaccgttctaaatccatcttctcagttaaattttgctgattttttcagtggttttttacaatttagagccgtaaaacgtggcgagcactttgaaaaaaccttacacaaaaataaggcttctactgcatatagcgaatttcttaatttagatcccaaagggaatgaacgctatagagtcggcaccaaaaatccttttatctatgtacttgttaagcgcccaattaaacataatgacggtattttcgagcttagagagttcgatatttacaaagagcaatctttaggtgtgcttggccaaatcgttgaccgtcagaaagccccatcttggcttattcaagccatttataaagccagaaatgcttatagaaacttcgagcataaccaacgccttgaagacttagggcatttcgcctcctccagctaccgtgactataaacgtcaatacggtcgaaaaaactaa

SEQ ID NO: 49652 - DNA, 951 bp, Acinetobacter baumannii
atggctgctcaaattatcctaccgcacgaagtaatgccggttaataacatcgttctttacatgtatggcccgccatcaatgtggaaatcctctatcggccagtctgcagtgaatgcccttcacattaatgcagataacggaatgcaccgtgttagcccaaaattgcgtagaaatgcagttttgaatgctgagcgctggaacgatgtgtactgcttaactgaacaagatcttaccccttataaaactatcgtcatcgataccgtaggaactttgcttgaaatgattagagccgagttcgctgaaaaccccaataacactcattcgtttggcgggttaaagcagcatatttacggcattgttaataatcggttcagtgagtttgtaagtcgcttaattcgctggggcaaagatgttgttttcattgctcatgctgcagaggataaaaacgaagaaaaggtaattattcgccctgaaattggaggcaaaagcagacaagagctttatcgcctttcagatgcaatggcttacttatgttttgaaaaacagcgtaatggtgcactaaagcgtgttttgcgtttcagcgccaatgatgaacatcatgcaaaagattgtgcaaatttacgaacaatcgatgtgcctaacttgaatcaaaatccaacttttttaggcgatctaattgagcacataaaaaaagaactcaacaccatgacccctgagcaggttgcatatcaagagaatttacaaacttggattcactggcagagaagctgcaatgaagcacagtatgcaagtgaatttaatgacttgatgcttgaccttaaaaaatacgttgatgatgaacacccgtggagacaagaaatgtggcactgcttaaaggctgcagctaccgcgaaggaattaacacatgacaaaactttgaatacttggagagaggttcaagctgcagtatga

SEQ ID NO: 49653 - DNA, 696 bp, Acinetobacter baumannii
atgaatgcaataatttttgatacggaaactaaccgtttacatggcctacctattcaaatttcctatgtaccgtgctcgttagagcacggggtaattaatacgcaaaatgaagcgttctttaaccagttttttagtattgacgagccaatttgttatggatctatggccatacatcacattgtagagtcggatcttgtaaataaacctagctataagactttcagacttcccgacgttgagtatgtcattggccacaacgttgaatacgacattgaagcattacgccgctgtggtatgccagtggaccatctaaagccaatttgcacaatggcgctatctaaaaaggtatttccagacgcacagtcttacaagcttggtgctttgatttatatgctttcagcgcatcaaacaactacgcgcaagatactaaagaatgcacatgatgcgctggtagacgtacagcttactgcagatctactcaaagcacttcaacaacgcttaaaagctgcagattttgaatacctacatcaaatgacggtacaagcccgtataccaacggtactttcgttcggaaagtacaaaggcacaccaattaatgacgttgatattagttatgtactttggcttttaaagcaagacaacattgataaatacctaaaaatcgcacttcaaaacagactggatcaaggccgatga

SEQ ID NO: 49654 - DNA, 186 bp, Acinetobacter baumannii
atgagcacttacatttttttatatacagcaaagctacctaaaggctcacagaaaggtcgtattgaagccaaaagccagcttgatgctaagcaaaaagttatggccaaaaaccttttaattacttctgtttctgtacgtgtagcaaaaaaccaagctgccgcacgtaaacaacattttgaggtttaa

SEQ ID NO: 49655 - DNA, 285 bp, Acinetobacter baumannii
atgggtaaatctaaaccggcacaaaagcttgtgcacgaaaagaaacagctacaaaagcaattaaatggaaattctgtacatgacgcgccacttaaagctcgtatagcacaaattgagagcgctttagaggccaaaactaatcagtcagatcaaaactttttccgtgttttctatcgagaggccaaagcatctttgcctgcaggcatattcgatcaaattgaaagcaacacaagtacacgtcaatacaactatcaacaaaaatctgcaggatctaaaaatgtgtaa

SEQ ID NO: 49656 - DNA, 429 bp, Acinetobacter baumannii
atgtgtaagcattgcgaaaattcaaaaaaaattcatatcaattatatgaatgagcattatggtgttggatacagtcctgttcattacagacgtttgcaaattgagtctcctgctgatgcccgtgcatttatgactaaattggacgataacgatacaaatcggcatggtgtggttgctttatcgtttttattggaaaatcgtgctgttaaatttgcgtacgctaatttgacggctaaacacttaaatcaattgattccagtggttgaagaagttaatgcccttagatctgctttaactcttttgcaggcaaaacttgccatgtccgatgatcagatacttaaaggtatcgtgaatgatgcattatcacgtccttccactccccttaatatcaatgaattaaagaaagaattagaccttttcgctcactaa

SEQ ID NO: 49657 - DNA, 798 bp, Acinetobacter baumannii
atgcacttcgataaattcgcttctcctactcaagcattatctgcctacaaaaaagcaaaaactatgcaattagagagtttgaaattaaagaaaaatgatgcttttcaggaatcctcaatttatgttgaaagctcccccacaaacaagaatttatattcttatgtaaacctgtttgaaccctgtgatgcttctatttatcgtatttattttcctgaaattgttgaaggatttgaaaattacttaaaattgcgttttggctgtctaattgacgaaaattggtttttgcgaactctatgttactttggccagaataacttattaaagtttttggaattgataccagatacaactcaactaatacttttacctcccccttatccccgcaaaagtatcgtttttataagggttaacttcacttctcttgaatatgaagtaaatgaattagaattattttttgatccttcttccgctgatcaattttctaatattggtggttctgttaaatggaacaatataggtaatagtttaactctttttcctagtgaccaatatcgatttatcccagctagacaaattctggcttctattttttatcatataaatcaagcagaaatattacgtaatgaactaaataccgaatcaaaaaagatattaattaataaacatttagctttaaatacatttgaaggtagagaatgggatagatatttatatgatgatcacttttttgagatttatatcttatcgagaaattggaatttctctacgctactaccatataaaaacccgttcatttga

SEQ ID NO: 49658 - DNA, 1131 bp, Acinetobacter baumannii
atggatcaagcacttataacacaagacagttcagttattaaacaggcaaataagcttatagaatcagtgtataggatggatgcaaatgagcaaaaaattatcttgcttgctgcgaaattcgtatatgacatggaaaagaaaaaagaagaatttacgacaaatactgaaattgttattacggcagcagaatacgccaatgaatacggcattactcgtcagactgcttttgaagttataagtaaagcaaaaaacacgctttatgaacgttcttttgagtatgattataaaaaccctgaaacgggcgaagttaaaccgatgagtagccgttggattcattctaaaggcgaaatgaaagcaaagagcgaaattagtatgttctttgcacctgctgttattccacttatctacctagtgcaacaagagtttacgctattagatattaaagaaattggccgactaaaaagtaaatatgctatccggttgtatcagatcctcatgaaatggcgaaatgctgattttcaaccgaagtttgaatatcaagaccttcgggccaagttgggtgttgaagatggcgattacacacttatggctgattttaaaaagggggtaattaacgttgctgtcaagcaaataaatcagggtactggctttgttgggttaaaatattcaaccgtaaaaaaaggcaatacaattacccatttcaccttctcttatgacaaatatgacaataaaacaataaatgtcactccaattaactctcaaagctcaactaggcctaaaaaacctaaaaaggcaaatcagcagcttacagagcaaaaagccccaaatagcgcaaatgagagcgatttaggcgatgattttagcttaactccaccagagcctagggcgcgtaaaaaagtgaagcgccactttgaaggaggcatgacagaaccacaggcttacatgttcgctggaaaaatcgttaataaaattaaggaaggggatacacgcttcatgtatctttcaaaattcgcccacgaaggggaacaagattctagtttttcaaaaagaattgccgatgattttcttgtggggaatttagagccatatcaagaggctttaggatacctaggttataagcatcacaagtaa

SEQ ID NO: 49659 - DNA, 603 bp, Acinetobacter baumannii
atgggtttaaattttatggcggtaaaaagtggacaagctccgttcgtaaacgagcacgagctacaaatcactctcgaatctttaaaaggtgctaattcccttcggaataaatgcgtccttttattttctcacttcattggtctacgttctaaagaaatagctgctttgactattggtgatgtttacgacattaggttaatggccgttaaagaaattatccgtttaaaacgtggttacactaaaggaaaaaaatttcgtgaagctttcttagttgatcccacaactattgatatattgaccaagtaccttgaaacccgtaaggaagatttgagtgcagatgcccctctatttagatcccaaaaaggtgggcatttttccgctaatactatgcaaagaatgattggtctgtgttataaaaaagctggtataaatgctagttcacactctggtcgaagatctttcgcaactaacctaattagacgaaatgctgatatttactccatacaacaattaatgggtcatagctctatttctacaactcaaatttactttacttctgatccattattgttgaaagagcaaatttctaaattaagtcaatag

SEQ ID NO: 49660 - DNA, 663 bp, Acinetobacter baumannii
atgattcttttaatagcaaattcgaaaggtggtgttggcaaatcttcactggctacttcaattcttgcagaattagccaagacaagatcagttattggtgtagatctggactcatcaactaaaacagcctcagcaatttggtcaaaagatagaacagaagaacaaggaagattttactacttatctggtgagattagacccgaactagaagttgcacgtgaagattatgatgacactgtgattgatgggggtggttttgataacaaagagcttcgtacagcaatgcttttagcagacgttgttttaattccattgagagtaggtgctaatagcaatattgaaggctttagaaatacagtagatttgctagttgaaataaatgcaacgcgtgaaaaaccagctaaaatttatggcgtagtgacatgtgcacctcacatcggtatgacacctgaattaaatagagcaattcaagaaattgttgatgagcctgcagtagagacaatgcctgttacaattggggaacgtacatggtatggccgtgcattagatgcaaatttaggtataactgaatatgaatcacctaacccacgtgatagaaaatacgttgaaattgcacagaaagaatttatgaagttgtttgaggcgatttatcatggtaaataa

SEQ ID NO: 49661 - DNA, 441 bp, Acinetobacter baumannii
atggtaaataatgagaaaggatctgtactacctagacgtccaagagaaagtgttaatacaatttctggatctgaggataagcaggaattacagaaaaaaattgttgaaagtgcgcctctacaaacaagcccagcgcaacaaactaaccctgttagtgaacagccatccgctagcgtaacacctgcagtaccggagaaaagcgataaagagaaatatccgtggcgcgctgatactgatatgtctgcagcggatctaatggttgttaaaaagaaaaaatcttatgatattccttatgaactggtgcttagacttgaatttattcgaggaaagaaaaaaccaaaagcacttggtgaaaaggtcaaggaaatccaactccttactgaatatctggataaagccactagggctgagctcaaaaaattaggctatgaagtagactaa

SEQ ID NO: 49662 - DNA, 1218 bp, Acinetobacter baumannii
atgagcaataacgacggctgtgtcgtggccagaagtaatgaggctaaattggctggtataaaaatgggaatgccaaactttgaactagaaaaattcatgaaagagaataagttagaggttatacgtttttctagtaactacgcgctttatgctgaaatgtctcgtcgattccacaatattattaaatattatgtagatcctgctttatgcgaagaatattcaattgatgaaaactttgtgaatcttacttcttatgcagagaggtacaatttggttgagtttatggccaatgtaaaaaacacaatttatcaatggcttggattgccttgttgcgtgggtttgggccgttctaagacggaggcaaagctgggcaactatattgctaaaactaaccctgtttttaagggtatctgcagcatgatagaccttgataggcagggggttaaaaatgcgtttctacatacaataaacgtgagtgaagtatggggtgtcggtagacagtatgcgaagcggcttaatgctttagggatctataccgcttatgatttgatgaaagcagaaccggagaaaattaaaaagttatttggtgtagtcctgcagcgaaccgttctcgaattaaatggaattgcttgttatgacgttgaaagtgagccacaaccacggcagcaaatagtttcgtcaaagtcctttggtgagcgagtaacagataaaaatgatttaaaagaagctattacaaggttcacattggatgctcaaagaaggttaagacgcgataatcttgtatgtggctatctggcggcttttgcatcttcaagccaattcgataaaactagaccttattttagtaaaaatgcgtcagtcccatttcctgaacccacagataaccctgttttattaattaaagctgcaacaagagctattgagcatatttatgctgaatgtgttgaatttaaacgtgctggtgttgttcttggtggacttgagcctaaaagcggccatagaatggatttatttgctgacactgcagctaatgaaaaatctgaaaatctagttaaaactttagacgagatccaagagcgatacggtaagaaaatcttaggttttgggggctgtttgttcaatgaccgtccttggtcgatgcgacaagctaacaaaagcccgaactatttcaatataaatgaatgtcttttaatcaatgattttcagactaaaaaataa

SEQ ID NO: 49663 - DNA, 393 bp, Acinetobacter baumannii
atgaaaaatttattaattattggcttggccacatttattttaagtgggtgtgtaattcagcgcggcacacatattcgcacaggcgaatttagacagccaacaacggcagatagtgtacgtctttattatagtgaaccttctgattataagattttgggaatggtaactggtgaaggtagtcatgcgtttgttagcgaccaaacacgcttaaacgcggctatatcgcgcatgaaaaaagaagctgcagcattgggggcaaacggtgtgcttcttcaaaatgtgggcaaggtaggcgctaatcacgccgtatatcaacaagtcggtaacattggcatcacaacacaagcacacgattctatcgttaatggcgtggcaatttatgttgaaaactaa

SEQ ID NO: 49664 - DNA, 843 bp, Acinetobacter baumannii
atggcgaccccttatataactataggttgtccaactactggtggcggtcaagtaatttcaggaaacaacatgttcctgattgatggtattgcaattgcatgtgttggtgataaagcaacgtgcccaactcataaagtcgttgcgactattgtctcaggcgatcctcatatgcaaattttcggaaaagctgcggcacgtgtaaacgattcgctgtcttgtggctgtaagcttctacctaaacaaagcttggttgttcaagacaatggcggtggctcaggatcagcggccgcaaaatcgtcatccgcacctatggcgcaaaaacaaccaataaatgatagcttcgtaaaggatgaatacgagaattactatattgaaggctcaaagacggaaattgttgagttcaagaatatgttacttccgtatgatcaagacaaagcaaacctattaggcattgttgtacaagccctatcgggcgcttgttcttttgaggtgtctcataaaattgagaaaagaaatctctttataacagctacacttatacccccttcgttgaaggcagatgcacaaatcttcacaagtggtactgtacgattgtttaaaaataaaaaacctataagtggtcctattgctctaaaagttggtaaggggtattggaatacggaaaatgatagacagcctgttggtagctgtgacataacactgcctgctccagacttagaagttataaccgttgaactacaactaggttttgagggcaaatttgataatggaaaagtagttccgaacccgccatacaaaacacattcattcacaatcacatcggccgctagacgtaaaaaatga

SEQ ID NO: 49665 - DNA, 642 bp, Acinetobacter baumannii
atgattaaatatttaacaccttttattctttgttcagtaactcttattagtgcttgtggcaatgcttcaaattcagctaatgatacgaaaacatcacaagaaaatgtggtacagcacgtctctgccgaagatcaaaaaatcatagataaatatgaaagctacttcaaatactaccgcgagggtaactttgaagaatttcagaaaaagatgaaggaggtattgccagaagtcagcaaaatctcaaacaaaagcaagcgagagttcatgcagatgaatatctacatgacattgcaaaattatgatgcagcttatgcgctaaacgaaaaacagttatctgaaaagccgaatgatctagctagacttaactttaggtgtcagttacttactttacaaagtaagagtagcgatgtgattagtaagtgttacgacaccacagcaaaagccctaaaagttgaactagaaaagcctgagagcaaaaaggatccaaactacaaacaagctgaatttacatatttgctcacaatgtataaagctggacattctgaatataaagaaaaaatgcaaaaattcattgatgaaacagacgatgaagctctaaagacttcgcttagaaaagtttacgattcagaagtaggaaaataa

SEQ ID NO: 49666 - DNA, 6753 bp, Acinetobacter baumannii
gtgtctgcaggtaaacccgtaaaggtgcttaaagtcagcaaaacaagtatcacggttggagacgagaaaggccagactacgattaatccgaagatcttagcgccaaaacttaaagccaatcctgatttactgcaggttgaaagacctgagcaagtaccaatggccaagtctgatccagtgcagcctgtgacagataatactgatcttttaggaagcattcagtctgttaaacaacgtttaaacgatgccgatgaaactttgacacttgatgacgttaaagcgtcatataaaaacatactcgataatgagccagctttacggcagcaactaagcaagaagactaaagcaggcctattagatgaattagatcattggtcccgtgaacgttataagaacgaaaagaaggacgtcattgtcaataaggttgttgatcgtctttaccagtcacttaactttgcgtccgatgttgatagcttcgtttacggggataaacgtggtactggacagcgaatttatgaagaccatatcgagcaagcgaccccggaacagttcaccaattatttggcagagcagaagaaaagaattgcagaatatcaagctgaacgtgaaaagctaaaagccggtattgaaaaccctaaaacacttcatgattttgttaattcgtttagatcctcaggcaaaacaaattttaaagattggtatagaggtttacctgaggaacagcaaaaaaattatgatgatctaaaggctgaatctgaccgtaacgaatatgaagctgcacaacgtgcggctattaaggcaaaacaattccaagcggctagtcagtcagtggccaaagataatgctgcaacactttttgaaggtaagcacaccaagaaaggtcataatatttggactgtacagctaaatgaccgtacaggatccgatgaatttgccgctttaagaactaaggctagggaacttggaggttactattcaaactatagaggcggtggcgcggttacaggctttgtatttgataataaagaaagtgcatcttcatttatggaccatgtttctggccaagaaaatagttctaaatccgttgatcttgatgcagctttagatcaacaaattgaagctgaaaataaagagcaacctgaaaaccgaactgcagaaagtttacgtacacgtgcacagaagcttattgaaaaagcgaccgcaagcttaaatcaggaacgtaagacaaacacacctaaacgagcaggtgaagcagcgcgtgcggagcaaaaagctaactatgaaatggctatcgcaaattcaatggccaacattgccgagggcttggaaaaaggtgaaattaaacacttaacaaagctttcagcacgtacagaagtcgaaacattagaccgtattcttaatagagcttcacgtgatgagcgggatgctaaaggtgcggttgaatctatagtctcaaacgcatcaattccttatgtcgagtatccccattatagattgagttcagatacttggattgatattggccatgagctatccaagcgtggatataaaaagcttggtgattcaattaaacgaaatgcaagcctacatttagataaacaatacgttaaatgggttaaggaaaaagcaactggtaaaggtgataagccgtctagcagagcgccagagattagcgaacttgtagcacggacaaaggaaggggctgtagcagtttataagtctgctaagcaagcggaacttgtagcagaaaatgctaatagcaagcttgataagccaatttatacaacgcttcaaatgaacagaggcgagcacttagttttactcaatcatgaagctgctttagacaaatctttatggactccaaatttggatgaaaggcaagttgcgctcagtgatgaaattggtcaaaaagtctatacagcttataaaaacattcaaaaggaaaagaatgagacgctgccatatgaccattatattgagtttttacatagcgaaaactcaagattaaagaaattagggattcatacacctgcagcacttcgtgcagcactacgtgagtatttatcggttaaaggtaaagaaaaaggattagatccaatcaaggcaaaagagcggtccatgatcggacgccagaatgatggattagactttttcccaacaccaaaatccgtagtagaaaaaatggttgatttggcacatatccagccaaatcaaagagttttggaacctagcgcgggatggggtcatattgcagatattctcaaagagcagggtataaatgttgatacggttgaactttcacctagtcgtagagagttattagaactcaagggccataatattgtgggtgaggacttcttagcattcaatccagacgagaagtatgaccgcattattatgaatccgccttttagcgataggcgggatgcagagcatatttatcatgcttttaacctgttaaaagatgacggtgtacttgtggccattgcaggtgaaggcctgttttttggcagcgataagaaagccaaggcttttagagagtggattgaagaaaacaatgcagaagtcgaggatctgcctgcgggtacgtttaacgattcatccctaccagttaatacaagtgttaagtcacgcttagtaaaaattgaaaagactgcagatagcgtgcagccgccagaatcaaggaacagccgcagcacagcagaaagtcctttaaccggatcaagcgttgaagaagtacgcaacactttagcctcaaagtttggtgaagcaacaattaaaaaacttgaggattcaggcgttttaactgttatccctacgtatgaagaaaaaggtgttgagggctttgccgaagctggaaaagtgacactcgttgccgaccatattaattctgaaaatgctgcagccgtttttctgcatgaattgggtggccatgttggttttcaacaacttttaaagcctaatgtttataaaaatcttttagataactttcattccctggtcgaaagcggcaatgaaattgctaaagaggctaaaagactagctgaacgtgagaaagaacagcatgttcaggttgacgaatatctaccttatctcatcactgtggccgaacaatctaaaatttcaggtccacaaaagggggctatccagcgctttattcagcggatcatttcagcagttaaagcttttgcggtcgataaatggggagtcaatttaaaactctctcctgaagacattttgaagcttgccgaacgcatgatttctaaagccaaggatctgcctgcagctaaaccagcaacaaaacaacgttcactaaatgaagcctctcatgcaccatttcaaaaagcgattgatgatgttgtagcgggcaatacacctgcaggcttcatccgtttaggtaaaacgcctaaggtctggtcattgattggattgccagcaaatgcccgtgtcacaatgcgcggagccactattgaaaaagtgatggctgaacatttgaatattgagaaaggcgaacattctaatattcacaatttaacgcctgaaacactcagacagttaccagcacaattaaatgatcccgtggccatctttaaatcaggtgacaatgcaacagtaaatggttttacagttttaactgaacttaaagaggttgatacggctactggtaaagaaaagcctgtaattgcggctctacatgtgaaagttaaaaataatgagactgagattatccagattgccagcgtttacggacgtagcgctaagcagctacagaatgcgcttaataatgatttgttatattggcataaagaaaaaggccagcaattcttagctaccgaagggcttcaattgcccaaggatttacgcggtgatgctgacctttctaaattcaatattaaaacaaatgaggatttagtcaagcgcgaatcggaagatagtaagcgtttcagccgaatttcagataatccagagcgcttctcacgtgcaaaacagaagcaaatttttgaagctgcaggtaaatccgcatttggccaagctgcattactcggtcttgagaggactaaaacaatttctaagcaaactggacgtttgtttaacacaatgttgcataaagccctgcaagataaagatttcaaagtaacttttgatttggttcaagacaaaatcaaccatgttaccttcgcttcatctgaaagcatggacgttgcaccagatattttaacccagcttgaaacgggtacagactacttgaaggaggtaaagcgggttggccaacaagtgggccatgccttaaatatttcagctaaacctgaatttcaaaaggatttagagaaagtcggcaacttactttttgaaacaacactttcggatgaacctaaagtatttacggatagagaacttcgtgaaatgaagttctcgcaaggtcaaattgatttatatcgacaagcacgtgcagcaattgacacatctttagattcattcgctaagacaactatttcaaatatctataagcatcttggcgggaaaagtagcgagattctggacctaacggccaaagatctaacacttggcgcacatgttgatgaagtggccaaaagaatggccaaaattgttgaagacaatcccgataaagccgatgctgcaaaagtcgcagaggaacatatcgaaaaagtagttacacggctggaacaactgaaagcagagggttatatgcctttaatgcgtttcggcaaatattatatgcgtgtaatagatccaaccactaatgaagtggcttttcgccaacactttgaaagtgaagcagaacgcaatttgtttgttaaaaactataaggcgcctgcaggctataaagttgaatcatcgcaaattaatgaacttgaacataaattgttccaaggtgtaagccctgaaacagtcgctttatttgctaaagaagcaggcttacccgttggtgatgcggaaacagcatatattaagcacgctgtgcgtgataaccatgctttaaaacgcttgttaaggcgtcagggcgttgatggcttcaatactgatacaaagcgtgttttagcagctttcgtgctatctaacgcacgctatgcggcaaatcagctatataaccctgccattgatgaatcaatcactgaaattaaaaaccctgcttctgcagaagatgcaattcgtctacgtgattatgcgctagatactcaggaagaagttgcaggtattaaaaactttgcgttcgtttggtatatgggtgcttcgttaatgtttggtttagtcaacttaacacaaccaatcctgcaaacactgccttatttactgcagtacagcacagattggggcgtaactggccgagcagtcattcaagcgggtaaatcatggtacggcaaagacataccagctaaatacaaggctcattatgagcgtgcacgtagagaaggtcacttagatccacaaaacacatggatgctacaaggacttgaacgcggtaagtctggtttaggtgcaagtacatggcaacttattagccatgcatctggattctttgctcaagcatcagaaacagtcaatagacgtgctgctctatttgcatcgctagatgtagctgaaaaaatgggacaagccaagcttgagaagttgggctttaaaaatgcttatgactttgctgtcagaacaatccaagaaacccaaggcatttacaacaaagggaaccgaccacgtgtatcacgcggcaatgtcggctctctattgatgatgtataagcaattcatgatttcttatgtagagcaaatggtcagaatgcagcgctcaggtttatggggcggtgaagatgacgagtttaaaaagaaaatggctcaattagtcggctttggtatttctcgaccgcttctaattgctcttggtattttgtggtctttatccggtgcaacgggtctaccttttgcaagagatattcttgacgttatcgagaccgctggcggcatggtcggaaagccgtttaatactgagcgagaaatccaaattgccttacatactgcccttggcgatagtcttggatctgcagctacaaccgcactgctagacggaccaattaacctaaatcctgtgctcgatgttaaaggacgaatcggcatgggtgacttaatccctgcaacgggctactttagcccacttaccagtgagtggcaaaagagtaaagaattgtcaggtatcggcggtgcaataggtggccttgttgagaaagctggtaatgcaatggattatgcaaaagttggttcctatggccaagctgtaatgcagttggcaccaaagtccgtatcaagcatatcgcaaggtgtaattgctgcagcaacgggcgattatcgcaacatgcaaacaggtgttaaaactaatgatgcatctgtgctcgatggtgttattaagatgcttgatgcccagcctgcaacaatcgctaaagagggtcgtatacgtggtcttgaaatgaaagataaggcggcacttcaatacgttaaagcacgtgctaaagaacgatatgaagaagctttagaatcaggtgatagacagaagatccaagaagctagggatgctatcacggcttacaatgaggcaaatccgcgctatccaattactttaaaccttaaacgtacagaaactaattttgctaagaaaaaccagtcttggcaggaaaagcggaaaaacacgaaaggtttagaatggatggatagttataaccagtatttagaaggggccgaagaatga

SEQ ID NO: 49667 - DNA, 1191 bp, Acinetobacter baumannii; identical to SEQ ID NO: 48114

SEQ ID NO: 49668 - DNA, 933 bp, Acinetobacter baumannii; identical to SEQ ID NO: 48161

SEQ ID NO: 49669 - DNA, 411 bp, Acinetobacter baumannii; identical to SEQ ID NO: 49579

SEQ ID NO: 49670 - DNA, 582 bp, Acinetobacter baumannii
atgaatcagttaaataatttacagcataaatttccagtagtggacggtattcctgaaagtgtacgtttgccatctcaaattcatcagcgtgtttcactcgtggatggtgagttgaagttatgggctggtgcaaccaagaaaacattatctccaatctggattcagcagcctgacggtagcctagagcaagttgaacttggtagttatccagtcatgggcgaaaaagaaagcgatgaagcattagaagcagcggtacgagcttataacaatggtcgtggcgaatggccaatgatgaaggttagtgagcgtattgcatgtatgcaaaatttcattcagcgcatggtagagcaacgagatctgattattaagctgatcatgtgggaaattggcaagagcttggctgattcagagaaagagtttgatcgtactatcacttacatgcgtcaaaccattgatgccctgaaagatctggataatgccaactcccgctttgtaattgctgaaggcaccattggtcaaattcgtcgtactccattaggtgttgtgttgtgttgtgtatgggaccatacaactacccgctaa

SEQ ID NO: 49671 - DNA, 1140 bp, Acinetobacter baumannii
atgtctggccttcaggaagaatatttacagcatcaaacaaaaattgagcagcttcgcctctcaattcaatatatccgctggtatcttgttagcctaattttactgtgcctaatttcagctattattttcttttgttactttacttcttacattacaaactttatttggtcaattggctttactattttaacgcttacctgtctattatttgtcccaaagctattaacacattatcgtgatattcatttcattaagaaaacagatttagtgctacaaggcatttgtttggcgtctggaattttaatgggaataaatatcattgttctgcatttttcccttcctgacactttaatatctgtttctgatgttcatatcctcatagcattatttattacctcagcccacataattggtcttacatttttaactcaacaacctcgatatttttatttactctttattccaagtacagttccactcattattggacagtttactcattctcaaatcacccaactccccttttactttgcttataatttagctttcgtcgcaactttgctttgtgcttatgcaactcagcgtaactatcaaaaaatttctcaactattatttaaaaataaacaacttgttcaagtagcagaacagcatactcaatgggctgaagagttatgtgtacagctccaacaagaagtaaataaatctaaagatattgaagcacagcttcaatttaataatcatttgctcgaacaaaaggttcgggaaaggacatatgacctcactaaaatgaatgagaggcttgaaagccatcatcataatttagcatttgcacatgaaacagcaggtatccgaccgtgggattgggatattgagaaacaaaaattagaaataacgttttttgatcaacaaaaacaaactcaaaatactcctttacacctcaagtcaattttagaacgcattcatcccaatgaccgaaagttatttgatgaacgtttaaaagaacacttggaaggaaaatctgatcacttcaatattaccttccgcattttacgtcgtaatggttcttggcgttggattcatgacgtaggacgtgtcattagccgtgatcctaaaaccaataaagggcagagtaaaacttga

SEQ ID NO: 49672 - DNA, 576 bp, Acinetobacter baumannii
atgagcaatttagaaataattacagaatcaagattcacaactgtttttatcataaaaatgttatatgcatttatgtgtggagctcacctagatagtattattaatgaaattagggaattagaaaaaccaagtaaaaattataaacgaatgaagcctgcaacgaaattcattaaacagcccctagaagggttatggcataagcattatgagcaggtcgggcttaaatctatggcaatgaatattaagcagcagatgggattgaataataagcagcagaagatattcaataatactttttttaaagaattttgcgatatattcaataactctgaaattcctcaggataaaagaattgaagccttaggatacttgtgttctgggaagcaatatatagatagaattaatgatggaaagttaactggtgagtggattatttaccatcattgcaatgggaaaaattattacttaaatgttgggaatcatagcgatggcgatgatgctttggcacaagaaataagagaaatagcactttttgaattccctttttttaaagggagtttacctatcttcgattaa

SEQ ID NO: 49673 - DNA, 507 bp, Acinetobacter baumannii; identical to SEQ ID NO: 46159

SEQ ID NO: 49674 - DNA, 1644 bp, Acinetobacter baumannii
atgtctgagcataattcgattcaatttgatccaacagcgttactcatcattaaaaatgaaattgataattcaataaaactggtggaaggcgctgtaagtaccttaattgaagaacaggctctcccttttggtattgatgatgcattagaacaatttaaacaatgtactcaagtcttacgtctcattgatattccgtatttggcaaaaatcactcaatattcaaccgagttgatgcaaaagattatggcgaatccagagcgcatcaataccgatgacgttgttgctttaagtgaaggcacaaccatggttaaacgttatattgagttcatctgtttacgtgaagtcgaagtacctcagtttcttttagacaccttaaataatttagaaaaagccttaaataagccactaacctcttctggacaacagattgcgtcaaagctttcaacagtttcacttgagttaccgttacccgaagtgcttattaatgaaagaactcagtttatccatcagctttataaattatcactacatcaatttttaaataaaactgaaagtgctcgagactttcaagcatttaaactgattggcagttatttagtgagcatggctcaaggtcaaccaagccagcaatactggcaattggtgaactctgcctttagtcatattgatgaacttgttttaaatgatgctcgcctacgtgtgttcattaaccttgaaaatgccataagtttatttttagcttcacctgaaggctttgaagcaaacttaactgctctagcagatatcctgagtattgtgattggacaagaagaccaacttgcgcagcaaatccgtagtcagttaaaaattggtcatgagtttctcaccgacactcaacttaaagcactgagccaacacttgtatggtccagactttgataccatgcaaacggtaagtcaattaatcttaagcgaaatgaataaagttcgtaatgatattgaatataactaccaaaacatgtcaccagaaaaagctcagcaactacaaagcaatcttatgcagcttgctcatacttttaaattactcaacttaaacgaggctgcttcagagctttctcaacaagccagcagtttaagccaaatcaatatattgagtaatgaaaactatgctcagcagttgatgaaaagcattttatctgccatgaatgctattggtattttggtgcgccattattcatctaaccgtctacaaattcgtgtgaacaataccaatatctctctagatcgtttagatgaagcacatcagacattattgaatgagaccaaaaatttaaccgattttgtatgtcaaagtttgactttatatgccaacgatcaaactcaaaatattgaagcaattgcaggctctttaaaagagttggctggcgcggctgaatttttaggaagtacagttcaacaaaatgctttacttgaaactgccaagtttgtacaacagcaaatcgatcaaaatcagcctttcaatcatgatcagattcactgtatttttaacgttttagctgggctagatatgttagttgacaatttaaaaaataaacagcctgttctacaatccatgtttgatgtagcattgctaagtagtcaacaacttcaaaaaaaggcagcttaa

SEQ ID NO: 49675 - DNA, 1836 bp, Acinetobacter baumannii
atgcaaaagttatattctcaactgagcctgctagtcgggctcagtgttttttcgcaagctatattctctgctcagcaaaccacgccgtatatcgcaattcattctaaacctaaatatctggcaatggctgctatgccttatgccaacccgaatgcacctaaaggcggaatattgagtcaggctgcgcaagggacatttgataacttaaacagtatgaacggtaagggaaatgcgacagaaggggtaaattatctttttgataccttaatgacccagtcacttgatgaagtgggcgtgttatatccactcttggcagaaaaagtttcgtatgatcctataaaaactcagtcagttactttttatttaaacccaaaagctcgatttagtaatgggctgcccgtaacagctgaagatgtgaaatttagctttgatacctatcaaaccaaatctaattttggtctacaaatgtatcttggagacttagcgaaaatagaagtggtaaacccacatcaagttaaattcacttttaagtctggccataatcctaaaatgccatttgttgtggcgagtttaccgatttactcaaaagcagattggcagaaacgtgattttacccgtattagcttgcaaccgattataggttcagggccttacgttgttgagaaaattgatgcaggtcgaagtattagttataaacgtaatccgaattattgggcaaaagacttacctattaataaagggcgctataacttcgatcatttaaagtatgtttattaccgaaattgggacattgcattcgaaggttttaaatctgggcaatatactttgcatgaagaaactaatccaaaaaaatgggtcactgactatcattttccggctgtaaaagcaggtttggtaacgcaatataaatttagacatcataaccccattgcaaccgagagttatgtttttaacacaaggcgcaaacctttcaatgacatccgctttagacaagctttaacttatgcctatgattttgaatggcaaaataaagctttgttttacggacaatatcaaagactacaaagttattttgaaaatagtgatttggcagcgacaggtcgtccttcaaacaatgaactggccatattaaagcctcttttgccaaagctttctccaatcatgcaaaaagctgttttggctgattggaaatatccagcctcagatgccagtggttttaaccggcaaaatttattaattgctagacagttgttgattcaagcgggttataaaattaaagaagggcaattatatacacccgaaggcaaacctgtaaaaattgagtttctcattcagcaagatggcaaacaaagaacactgatgccatttgtaagaaatttaaaaaaattaggaattaatattaatttacggcaggttgatgcgccgcaatatttagagcgtacacgccgttatgactttgacatgactacgatgaatttgccgcaatctttaaacccgggcaatgagcaggctcagttctggggaagtgcagcagcagttcaaaatggcaactataactacgctggtattcgtaatccggtaattgatgaggtcatttcaaaactggtcactgccaaagaccgtgaacagcaaatcacttatactcatgttcttgaccgattacttcgtgcaggatattaccagatcccgacttatggaaaaggggattattggtatgcgtactggaatatgtatcagcagcctaaagtgaaacctgggctctctgccggtatagagtattggtggagtaatgcaaaccaagctaagaaagttgctcaatatttacatcaacaataa

SEQ ID NO: 49676 - DNA, 213 bp, Acinetobacter baumannii
atggctgattattttgatgaaaatgaaatagctcgacaagctagagaatggactaaagaagatgtaattcaagttattaagtcatggcaaatggctgatgaattttttcaagaagagcatataggcaatagtaaccttaaggaccaaattgaagggtctagagaatgtctagccattattattgagttcattaatagtcgttgtactgattaa

SEQ ID NO: 49677 - DNA, 1206 bp, Acinetobacter baumannii
atggctttaacagaagcatggcttaaagccaataatggcaaggctcgtgagaaagttgaagaggttgcagatcgtgacgcaatgagtgttcgaatctcacctaaaggtaaagttgtgttccagcttcggtaccggtttgctggaaaagctgaaagactagatttaggaacctatcctcacctttcgcttaaagatgcgcgtattaaagctagtgaaatgcgctcactattagataaaggtcaaaaccctaaagttgaagaacgtgtaaaacaacagaaatatatcgaggcgagcacacttaaagaagtgttcgatgattggtatgaaagttactgtattaaaaagaaaacttcagccaaggatattagaagatcatttgaacatcatgttttcgatgaaattggtgatttacctattgaaagaattacgttgcagcaatggttagcaattcttgaagacttagcagatgaagtaccttctattgcggaaagaattttaactaacgcaaaacaagtacttaaatgggctaaaaaacgtgaaattgtggaagtgaatgttctatcagatatatatgctaaagaagatctaggtattgaaaagaatcgtggtaaacgtgtcttaaccgatgaagaaattactatggtttggaaagctattgatgagtcaaaagctttacttaaaaataagatctttctgaaattatgtttaatgtttggttgtcgtaatggcgaattaagaaaagcactaaaaactgactttgatttaaagcgtaaggtatggatcgtgccggttgaaaacaacaaagtcgggaaaaaaacaggtagagaaattgttcgtccaattttgccagaaatggaagagttaattgttgaagccatgtcattgaatgatagtgagtacttcttaacaaatgatgatgatgtaacaccaatgggccacggttcctcaaattcacttgcagcgaatgttatggagcgtttgcgaagacactataactatcatatgccccactggtcacttcacgatttacgtagaacagctcgtacaaactttagtgcattcacgagtcgtgatgttgctgaactcatgattgggcatgtaatgcctggtgaacaaggtacatatgattattatgaatacctaccacaacaaattgaagcctatagaaaatggttggataaacttaactctctgactattatttaa

SEQ ID NO: 49678 - DNA, 195 bp, Acinetobacter baumannii
atgagcaaagtctacaaaatccgtagtgaagaagttgaagacgtaaaagagacactaatgaagtttgtcgtgcaaaaaaaatcactcatggctgaaagcgatgtaatacacgccctaatcaaataccatttgaaaaatttaaaagctgaggaagtgatgaaatatagacaagaagtgttaggtaaagacgaataa

SEQ ID NO: 49679 - DNA, 1218 bp, Acinetobacter baumannii
atgattgattttatagaaatgcgcttattcgtcttagacgaatttgttatctcggatagggatggcaagcattttctattgtcttgtgatttgttacagcttggtgtcactgtaggttcaagagatgtttacttggatgagcagggcaatatgcaagtaggtgcgttgtatcacccttatgatgatttacccacttcatttactaatgttgcttttaaattagttcatgaaggtaaaattaaaccgcatgtcatgatcaaatgtagtcctgcaaagattatgcagggtcataacatttttggctcggataatttggaattaggtgtttttgaaatgcttggtttcttagcggaatctcatcctaagctttataaaatattagatattccgaatgctcagattgtcaatttagatgtgacttattcagcacgtttaagaaatgatgatcaagtatgcaaggttttagactttcttcgtaaagtttccagtggctcacttcgtaaatctaaattggtttatggttccacagtttattggggttcacctaattctaaacgcttgtgccgtaaggcttattgcaagtcaattgaatttcaattgcagcttgcaaagctaaaacgtcaagcttctaaaggtgaagtttttgcgttgcgtgtaattaaagcaatggaagaccctcgtgtaattgaatttatgcagggtttactacgtttagaaactcgttttaaacctttgtggttaacggaacataatattccactcaatgtatttgatcttattaaatatcaatctgaacaccctaattttttaactgatctttggcaactagcaaataaaccactttttgaagcattggagggtcatacgatgaaggctcttgatcacgatactgtatttggaaaaatctgcgctaaattcgacacttatacaaagtcaggtcgtttatcacaaactaagtctcgtaatatttttaatttcttttgtgcattggaacttcatggttctgatgaacttaagaagaaatatagtaagtcacaatattatcaatatatatcagatttaatgagttgcggtttttcaaaggcttatttgcaaaaccttgattcagaatcaaaaaataacgttattccattcgttcagctcgtcaaaatcgattttcagaatcaagtaccagattggtatcaagaacctgaatcacgctttgctaaggtaggttaa

SEQ ID NO: 49680 - DNA, 273 bp, Acinetobacter baumannii
atgctcagtattacagctcaattattagatgttcaaactggtgacttttgtagtctagtttttaaaggaaccaaatgggattttggtttacaacaagaagttccagcttctgtacgtgttttagtttccaaagatcatctttatttagttcctacttatcaggaagctaaagggaaaatggtttctgtagaagttaaagaaggtttaacaaagtcaaagcagatcttgtttagaacaagtggaacaggtcaaatagttctacaggatgattaa

SEQ ID NO: 49681 - DNA, 180 bp, Acinetobacter baumannii
atggcttatcagtgcaagacgatagatacagcaactaatcagtgtcttgagtgggtgatggctgtcaacttgcaggattttgctattacggggacgcaagcagcagctatctgcgtggcgattgcgtctttctttggtgtgtgttggattctaaaagagtctcgtcgcgcagttaaataa

SEQ ID NO: 49682 - DNA, 219 bp, Acinetobacter baumannii
atgaacaagaagttttctttagttaaaaaatctggcgttgctttagctgctgcgggttctgcaattgctgctaatgctgcaactatcacttatgacactactggtattttgtcaaacatcgatgccagtgaagcctttgcaattacctgtggtcttgcattcattgctttaaccgcaacgatctctgtattgcgtaaaggacgcggtgcagttcgctaa

SEQ ID NO: 49683 - DNA, 1239 bp, Acinetobacter baumannii
atgagaaagttattaaaacagatcaatgtgataattttgtcatttgtattgatctttgcacctacatacgtttttgcaactagtgtttctgctgagggttggtctgttactaaacgaatagttaatggtgctacaacgttttatgacggtactaaaaatattcttttaaatggtaaaagttacgctgctaagggatctgcttttattattccgaatgctactcaaatcggtaagatgattgttaaaacaggtgctgtttttgctgttgatttagcgattaaagcgttaattggtgctgtagattatgtaatggagcctgaaaacaaccgtgtaaaatactacggaatgatacaggcatttcaaagcaactcaccttacaacggctctgttaaagttgctaagagtcaagctgaagcttgtcagatatcagtagattttgttaaatcaaatacttcagcaaattattctagtgtggctcttggtggtgcagcactttctggcacttcacttgaatgtaaaattcttgcttatcgttctggcaacactactccattagtatttttgcattactggacgttaacaggcgttaaagatgatcaacctaaatacttaccttatgaggctatcggttatcagttgatttctgacgcaaatgctaataaatctgatgctaaagcttatgtttcatctgttgctgatactgcattagaacaagatgaacaaaagcaattggttcctgctcaagatattattaatcagcttgaatacaataaaactattccgaccactgaaactgcacagggtcagtcaactcctcaagcagatccaaacgatcccactgctcctaaagcaccgcctacagatatttctataaattttcctattttctgtgattgggcacctactgtgtgtgttgctgctcaagctgctgtagattttcctgcgaaggtagacaaatggattgagggtcttttttacaatacgaagggattacctgaatacgataataaaactgatctctttattcatgaacaaccagaaattaaacatgtaagtattaactggggttctgtttgtcctgcacctgttaccgttcctttatcttttatgggaatttcaagagaaatcacagtagttaattatcaatatatttgtgattacgcttggattattaaggcatccgtaaatatggttgcgtctatctctgctgtctatatcgttgcggggagaaaagaataa

SEQ ID NO: 49684 - DNA, 276 bp, Acinetobacter baumannii
atgtggaatgtattttatggagttatggccttatttgcccataacacgattagatcattacttacaggtttgggcattggtattgctactggtgtcattttttataacgttgtttctacctatatcgagtctgttatttcacaggcttcatcaatgccattcatatcattattggggatttttggcattgattcagggttatcaattatttttggtgcaattcttacaagagtatctattgaggcatcaaatctcagtctacggaagcgctcataa

SEQ ID NO: 49685 - DNA, 1233 bp, Acinetobacter baumannii
atgccaattaaactcattacaggtcagccagggaatggcaagactttatacgctgtacatttgattaaacaggcactcaaggaaggacgtgaggtctatacaaatattaacggcattaatcttgatgtattgcctattcctgaaaatgataagggtgaattagattggacgctgaccccgaagggagatgctgaactgggtgttaagggggcattaactgtctatgatgaaactcagaaactaccttattttgcgtacaaatctaaagaaaaactttctagcaatcctctaattactgaattagaaactcaccgacatcatggttatgatttaatttttattactcaatcacctaagtttttgcatttgcatttattggatttggtgaatgagcattaccacgttaaaagaccatttaacaagaaacaggctgaaatacacttacatcgtaaagcttgtatgcttcctgaaactgaagctgctgaaaaacgtgctgaagatatctttaaatttcagtatccacctgagttatttagtgcatataaatcaactgaaatagttactaactctaaattacgtatacctaaatatatgaagcgtctcatgtggattgcgggtatatgtgttgtcggtattatttatttagtgttctttagggacaattttatttttggtcatatgatggggaaagataagaaaaatgaagtcgctactcaaaatgtacctgctccaaaagcggatgaagaaagtaataaaaaaattgatgaagcatgtgcaaaacaatatggtttaactgttgagcagtgtgccgatctgcgtgacccaagtaaacgtaatgagcagttacaagctgctaatgatgttcgtatgtcgacgatagctgttaaatacaatcctaataagccttatgatgttgaattgcctccagatgcttatcaagtaacgtctaagcctgtttttagtggttgtatgaagaaaggtggccgttatgtggcatatacccaacaaggtacgattttaaaggatgtgtcacagtcagattgtaagcgtctaattaatcaagccggtgaccgtccatttaactattttgcccagcaaccagtccaacaaatgcagcaaaattttcagcaaccaacggtgtctattcagcctcaattggaacgatatcaggctaataactatgtacaagaaggtttacaacgtagtcccatagatggagctaatccgttataa

SEQ ID NO: 49686 - DNA, 132 bp, Acinetobacter baumannii
atgatgcagttttcagattgggttcaacttgtatttatggtctttttgactttagcaattattattaagtttactgtgtcttttcatcgtgatcttagaaatcaacaagatgatgagcagtatatcccttaa

SEQ ID NO: 49687 - DNA, 195 bp, Acinetobacter baumannii; identical to SEQ ID NO: 49678

SEQ ID NO: 49688 - DNA, 1218 bp, Acinetobacter baumannii
atgattgattttatagaaatgcgcttattcgtcttagacgaatttgttatctcggatagggatggcaagcattttctattgtcttgtgatgtgttacagcttggtgtcactgtaggttcaagagatgtttacttggatgagcagggcaatatgcaagtaggtgcgttgtatcacccttatgatgatttacccacttcatttactaatgttgcttttaaattagttcatgaaggtaaaattaaaccgcatgtcatgatcaaatgtagtcctgcaaagattatgcagggtcataacatttttggctcggataatttggaattaggtgtttttgaaatgcttggtttcttagcggaatctcatcctaagctttataaaatattagatattccgaatgctcagattgtcaatttagatgtgacttattcagcacgtttaagaaatgatgatcaagtatgcaaggttttagactttcttcgtaaagtttccagtggctcacttcgtaaatctaaattggtttatggttccacagtttattggggttcacctaattctaaacgcttgtgccgtaaggcttattgcaagtcaattgaatttcaattgcagcttgcaaagctaaaacgtcaagcttctaaaggtgaagtttttgcgttgcgtgtaattaaagcaatggaagaccctcgtgtaattgaatttatgcagggtttactacgtttagaaactcgttttaaacctttgtggttaacggaacataatattccactcaatgtatttgatcttattaaatatcaatctgaacaccctaattttttaactgatctttggcaactagcaaataaaccactttttgaagcattggagggtcatacgatgaaggctcttgatcacgatactgtatttggaaaaatctgcgctaaattcgacacttatacaaagtcaggtcgtttatcacaaactaagtctcgtaatatttttaatttcttttgtgcattggaacttcatggttctgatgaacttaagaagaaatatagtaagtcacaatattatcaatatatatcagatttaatgagttgcggtttttcaaaggcttatttgcaaaaccttgattcagaatcaaaaaataacgttattccattcgttcagctcgtcaaaatcgattttcagaatcaagtaccagattggtatcaagaacctgaatcacgctttgctaaggtaggttaa

SEQ ID NO: 49689 - DNA, 273 bp, Acinetobacter baumannii; identical to SEQ ID NO: 49680

SEQ ID NO: 49690 - DNA, 336 bp, Acinetobacter baumannii
atgaataattcacaacatccaattatgacagttgcaggcatccgtaaggctgctggagactttacagacgataaaggcaaaacaatcgagtactcaaacacggttgtaactgtattacagaattactctgagcgtgaacttgaacaaggtgcaatcggattcaaatctaccgaatataaaatcaaaggcgctcagttctttaatgattacatgcaccagaagctaccagccgaggctgcaatgatctttgattgggatttcacaggtaaacagccaaaggctgtgttagtggcgttagatttcaatgcgaagaaacaggaagttaaatcgctatga

SEQ ID NO: 49691 - DNA, 156 bp, Acinetobacter baumannii
atgatcaatataaatcattttaaatcagttgtttgcgctgactgtggcgttaagtttaaaccagcatcacgatatttagagttgggtgctcacaaaccacattgtacgcaaatgggtgctgaaatggtaaaaaagccaacacaaacaaaggcataa

SEQ ID NO: 49692 - DNA, 204 bp, Acinetobacter baumannii; identical to SEQ ID NO: 46668

SEQ ID NO: 49693 - DNA, 1248 bp, Acinetobacter baumannii
atgatttgtgaatttgtgatttacatgctcgatcatctctgtattaatgctcactttgaatcaagcttttactcgttgagtgaaagtggtgagtatttttttgtagatgttgatttgcatagcttggacattccattggcaagcagggcagttcacaagaatgatgacggctcgattacagcatcatctttatttcacccatacgaatcagttccgaccagttttactggcatgtctctaaagtgtttttttgattcgtcttatgcaccgtatattcagatcaaggctagtcctgcaaagctccgccaaggtcataatgtgtttggtgatgacgatattgaattaggggctatggagatgattgggtatttttatgaagcttatccaacgttagctcgcatgattgactggactactgcatgggtatcacacattgatgtgacttactctgcacgtgttggtgatcagaatacagctaagaaattgcatgacttcatgcgtcgcgtgactaatggtcagacgcaacttagtcaaaagcagatggataatacaatttattggggcgggcaacattcacgtttgattaatatcaaatgttacttgaaacataatgagtttatggaagagttcaaggaacaacaagcattggctaagaagtgtgataaagctgcaatgcgtgtcgtgaatgtaatgtctgatagtcgtttgattaattggactgttggcattatgcgttttgaagcacgtttaaaaaaacgttggcttgaacgtgctggtattccagttaatctttttgaacttattcgatttcagcgtgaaaaccctgagatattacaagcactttggactaaagcaactcatagcatatttgaagccttaaggggtcaaactatgaaattaaccgatgataaaagtgttcttgaagccatatctaaatccccagtagttgttacaaacagtgggaaggtttcccaaacacgtatccgaaatatttacgcaacattctgtctcatacgcgaacatggtttggaagagcttgccaaaatgctccctaaaacaacattttacagacagatttcagaattatgtgaatgcggtttttctaaagcgtatttacagaacttgcatgacaacaagtcatcaaatgtcattcctttcatgaagctcgtagaaatcgacttttcacagcagttgccagactggtatgaaccgccagtttcgcaatttaactatttaaaacttgcatag

SEQ ID NO: 49694 - DNA, 336 bp, Acinetobacter baumannii; identical to SEQ ID NO: 49690

SEQ ID NO: 49695 - DNA, 156 bp, Acinetobacter baumannii; identical to SEQ ID NO: 49691

SEQ ID NO: 49696 - DNA, 285 bp, Acinetobacter baumannii
atggaactacaaacccttcccggactgtttatttcacatggttcacccatgcttgcacttgatccagaacaagtgggtcctgccttacatcgtcttagtgtaaatctgcctactccaaaggcaatcatagtgatgtctgctcactgggaaagtaaagcactcgaagtaagtagttcgactcgtccggaaacttggcatgacttccgtggtttcccaccagagttgtatgaaattcgctatactgcccccggtcaacccgagccgagcttgcagaagaaattttga

SEQ ID NO: 49697 - DNA, 1758 bp, Acinetobacter baumannii
atggtgaactataacaaatttaataaaaatgtcttattcatctgtttatcactcatggggggcgtaagttatgcggctgactcggatgatccaattcgacagagaattcaggctgatcagaccattcggcaacagcagcgagatactgcattagaaaaacagattcagccgaacgtaagtgtgaatttagggcaagaacaaaataaaatttcagctcagcaattacaatatttacactctaatagtgaaacaccttgctttgaaattaaaaaaatacttttagaaggtgatttagctcatcaattcatttctagctttaatgtggttacaactggtaagaacaatattattggacgttgtttaggtgtaaatggtcttaatcaggcacttgatcttgtccaaaataaaattattgcagatggttatgtcacaacacgagtgttactacctcagcaaaatattgcatctggcacagttcgggttcatgttattcctggccgagttgatcagattaagtttgccgatggtacctctaaacgagcacatttatggaatgctttaccgatgaagtcgggagcgcttttaaatattcgtgatatggagcaaggcttagaaaactttaaacgtgtacctacggttgaggctgattttaaaattcagccagcagaacaaaaaaatgaaccgggttatagtgatgtgattcttgcatggcaacaagctaaaccttatcgcttacatgtggggattgatgattcaggttctgatgctactggaaaataccaaggtacagcgaccttgtcacttgaccatgtgttaactttaaatgatttattttatatcagttataaccatgatttaggtagcaatggttctggtaaacatggtacagatggcttttatgcaagttataccattccatttgattattggttattttcaaccagttatagccgttctaactatttacaaacagtcgctggaagcactgaaacttatcaatacagcggtaaaagcgaactcattaatgcagatttgtctcgaattatttatcgagatgctcaccgtaaaactgctgtaggttttggtggatggtaccgtgaatcacaaaactatattaatgatgtcgaagtagaagtacaacgccgaaaaacggcgggatggaaagcaagtcttgatcatactgaatatttttctaatgcaacattaagcggtaatgtgacttataagcgtggtacaggctggcttaatgcaatgagggcaccagaagaaagctttggtgaggcttatacacatgtaggcattttgcaggccaatgccagtttacaagttccttttaaagtggggcaacagaaccttcaatatcttgcagaatggcgtacccaacacagtaataagcctttgacaccgcaagaccgattctcgattggaaaccgttataccgtaaggggttttgacggtgaacaaactttattggcagataatggttttttagttcgcaatgagctgagtggctcaattatgaataaaccacattcgtggtatgcaggtattgattatggagaggtgggggggaaaaccgcgcattatccaaaccctttaccaggtactagtttgttaggtgcagttgttggtttgcgtggacaaattgcccctctgcgtttgaattatgacgtttttgtcggagcaccgttgaaaaagccagatcacttcgagacggatgattacacgactggatttagcgtgaactggacctattaa

SEQ ID NO: 49698 - DNA, 948 bp, Acinetobacter baumannii
atgaaaagcactttaattaaacatggctttttagcagggacattgttaggtttgccgttggttacacatgcctatgatttaccgaccgtaaatttaggcatgaccagttttctcgatggcggattacctgcagggcccggctggtatgctcaaacctattttcaaaattacgatagcaataaactggttgatgccaatggacaaaaactcggtttacctaaaacagatttaaattatcacgtactggttgagcagattagttatttatcgaatgtccgagtaaaagataaagccagcctaggtatgaattttttaattccttttgtcagcaaaatggacatggatgaaggcttgaataatgcggcaattaaagcccaaagtggctttggggacattatgattgggccgtttattcagttcgatccagtcatgggggcaaaagggccgaagtttgtacatcgttttgagtttcaggtgaatttacctactggggaatacgaccagcaaaaagatattaatccaggtaataatgctgtttcatttgacccttattgggctgcaacgtattggtttaatccaaaatggacagcttcaacgcgtatccattacctctataactttaaaaatgatgacccaagctatgcatttgctggagcaaatgatatgcaggcagggcaagcaatccatgcaaactttgcaacagactatgctattaccgaacagttccgcttgggactaaatggctattggttaaaacaagtcacagatactgaagtggatggtgaaaaagttaaaggtcgacgtgaacaagtgtgggcaattggtccgggtgcgatgtatagtttttctaaaaatgatcacttggttgcaaatgcctattttgagcaagatgctgaaaaccgaccagaaggtacgcgactacaagttcgttatgtccatcatttttaa

SEQ ID NO: 49699 - DNA, 540 bp, Acinetobacter baumannii
atgaaaagatgtccatcgtttaacagttactcagtcactgcagatgggaaagtttttacacaccgtcgcaagggtaggttagccaaagggctaaatagagttgatttttcatactcaaaagaactatcgcaatttaccacttcaaaaggatatcgcaccgtttctgtatatatcggtaatggcaaatcaagaccaattggtgttcatcaacttgttgcagatgcatttattgggcctgttccagaaaatcaagaagtacgccatctaaatgggattccatccgataatcgttacgaaaatctagcttatggcacaaaacaagataatgcaaatgatagggttcagcatggtggatataagcagggggcatcacatataaatgcaaaacttaatcaagggcaagtagagagcgttaggaaaaaacgtgcatcaggctcaaaagttaaagatttggcaaaagaatttgctgtaagtactagcactattgagtcggtcctctatggcaagtcttataaagttaaccaaggtggcgcctcatga

SEQ ID NO: 49700 - DNA, 618 bp, Acinetobacter baumannii
atgacggtacgtccaattttatttaattcagaaatggttagggccattttaaatggatctaagacgcaaacacgccgaattattaagagtaaagttcaaaaaaaaattgatatagctgaacatcttggagagttctttggtttagaagattctaaatcacaaatatcttcttattttcagaaaatttgtccttttggagcaattggcgaccagctttttgttcaagagacgtatggcaccaaaattagaagtttaggtggaactcctcatgagtcatttgtctacaaagcagataacccaaatgaaattgcttattacgactgtaagggaaagggttatccagttagatggaagccatcttctcgtatgcctcgtaaagcatcacgtgttttgcttgaaatagttgatatccgtgttgagcgtttacatgaaattagtgatgtagatgctaaggctgaaggttttgataaacctaaaactgattcaactatgcaaagcaataattctcataacccagttcttatctttcaaaaacattgggaagcaataaaaggtaaagaatcttggaatgaaaacccttgggtttggtgtatttcttttcggaggattgatcaatga

SEQ ID NO: 49701 - DNA, 339 bp, Acinetobacter baumannii
atgactaatttacgtcctactgattgcgaagaattcataaatgacatagatggcggcgcttttgcagaacaacttagttatgcagttagtaaagttgccagtgcagcaatggaaactcaaaaagtaggagtaattacagttcaacttaagttctcgaaatctaaaggtgctggtcacaacaacattactgtagaacataaattaatttcgaatgctccacttcctaaagggaaatgtgtagaagagcatagagataaaacacctatgtatgtaaatacaggtggtgatgtatctctttttgcgaaacatacagaacaactttttgaagtaaaagcatag

SEQ ID NO: 49702 - DNA, 288 bp, Acinetobacter baumannii
atgagaaacatccctgattctatgtcgtttcctttcactgtttggatgtgtgaaaacgggtattacccatctcataaaaatggattcattgttttaaagcgtggtaaagaagtcgcaaagatatcaatgaatgaaacaaaagatggttatccaatgaatgatatttgccaaaagaaatttgcctcgttctgcagagcatggatgaacagagataaacactttattgagcaattacgtttgcgtggattagcaagattaaatcaaaaaagttatcagatggtggcctaa

SEQ ID NO: 49703 - DNA, 324 bp, Acinetobacter baumannii
atgattgacatgaataaggaaagagaggcttttgcccaaaccgaatttaatacatttggtcttgatgttaaggatttcaaaaccactggtgagtatttcatgtttatagggtggttgttgcgatcagagcaagaaaaagccaaagctcaggcggtgccggatactcatattctgattccaaaggaaccaaaccacaaaaccataatggcaatggcttgtgtctgcttaggggctgttggttcagatccagagttccttactcttaaagatgctaaagatgtttacagtgcattagtagaaaaagaatcgggagctgagagatga

SEQ ID NO: 49704 - DNA, 258 bp, Acinetobacter baumannii
atgagtgaagtaaaagttaaaacatgtgatttttgtgatgatggaaatggtgaatgcatttacccctattacggtctagctcctcatattcacacaaagccaattggcggcactgtatttctagaaaggtcattacctgaaaacttctgtcctgatggggatggtttaggcatgtatacacactgtctgaattgtgggggtgacggcacctatgagggtacacaattagaagtcaaagcggaaagtttggagggctaa

SEQ ID NO: 49705 - DNA, 252 bp, Acinetobacter baumannii
atggaaaagtattttacgtccaatgtcatatgtaaaaagtacaaaattagcaagcgaactttaagccgctgggaaattatgacaccttggggcatacctttccctgcccctgcatttggtaacacacctggtgctgtgaaacgatacttaattatcgaagtcaaaaagtgggaaagaaagtgttttaagaaaaataatgaagacactgaatcaactgatgtaatagaacctgaatatttaaaagctatataa

SEQ ID NO: 49706 - DNA, 621 bp, Acinetobacter baumannii
atgcttacgctttcacaaaagctcccagattattttgaatatattgaaaatgatgttagctactcattacgtcaggttcagtatcctcaagatataccactattacaccgctggatgcatgagccacacgttattcctcagtggcaattaaataaaagcgaaatagaactcaaagtttattttgaaaaaatgctagctgatgatcatcaacgtttaatgattgtaggaatcaatggtcaagacgtggggtatgccgaaatttatgaagggaagcgtgatcgcctagctcgttattataaaggtgaagacaatgatttaggttggcatttactatttggggagaaatctgcttttggtcaaggctttttgcgtccaacgattcgtttattgaatttctatatttttgaaaattccccaacaaatagaattgtgggagagccagatcatacagtgaagccttatgcggctgtagtagaagacatgtgctatgaagagcagggcttaattccaatgccggaaaaaacggcaatgttgtattactgtttccgtgaaaagttctatgacagattttttgagttataccaggcatcgcaacaaaaattacagcaaaaagcgagttaa

SEQ ID NO: 49707 - DNA, 129 bp, Acinetobacter baumannii
atgaaaattgccattattggttcaggtatatctggactttacgcagcttggagattgtcagaacaacatcaagtcactgtgtatgaaaaaataactattttggcggtcatactgacactcacgagctag

SEQ ID NO: 49708 - DNA, 291 bp, Acinetobacter baumannii; identical to SEQ ID NO: 46180

SEQ ID NO: 49709 - DNA, 402 bp, Acinetobacter baumannii
atgtcatcagtcagcattgctgaataccgcaagttatttccgataaagaaaaataaaaagcggcgttcagcaaagcaagttgccagacaaccaagtgtgggtgaaatggttctggcaacgcatttaagagcatgcaagatcggttttgaacaggaatataagttccatccaaaacgcaaatggagagctgattttctgattattggtacaaaaattttgattgaggttgaaggcgggatctggagtggaggccgtcatacaaggggcaaaggctatataggggatatggagaaatacaactccgcagcaatgatgggttttacagttttacggttcagcacagagcaagtgaaagcaggcgtggcgattaaacaaattgagcaattggtaggtgaaaaatga

SEQ ID NO: 49710 - DNA, 477 bp, Acinetobacter baumannii; identical to SEQ ID NO: 44640

SEQ ID NO: 49711 - DNA, 396 bp, Acinetobacter baumannii
ttgcgtagcaggatcaaaccaaatggcaatatttccgcgactcatgagtgctcggttatatgcgggccaattggttgtgcggtagattttgtgtgtaggcttcttcatttgaaaattatatcgctgaaaaagcctttacagataggtttgtgcaacaaagccaattcaattttaaaatttttgacgtctgagaatgcattcacaaactctgtcatttgctctttatatataattaaagtcaatatgccatcaaagtctgtctttcccaaagaatatacaaaagaagagatcaggtcagcgttgtatcctgtagctgacccaataataatatttttttgcttaatcataaaattaataataaaaacgaaagagacacctaaattatatatttattaa

SEQ ID NO: 49712 - DNA, 219 bp, Acinetobacter baumannii
atgagtagtttaaaaattttaattacaaaactttctacagctgcacgcactgctttagaaaaatctgctaatgcttgtgttcttcagcaaaactacgaaattgaaattgaacatttatttttagagttacttaatcagcctttagaaaacgatttaaaaattttattaaaaaaaggctttgttgcacaaagatttgaaatgcaaagcgcccctaattga

SEQ ID NO: 49713 - DNA, 1782 bp, Acinetobacter baumannii; identical to SEQ ID NO: 48190

SEQ ID NO: 49714 - DNA, 1941 bp, Acinetobacter baumannii; identical to SEQ ID NO: 48164

SEQ ID NO: 49715 - DNA, 1110 bp, Acinetobacter baumannii
atgaagtcacgtgctgctgttgcgtttggtcctggtcaacctcttcaaattgttgaggttgatgttgcaccaccgaagaaaggtgaagtattaatcaagatctcccatactggtgtgtgtcatacagacgcatttactttatctggcgatgatcctgaaggcgtttttccggctattctcgggcatgaaggtgctggtgttgtagttgaggttggtgaaggcgtgactagcgtcaaaccaggtgatcatgttattccactttacactgctgaatgtggcgagtgcgtattctgtaaatctggaaaatcgaacttgtgtatttccgttcgcgaaactcaaggtagaggcgtaatgccagatggtaccactcgcttttcctacaatggtcaaccgatttaccactatatgggctgctcaacgttcagtgaatacactgtagtggcagaagtatcattggctaaaatcaatcctgaagccaatcacgaacatgtctgcttactgggttgtggggtaacaaccggtatcggtgcagtacataacacggctaaagtacaagaaggtgatagtgttgcggtctttggtttaggtggtattggtttggcagtcgtacaagccgcacgtcaagctaaagcagggcgtattattgtggttgacatgaatccagataaatttgcgctggcaaaagagtttggtgcaacggacttcttgaaccctaaagactacgataaaccaatccagcaagtcattgtcgaaatgactggctggggtgtagatcattcatttgaatgtattggcaacgtgaatgtaatgcgtgcagcccttgaaagtgcacaccgtggctggggacaatccgtaattattggtgtagctggcgcaggtcaggaaatctctacccgtccattccaactggttactggtcgtaaatggctaggttctgcctttggtggcgtaaaaggtcgtacgcaacttccaggaatggttgaagatgccatgaaaggtaaaattcaattagaaccatttgtgacacatacgatgggcttggatcagatcaatgaagcctttgatctaatgcatgaaggtaagtcaattcgcactgtcattcactattga

SEQ ID NO: 49716 - DNA, 399 bp, Acinetobacter baumannii
atggctactccagtaatttccggtaacgatattttctcccatgtcttcctcggcgcagtcgaccttaagaagtcggttgtattctacgatgccgctctaggtgccctcggcattaaaaacctagggccattcggtaacgattgggttctgtacggtcgcgacaaacctgctttcatgatcacccgcccaagcaatggcgcagaacccaccagtaatggtgtgacggtaggcttcgcagctgccacccctgcagaggtaaatgcattccacgcagccggcctcgccgctggtggcaccgatgaaggtcagcctggcccacgtggccacctgccgggtgcttacgcggcctacctgcgtgatccggctggtaataaggtctgcgcctacacctttgtctaa

SEQ ID NO: 49717 - DNA, 306 bp, Acinetobacter baumannii
atgcttcaccgcaccactcagcaggttttcagcgttgtcgctggcatgaagatcgctgctacaaacccagacgccaccacaccacgaaggtcggatgtcgacttcaatgtacaaacaataaagtgtgtaattcagggagccactaccgcgatgctcattttggattctgtgtttcttgcatcacgcaccgaactttcagtccgatcgtgctcattgaccgtctttggctatgaaggcgaggtaacagcctttctgagctctaatcagcagatagaggctcagagtaccgtaaaccgtgtggcatga

SEQ ID NO: 49718 - DNA, 834 bp, Acinetobacter baumannii
gtggaacgcattgaacatcacgccagcttcgagggttggcaggacgtttttcagcatgagtcaacagtgcttggctgcatgatgaggtttggaatctatcttccgcctcaggctgagcatgaaaagctcccagttctgtactggctctcaggtctgacctgtaccgaacagaacttcatcaccaaggctgcggtgcagcggtatgccgcggagcacggaatcattgtcgtagccccagataccagcccgcgcggagaaagcgttgcagacgatgctgcctatgatctaggtcaaggtgcgggtttctatgtagacgccacagagctaccttggagcgatcactatcagatgtattcctatgtggtcgacgaattaccagcgctgatcgaagcgaacttccctgcgtcgtcaagacgcagcatcagtgggcactccatgggcggtcatggcgctctggttattgcgcttcgcaaccccggtcgctatgcaagtgtctcggcgttctcgccgatcgtggcgcctacgcaagttccatgggggcagaaggctctggcggcttacttgggcgaaaagaatctggaagcctggaagcaatatgacacggtcgagctgattcgcgtggcgcaagaacgcttaccgctgcttgtcgatcaagggctgagcgatgagtttctcgagcaccagcttcgaccgcaactgttgcgtaccgcgtgtgaacaggtagaccacccgctaacgctcaatctgcggcctggtcatgaccatagctactactttatttcgacctacttgagcgaacacatggcccaccatgcggctgcattgaatcgctga

SEQ ID NO: 49719 - DNA, 837 bp, Acinetobacter baumannii
atgagtgctcagttatttgttgtagccaccccaatcgggcacttagatgatatgactttccgtgcaattgatatcttaaaatcagtttctattgtggctgccgaagatacacgccaatcagctcaattattcaaacactataatatatctaccccacttaccgcatgccacgaccataatgaaagcaacaaaattgagcagttagttcaaaagctacttgctggtgaaaatattgctttgattagtgatgcaggcacaccacttattagtgaccctgggtttaaactggtccgtgctgctcaagaaaatggtattagggttgtacctgtaccgggtgcatgtgctgcaattgctgctttaagtgctgtaggcctaccaagtgaccgttttagttttgaaggctttttaccatcaaaggcttctcaacgtatttcgcaactcgaaaagcttaaaaatgaaactcaaaccttaattttctatgaagcgccacatcgtattttagaatgcgtaaaaaatatggctgaagtatttggtgaaaaccgccctgtaggtttcgcgcgtgaaattaccaaaacatttgaaatgatcaaaaaaatgaccttaaaagatttggttagttttattgaaaatgaccataaccaagaaaaaggtgaaattgttcttgtagttggcggtgcaccagaaaaaaccgatctggaacaagaaaaactagatgagcttttaaagcgcttacttcaagatttatcagttaaagcagcatctcaactggctgctgatttaacgggtattaagaaaaaagtcgcttaccaacgtgcacttgagctgacacaatcttaa

SEQ ID NO: 49720 - DNA, 735 bp, Acinetobacter baumannii
atgaaattgaacaattataattttttgttaggtttggcgtttgcttcatctgttgctgctcctgccgctcaagcagaaattgtaattcatggcacccgtgtaatttatccgtcggatgctagagaagttacgctacaagttagcaataacggttcaaaaccagcacttgtccaagcttggattgatgaaggtgatccaaaaagtactccggatcaatcaaaagttccttttatgattgctcctccaatttctcgtgttgaagcgacaaaaagtcagacgcttcgtattactgcccttccaaatgcttctcaatttaaccagaagcaagaaactgttttgtggttaaacgttttggatattccaccaagacctacctcaaaaaatgcagatacgacacctgataacttcttacaacttgcaattcgttcccggatcaaattcttctatcgtccggcttcaattaaagaagatgcgaatttagcagcagataagcttcaatgggttaaatctggtcagaatttaacggtaaaaaatccaactcctttccacattacgatgacttctgtttatcaaaaggttggagataaaaaagttgatttattgcctcaagggctaatggttaagcctttttctgaagcttctattcagcttaagaatagcaaccttcaggatatgagttttattaatgtcaacgactatggtggtcgagtcgaacaccaaataaaacttcagtaa

SEQ ID NO: 49721 - DNA, 504 bp, Acinetobacter baumannii
atgaaaaatttagttattttcttaattagcttagctatggttggttgtagccatgcagataattcaagcgtaaaggaacgagaagctgaaattagtaaggcgcttgcttcaagaactatggccattggagatgatatagctcaatctcgaagattatatataacagcctataacaccattaataccaaatctgagatgactaacgagcttcttatctatacggttcgtaaagttgactcattaattggtaattatgaaacagataaagatagcttcgaaaatgatattaatgccaataaaaaaatttcgttagaagcagtagatgggctttgtattatgaataagtttcttcagaaatactcaacacttattgatttaaagaaagctccgcctagcatccaagaaagtacaagacgtgctttatcttatcaaccactttacctaaaaagacttagttcagataaggactatttaggtcaattacagtgcatcaatttaaagtag

SEQ ID NO: 49722 - DNA, 711 bp, Acinetobacter baumannii
atgggtagcactgacaaagtaagtaataacgaaggtcgtttaatatttcattcaaattatgataaaacacctataaatgctgatgcagcagatcgagtaaatttaaaagaaactatcaatctttgtagggcagatgatggttatttaactgcttgtagtggatgggaaaacttaattaaagtaaagaaaattgttccttacaccttttgtattcctcaacatctttgggaccatattaaaaatagacagccttttgaatacgatatggctttgcggtttggaatggaatttgatttaagagagattgaaaaaggtactcctggcctaatttatactgagtattttcatacaatgatgtatctaaggtttgctacctacttatatagaattgcaactgataaggctcttactgctgccacagagcttttgaaagatagcttcaaaatcagggtagctgctcactataagaacttagaagatattattgaattgaccccagcaggatatggaatttttgatcaaggcagatacactgctttggcaacaaataaccgaaacaatagaggtcctataatgatagggcacagattatatcaaatgatttttaagaaaaagtggaatagacaggcatacgaactctgcagaaccgaatatggctatcaagtaccaacttctgaagaaaatgaaatacttaactcgaaaaattggtaa

SEQ ID NO: 49723 - DNA, 552 bp, Acinetobacter baumannii
atggctaaaagttttgccataaatatggcccccactaatcatggtggaatgattcctgcgactcaatcaagaacatctcaagaagggaatttgtttgttcgtgccggtgatggacatatgtgcccaaagtgtaaatgctggtctgtcgttattaaaagtcacgatcatgtaattatggatggtaagccagttgcttacgtaggtgataagctctcatgtggggcaactatcatgcctcagcagtttcatgtagttggggactctggtagtccttattcctcagctgcttcttcaactgctcctgttcagaatagcttagtagaagataagtccaacgaaattcataaagttcagttcaagttggttgatgtcgatacggatcaaccactttcagcaatgctatatgaaattcatagtaaagaatctggaaaattattagtacagggctatacagataaaaacgggatgaccgccatttatgaaagtgaacatactcctgaatctgtacaactaataactgtcgatttatctaagccattagatccattatga

SEQ ID NO: 49724 - DNA, 429 bp, Acinetobacter baumannii
atgacttcacccaaatttttaagtgaattgcctctagatcaattgcaaaagttatctgaagaagatattgctcagactatcgcagcagaacagctttattttcagcataaaccacatactgtttattatcttgctgtgaacggtgcaaaaaccaggaatggtggcttagttagagctggaaatgataattacaaagctcatggtattgctattgcctgtgtaggtgatgaagctatatatgccgatggcactacttctaaaattatttctggtgcaggtcaagcctgtaagatcaagggtgtgtcagctgctttagtcggaagccgcttagaaaatggagatgagattattgatactcctgtgagtttatttgcagtgaggatatacaaagatcaatcccttcctgaaggctttcttagtcatgaataa

SEQ ID NO: 49725 - DNA, 903 bp, Acinetobacter baumannii
atgaaaactcttaatgaagtattcaaggatttctttgaatacaacaaacctctttggagcaatcgaactcgtctttataaaaaacaagcttatagagatcatgtaaaaccctatttagggaagatgaaagtcaatgaaatcaaaccaattgatatattgaaagttcttaagattttagaagatgaaggaaaaaccaaaaccacaaagtttgttttacaaatgctaagaaagtgctttcatttagccgtagcaagtgcttactgtgactttaatccagctacatcactaaccgatgccttaaagccgcaccaaactaaaaaccacccttttgtttcagaatccagaatgccatttctttttaaagcgttaaaagaagacggccgtttagatttggagtttaaagtagcatttctattggttacttatacagctgtaagagttaatgaagcatgtaaggccagatggccagaatttagctttaaacaggaacgttggagtattccagcttcacggatgaaaagaagaagacctcacgtagttcccctttcaaaacagatcatagaaattctacaaatgtggaaggaaaaatgcccttcaaatgttttggtattccctgagctcaaagatattaataaaccaatgtactcaatccgtcttattaatgcgattaataaaacatcgtacaaaggtaaacaaacagttcatgggttacgaggaaggttttctacttcagcttatgagtctgagttgtggcgggacgatgcaatagaaatgagtctggctcacgcggtgcggggtacgaaaggtatttataacaaggctacctatttcaatgagcgtcagaaactcatgcaatggtatgcaaataaagttgagaaatggtctaaagactttttggtataa

SEQ ID NO: 49726 - DNA, 174 bp, Acinetobacter baumannii
gtggataactcagcagctgataaagctaaaaagaaatatgaagccaaacggaaaaataaatctgtaccgttcttaattgacaaggaagctgatttattggcttttgctgataatgttgatgactttgctaattgggttaaaaacaaaattagagaagaactctcgaaaaaataa

SEQ ID NO: 49727 - DNA, 387 bp, Acinetobacter baumannii
atgaaagagtttaattttgtctttagaaaccctctctctcgagtaaatcatactctagctgattcaattccgtccgatactgtaaatgatatgtatcccgacgatcataaagtagcaaatgcaattgctgattatgccggtggtttaaatgattgtgcatacattattagcgaatggactaggaatagacttctaaaagagtatggagaatctagatatttagaaaaaattaaagttgatggccgccttttttttattgttaccattcactatgaaaagctaccaattcaaatggccgatggttcgaaaaaatatagacaaacttgggattctccgatgcgtcaaataaaggaattaaatattccaagttatatacccaagaaataa

SEQ ID NO: 49728 - DNA, 198 bp, Acinetobacter baumannii
atgaaaactttaacaattttaagcaaagtcactaaagatgcaaaagctactgcaaaatatgatgagtcattaaaaagtggtgatgtaataacttataaaaatgaaaatggcgtgatagttgagggagtcgtgtcatatgcaaaaaaatggcagtctcaacgctattcaaatcttccagtagtggagattgaaaaatga

SEQ ID NO: 49729 - DNA, 1299 bp, Acinetobacter baumannii
atgaaacatgagaacaaagttttttttctcatagacgtaaataatatgtatgtctcatgtgagagagtctttgacccaagtttgaacaacaaacccgtcatcgtattatcaaataatgacgggtgcgccgtggcgcgtagcaacgaatccaaagccctaaatataaaaatggttgtgccgttattccaaattaaagacatagtccaaaaacataacgtagtagtgctatcaagcaactatgtgatgtatgccgaaatgtcacggcgctttcataagatactttcttcatatgtaacagaggaagaagttgaaccatattctattgatgagtgctttgttgattttactgcttatgagaagaactttgatttagaaaaagttggtcacgatatgcgggcgaagatatggaaatggattggtttgcccgtgtgcgtaggaattggtcgcagcaagacggaggcaaagatctccaatcatatagctaagaaaaatcaaggctttaacggtgtttgcgacctcgtcaatatggatccatgtaataaagaatattattttgatcagatcgatgtaagtgaagtttggggtgttggtcgtaagcatgcaaaaaaactacatggaatgggagttaaatcagtattggatctagcttgtactgaagcacgtgaaatgcagcggcagttttctatcgtcatggctcgtacaattaatgaactacaaggcatttcatgtattgaaatagaagatacccccccatcaaaaaaacaaataataaagtcttgttcatttggtacaaaagttactgaactctctgatttgaaagaagcaattgctatgcacgctcaagaagcttgcaaacggttgcgtgatgaagaatcactatgtggttgtctacttgtatttgttcaatcaagcccctttgatgaaagtgcaccattttataataagtctattacaggcgcattttctgaacccacagattgcgcaacagatttcgtaagagcagcagtaaaaatggtgtcagatatctttaaagaaggcatcaagtataaaaaatgcggtgtcatattaacaggcttagaacctaaagctggccatacctatgacctactcacagactttaaaactatagagaagaaagaaaaattgatgaaaacactggataacgtgcacacaaaattcggaaagaaaaagctcggtgttggtccttgttatatacctggtcgtaattggtcaatgacgagagataaactgactaaaaacccctttagatttgatgaactattaaccataaaaaattaa

SEQ ID NO: 49730 - DNA, 498 bp, Acinetobacter baumannii
atgagcgaaattgcaccatccatcatccagataaaaccgtacctcacacaaggcgctgttttatctgaagccttgttaatcaagcaagttgtaccatcaactcacatacttgtcccttacgctcttgaaaaaatttccgctggcttcccctctcctgcacaagactatatagacaaagcgctcgatatgaacgagcacttaataaaaaatgaaactgctacgtttattgtgaaagttgcttcgctttcaatgctgaatgcaggtattgatattgatgacgaactaattgtcgatcgcagtctcgatgcaaaacacggcgatattgtcgtggcactaatcgataatgattttactgttaagcgcctaatgattgatgaaaaaggccaatggctaaaagcagaaaatccagattacaaagatattcatttattagatggccaagaattaataatttggggcgttgtcacctgcatcattaaaatgattagaaactcatga

SEQ ID NO: 49731 - DNA, 636 bp, Acinetobacter baumannii
atgtgtgcaaactatgaacctatatctaaagaccgagtacacctactagatctccttgagccaacattcgactacaaagatgatgtttatcctggctacgactgccctcttatattttctaaagatggtcagatagaatggcggcaagttaaattcggcatgattccaccttggaagcatgaccttaaattttctaaatacacatacaatgctagaactgagacagtcgatacaaagcctagtttccgacacgcatgggctaaaagccagtttgctttgatacctgtagaaaagatctatgaaccaagatatgtaaatggtaaagcggaaagatggggaatttttagagaagatggcttaccgttcacggtggcagctatttatgattcaactgttattgatgggcagcaagtaagatctatgtcgatgctgactattaatgcagataatcaccctttcatgagccagttccataaaccagaagatgagaaacgatcaattatcgtcattccagaagagtatcgagaagattggttgaactgtaaaaaagaagatgctgaccaatttttctttgaaatgccgatcggtgaatttactgctgactacttccctaaacccaaaaaaagtgcaaattag

SEQ ID NO: 49732 - DNA, 456 bp, Acinetobacter baumannii
atggataatgcaaacatagaaacacaagcagaagagcaaggagaaaaaaataaatcaaaatcaaaaagttctagaaaatctgcattagattttagaaagtatactaaacaaatctggttggcaggtttgggtgctttttcacgtgccgaagaagaagggaacaaactatttgactcattagtcaaagtaggggaagagttagaatccaaaacaggtgatttagcagatacaactgttggtaaagtaaccgaaaaagcaaaagagtcagtttctgatacaaaagataaggtcgagaaaattttagatacgagtgtaaaccactctttaaatagaattggcttggtcactccgaaggatttacagcacattgaacaactcctagttcaactgcatataaaggtagatgctttaattgaagaaaatcagaaattgaaggcaaaattgaatgaaaagtaa

SEQ ID NO: 49733 - DNA, 1866 bp, Acinetobacter baumannii
atggaatcgtttcgtacagtcattaagggttggctcggcaaagtccttttagttttgtttttgacccctttagcgcttgtaggtattgaaggatattttaataggggaaacaaggcagatgtcgcaaaaactgtaaatggacaggacatatcaaaaaaagaccttgaaactttaacgcaaaggtataaagaacaatatttagctgctgtaaagggtgatgaaagtttacttaatttaccggtaattcaagccaaagctcttgatatattggtatcccgtaatttgctcattcaacaagctgaaaaattaggtatttctttaagcgatgctcaaatcgagcaaatgttagctcagcagccaagtttgcaagaaaatggccagttttcacaaaaattatatgaaaattatttgcgttcgattggtatgacaagcgaaggtttaattgctagcttacgtcaagatcacgctttaaaaatgttgacttcaacttttgcagattattctttagtgagtaaagttgatttaatgcaaattgcgaatttgcaaactgaacagcgtacattgcatttggctagtattaagttagacccttataaagctggtttaactgcatcgaaccaagaggctactgattactacaacaaacatcagaatgagtttaaacagcctgcttctgttgatgtagattatgttgttttatctccgtctttaatggctaagccagctccagccacagatgccgagcttaaacaagcttatgcaaagttcgtagaaactcagcaaaaagatgctaaacgcatagtgaaacatatccttattacgacagacgctcgtgatgatgcggcagctcaaaaacttgctaaagatgtatatgcaaaaattcagggtggactttcatttgctcaagcagcagctcagttctctgaagatccaacttctaaaacgaaaggtggattagttgaagcatatgcacctggtgttttctctgatgcatttgataaaactgttttaagcttgaaaaatggtcaaatttctcagccagtaaaaacacaatatggctatcatattattgaagcggagactcaggccaaccaaattccttcatttgaagctgagaaatcacgtttaattgcagaagttgaaaagaataaagttgcatctgtttattcagataccgtaaatagtttgaatgaaacgattgttggtaatgattctttagatgctgttgtacagcaggttaaaggtacaaaaatcgaatcattaaatggtgtaactttagctactcaaaatccatatttaagtgatcctaacgtaaaaattaaattgtttaatgatgatgtgaaaaatggcgatcgtaatgcttcatctaatattcaattagcgaacggagatactgtttgggttaaagtacgtgactatcatgcggctggtgttaaaccacttgcccaagcaatgaatgaagtaaaagctaaagtaattgatgagaaagcacgtaaagcagctcaagcgaaaatcgctacaatgctgacagaattcaaaactcagccagctgaacaagttgtcgcgaaaaataaagttgcttttgaatcagcgggtgtatttactcgttcacaaggtttaaaacgtgcaattgagcgtgcagcatttagtgttcctgcgccaaaaccaggtatgtggtctgtaactaccgcgaacttaccaaatgagttagtggttgtggctgtttctaatgtaaattcagctgctgttaacgctatgcctgctgatcagttgcaacaattaaaacagctttaccgccaatctcgtggtcaacagatacttgaagattacagcgaatacttaaagtcacacgctaaaatcaaataa

SEQ ID NO: 49734 - DNA, 966 bp, Acinetobacter baumannii
atgattgatcacgtaaacatggatgcactaagtaaattttttgatgatatccacttaaataagtctgaatatatttatataaaagcacaaggtgaatgggcttttaaaacacaagatcaatctgccttactggcttatattgttttaacgggttctgtatatatccaattaaatgtgtcagagaaaataacagcaagagctggagatattattttaattccttctggaaaagcgcatcatgctacagactcaaaagctactgcgagtaaacttgtagatccagtcgatattactccattatttaatgggcatcgccatgatccaattgagttaggcacatcaacatctgaaaataccctattactctgcttgcgctgtcaagtcgatacttatatggcagggccacttattaatgcattaccctctattatgcatattcaacatgagaaccaggccactccccctgaatggttgcaaataggtctctactttttagcggtcgaaacacaaaaaatccaaccaggtcatgacaaaattattgatcacttagtcagtattcttttaattgaatgtattcgtgatcatattcaacaaatgtcagatcaacaaaattggttaggtgccctcacacatcctgaattaagtaatgctttatccgcaattcatagtcaacctgaaataagctggactgttgaatcattagctgaacaatgctgcatgtcacgatctaagtttgccaatctttttaatagtattattggtgaaccacctcttacttatttacagcattatcgcttccgcttagctagccaatatctacgcacaagtaatttatcaatacaacaaatttcaaataaagtgggctattcttccgaaaccgcatttagtcaggcatttaaaagagtatttgatttatcacctaaacaatatagacaaaattatattggtactaatctcgatgaataa

SEQ ID NO: 49735 - DNA, 1224 bp, Acinetobacter baumannii
atgaatgcaccagtaaatgttcagcaagaacttatgccagtgccagcgtctatgcgtgagatagatcgtaagcgctatttatggatgattagtccggctctacctgtaattggtttaggtattttagctggataccattttggtccacgcccattaaagaaagtatttgctttaggtggcccacttttattacacgttgtgattcctgcaattgatacaattattggtaaagatgcgcgtaatccaaccgatgaagaaattaaacttcttgagaaagatccatattattcgcgtttggtaaaaagttttattccattgcagtatgcggcaaatatttacgcatgttatttaacaagtcgtaaagatacttcatttattgacaaaattttgcttggtatttcgatgggtgccattaatggtattgcaattaatacagcccatgaattaagccataaacatgatcgtatagaccatattttatctcatcttgctttggtgcctacaggttacaaccatttccgtattgagcatccatatggccatcataagcgtgcagctactcctgaagatccggcatcttcacgtatgggtgaaacattctatgaattttggccacgtactgttatcggttcttttaaatcagcaattgaaattgagaaaaatcgtttaaaacgtaaaggtaaagagttttggtcactcgataatgaattgctgcaaggctggggtatgagtgctgctttccatgcttctatggtaggaatttttggtaaaggtacgattccttatttggcaacacaagcattttacgggattagcctattcgaaattattaactatattgaacattatggcttattgcgtcagaaaaaagaaaatggccaatatgaacgtacaatgccagagcatagctggaataataacaatgtagtgaccaacttattcttatatcagttacagcgtcactcagatcatcatgcttatccaactcgtccattccaagcgttacgtcattttgatgaagcaccagagttgccaagtggctatgcaagtatgctgctaccagccatgattccttcatggtggtttaaaatgatggataagcgtgtatttgatcactacaaaggggatttaaataaagcaaatatttcaccaaaacgtcgtgcaaaaatcttcaaaaaatttggtgtagtcgataagtccttagaagctacacaggctgaataa

SEQ ID NO: 49736 - DNA, 1206 bp, Acinetobacter baumannii
atgaatttacaaaatccaaaaaaattcaaaatgatgattgatcaggcacatgatgttgcggtcaatgtattacgccctatttcgcgtaaatacgataaagcagaacatgcttatccgaaagagctggatatgcttgcttcactcattgatggcatgaatgaaggtggtgaaggaattaatgcaggtgctgctggtgcaggaaaacgtggtgaaactgataatgaaggagtccgtaatggaaccaacatgtcaacagcgttaggcatcattgaaatgtgttatggcgatactggactattactgagcatgccacgtcaaggtttaggaaactctgcaattgccgcggtcgcaaatgatgagcaactagaacgttttaaaggtacttgggcagctatggcgattactgaaccaggctgtggttctgactctgctgcgatccgtactacggcaactaaagatggcaatgactatattttaaatggtgaaaagatttttgtaacttctggtgaacgtgcggactcggtagttgtatgggctacacttgaccgaaaacttggacgtgcagcaatcaagtcattcgtagtgcctaagggtacacccggaatgaaggttgaacgacttgaacataagttaggtatcaaagcttctgatacagccgttattagttttactgactgtcgtgttccagctgaaaacttgctcggtaatcctgaaattgatgttgcaaaaggttttgccggtgtaatggaaacctttgataatacacgtccattagtcgcagcaatggcaattggctgcgccaaggcttctttagagcgaattaaagaaatttttaaagaccagttagaccccaattactcgactccatatttgcaaacttccaaccttgctgcacaaatttaccgaatggaagccgaatgggaagctgcacggttacttatgctgaaagccacgtggatggcggacaataagaaaccaaactcaaaagaagcttccatcgctaaagcaaaagcaggtcgtgtaggcaatgaaatcactttgaagtgtgtcgaattagcagcaagtattggctataacgaagatgaactacttgagaagtgggcacgtgattcaaaaattcttgatatttttgaaggtactcaacaaatccagcaacttattattgctcgacgtgagcttggaaaatcttcaagtgaactaaaatag

SEQ ID NO: 49737 - DNA, 594 bp, Acinetobacter baumannii
atgaaagctattttaacgaagaaaattattagctgtatcgcaattagtggtgttttaagcttcagtgcatttgagattatggcagcgaatcaacaaactataaatgatgggaagaatcactctaaaatattaaatgaaaaccatgaaaatttgactgatagtcaaattttcaagatattaagtacagctaataatggtgaaattaagcaggcaaaaactgcattgccaaaattaaaaatggatgaagctaagaaatatgctgaaatgatgattaaagaacattcagccaatgaaaaaaatgcacaagtgttggcaagtcggttacagttgatttcacaaaccagtaatcttagtaaatcattgcaaaatgatagtgataaaattgttagtaagcttaatcaaataacatcagatactgataaaaattatatgatgagtcaagttaaagttcaccgtaaagttttgacgataattgacaagcagttaataccaaacacgaaaagttctgaattaaaaaatatgctcgtacaaacacgtgatgctgttgcgaaacacctaaaagcagctgaagatatatttaaaaatatgaaataa

SEQ ID NO: 49738 - DNA, 357 bp, Acinetobacter baumannii
atgtggacagtcattacaacggatctgtttaacgaatggcttgtacagcaagatgaatctacacaagagaaagtactcgcagcgttggtcgttctacagcaacagggaccaagtttaggtcgtcctttagtagataccgtctatgactccaaatttaccaacatgaaagagctacgtgttcagcatcgaggtaaaccactgagagcctttttcgcatttgatcctttacgacaagctattgtgctgtgtatcggtgataaaggcggtaaaaagcgtttttataaagagatgttagatattgccgatcagcaatacgaacttcatctttcaactttaggagatcaatctaatggctaa

SEQ ID NO: 49739 - DNA, 303 bp, Acinetobacter baumannii
atggctaagaccctacaagaattattggctagtcgctctccagagagtcaagctcgtattcaaaaaatggctgatgaattactgttggaaactcagcttcaccttattcgtgaagagttagagatttctcaaaaagaactggctgcaacccttggaatcaaacagccgtcattgtcagcaatcgaaaatcgtggtcatgatcttaaaatttcaacgatgaaaaagtatgttgaagcaatgggcggaaaacttcgtattgatgtagagcttccaacaggaaaacacataggatttaatgtctaa

SEQ ID NO: 49740 - DNA, 210 bp, Acinetobacter baumannii; identical to SEQ ID NO: 48453

SEQ ID NO: 49741 - DNA, 462 bp, Acinetobacter baumannii
atgaaattagcagaagctctcttacttcgaagtgatcaacaaaaaaaaattatttcactaaaacaacgtatcaatgcaaatgtattggtacaagatggtgatcaaccatctgaagatccaaatgaactactaaaacaagtattttctttaattcaagaatttcaaaaattaagttatgcaattcatgaaactaatgctttaacaaaattaaatgatggccgttctctacttgctttattgactttgcgtgatgaatttgtagaacagcacaaaaccctaactgcagcaataagtaatacatctcgtgaatctgatcgttatagtacgcgggaaataaagtggcataaagttattccagtttcatcattacaaaaacaagctgatgatattagtcttaaattacgtgatttaaacgtgttaattcagtcgactaattggaaaattgatttgattgaagcctaa

SEQ ID NO: 49742 - DNA, 2412 bp, Acinetobacter baumannii; identical to SEQ ID NO: 46704

SEQ ID NO: 49743 - DNA, 315 bp, Acinetobacter baumannii; identical to SEQ ID NO: 46705

SEQ ID NO: 49744 - DNA, 288 bp, Acinetobacter baumannii
atggaacagtattttgaatgggatgaggctaagaatcgaaagaatcagaaaaagcatgatatctctttcgaaactgcaagccttgtttttgaagatccattacggatctcaatccaagacagatatactaatggtgaagaacgttggcaaaccattggacgagttaaaggcgtactaatgttattggtggctcacaccatttttgatgaagatgactgtgaaatcatccgaatcattagtgcaaggcaagtcactaaagcggagcgaaacaaatatgagcatggttag

SEQ ID NO: 49745 - DNA, 834 bp, Acinetobacter baumannii; identical to SEQ ID NO: 49718

SEQ ID NO: 49746 - DNA, 306 bp, Acinetobacter baumannii; identical to SEQ ID NO: 49717

SEQ ID NO: 49747 - DNA, 399 bp, Acinetobacter baumannii; identical to SEQ ID NO: 49716

SEQ ID NO: 49748 - DNA, 1110 bp, Acinetobacter baumannii; identical to SEQ ID NO: 49715

SEQ ID NO: 49749 - DNA, 1344 bp, Acinetobacter baumannii
atgaaaacgatagatgcgaatacgattatcaatcgcgaaaaactgtctcccttacagtgggtggtttttattctaggcttttttgtctttttctgtgatggtctagacacaggaattattggttttgttgctccggcattactagatgactggggaattaccaagcctcaacttgcaccagttttaagtgcagccttagttggtatgtcaattggtgcaatcatttcgggacccttagccgataaatttggccgtaaaggtgttattgtttttacaagccttttgttttctatatttaccattttgtgtggctttgccaattcaactcaagacttaatgatttatcgctttattacaggtgtaggtctaggcgcggccatgccaaacatcagtactattgtctcagaatatatgcctgtaaaacgtaaagcatttcttacaggtcttgctggctgtggatttatgctgggtatttcttgtggtggtgtgctgtcagcttatctattagaaagctatggctgggctaaggttattattattggcgggagtattcccctaattttagtggttgctttattacttaaattacctgaatcaacgcaatacttaattacacgtcatcaacaagataaagcacagcgtatcttagaaaacattcaaggtcattcttttcaagagcctgtaaaacttgttttaactcaagcagaaactgcatcggatgaaaatccggttaaagtagttttaggaaaatatctttggggttcaagcatgctttggctctgctgttttactagtcttttggtgttctatcttttaacaagctggatgccaacgattttaaaaacagcaggtttcagtacccaacagtttagtttaattgccgcgattttcccttttggtggtgtaattggcgcaaccattatgggatggtacatggataaactgaacccaactacagtcattaaatattcatatctgattgctttcgtcctattcattgttgcaggtttggtgagctcaaatattttcttattgggtcttactattttcttaattggtgctttactcgctggtgcgcagtcttcattactgccacttgcggctatgttctatccagcagtatgccgcgcggttggagtttcatggatgcatggcatcggtcgtatcggtgcaattttaggcgctttctttggctcactcattttcactttcaacctaagcttaagcggtattttctttattctagcaataccaaccttcatctcatttattgcacttagcctaaaagtaatttatgagaaatctaaacacaaacaagtgttaaaattcgaagaaagtctataa

SEQ ID NO: 49750 - DNA, 234 bp, Acinetobacter baumannii
atggacacaattgacactttagctttacaaacgattaatgccgaaaacccaagagaaattcgtaatttgcttggtcagtttgcaactggcgttaccgtgattaccactcgtggtaaagatggccggaaaataggtatgacagccaattcattttcatctctgtcgttagatccgccattaattttgtggagcggcagagtaaaacttgaagtgcgacataaaccacctaattaa

SEQ ID NO: 49751 - DNA, 2271 bp, Acinetobacter baumannii
atggacgatcaatctttaaaacaggccgctttaaattaccacgaatatccaaatccagggaaaatcagcgtcacgccaagtaagcaacttgtcaaccaacgagatttggctctagcttattcaccaggggttgctgctccatgtttagagattgaacgtgatccttcagctgctgcaaaatatacagcgcgtggtaacttggttgctgttgtcagtaacggtactgcggttcttggtttaggtaatattggtccattagcttctaaaccggtaatggaaggtaaaggcgttctgttcaaaaagttcgctggtgtcgatgtatttgatattgaaattgctgaaaacgatccagataaaatcgttgatattgttgcttcattagaaccaactttcggcggtattaaccttgaagatatcaaagcgcctgaatgtttctacattgaaaagaaacttcgtgaacgcatgaaaattcctgtgttccatgatgaccaacacggaacaagtattattgtaggttcagcattattaaatgctctacaaatcgttaataagaaaattgaagaaatcaaaatcgttgcttcaggtgcaggtgctgctgccctttcttgtttagatttactttgtgctttaggcgtaaataaagaaaacatcattgttgccgattctcgtggtcttcttacaacttcacgtgaaggcttggatgaatcgaaaaaacgttatgtacaagacattaaagcgacccaattacatgaagtaatggctggcgcggatatgttcttaggtctttcagctgctggtattctcaccaaagatatggtgaaacaaatggctgaaaatccgattatttttgcattagcaaacccggatccagaaattctgcctgaacacgcacatgaagtacgtccagatgtaatcatggcaactggtcgttcggactacccgaaccaagtaaacaacgctttatgtttcccttatatcttccgtggtgcacttgacgtaggtgcgacaaccattaacgaagatatgaaaattgcatgtgtacacgcaattgcacgtatggctcatgtagaagctgatgctgcaacatatggtgaaaaatctgcttcatttggtcgtgactacttaattccacgcccacttgatcaacgtttgattttagaaatcgcgcctgctgttgctaaagctgcaatggactcaggtgttgcaactcgtcctatcgaagatttctctgcatatcgtcaaaaactttctgagtttgtttataattcagcattcttgatgaaaccaatctttgctcaagcaaaaacagatcctaaacgtattgcatacgctgaaggtgaagatgagcgcgtattacgtgctgttcaaattgcagttgatgaagatttagctaaaccaatcttagttggtcgtacagcagtcattgaagcaaacatcaaaaaattaggcttacgtttacaacacggcgtaaatatcgagattgtagatcaagaacaaaatccgttatacgaagagttttggaaagactactatcaaactatgcaacgcaaaggcatcactgttgaatatgctcaacgtgaagctcgccgtcgttcaacactcattgctgcacttctagttaagtttggcaaagcagatggtatgttatgtggtacttacagtagctataacattcaccttgacttcgtacgcaatgtaattggtcttaaagaaggcatgaacaacttcttcacgcttaatgcattaatgcttgaagatcgcaacttgtttattgctgatacttatgtaaacactaatccgactgctgaacaacttgctgaaatgactattttagcggctgaagaagtacgtcgctttggtattacaccacgcgtagcgctactttctcattcaagcttcggtagtgaccagacagactcaagcgctcaaaaaatgcgtgaagtttatcgtattttatctgagcaagctccagagcttgaagttgaaggtgaaatgcatggtgatgcagcattagacgaaaatattcgtcattttgcattccctggttctcgtttcaaaggttcagcgaacttgctgattatgccgaacttagatgcagcaaatatttcgttcaacttgttaaaagcaacttctggtaacaacgtaacaattggtccaattttactaggtgctgctaaaccagttcatattttgactccgacagcgacgactcgccgtcttatcaatatgactgctttaactgttgctgaaattcaacagcaagaaaagtaa

SEQ ID NO: 49752 - DNA, 1029 bp, Acinetobacter baumannii
atgctgttaaaagttggtgaattggctaagcaaacaggacttactgtccgtgctcttcatcactatgacgatatcggtttacttcagccttcggcccgttccgatgctggttatcgactatatacccctaaagacattactcgtttgcatcaaattcaagcattacgagggctgggtatgtcgctagccgaaatctatacggttcttgaagatcccaatctagcacttttaccgattattgatcggcagattcaagcaattgatcaaagactggcagagcagaagaaattgcgaaatcagcttggacaattgaaatctcagctcatcaatggtgaagaacttgatttggaggattggctaaatatgctggagcttatagcaatgtacgagaaatactttacgcaagaagaacttgaaaagcttacatttttacaatcaggtactaaaagccaccaagaatggcaagagttaactcaagctgtaaatacggtatttaatgctggcgaatcatctagcagtgaaaccgctcaaaagctcgcccataagtggatgaaaacacttgagcagaatacgcgcacaaatccagaatggcttgttaaattaaataacatcaattcagccgaacctgaatttcaggaaaaattaggagtaatgccagaagttgttgagtttttacttaaggccttttcagagagtaagctaagtatttttgctcgttatttatctgataatgagtttgcttttttaaaggagaattatgttcgcgaaatgaaaaaatggcctcaactattagtcgatattgagaaattgattgacgctgaggttaaaccgaatagtgaaggagcaaagcgtttggcacagcaatggctctctatgctacaaggttatgctggcgaaaatccaagcactcaagaaaagatccgttcagcaatgcaaaatgaaccaagccttgctgacggtacttggcttaaaccggttaccctacactttctagaaaaagcagtagcagcattcaagcatactgcttag

SEQ ID NO: 49753 - DNA, 1668 bp, Acinetobacter baumannii
gtgagtaatattcaaatttcaaatattgtactttggcaaaagaatggtattaaacgaacccttgattttctacctaatcgtgtaaatgttattactggagattctggtaaaggaaaatcttcaattttatttattatagattattgtttgctagcaagtgaaaccacaggaatatcaaaaacaaatattgattcaaaagttgaatggtatggtattaagctttctatagatggcaaggaaatagttatagcacgcccttcggaaagcaaaggtgcaaatgatcaagcatattttagtgaaaatggtgttatcccgcccttaccatttttaaatattagaattgataatttaaaaagagtcttaagtggtgcatttggtattgatactgatttacgagtgccttatggaggcaaatatatccaagcaggttcgaaagtctcttttcgcaactttctagcatatagttatcaagatcaaaatactattgttgcacctgatcatctttacattcgaccgactgatggccgatatcaggaagcaattgaacgcacatttagaatggctataggtgctgagaatgtggatactgcgttatctcgtagtcgtctttcagaactagagcggagaagatctattcaaataaggaaaattgaatcttatgaaagatctgcaaaaatattttctgaagaggtgggaacgttatctaaagaggctcatttgcttggaataattgaaaatattcctgaaacttatgacgatagtattaccgcactacaagagttggttcagtcgcctatcattcctagtaatcaaaatcatgaaattgagaagattgagtgtgaaatatttcgtttaactgctaaaaatcgccaattaaaagcatttcttgataataaatctatttatattgatgaacttaaagcagttgaggattcactaaaaccagttagtatttttaataaacaagccgataatttatttccatcagaatttgctaataaaattattgctcgattaggtcaagaactttcaaatataaaatcttcactgaaaaaccgtaagagttttccttttatggatgaggtgaaaaatattattaatcagaatgatgaagaaatacgagctcttaagaataaattgtattcaataaaagaaaaccaactcattgcttgtaatcctaatgattattataggtatttagggcgtcttgaagctaaacttgaagtttatagccgtattgaaaataatggatatcaggtacatgacgactttgatagtgcaatagcggctttaaggcgaatagttgatgagaatgaagaaaaaagtaatttagctaaacaggaattaaatcatttaattaataaacgacttgctaatctacctttgaaaggttatgaaggtttctctgcttcatattatgaaaaagagaagctgatccatttacgttctccagactttaatattctagagaatatgcctgatgtaggaagtgcttcaaattatctttatcttcatgtttcatattttctcgcaatacatgaaatagcaaaaaagatgcgaattccttgggttccttcttttttagttctggatcaagttagtactccttacttttcaagtaatggggaaccaaatgacgatattcgtagcttagataaagtattatag

SEQ ID NO: 49754 - DNA, 567 bp, Acinetobacter baumannii
gtgttacatgaagagttccattctcctgaatttgcagagcatggcggtctttttgaaatggtgcaattgtgggtaaatttaccttcgcattcaaaaatgacccctggaaaatatcaagccattgaagctaaagatattccggacattgcactagacgagcacggtagtcatttgcgtgtgatcgcaggtgaatatgcagatgcaaaaggtgcagcaagtacatttagtccattaaatgtatgggacggtaaattggtaaaaggccaaaaacataccctgtatgtacctgaagggcatactacccttgttgttgtgctagagggtgcggttgtggttaatgatacaaaccgtcttgaaggcaaaactgttgcgattttatctcgtgagggcgttgagtttagcttaaatgctgaagaagacactaaattcttggtgttgactggccaaccactgaatgagccaatcgaaggttatggtccatttgtcatgaataccaaagccgagattatggacgcgattaacgattttaatcgtggaaaattcggttcaatcatgcaagaaggataa

SEQ ID NO: 49755 - DNA, 1173 bp, Acinetobacter baumannii
atgagttcaattgttatagtttcaggtagccgtactgcaatgggtggttttcagggtagtttatcttctctaactgctccagaacttggcgctgctgtcatccgtgaatcgatccaacgtgcaggtgttaagcctgaacaagtagatgaagtgattttcggttgcgtactcagtgcaggtattggtcaaggccctgctcgtcaagccatgcgcaaagctggcgtgcctgatcatgtcggagctgtgaccattaataaactttgcggctctgcaatgaaagcggtcttaatggcatcagataccttaaaagcaggcagtgccaatattattgtggctggcggcatggaatctatgacgaatgcaccttatattttgcctaaagctcgcggtggttatcgtatgggacacggcgaaattaaggatcatatgtttttagatggcctcgaagatgcagaaacaggtcgtttaatggggtcttttgctcaagacatggcaaataccaaaggctttacccgtgagcaaatggatgactttgcaatttcttcacttaaaaaagcgcaaactgcgattacggaaggttatttcaaagaagagattgttcctgttgaagtaaaaacccgtaaaggtgtcgaagttattgatcaagatgagcaaccattaaaagctaatcttgagaaaattccaactttacgccctgcttttagcaaggacggtacaattacagccgctaactcaagctctatttctgatggtgctgctgcattagtacttaccactgaagaatatgctcaaagtcacgggttaaatactttagcaaaaattgtggcaacttcgactcactctcagcatccaagcgaatttactattgctccaattagtgcaattcagaaagtacttgagcgtgctggttggtctgttgatgaagtagatgcttgggaaattaatgaggcttttgcgatggtggcaatggcaccaattcatgagctaggaattgatgaagcaaaagtaaacgtccatggtggtgcatgtgcattaggccatccaattggtgctacaggttcaagaattatcctttctcttatttatgcattaaaacgcttaggtaaaaagaaaggtgtcgctgccctttgtattggtggtggtgaagcaacagctgttgcgattgaaatttaa

SEQ ID NO: 49756 - DNA, 1410 bp, Acinetobacter baumannii
atggaaaaacagcaaggattttttgaaagatttgctcttcggattagtgactggtctgaaaaatggtttcctgattcatatatttttgctctgcttggcgtcattattgtctctgttgccgccttgggtattggtgctccaatccatgatgtagcgacctcatttggtaatggcttctggagtcttattccctttaccctgcaaatgactatgctcattattgtaggttatgtcgtttctgtatctaagcccgtaaaattcatgatccaaaaaatggcgcgtattcccaattctggacgtggtgctattgttttagttgcaaccgttagtttattaatttcactagtcaattgggcaataagtacgattcttactgcacttttagtgattgcattagcaaaacgtaaagagctgaatatggattatcgtgctgctgcggcagccgcaatcattggtatgggagcaacttgggctcttggaattagttcatcagcagcacagcttcaggcaaataaaaccagtttacctgagtcaatttataacctgactggtgttattccatttacagaaacgattttcctttggcaatcaattgcaatgaccattattttagtgattgtttcaatcgctattgcatattggtctgccccaaaaggcaatagcgttaaaaccattgatagttttgatgtgcaatttgaagaagaaaaaacaaatgaagcaaaatctactcgtccaggtgactggttagaaaattcgcctattttaacgattattgtggtggttttaggcttaatctggatgttttttgaattttcaaaaagcaatcccatcattgccatttcaagtctcaacacctacaacttcgtgtttttaatgcttgggttagctttacatggcacaccacggaactttttaaatgctgtttcaaaggcagttccggcagtatcgggcatcttaattcaatttccactgtacggaagtatcgcctttattatgacccaagctttaaatagccaagacttatcgctgtcacattatattgccgagtttttcgtttcaatcgcttcaaaagaaacctttgcaattgtgatgggaatttactctgcggtacttggattttttgtaccttcaggtggtggaaaatggattattgaagccccatatgtaatgcaagcagcaaatgatttaaaggttcatttgggctggtctgtacaaatttataatgcagccgaagctttaccaaacttaatcaatccattctttatgcttccaatgttaggcattttaaaactaaaagcaaaagatgtgattggttttacagtgacacagctcgttgtgcattttcctttagttttattcttgctgtggttctttggtagaacgctcagctatacccctccaactttttaa

SEQ ID NO: 49757 - DNA, 1416 bp, Acinetobacter baumannii
atggactcatcagctgggaaatcgaaaagcggatttgttgaaaaccgaagtattgactttattcctgaaaatgaaaggcatggcagtatatttgcccaatttacgctttggttaggggccaatttacagattacagctattgttacaggtgcattagccgtcgtattaggtggtgatgtattttggtcaatcattggcctctttattggacaatgctttggtgctgccgtcatggctttacacgcagctcaaggtccaaaactcggcctcccacaaatgatttcgagtcgagtccaatttggggtatatggtgcctgtatccccatcattcttgtttgtcttatgtatattggctttacggccactggtgaggtactcgctggtaaagcaattgctcatctagcacaggtgagtaatacaacaggtattttaatctatgcttgttttattattatatttgcgacaattggctatcgtttaattcattgggtaggcaaagttgcaagtgttattggtttaattgcttttgttattattttaactcaaattttagctctctctaatatttcagaattgcttgctatacggcattttagctggtcatcatttttattagcagtttctctttcggcttcttggcaaatttcatttggaccttatgtagcagattattctcgttatcttcctacaaaatcatcttcaacacgcgtattttgggcagttgggcttgggtctttaataggctcccaaatttcaatgatgctcggtgtattcattgctcaagtctcgaatggtggttttgttggcaatgaagttcagtacgttgtaggcatgaatccaatcgctcttgtgattacttttttatattttagtattgcattcggaaaggtcactttatctacacttaatgcttatggcagttttatgtgtattgtgaccatttggaacagttttaagccaagtgctcaaatttcaaaattaacgcgacttacaattgttcttgcaatggtaattatctcaacatttattgcagttgtaggtgaacatacttttttaagcgcattcaaatcttttattttgttccttcttacatttttcattccttggagtgcaattaatttagttgattactattttatttctaaagaagaatgcgatgtaaatgccttatatgacccaaatggtaaatatggccgctggaacacgattggaatcgcttgttattgtattggtatcttacttcagttgccctttattgatagtaaattctataaaggacaaattgccgaaatgttgggtggagtcgatttatcctggttagtgggattattatccactgcagttttatattatgtacttgccaaaagagctcaaataaaaatttcaaaagctcttcaacttgaacgagtaaaataa

SEQ ID NO: 49758 - DNA, 567 bp, Acinetobacter baumannii
atgggatcggacacacaattatctattaatttgatgcaactaaaattctttttagttgtcgccgaatttcaaaatatatctaaagcggctgaacacttatttcgcacccaatcagctattactcgtgcaatcagtgatctagaaaaacaacttcaaattgaactatttgagcgtcaccacaacggcgtcattctaaccgatattggaagttctcttcttattcaagtcaaaaatgcaattgaagaacttcgtcagattccccttattgttcaaaaatataaaaatcttgatagtgaacaatcacagcccatcaatgaaccattttttttatacaatacgcgccgtttagaaatcttctctaccctttatctaactaaaggaatgaaaaatactgcgtccttactcaatattactcagcccgccgtcagttctgcgattaaattattagaagagtcattaaatatagaattatttattcgaacggctttgttgcacaaagatttgaaatgcaaagcgcccctaattgagccaaatttaaggcgtaacttgggtaagtggtcgacctaa

SEQ ID NO: 49759 - DNA, 873 bp, Acinetobacter baumannii
atgacaaatgtgaacgattcaaactggataatttatggagcaaatggctacacgggcgagttaatcgctcgtgaagctgtacgccaaggtttaaaaccaactttggctggtcgtaacaaagctaaggttgaagcacttgctcaagagttggggcttggttataaggcttttggactcgataacgtggatgcggtaagtgagcaactccaaggctttaaactggtcatgcactgtgcagggccattttccgcgacatcgaaacccatgatggaagcttgtataaaggccggtgctcactatctagatattacgggcgagatctcagtatttgagttggcacagtcacttaacagccaagccgaaaaagccgatgttgtgctttgtccaggtgttggttttgacgtgattccgacagattgtgttgccgctgcactgaaagaagctctgccagatgcgacccatttggcgcttggttttgattcaaaaacagggctttcaccgggtacggcaaaaacaagtacagaaggtatggccgaaggcggcaaaattcgtaaaaacggaaaaattaccactgttccattagcacattatgtccgtactatcgatttcggtgatggtaaaaaaagtgctatgagcgttccgtggggagatgtatctacagcgttttatacaacgggtattccaaacattgaagtatttgttcctgcacctcccaaaatgatttttggtgcgaaaatgatgaactgcttccgccctgtattaaaactcaatgccgtgcaaaagtttattaaatcatgtattgaaaaaacggttgttggaccaaatgaggaactccgcacgaaagtacccacctatgtttggggagaagcatga

SEQ ID NO: 49760 - DNA, 1068 bp, Acinetobacter baumannii
atgcctaagttgataagtgaaaaaaatcaattacagcaactgagcctcaactcaaatgggggagttgtctatcagcccgccagaggtttttttaaagttgtctatcaaggtttaattcttcctaacctgcctgcaccacttcgttactttaattacattagtctgatcggacagcctagaatccctctttgctataacgcaaatggtattgtgacttctgcagttgatacagcaactgtactggttagcaatagcttacatagtgtagggcacttaaaaacttattccattcgacgccaatgtcagcttaatcctagtcggtatcaattcgataaaactgatcttattgagtggcaaatcccaagagttcagcttagacgaatcgattctgaaatgagttgtgatttaatcgtccaaactccttccgacatttcgaattcatcagcattgcagtggggaatatctgactactggtctattttgtgccactgtgaaggtgagattttatataaaggacagaaatatgaggtcaatggattaggccgatttaaacatgctcgggccttacatttaccttttttatctttatgtttttatacctgccaaattattaatttgaatgaaacaactcaagttacactttctcaaataagaaatcagtggaatatcattctattttcacgtttagatattcaagaactaggaaagcagcccctcacgtttacagaagatgttaatttccacattcaccgggtttatccaaaagttgaaacaccgcatgggcgagaaatgtatttaccccgagagttttcttggcaatgtaaaaaaaatggaaaagttatttttgaactctatggtgaaagtcgtggtgattacaaatttgggttagctgctggatacataggaagttttcgttatcaattaagttggaatgatcaatgtcttcaaggagagggtggatattgtgaatacattgattgtcgacctttaagatggcaagaaaagaatcaaaacgaaaaaatgctcgataaattgctgcttttacagccgtgtttatataaaaaatga

SEQ ID NO: 49761 - DNA, 246 bp, Acinetobacter baumannii
atgtctattgaaacaaaagcgattgtgtccagaattggtgaaacagaccaactctatttaactgagaatacgcccgagcttgctttggagcgtgcagaattacgtatgcagctcgttacgttaagccgtgttcgccaagaacaaattcacttcttgcaagaagccattgttttgctggaacaagctcgtatggaatatgaagaaatgccaatgagtttgtattggctttgttgcacaaagatttga

SEQ ID NO: 49762 - DNA, 768 bp, Acinetobacter baumannii
atgttgaatcaacatgaaataaatttaaaacagtatcaaaataaatctttaagttatttgaatagcaccgctcactctgaaggggtcgagtttgataaattcattaaagaaattgatgaatatccaaatgctgtcgttttagatttaggttgcggtggtggtcatgtagcttataacgttgctcgccatgcagatctggtttttgcttatgatttatctcatgaaatgctcgatacagtttcaaaagctgccaatgctcgaaaaataaaaaatatttttgtacagcaaggtattgctgaagatatgccttttactgatgaacaatttgatgtaatcattagtcgttattctgcccatcattggcagcatgtcccaacagcaatgaaagaaataaatcgtgtattaaagccaaatggcactgttatttttgttgatattattagctcaagtttccctattttagatacatttttacagactatagaagtgattcgagaccctagtcatgtaagaaattacagtattaaagactgggttcactttattgaagatgctggttttgaattaacaattttagaaaaacaaaccctcaaactagattttgatagttgggtacagcgcatgaagacacctgaagatcaaataaaaacgcttaggtatctccaagaaaatgcagcagatgttgttaaaaagtattttaatattcaaaaagatggaagttttgaaagtaaggtcgggtactttgtattcaaaaaactatccttctag

SEQ ID NO: 49763 - DNA, 1188 bp, Acinetobacter baumannii
atgaaccagtctgatgatttagaataccaacttgatactttagccattcgtaccggacacactcgtagttttgaaggtgagcatggcgaaccaatttttttgacttcatcttttgtatatgaaaacgctgctgaagcagctgcaaaattttctggtcaggttcaaggaaatatctattctcgttttactaatccgactgtatcgatgttcgaaaaacgtttagcagctttagatggggctgaacgtgccgtggctacaagctcaggtatgggagcaattctatcgattgcgatggcgtatctaaaagcaggtgatcatgttatttgctcaagagcagtttttggttctattgttgctttatttgaaaaatacattgccaaatttggtgtagatatcacatttgttgatctacgcgatttagatgcatggaaaaatgcagtacgtccagaaactaaactattatttgttgagtcaccgtctaatccattagctgaaatcgcagatatccaagcacttgcagatattgcgcatgcaaatggcgcattacttgctgttgacaatagtttctgtacacctgttttacagcaaccgttaaagttgggtgcagatctcgtgatttactctgcgactaaatatttagatggtcaaggccgtgcgttaggtggcgcagtggtaggtaaacatcaactcctagaagaagtttttagcgtagtgcgtactttaggaccatctatgagtccgtttaatgcatgggttttcttaaaaggattagaaaccttacgtttacgtatgaaagcgcactgtgaaaatgctcaaaaacttgccgagtggttgtctacccatgaaaaagtagaaaaggtctattatggcgggcttccaactcatgaaggtcatgaacttgcagcaaaacagcaaaatggctttggcgggattgtttcttttgtagttaaaggtgagcgtgaaggcgcatggaaggttattgataacaccaaatttatttctatcacgggtaatttaggtgatgtgaaatcaacaattacgcatcctgctacaaccacacacggcaaactttctgctgaagcaaaacaagctgctggtattgaagaaggcttaatccgcgtttcggttggcttagaagatattaacgatattattggtgatatctcacgtggattagatttgatctaa

SEQ ID NO: 49764 - DNA, 1053 bp, Acinetobacter baumannii
ttgcgtagcaggatcaaaccaaatggcaatatttccgcgactcatgagtgctcggttatatgcgggccaattggttgtgcggtagattttgtgtgtaggcttcttcatttgaaaattatatcgctgaaaaagcctttacagataggtttgtgcaacaaagccgttcttaaatacgaacattatataaagaatcctataaagaaaatttttttaacagatgtcgaagattattttgatattgactctagtgatagtaaatataaaaattatcttgccatgggtgaactatattcattcattaaatttttgtctgaggagtctaatgcagacaaagattgtattttttataatcgtagttataagtttaaaattaaagcttgtgaagatgatttaaattatccgattgatactaaaagcttaggtaagttcaaacatcaagatatgcaccgagaggctattattaatctgatgtgcaaagaattaacgtcttttgttaaagacgaaattgaagatgttagatttagctatcttattcgtaacttgaatcccttgattacgaatatcaatcatagttatcaaagctatgtagaggattatacctttgataaggtgagaaaagagtataaagaaaagaaaactgaatacatcaaaaaattgaatgatactttcgattctgtcgctacaaaaatgtttgcaataccagcaggtatttggttcgctacagcccaaatgactaccatgaaaactattagtagttttatatataccaaaaacttcattgtattaatgaccgttttatcaatgatatttattatgattcttaatgtacatgggcaacgtaatacacttaatcaagtgaaagaagagtatttagatatttttgatgaattagaaaaaaaatttgaagatgtagatgcagaaattagaaaaataaaaggtgaagtaaatgataagttcgatagagtaatgtcttacatttatgtggcgattattatttgtgttgcattaggtgtgtatacggcataccttttttatcaaagtagtattctctag

SEQ ID NO: 49765 - DNA, 2289 bp, Acinetobacter baumannii
atgacagattcaaatcacaataatccagttttatcttatgatgaacttggtttcattattggtatgaaacgagttgaaaaaaaagtaagtacgattgattcaaatattgagaagatcatagatattcttacgcaaagctttgaagagcaaaaagttcaacttacacagcctcagccaaaattaactgaatttcaaaagatgcttaatgctgtcaataatagacaagctttagattttgaagatttattaaaagacaaagctaatccaatcactcaatcttttgttgtagcagacaagctggtcaaagactttgctgatgttttggaccaatcaattaatgaccttaaaacagtagataaaaaacaaatcaacaaatctaatgggcgaaagcccgctatagaaattaatagtcatgaagacttatcaaaaattataaatcctactgttcctgagcgtgatgaaaggggccgttttgtatctaatccaaatgaaccccaaaaccaatcatcgattcgtaaagttgcccaaacgatatctacggcgattaaaggagtaatgccgaactcaacacaaggtgtagatcctacagttgacgcaatcaatgaagttggtcatttactttcacctgtacgccgtgcagcaggattagctttgcggccattaactggattgatgcgtagtaaaaagagaaatgagccattacctcgtgaacaagagaaccataaccgcaaacaaataaagttattgcagcgtattgccgataatttggcgtctaagggtggtttgttaggttctctagggaaattgcttacttccgtgttatctgctggtggtgggcttctaggtggtgctctaggcaaaggaaagaaaggtgtagggaaattaggaaagggcttaggtaaatttcttaagtttggccgtggtctacccgtaataggtgcattggctgctggtgcatcattattagattggaatgaacaaagcacacaagaaaagggcggtactgtaggtagtcttgctgggggcgttattggtggcacggtaggatcaatattaggcccagctggtactttgattggtggtatggctggttcatggataggtaataaacttggtaccgcagttgcgccgtattttaaagagtggacagattcattaatagctgcagatgtaccaggtattattaatactgcttggaaaggatttgtaagttatgcttctaatgcttttgatcaggcaaaaaacactgcttcaaaagttgtagacggagttaaagatactgctggtgataccttagatttcattaaagataaatttaaccgatttaatccatttcatgatggtgttccaacatggggcattgggcaaggagtttataagccgggttttggtgcaaataaaaatgtacctgcttatggttcaactgtttctccaattggtgaaaaaactaaggaaaagcaacttgcagtttacaatgcaatgaagagagctggttttaatgataattgggctgctggtttaactgcttctgttggtagggaaaatgactaccaagataaatatctgtttggtaaacaccaggataaagctggtggtacgaatatgggtatgatctcttggcaaggagcccgtaaagaccggcttacggcatatatgaaggaaaggggattacttgatgcaaacggtaatatggtacggagccaagcagctttagatgcacaaggtgcatttatgaagcatgaaatcgaaacgaatcctgaatatgcttcggttaaagcttatatgcagaataacccaaatgcatcaaaagaagatattgcccgagttctcggcacaaaatatgtaagatgggcgtatgggcaaacaaagcttcgcaatgggcagtcatttgattatagaccgcatttagaaaaggaatataaatacagagctaacattgataaaaccgttcaggaacagaaaactaatctacctaaagaaaatacctcagctgtatcagatttgaaatcaagtcatattgtggaaaatacaagagctaaagttgctagtgttttaagcacccaaaaagctatcgttccccaagctactacaaaagcaaaaccttcattaaataatcaaaatagattattaactaatgtcacgccgtttaagcaacctttaaatactcctaacccacaggaagttgttgttgtaaatcagaataatggtaacatcgggcagaatgttagtgatcgtttccttgctcatgctctaactggcggcattggaatggggaaattagacgtttag

SEQ ID NO: 49766 - DNA, 792 bp, Acinetobacter baumannii
atgagtaaatttaatttaagattaggggttaccttaatagcgatcgcacttttacaggcatgtgcaacgacgccacaaccgaaaataacgaataaacaagcaaaaggagtgctggaaactataaaatcggatgaaaaactaaatcctattgtactcagtattagttttaatagtggaataatttatccttctttaaaaatagaaagccttacagaaaaaacggcaatacagaaaaataataaaatttatgaaattaaaatgataaattcagatgtctctcgctctacatttatttatagtggacaactaccagctggtgaatatcgcattgttgaattgagcaactatcaaccatctccaaatccttttctttcaggtaaaatccaatttattaatttaaatgataaagataaacctcacccgatgggtacttttaaagtactagaaaataccacaactgatttaggacgtattaacttaacccatgctaacgatgcctacttcatagcaagatctgaaaaacattcttcaaataaggatttaattaataaattaaagaatagttatctagaagcaatttataaagataaaattttgaatggatggacacaaccagttacaactttagaaaaaaatataggtgatgaaagcaagatactcccctttggtatgcagtgttttaaagagctaaaagataatactattatagcatcaagcaaaattggctcagtttttttcttaccctcacacgatactaataaaaaaactaaaatttttcaaagggcagagtaa

SEQ ID NO: 49767 - DNA, 264 bp, Acinetobacter baumannii
atgacccttatttcagcagcagaagcagctaaaatctcagaatctgcacagccatctacacttgaggaattgaaacaagaagtaggtgtatttattacttctcttgccgcaaaaggacagaaagaaatgactttcaccttatcaaaatcaagagctacaatggcagtagtcaatgagttacaacagtccctaatcgatctaggataccaaattgaattagatgttttggatcataataattattttctaaagattaagttttaa

SEQ ID NO: 49768 - DNA, 609 bp, Acinetobacter baumannii
atgtctgataagaacttcgtatttccttcaggattgaccagtcaacgtgctagagctttagctaaagaagcaaaaaaactaaatggtacgcaactttcatgtgagctggatttaatatctaaaaaagaatgtcaactcccatggcataaagcagttgctaagtttactaatgaagatatctcaattctacatttgaaagtagaagatattttgaaaaaaaacccattattgggttattgtggattctattctccattaatattttcagatcgttattatcaacgtcaatatagaatgtctaaaatagagtatgaacagcattttattgaaggccgaattttaagtacagactggttaaaacaaatagaatatgctcagcactttatgtcatattttggaaaaaataagaatataaataataatatgttaggttcttatgggttaaaacatatgtgtgaggattactatggagaaatatgtggtcagcatacttatatatctaatggtgcattaatcataggtgctattttaaataatttcaattttgagcaatatagtgaatatcatattaactgtagttttaataggctttgttgcacaaagatttga

SEQ ID NO: 49769 - DNA, 894 bp, Acinetobacter baumannii
gtgaaaaactatacagttgctgtaaagattacagaatctaagtctttctttaaaaaagatatttatgaggctgcactttttgataaaccgaatattaatgctactggttccagttatgacgaggtgattaggaaggtatatgagaagacgcttgagtattttgattttctaagtgaccaaggtcttgatattcctgagccgactgaaattaattcagtaacatttaaaaaacgtgataaagatgttttttttcatgtcataacaattgatacatcaatctatgcggaaaagactgaaaagattaacgttacaattcccatatctttaacacgaaaaattgatgactttctaaaagataaagtacataactcaaatcttttctcctctagatcagattacataaccaaatcttgccaaagatatttaccctatgcgaattatcttgcctcgctctacaataatgaagatttaataattgctcacagatatcacgaaagtaataccacgagaaattgtcttaatttgctcgactatttgaagctacctaattgtcaagaagtaatcttatttgcgacttatcgtacacctactgatgggtttagtagagatgacgggcctgaaactaatttgcccctcatgggagcaattgcgaaagtccaattaccaggattaaacgagatttatattatttttgatggacttttcctaaccgcgcaaaggaagccgcgctacaatgaagtaaaagatgtgctggatacagctttggaaacagatcctgtggaagcagtcaaaatattaagtgaatttcctagacagaaattaactaaggaaactcgacctactttttttaatttattaagtaatctaacagaagaacaatatgtaaatttttaa

SEQ ID NO: 49770 - DNA, 768 bp, Acinetobacter baumannii
ttgtatttgagtaatgaccatactaactgtagtgagctttgtactttatttttagatcctgactatcgcttaaataaaaatggcaaatttttatctaaagtccgttttttgtttctctctgcctttcgccaatattttgaagaaacgattgttgccgaaatgcgtggatactctgatgcaaatgggcagtcaccattttggaatgcggtaggccataagttttttaatattgaatttaccaaagccgattatttgagtggggtgggacaaaaggctttcattgctgagttgatgccaagacatccactctatgttgatatgctgcctgacgatgctaaagccgcgattggaattgttcaccccaatactcgaccagcctacaatctcttgcttgaagaaggactacgctacaaaggctatatagatatttttgatggtggtgcaacgctgcaagcagatattgaaaatttacgagcaattaaagaaagccagattttaactgtacaagttgtagagtctattcctcttagttcaggtgatgaaccctatattgtggccaacgataactatgaaaattatcgagccattcttgtattcggcacaccttatcaggagttattgcaaataacaaaagcacaagcaaaacaattaaatgttgaaaatggctctttagttcgtgtgctaagtgtccatgttaaacaggactcgaacccacagatagtgaacaaacttaaagaaacagagcatttgcgaatggctgttaattaa

SEQ ID NO: 49771 - DNA, 360 bp, Acinetobacter baumannii
gtgagcgctgaaataatcgtaaatgcagtcataacgtttggaacaataaacaaaatagaagtaccaaccgtcacacaagccattgaaaatacgagtccgcgaattggaacttttctttttgacagcttactaaagcttttaggtgcatcgttgtctaaagctaaaccatataacatacgactggttgcaaagattccactgtttgccgaagataaagccgaagtcgcaacaacaaaattgattaaacccgcagcaattggtaacccgaccaaagtaaacatttctacaaatggacttttttctggtgaaacttttgcccaagatgtgactgcaataatacaaaccaacgcgcccacatag

SEQ ID NO: 49772 - DNA, 174 bp, Acinetobacter baumannii
atgatcagttacaaggtggtgagggggatgattacttggaagctagcaatggaaatgactttattgaaggaggtacaggtaatgatcaacttattggaggttcgggggaagattcactatatggtaatgatggtgatgatcatttatatggtggggatggtaatgatattttaa

SEQ ID NO: 49773 - DNA, 1956 bp, Acinetobacter baumannii
atgtttgaattcgcccatgatcttcaatgtatttgtaggaaagaatattatgaatgctattgtcgaaatggtgtgagcaaaattattggaacacttttagaccgatattttgaaattgaaaaacaatcatatgatgctagtcagatttggaaatggctaagaaatttgaattttcatcagggaaaaactgaaaaagatagtattgctgtaaaagttttacaaaatgaagatgcactacgtcagaatattgttctattagcatttgaaggactaaaatctctagaggaaattcatcgagtaagctggcaaacattatcttgttatactcattctggacttaacttaagattacaagattattattttattttagattgggcctttgagaataataatataaatttatggacgtattatattcagacacatcaatttcatgtagcaaatagaaatcaaaccaattttgaactacgtaaatatgcaaaattgcaggcaagagaaaagtctgagtttttaaaagcatggataagaaaaaatttagctgctaaagcaagctataaaaagacacaagttagaataagacgtcgtataagaaatggaaatttcaaacgaaaaacgataagaaatgaaaatataaattacatccagaataatcgtgaacttattgagaggggggagcattggggacttttaactgatttcgcaaacttaatgttaaatcaacctgaaagaataatagaagaatttggagatgaggaattagtaaagacatctcttagaaattgtctaccatttattgaaacttatgttcctaatttaattgaattagctaaggcacaatgtgactccgtacgttattcttcagaagaaattttaagtgctgcatgtttagaaatatttagagagagtggaaatcttgaaagtgttaaattagaattattgaaagtgttacgaacagatattgacactcgcccttacgctgttgatgaaaaagaatatcaaaaatttaaacaggaagttgatagaatactttttcctgacactgaaagtcgactacaatttctaaaagattacattgaacctcaactgacctataacgactgtcaatacacacaagtaagctggttacgttttagtgagacattcaaagagtttcaagatacgttaccattagaatggttatataaatatccaaatatcagtatagaaaccacaaaaacactatttgatctaagtgctcaattttgtgatcgaaataaattaaaaaatttaattataaaaagatgtgatgatttaaatacgttacttacaaaacatgctaccgattttgaaagtttaaattctaaagttatgttttggtttgtaagagcatttttctttcttgatgaatcagagattgtagtttattggaattttttaaaagagcaagaaaaaacaatatttcttttaagtgatagacatgaaggaattcgacatgggaatcatacattttggcctgcattaacatctacaaaaattgggtggattttagatgcatttatagatcagtggccgaaggttaatttacctgattcttgggggacaggggatcctcctaatgaaatagcctatagatttctaagtaatgtaatttggaattttacaaagtatattactgaaaatactttatcaattgtaaatagtttaatttcagattctagatttgaagctatgttattagatttaaaaagtattcgttcaacagttattcgaaatcttgctctaataacttttaatgctccttcgccagaggaaatagttaattttttagataatgacggagtaattactgtagaagggttgagatcattaattttagaggaattaaaaatatttcaaatagacttaaatagtagtgaaacaacttctaagaatattttttataatttgcaatggctttgttgcacaaagatttga

SEQ ID NO: 49774 - DNA, 1047 bp, Acinetobacter baumannii
atgtctatccaacatattattgttcacgaaattcgacgcgttaaagaagaaaaaaaaagtacagaaacattaattgctaagatcaaagatacagagaatgatttaagatcattaaatggtgaattagcagcaaaattattaaaacttttttctagttctagtttaatggtaggacagttttctattgggaatgatacagaaaagaaaccagcctttgaacaagggttagataatttttattctggtgaaaattgtctagactttgttgaaatgacaagagagttggcagaatactttaaaacttttcttgttgaaaataaaagtattactggtggttttcttgttttttttgagtttaaaggtgatgaacataccaagttagcagttgctgtaattaataaatcgaatgcgactgacattaatcctgatcttaattttattgccaaagaaattctggatctagataaattgcatttgggtgcaacaatcaatattacagagtggcgtgatgagttttcggaacgatatattcgttttaaaaatggtcagtcagaacaggtaactgattattttcaaaaatttattggttgtgaagtcgataaacaagctgcaaatgaagaaacaaagaaattaaaagaagctattgaatcctttgctactgagaaacttaaactatcccaaactgctgcagatgactatcttgctttagcccactcatatattaatgattgtataaccaaaggtgacgatgttgttttgtcgaatgtagcaaaacatgtttttcctgctgatagtaatgagttttttgaatatgcaagcgaagggcataatttgtcaggaattttgcaaataagtaaaacagaattaaagggatttaagaaatttagtagtagccgaaaggacctttcaattacttttgcaaaagctttgctgaacgataaaattaaatttgaaaatgatatactcaagatcgacagctcattactgtcggatagtttggtagcagaacttaaagcagctacaacagcaagcaattcagatgaatag

SEQ ID NO: 49775 - DNA, 369 bp, Acinetobacter baumannii
atgactatgaatccagtacaaatttatcgtgacatctttctgtctatgcaagacagacaggaaagttgtgaccaatttgtaagctggatggaactagatgcagacaaacttgcttctctaaaagctttaaatgcatactcattggctgctggcagccttgatgtaaaagttgaagggaagcaacgtggatcaggcgtagatttagagagaattcaaagcagtcaatttaatagtaaatacatttttgaagttaaattaaataaaactaatattaatttgggacacgatttcattgtttgtgatagctggaatacagttcttaaaggctttgttgcacaaagatttgaaatgcaaagcgcccctaattga

SEQ ID NO: 49776 - DNA, 1071 bp, Acinetobacter baumannii
atgcgcacaacgcatcttaccccttctactttttttaaattaagcttgatcagtctgagtttaatcttagctgcatgtaaccagcaagaagtaccaaaaacaacagcatctgaacctaaaaaaattgaactcattcctcaagatttaattcctgtaaaagaaggctcactcgccgctcaaaccgcttttacaggaactattcgtgcagtacaacaaagttctattcaagcccaagttagtgcaacagcgactgccgttacagccaatgtaggtcaaaagatacaaaaaggccaagttttagttagattaaataatcaagacaacgctgcacgcttagctcaggcacaggctaatcttgcttctgctcaggcacaagcagaacttgcacgtaatttgatgaatcgaaaacaaagattactcaatcaaggctttattgcccgtgtagagtttgagcaaagtcaggtggattataaaggtcaacttgaaagtgttagagctcaacaagccaatgtggatattgctaaaaaagctgatcgagacggtattattaccagccccatttcaggtgttattacaaaacgacaagttgaaccgggacaaaccgtttcggttggacaaacattatttgaaatcgttaatccggatcaattagaaatacaagcgaaactacctattgagcaacaatctgccttaaaagtaggtagctctatccagtatcagattcagggtaactcaaaacaattacatgccatactgactcgtatctcacctgtagcagaccaagacagccgacaaattgaattctttgcgagccctaaagaagcgattgattcattaagtattggtgcgtttattaacggtattattttgcataatgatagcaatcagggacaaaccattcctttagatagcattcaaaatctgcaacatgatccttttgtatgggtaatacgcaatcaaacgattcagaaagtcaaaattcgagtggttgagcaacgatacaacgaaaatatcgctttagttcagggtttacaaagtacagatcaggtaagtcggcagagtaaaacttga

SEQ ID NO: 49777 - DNA, 366 bp, Acinetobacter baumannii
atgatattcaatcgtggttcggcatttataatttcttattttttaatttctttagtaaatgcgggtgaaattggagctaaattaactagtcaaattgaattattgccttcttgttctattaataataacgttgtagaaaataatgcagcaaatttaaattttggaactatagattttggtgaagctaccacagcttttaaaggggttttagaagccagtttagttaataatggtaattcaggttttcagattgagtgtgcaggtatttcgactgtaaaaataatatttggagcaggaaataatgatagtaatattccagggctttgttgcacaaacctatctgtaaaggctttttcagcgatataa

SEQ ID NO: 49778 - DNA, 693 bp, Acinetobacter baumannii
atgcctgttgtagtgaaaaaacgattattagacttattacaagataatcaacaaaattattatgaattgtttgtttttttccttgatcctgatgtttctagctttgagaaagagaaaaaggctagagattttcttgttaaagagatagataaactagagatgaaggaaatagattttccttcggatatcaatttgattaaggcatggtgtgaaaacgataataaaaaaaattgtcaggaatttcaggcatatttaaatcgtagacaatctggtcaagatagagagtattttaagaacgtcgctcaggcatttgagtttttaataaaggtgtctccaaccaaaaaagtagacggtgcatggctatatagctcagtgcattattggaatgatcctatttttcatgaattaattattacttatctcgaagagcttgggttaggtgagccaaaagcaaaccatgtctgtatctatgatgaccttttacgcagtctagggctagacagtttcgatctgcttttagaagatgagtattatcatcaagcagttgtgcagcttgctctgggttatgcgccttctgagtttattccagagattgtgggttttaatttaggctatgagcagttaccactgcatcttttaatttcgaatggctttgttgcacaaagatttgaaatgcaaagcgcccctaattga

SEQ ID NO: 49779 - DNA, 1083 bp, Acinetobacter baumannii
ttgtttgaattaattcataattatagtggcaaccaaaatttggtattcaatcatgtatttgccagaattattattcatttatcactagattattcagattttgttatcgaatggcttttatctaatcctgaagtacgttttaagtgtggaaatacttacaaagaaccagcatggatattatctggaaaaataatagaaatattttctcctgcctgttcagaaaaagaggtaaaaatacagtttagatatagaaaacaaggttattttcttcattactggggagagacacagtacttcttactaccaaaacttgataaaaggagactctctatagagtcagaacaaatgatccaagtactcaatcgtaagtttagtaactgtaagccatcagacttttgtaaattatacgaaatgagtagtggatgggtaacttctcctatacgcgaacctaatcaactttcaaataaggcgtggatcgaattgattctcacacctgctgctgaacttaatccatttcgactaaaaaaaatgaatggaaatacgctggcagaagcaagtataaatcaattttctaatgaactaagtactgcgacaaagaatgaacctattcgcttttgccaattggctttaaccttacctcataatattgataaccaatatattgaagcattcttcaaaggcttacgtgactctagcttgacgaatgttaatgaacaataccgtgataattggcaacctgcccctattgagttagttgagcaagtattagcccatttttctatggtagatgatgggaatgccttaatagatttattggcaagtcgtataaaaatcttatctccaaaatatattgaacagattggatatttagcgataaattcaaaggatccaatacagggtaagcttaaaatatacaaccctcaaaagggaaatgatccagaaataatttctgctgaagaaattagaggcaataagatgagttgtgtaagaggtaaagcttattcggctattgcagatctcttttggaatgataaagaatatgctttatctcataagggctttgttgcacaaacctatctgtaa

SEQ ID NO: 49780 - DNA, 888 bp, Acinetobacter baumannii
atgaatattcgccaagtgtctgctatttgtctttcaatagcagctactcattttgtgtatgccgcttcaaatgttgcaaatcctgtaaatgattcttcccaagcaaaaggaattattaaaaatcaatatattgttatattaaataaggatgcaggtccttctaaagatttcgcacaaaatattgctaaacaacatgctggtaaagttttacaaagctacgatactgttcttaaaggttttgcaatttatttacctgatacagcaggggcagcctttattgaagcgatgaaaaagaaccctcatgttctttcagtagaaagcgatacaatagtaaatattgatgcaactactcaaagtaatccagattggggactagatcgtatagaccagaaagctttaccattaaattcgacttattcttatttacagaccggttcaggtactacggcttatatcgtggatactggtatattatctagccaccaagagttttcaggacgtgtgttaagcggttataccgcaatatctgatggcaatggtacaaccgactgtaatggacatgggacccatgttgctggaacagtaggtggtacgacctatggtgttgccaaaaatgtcaatttagttccaatccggattttgggatgtgatgggtcaggggcctcaagtaatgttattgctggtttagactggatattgaaaaatggtaaaaagccagctgtagtgaatatgtctttaggtggtgaagcaaacgcatctttagatagtgcagtggaaaatttatttaataatggttatgtaatggttgtggcagcaggaaactcgaatacagatgcatgtagttcttctcctgccagagtaagtaaggcaaggcagagtaaaacttga

SEQ ID NO: 49781 - DNA, 990 bp, Acinetobacter baumannii
ttggctcaattaggggcgctttgcatttcaaatctttgtgcaacaaagccggataatactgatcactatacatctttattatccactagacttttcaaactagctgataatgaaagtcaacatcagccgagccacaaaattattgctgaattcgcggctgcacattatttaataagaagaattaatgctaaccgtaatagtatttcactatctcaatgtctttcaattatagctcctaatggagttgtacgtgatgaattacgaggcttattagggtggatggcagcgttaggtaataaattaacgcaagaaaccctaatccatatcgatccatatgcagttttagcaaacggagatccttcccaactgttatcctcatcaaaaaagtatttattaaaggaattaattaatcttgctgatatagatccatattttcgtcgtagtgatatgtggagaaatttttcagtttcaggattttttgacgatgattctatatcaatagttaaattaatattggttgagtcagataagggtttgttacgagggctaattctagagttactagaaaatgcaagaatacttgaatctttagtactagacttagaaaaaattctattagatgagactattgataagtatattagaaagttagctggattaagaataagtgaaataattgattatgatattaaacaatctattgtcagacttataggaattggaacagaatcttcattagatattgctgctaatttgatagaaaaaagtaatattgattcggtacaatatgaaataattttaagttttctaaaaaaatgctcatttttatatccaagtcataataagcaaggtatagaaagagttgttggaaagcgttattttatcaaaagtcttatttctttatttaattatgaattagtctttaatttacttgatgatttaagtcatggcagagtaaaacttgaagtgcgacataaaccacctaattaa

SEQ ID NO: 49782 - DNA, 435 bp, Acinetobacter baumannii
ttgaaggctggagatggtggagcttatttagatggtggagctgggaccgatcatcttgtcggtggctccggtgatgatatctttattgtggatgaacaagatacttacgaagaaaatgatctaaatggcggttacgatacaatttatattgctaaaaattttgatcttgcattaaataattttgaggctgttacattattgggtaaccagaatattaatgcctatggagatgagtttgataataaattaattggcaatagtagcaataactatattgatggtcgtgcaggtagtgactatatgcagggtggcttaggtgatgactattatgtggttgatacaaccgaaacggctttgttgcacaaagatttgaaatgcaaagcgcccctaattgagccaaatttaaggcgtaacttgggtaagtggtcgacctaa

SEQ ID NO: 49783 - DNA, 987 bp, Acinetobacter baumannii
gtgttgataatggaccactcttcaacaaaggctatgggaaactatcatattatttcagaatatagaggtttaaagaaaaataaatatacacgaaatgatggcagcatcactttaaagggtttagctggctttggagtaaaattaactataccctcaggtcaagtcgtgttaccggaaacgtattttgataataaagttttattttataaacgggctttgtttgaaaaatatgaacagcctgcttttgcaaaaacaactccaccattaaaagcagatggtgaaattgttgtttcaaaaaataaaactgcaccaatatcgcaaaatgatgtacgtggaaataatgggcatcctattaaattagtcagtaaagaaggcacatttgaagtagagacttacttggatactacaaaagcactagcatcgaatttaagttatgaaatagtttataaaggacaatctcgagtccatataagcggaagtactgggcgtaaattacataaatgtgagataaatcaagaaataagcataaagtataaaagtggtactaaaatattaattgagaagtatactgtaattgaaaatatgtctcctattaagatttatataacaaaatctaaaggagggtttaataaagcaatttttgcccaaactttaagagcaaactctacggcaaaaagccgcgggctgtgtgcaatgtatgttcgattagcttttgaagcggctggtggaaaagttaatcctagacctgcttctgcttatcaatatgtaagagttatgcaggataatgaatttagagaagtagataaggatggatatacgccacaaattggtgatatatatataattgatagatttggttcacatgtgcatgggcatatttctggttatgatgggtcacaatggatttcggacttcaggcaaaatggaataaatatctatagaggaaggcctaccattagttatagaatttttcggtattatgattag

SEQ ID NO: 49784 - DNA, 471 bp, Acinetobacter baumannii
atgaacgttcgcctgtgttatgccagccaacgaaatgaaaaaaatgaagatttgctacaagatttacgtgatattctgacagaagctcgtgatttcaacgatttaaacgggatttgtggggtgctttattatgccgataatgcattttttcaatgtctagaaggcgaacaagaggtcgttgaaagattatttgaaaaaattcaaaaagatcaaaggcattataatattaaatggttatgcacatactccattgatgaacactcttttcagcgttggtcaatgaaatacgtgcagcgtaatacaaatattgaaactttctttcttaacatgggagaaaatacctttaacccgcttttgctgaaccagcaaaacctcaaatttttcttaaatgaactcttaattgcagagcaaactaagatgaatacggttaaaaaagttggaatggtgaataggggagtaaacccgttctag

SEQ ID NO: 49785 - DNA, 489 bp, Acinetobacter baumannii
atgagtcatttacaaaaggtagccgcagataagcaatcgcttggttttgaatttcaggattttgtttatattgaaaaacttattgaacttaagccaacacaatctttaggattagaggtttatgatgacattcatgtaacgactaatgatgagaatggagatactaaagaacttctccttatccaagtaaagcactcaattgacgctagtaatattagtgacagagatattgatatctggaagactttttataattggctaaagctagttcctgagttaccagatcatttacaacttaaatttcagttatacactaataagaaattaaatagtcaagaattcgttagtctactgaaatatcctaccaagaatattaaagagatacttaactttattaatcaaacggctttgttgcacaaagatttgaaatgcaaagcgcccctaattgagccaaatttaaggcgtaacttgggtaagtggtcgacctaa

SEQ ID NO: 49786 - DNA, 921 bp, Acinetobacter baumannii
ttgattagaaaaagtaattctttattaaaaattttatttagcagtatttgtttgatatctggttctgctatggctgctccaattacagatttgagtaagcaaattgtgagtgaaaaaccgggctcaatactttctatagcgcaacaagatgtgacggatttatttctgcatgcagatcagcgcttattagtaaattatcgtagtcgaggtgtgaataacgagcctatcgttgcctcagcgtttattttattaccgaaaggaacaccaccaaaaaatggctggcccgtactagcttgggcgcatggtacaacaggagtagccgatacttgtgcaccttcgggtgattatgccggtggaccagttcattcatatcaggaagttgcttcaaaagcgttagatggttggcttgcacgaggctatgcagtagtcgcacctgattatcaaggtctgggtactttaggtgcacatccttatatgaatgcaaagagccaattgcatacagtagtagatgcagtgcgggcgttacatatgcttaagccaaaagattttaataaacagtggttggtgatggggcatagccaaggcggtgctgctgctattaccgtggcggcttatggtcaaaaagatgctcccgaactagatttaaaaggggcaattgctcttgcgccaggtggctatcaatatgaaggcattgcagaatatgtgttgagtcatccaaacccagaaccaagtgtggcagcatttttcccgattgtattattgggagcgcaagcagcagagccaagtattattcctgagaatttagtcagtccagaaatgggcaatgtgctgactcaagcacgtagccgctgtttatctgagcttcaatctgattggctttgttgcacaaacctatctgtaaaggctttttcagcgatataa

SEQ ID NO: 49787 - DNA, 441 bp, Acinetobacter baumannii
atgaagttaagtaagttgagtttggttgtttttatactttttatatttactggatgtggtgaaatttattctcaaccttctgataaatatccatttgaagtgaaaatgaaagctttattagggggtaaccttgaaattgtgaactcaatacgtaaagcagaagttcaaatttcttcttttagatttgaaaaagatcctaataaattgataaaagtaatcaaccaattagaagaagatggctgggtgttaaaaggcaaaggacaaggagttgatacttattgtttagggagaaataatagaattaatgttgtgagccctactatgataggtgtttttgattaccaaggcgggaaactcaatataacagattataattctgatgctatatcttatagtggctttgttgcacaaagatttgaaatgcaaagcgcccctaattga

SEQ ID NO: 49788 - DNA, 507 bp, Acinetobacter baumannii; identical to SEQ ID NO: 49547

SEQ ID NO: 49789 - DNA, 360 bp, Acinetobacter baumannii
gtgagagagtttctagaaaattcctataaagactataaagccgtttctgctttattagctgtagctgaagaagaagttattttgtacagtccacctttacgaaaagcaaccagtgctgtaggtatagcggtcgagggtggtggctattaccatgtgcatggagtatctgaagatgaaactgctgaggcagcagatgacgatcatgaagaagatctatggtttattttaatgcaagcttgtacagaagaagactacacttatttagaaaacctatgcctcgaatattgtgatttatgggaaaagttttgggatgttcaaatagaaagctcaaaatcaacccttaaacaaaatttagcttaa

SEQ ID NO: 49790 - DNA, 252 bp, Acinetobacter baumannii
gtgcaacaaagccatattccagcttcattttcacaaaattattatcatgctttaagtaatggtagagattttattgcttataacttgctctatggtttaaataaacaagtcattaaagcaaatgaagcttttattcttaatggtatgaataataaaaagaatatcgatatttttggtcaagcagcccatgatggtagtcgtatatctaagggtgaatataaagatatagtaccaattacgattgagttttaa

SEQ ID NO: 49791 - DNA, 936 bp, Acinetobacter baumannii
atgggcgcacaggcatttatttttctcacgattgcgctcaccattagtgaattattaaatatatttaatttaatctatcagcgtaatccaaaatctagaaacaagccgattaaaggttatttgcaactcgttaaactcattatttttgttgtttgcggattaatgattttgggtacattcctgaaaaaggatgtatttacgttgttggctggcttcggtgcaatggcagccgtattaatgttagttttccaaaatacgattttgtcattggtcgcgagtgtacaaattgcctcttatgacatggtacgtattggggactggattgaaatgccatcgctcaatgctgatggtgatgtcattgatatttcattgcacacagtgaccgttcaaaactttgataaaacatacaccacgattccaaccaataaactagtgacagacacttttaaaaactggcgtggtatgagtaatgcgggctgtcgccgtatgaagcgttctctttatatcgatcaaactagcgtgcacttcatgaccgaagaagagcaacaaaaactcaaagatttcttattactagatcaatacctcaatgccaagcaatctgagattgacgaatttaataagcatttaggtagtcagtcacgttataacaaaagacgcttaaccaatattggaacatttagagcatatgttgaattctatttgcgccagcataaggggattgctcaaaatcaaacgcttatcgttcgccaactacaaccaacgagtgaaggtctaccattagaaatctatgcatttaccaataccaccgcatgggtttcttatgaagcaattcagtcagatatttttgatcatctgattgcgattttgcctgagtttggcttaagagtgtatcaggcaccttcaggccatgattttcagaaattaacagtagaataa

SEQ ID NO: 49792 - DNA, 471 bp, Acinetobacter baumannii
ttgaattcgccaagtaatgataacttagcttttgattgtataactgtaaaagaaaattataactttgattttctagcttatggtgaaatgaatactctttataaacacttaaaaggaagtgatgttcttaccccagttgacagtggtaatttaccaatcggcgtaatttcctctatcgtgggtgatgatcaaaacgggtggtttctatctcatatagtaggttataaagctacagtttataaaagtaatcgcttagaaaatggtgattggcaaccaattgtacaaaaagaaattgttgataatttttggggattacgtggattttggttatgggaggatgagcaaggatttagctatgcggatatgtatggaaaaattaaccattatgattatataacaaaaaaatggtctgaaaataaagtaccagataatgagaatatctctcaatggctttgttgcacaaagatttga

SEQ ID NO: 49793 - DNA, 900 bp, Acinetobacter baumannii
atggcttatacatatgaagataaactaaattttattgcttcaatctattgttctgtaaggagagtagcatttaagaaggatgtaagttgggaaactatattagctcaagccgctcaagaaactgggtggggagaaaaaatattaataggtacaaataatatatttaatataaaggctgatagtaggtggaagggtcctaaaagtaagcatttagtctgggaagataaacctgatggaacacgtgtacaggaatatcatgattttagaaattataaagattttgatgaagcacttgaagatagggttaaatttttagaagaaaatcaaagatatcataagtttttcagtaatggggtgaggggcatatttgaaagggaagctcaagcattggaagatgctggctatgctacacataaggaaagaaataaagctacaggaaaatttgaattagtatatgcagataaattaatagaggtatttagagggccttcaatgagaagggctatagctagaggtgaatctagtggacaatgcactattgtgaatgctgtatttttggatgatgataatagcaaagaagtaaataaagaagttgaaatcgtcatagatggaaatatcaagataaaaaaagttacggatagtaatgcgattattaagggtatagttgtaaagccaaatggaattattagctttaagaaagataatatcattgttccagctaaaattccttcagctaaagctcctctaaatattaaaattactaaagcatcaacccctatagcagataaattagaccaacacaatggcaatccttctaagagagaaactcctgtagaaaactcaagacaaacacctgtctcttatacacatctgacgctgccgacgaatagagaggtgtag

SEQ ID NO: 49794 - DNA, 324 bp, Acinetobacter baumannii
atgccaacagttattgtagaaaatgatatttcccaatgggatgatttaaccggtgaggtttatcattttcctaaaagatataaggacttactcttaactggtgaaaaggttatttattacaaaggcaggatgaaagataaaaattttgaatctcgtcgactaagtaagtttcctcattactttgggatcgctgaggtaggagatgttatttccatcaataacggcaaagaactcttagcggaaattatcaattttaggccttttactcaagcagttgattttcagataaataatgaatatcggctttgttgcacaaagatttga

SEQ ID NO: 49795 - DNA, 351 bp, Acinetobacter baumannii
atggaaaaccttactgcattttcattatttgcaattgttgcctcaattactccaggcccgaccaactttataattttaagtttaagtagtcattataaaatttctaaaacacttcccgttattttaggttcttgtattggagcagccttacttgtattagtggttggtattggccttggctccactattcttgcttaccctgttattcaaaaaattatgacatggagtggtttaatctggcttactgttctagcttggaaattatataactacaatcctgttatctctttagaaaaaaatgaacctgtctcttatacacatctgacgctgccgacgaatagagaggtgtag

SEQ ID NO: 49796 - DNA, 324 bp, Acinetobacter baumannii
atgtcaaaacaaaaatttataccctacctgatttttcttattctcggttctctatccatccatagctttgcagacgtacaagtatatggtccgggtggcccagcacccgccatgaaagaagccgccaaacaattcaccaataaaaccggcatagctgttcatgtgaattctggtcctactgctcaatggtctgaaaaagcgaaactagatgcagatattatctatagtggttccgaagccatgatgtctgattttgaaaatgctttttctgagcaaattggctttgttgcacaaagatttgaaatgcaaagcgcccctaattga

SEQ ID NO: 49797 - DNA, 222 bp, Acinetobacter baumannii
gtgagcggtcttttagtttttataaccattgcctttcttactttatcaagcccaggcccaggcgttttatttacagtaacaaattcaataaattatggtgtgagaacagctttatttggtattagtggtttaattattggtatgtttattatcgctgtgatttctgcaagcggtgtcggacttattattactagcaaccggctttgttgcacaaagatttga

SEQ ID NO: 49798 - DNA, 558 bp, Acinetobacter baumannii
ttgcgtagcaggatcaaaccaaatggcaatatttccgcgactcatgagtgctcggttatatgcgggccaattggttgtgcggtagattttgtgtgtaggcttcttcatttgaaaattatatcgctgaaaaagcctttacagataggtttgtgcaacaaagcccagcagaattggaaaacagacgaagtagtattggtcggccattcagcaggtgctcatcttggtgctttatgtttaaaccatccgttattatccaaggcaactttattaagtgggatttatgatttattacctatacaagagactcatttaaatcacgctttaaacttatcgcaagaggatattttgaaatatagtcctattcatcagcaggaacagatcaatattccttgtacgattttgtgtggtgggttagaacttagtgaattaaaatggcaaagtcaaaattattttgagtatcgacttagtcaaggtgacgatatgatttcttttgaaattattcctgagattaaccattactctattttagagcactattttaaatttatatttaagtga

SEQ ID NO: 49799 - DNA, 123 bp, Acinetobacter baumannii
atgctttctacaccacctgcaatcaccaagttcgcttcgccggctttaatggcacgggcagcaatggcaatggcatcgagtgatgaaccacagagacggttaatagtggttgccggtacctga

SEQ ID NO: 49800 - DNA, 354 bp, Acinetobacter baumannii
atgaccgcttataacgtgactaaagctggtgttcgtgcgttgtctgaaacactttcggctgagcttcgtaaattcaacattaaagtcaatgtgctctgcccgaccttggtgcctaccaatatcattaaaaatggtcgtattccgggccgttattcaaaacttgcagaccatgcactcatgaactatgccatgacgaccagcgatgcagttgcaactttaacattgaatcgattagatcgtgggcagctctacaccacgccacagatcgacgccaaattattctggcttatgaaaaggacatctccaacgctatatgcaaagttccttgggctttcgtatcagttatttaaataa

SEQ ID NO: 49801 - DNA, 447 bp, Acinetobacter baumannii
ttgctgaaacagattgatcaatctgctgtaactgctacagatgaaattaaactgtttgcaaattgcttctatctcgatcagaactttagctttttattagaccatctctctgctgttgaaaacttaagaaatattaacccaaatatttctgagttagagtggagaaatttattaggtcaacttcggattcgtggtgataaaagcacatatcccttagctcaactcagtggtggtgagaagttaaaagttgctttactaggtttgagccatgctcagcctatgcctgaacttttattacttgatgaaccagaaaaccacttagatatcgagtcaagagagttatttgcaaatgctatttctaattatgagggtgctgtgctattagtttcacatgatttaagttttgttgaaaaatgcgggattgttgattcaatttatttaaattaa

SEQ ID NO: 49802 - DNA, 354 bp, Acinetobacter baumannii
atgaccgcttataacgtgactaaagctggtgttcgtgcgttgtctgaaacactttcggctgagcttcgtaaattcaacattaaagtcaatgtgctctgcccgaccttggtgccaaccaatatcattaaaaatggtcgtattccggggcgttattccaagcttgcagaccatgcactcatgaactatgccatgacgaccagcgatgcagttgcaactttaacattgaatcgattagatcgtgggcagctctacaccacgccacagatcgacgccaaattattctggcttatgaaaaggacatctccaacgctatatgcaaagttccttgggctttcgtatcagttatttaaataa

SEQ ID NO: 49803 - DNA, 162 bp, Acinetobacter baumannii; identical to SEQ ID NO: 49576

SEQ ID NO: 49804 - DNA, 354 bp, Acinetobacter baumannii
gtgcctgctgtgctatctacagttgcagtatacgtctggccattgatcacaacagtgaccactgtatttgctgcatctgccggaacgtttttcaatacgcctgtaacagtaacgttgcctgacgcttctgatgcattaatcacattgtcagctgttactgaatcaaccgtgaagttaacgccatcggtatttgggccaactgcatcgacaatagctgtacccggtaatgatgggttacctgctggatcggtagcaattgcctcaacttcgtcaccatcattaaggccagggtttggtactgaccaactgccgtccggtcctgctacaactgttgctgtgtcaccattaggatag

SEQ ID NO: 49805 - DNA, 252 bp, Acinetobacter baumannii
gtggctacctataaaaaagaaactggttttacttcatcattttgtaatagatgtggttcgcctgtccctaataaaattaatggtacaaactatatatggataccgttggggcttcttgaacaaccgtttaaatcagatttaaaacttaatttttgtatagagtcaaaacatgattgggttgtgttaggggatgctcataaaaactttgcacatttacctgagttagaagagttcttaaaatattttgaataa

SEQ ID NO: 49806 - DNA, 162 bp, Acinetobacter baumannii; identical to SEQ ID NO: 48445

SEQ ID NO: 49807 - DNA, 354 bp, Acinetobacter baumannii
gtgcctgctgtgctatctacagttgcagtatacgtctggccattgatcacaacagtgaccactgtatttgctgcatctgccggaacgttttccaatacgcctgtaacagtaacgttgcctgacgcttctgatgcattaatcacattgtcagctgttactgaatcaaccgtgaagttaacgccatcggtatttgggccaactgcatcgacaatagctgtacccggtaatgatgggttacctgctggatcggtagcaattgcctcaacttcgtcaccatcattaaggccagggtttggtactgaccaactgccgtccggtcctgctacaactgttgctgtgtcaccattaggatag

SEQ ID NO: 49808 - DNA, 255 bp, Acinetobacter baumannii
atggatttggcggttggtgccaagaaagtatttatcactacagaccacgtcaccaaacaaggcgagccaaagattgtggctgagctgacttatccggtaacgggtaaacactgtgttgaccgtatttacactgacctgtgtgtgattgatgtgaccaaagacggtttaaaggtgattgagaaagtggaaggtcttagctttgatgagttacgggctttaaccggtgcaactttgattgatgcgactcaagggtaa

SEQ ID NO: 49809 - DNA, 423 bp, Acinetobacter baumannii
atggaacttacggactctcctcgacatagatatcgtgtaagattttttgctccccatgttgagactagatggcaacgtaagctagtaggtaaattatttactttttctttaaagatattagataaaatttttattaccaagaaagatttctggtttggaagtaattggttttcaattcgtagagaagaattgaaaattattttaaactcaattacagatagagatatttcattatttaaacatagattaaatcctgatgagcatttcttccaatatatagtggtgagatataataatggaaataatcctatttacttaaatgctgatcagttgttaaagctcaaaaatacgtgttcccatttttttgctaggaaagtggatattgataatcagttaaaatattatgaaagggtgaatttctaa

SEQ ID NO: 49810 - DNA, 312 bp, Acinetobacter baumannii; identical to SEQ ID NO: 25139

SEQ ID NO: 49811 - DNA, 786 bp, Acinetobacter baumannii; identical to SEQ ID NO: 25138

SEQ ID NO: 49812 - DNA, 1182 bp, Acinetobacter baumannii; identical to SEQ ID NO: 25137

SEQ ID NO: 49813 - DNA, 636 bp, Acinetobacter baumannii; identical to SEQ ID NO: 25135

SEQ ID NO: 49814 - DNA, 378 bp, Acinetobacter baumannii; identical to SEQ ID NO: 25133

SEQ ID NO: 49815 - DNA, 282 bp, Acinetobacter baumannii; identical to SEQ ID NO: 25132

SEQ ID NO: 49816 - DNA, 675 bp, Acinetobacter baumannii; identical to SEQ ID NO: 25131

SEQ ID NO: 49817 - DNA, 507 bp, Acinetobacter baumannii; identical to SEQ ID NO: 25130

SEQ ID NO: 49818 - DNA, 312 bp, Acinetobacter baumannii
gtgacagaacaaaccaataagaaattgatgctggatgagtctccagatatgcccctgcaattcaagtggagaaagtttggtggtgcgatttttactgccacgcaaacaatggagcacgtcaaggaaggacgtaagctcgggccgactccagcagggatgctacctcaagaagtgtggctgaaccgcctgatcgctatggaagaaaccctgccacgagggaagttttttgacagattccgccgccgcgacaaaaacgagcagtatgacttggccgccgatcatctccgtcttgtcggacagaaaaagcgatag

SEQ ID NO: 49819 - DNA, 501 bp, Acinetobacter baumannii; identical to SEQ ID NO: 25128

SEQ ID NO: 49820 - DNA, 1428 bp, Acinetobacter baumannii; identical to SEQ ID NO: 25127

SEQ ID NO: 49821 - DNA, 657 bp, Acinetobacter baumannii; identical to SEQ ID NO: 25126

SEQ ID NO: 49822 - DNA, 618 bp, Acinetobacter baumannii; identical to SEQ ID NO: 25125

SEQ ID NO: 49823 - DNA, 489 bp, Acinetobacter baumannii; identical to SEQ ID NO: 25123

SEQ ID NO: 49824 - DNA, 2193 bp, Acinetobacter baumannii; identical to SEQ ID NO: 25122

SEQ ID NO: 49825 - DNA, 618 bp, Acinetobacter baumannii; identical to SEQ ID NO: 25121

SEQ ID NO: 49826 - DNA, 2973 bp, Acinetobacter baumannii; identical to SEQ ID NO: 25120

SEQ ID NO: 49827 - DNA, 1866 bp, Acinetobacter baumannii; identical to SEQ ID NO: 25119

SEQ ID NO: 49828 - DNA, 546 bp, Acinetobacter baumannii; identical to SEQ ID NO: 25118

SEQ ID NO: 49829 - DNA, 630 bp, Acinetobacter baumannii; identical to SEQ ID NO: 25117

SEQ ID NO: 49830 - DNA, 447 bp, Acinetobacter baumannii; identical to SEQ ID NO: 25116

SEQ ID NO: 49831 - DNA, 378 bp, Acinetobacter baumannii; identical to SEQ ID NO: 25115

SEQ ID NO: 49832 - DNA, 663 bp, Acinetobacter baumannii; identical to SEQ ID NO: 25114

SEQ ID NO: 49833 - DNA, 378 bp, Acinetobacter baumannii
atgggaggaagtgtgaaccttaataaacaatttttctggtttttgatgaacgcggtgctgatgtgcatcttcatcgttccagtggccgtcgcgttttggctgtctgcttttgcggcaggttttgactggagtcagtgggttaagttggctgctgatacggccaacagagctgcaagtgacccggccaaggctctgggcacggttcagacctactggggcattctcagcttcttcctgctggcggcgtacagtctgatgttcaagtttaaagccaatgctaacaaggaagtgaaaactctggaggtggcccgaccagccaatgaagttagcgttgcggcttcggaaaaacattcggaagcggttcctcaaaatcaataa

SEQ ID NO: 49834 - DNA, 627 bp, Acinetobacter baumannii; identical to SEQ ID NO: 25110

SEQ ID NO: 49835 - DNA, 918 bp, Acinetobacter baumannii; identical to SEQ ID NO: 25109

SEQ ID NO: 49836 - DNA, 1317 bp, Acinetobacter baumannii
atgattaagcgattttggacacagttagaccccaacaagaagcgttgggtgtctatcgctggcggcgtcttcgttctttttgcggtcgtgacaatgttctctggtgaacccaagaaagaagagaagcgcggtcgccaagaaaccatcaagcacgttctcacagacaaaaacacccgtgagatcgggatagattcgttgtctgccgatgtgaagatggtgtctcgtgaaaactccgacctgaaaaaggagctggaacgagtcaagaaagagctggaggaaaccaaaaccactgccgggaaatccagtgatgttggccgtgagatgacccgccttcgtcaagatttggaccgcctgacccagaagaacatggaattggctaagaaagtcgaaaccggcgctgctggtggaaaaacatcctcttcatcagaggatgccagagccgatgttaatggtgcatctggtggtgatggtcagttcatggagaaaaagctcgactacaaagatcctgcatccttttttcgggacgcaccgcttcctgactcgaagggtggggctcctgcaactggcaagggagacggtcgtgatgcaactaaaccaggcatccaaatagtgagctactcgcagaaagcgccagaagttgaagagaaggacaacaaggatgatgagtctatctacctaccttctggctccatcctgacaggggtgctcatcaacggtatggacgcaccaacatctcaaggtgctcgtcgagatccgttcccttcgaccctcaggattcagaaagaggctattttgcctaaccgcttccgtgcggatgttcgtgagtgcttcctgattgtttcaggctatggagatctcagttcagagcgagcgtacctgcgtggcgagaccttctcgtgcgttcgggatgatgggggcgtcatagaagcgaagctggattcctatgcagtgggtgaagacggtaaggccggtgtccgtggtcgcgtcgtatcgaagcaggggcaaatcatcgccaagagcttgatggcaggcttccttggtggcgtttccgaagcctttgacgtcaatcctgtgccggtcgttagcactaaccctggctcaaatacccagtaccagtctgtgttctccgaccagatgttgcagggagcagcagtgaagggggccagtaaggcgctagatcgcatcgctcagttctatatcgacatggccgaaggcatcttccctgttatcgaggtcgatgctggccgtcaggtagacatcatcgtgaccaaaggaaccaagctacaaattcgttccaccgggggaaccaagaaatga

SEQ ID NO: 49837 - DNA, 579 bp, Acinetobacter baumannii; identical to SEQ ID NO: 25107

SEQ ID NO: 49838 - DNA, 384 bp, Acinetobacter baumannii; identical to SEQ ID NO: 25106

SEQ ID NO: 49839 - DNA, 5487 bp, Acinetobacter baumannii
atgatcaatttcaagcctaaaattccggcgatgcttggggctctggcggttcttaccgctggtgctgctcatgcagagctgctggaatacacctttaaggctccagatggtacgcaacggtctctgactccgaatgccaactatgccaacccaacgggcaatatctcgtttgccttgagtgccggtatcgaccgaaaggtaaagatttcggtgcttcggtcggatggaacagtggtttcgacagcgaccagccaccttcttggggctactgatcgcatcacagtgggtggaaaatcctactatggtgcggaacttcaactaccagctccagttggtggggcatacactatcagggcggaaattcttgcctctgatggttctacagtacagacggatgaataccctcttactgtcgatgtgacgccgccaacctactcttcgcttgccccggtttatagtaactatgggcaggttactagcggtgatgtttggaaactgggtctaggtggctctgaggataatgcctttttgctgtcaggaatctctgatgagtcacccatcaaaggcgtcaaagcaaagctgtatcgtcaagacggttcactctacaaagatgtatccgtgaactacgatgacgctaacggacaagctagacagtctttccaatctggctttttcccagcctctgacttggatgaagtgtttacacttcagtttgagataagcgatagcgctggaaatagctatctttcacctcgtcaaaaagtgatgtttgatagcataaccaatgctccgtctgcaccttttggtgtttatgacccttcaagtacaaacaacttaggccctggattaaccggatttgttgcttacactgagggcatgacagttaaaactaacccaatcaagttagcttggcgtgttccgcgtgataactggcatgagtatagagaaggtgggataaatatgaccaatgccttgggagagatgtccaaggtaggagaagatgccagctatgtttatctcgtcacaaccgcaccttatggcaataccgacggcaattattggcgttgggtgaacttcggccagtgggggggaggcggtattgcttataacctcacactctctccatcagcgcctaaaagtcccagacttttgggtgtggactacaattacagtgatataggatggtctagtttttaccgctactgggtgaacaattctgttcttcctgtcactgttagtagtatccgtgtcaaagttgaaccaaggccttacgttcaaactgccgttcacaggggaagctgtgaaattcctgttggtcaagatagctgcgtgattgcaaatagcttcacaatggctaaaggcacaacagggtacgtccacgataatgcgacagttttcaatccggataaatctcttcgctcgaatcctctttgggcagaggttaactggaacgatcagcactaccctcagctaagtcagcagttcgatcaaaatagcaaggtatttaccttattcgttaaccagccaggacgaggcgcttactttgataggctgcgtctgcgaagtgcatggattgaagatagcaaaggcaacaagctgtctccaactggtgggttaatagccaacaactgggagaactacacttaccagtgggatcttaaaactctccctgaggggcaatacagtcttgttgccgcagcagaggagatgcacgggcctttaacgcgacaaccaatgttccagataacgtctgatagaacgccaccaaccatgacactcagtgtggcagatggagcagctatccagactctagatgatgttgttattaccttggctgatgctatcgacccttcacctaaattgacctctattgcccttgtaggggggcctgccaatgacaaggtgcagttgtcttggcgtgaggagtcgaaaggtcgattccgccttgagtacccggtaatgttcccttctttgaaggaaggggaatcttacacgctgactgtttccggtgaggatgcacaaggcaatgcggttcaaaaggctgttggcttcgagtacaaacctcgtcaggtaatgctggcggatgggatggatggcaaggtcatggtccccgctgtcactcatgaatttgttcatgcagatggcaaacggatcatcgaaaccaagccgctgacgctcagtgatggtgctgtcgtgacaggttcatacgacgtgtttgcgaccctacgttctgatgcgaaagtaccgctggtggttaatggggtgcgtatcgagccaggccagacaatggggatcatgagccaacatgatttcggtgcgtcaggtggtcgtttgagcattccggttaaacctgctgttcctgatgtggtcggctcttccagccttcttgtcatgacctccgcgccgaactcacccatcttggttgtggacatcaatacctggaaagggacggctaagctctctgctgaatcatggacaattcgccaggtcattgacccagtgaaaatctatgccctgccagagtcgggtgtgccttgccggttcaccacgaaagaggatgtggctatggccgcagacccaattcgtgacccggtgtgtttgctccagtgggacagaactccagatgaggctgaacaaactacgcaggacaacaacgggatgaaagttgctgggctggtggggcaggctgtgagcattggtgaacaacctgtcgaatacagcctgtacctgttcagtggtgacggttccaaggtaaaagttgggtctggctctcagaacctgacggtaactactgcctatggctctgttggctacaccccgattgatgacattgctcaggtgaatcgcgtcattgaagattttgatgtgaacttcaagcagagcaaggggccagactgttctataaccctcagcgcagaccgtgcgaaaaaagaggccgcgaacaaggctgttggtagtgcaagccgtgcctgtctgttcgagtggcagcagatccccgatggattggtccaagacccgttatcggaatcaccttcgctctctggttcattggcctccaacggcgttcatccactggggtggcgggtaagtattttcacccgtaacggcactagggtgacgttgaacgacgagactttcaatgtcgaagcggttgacccaccagctccgaccgttgaactagcctccgactacaacttcaaagacaacatctacttggtgccgatgacaggtaactacctgggtgatgccattatcaactctgaacgagctgatctggatattgccatatcgcgcaactcggatgttcttgagtctgagaccttcactccgggatggggtgccaccaataaggtgtatcgccgcatcaataccgatgagcgagcgttgtgggaggagaccacctacaaggtgaacgcggcctacaacaaggtgcctgatgtgaagacggaggttgtctaccgggctatctctgcaccttctgacagtatccgtcctatcgttgaagttaaaggtgataccgcgattgacacccaggcattgccggttagggttctcatccgtgatcagtacaaacctgatggtgactatgacgctaacacgatgggggtgtggaaagtacgcctgatccagcaaaaggcctacaacgagacggttgcgctcactgattatgcggaagcatcgaacggtgaagctcagttctcagtagacctgtctggtgtggatacttcctccgtccgtatcgctgctgaggctgttctggaaagccctgtggagggttacaaccgcacagagttgtctatcagacctgccttcttgacagtgcttcgcggtggtgccatcggtgctggcgtggaggctcgcaagttgtctggtgaagctccgttcactgctgtgttcaagctatctttggacgaccgtcaggatctccgggctaccggccaggttgtgtgggaaaccagtaaggacgacggtaaaacctgggagcagttcatcccagaagatcgatacaagtatcagcttgtgaagaccttcgacaagggggagtaccaggttcgggccaaggtggtgaacgtcaactcaggtgcggaaaagtacaccgaagcggtcagtgttgtcgcttacgacaaacctgatattgctgttatcggcccgaccacgttgtttgtcggaagtgaaggcaagtacacagcgaacctgacgttgaacgatgagccaatctccggtggcaatgccattgttgagtggtctactgacggtggcaaaacctacgcgcagacaggggatagcatcacgctttcgagcgatgaagaaacccgataccgcctgtgggctcgtgtgcgctctgccacggcaccggctgatgacggctatgcctatgaagttgcgaaaacggcggttgacttccgagcagtgaaggcacctcgtccttacgtgacagggccgcgagttattgagaccggtaagaagtatgtgttcaaagccgaaaccagcctgccttaccgtgggatggacgtgaagctgaacgggttcttcacgctgcctgatggctcgattgtgcagggtgatactgctgagtacgaaccctctgacactgacctcaatcaggctactgtagaaacgaagtacaccacctggatcgaaggataccgagatcagggtgcagaggcttcgcatagcctacgctcccgcgtttggcagtatgtatggccgagcttcggaatgcaggttaggaagaacgcagacgtggctcctgcgacgatcaccgcgtcagtgcggccaattgccttcaacggcaagctggaagagccgacctacgagtgggagttgccggaaggcgctgtgattcaggatcagcggcaggatattgtccggtcctttgtgatcaatgagccgggtgattacaacatcaaggtcactgtccgtgatgctcgcggccatgagaccgtgatcgagcaaccgctcaagatcggccaggcagcgccctatgccattgacctgcaatactctggctcgaacaaatacgagcgtgagcctctggatgtgctgttgcgaccgtacatttctggcggccacccacgcgaccgtatttcgactcgtgtttattcggtagatggtacaccgttggaaagcagtggttactacggcagagcaactctgggcgctggtgagcacagcatcaagctgaaaataacctcagaaatggggcatgaagctgagggcgaggtgaacatcaatgttgcagagaacaagttgcctgcatgtagcctgagctcacgagagaccgttgggtcgtggatcgtctatgcgaactgcgaagataccgatggccgcatgaagtcctacgaatggaccattgccggtgagttgcagagcatcagctctgatcgagtgactatcagcaagggcacctatgaaacgatgccgaccatctctctggttggggtcgatgactctgggggcaaatccgaagctgttaccatgaactaa

SEQ ID NO: 49840 - DNA, 708 bp, Acinetobacter baumannii; identical to SEQ ID NO: 25142

SEQ ID NO: 49841 - DNA, 2448 bp, Acinetobacter baumannii
atgatcgtaaccatcaaaaagaaactcgaagaaacgttgatcccggagcacttgcgagctgccgggattattcctgtcctggcctatgacgaagacgatcatgtcttccttatggatgatcacagtgcaggctttggtttcatgtgtgagcccctgtgtggtgccgatgaaaaagttcaggagcgaatgaacggtttcctgaatcaggagttcccgtcgaagactacgctccagtttgtcctgttccgctccccggacatcaatcaggagatgtaccggatgatgggtttgcgtgatggcttccgtcacgagctgctgacatctgttatcaaggaacggattaacttcctccagcaccacacgacagatcgcatatttgccaagaccaacaaaggtatctacgacaatggcttgatccaagacctcaagctgttcgttacgtgcaaagtccccatcaagaacaataacccgactgaaagcgaactccagcagctcgcacagcttcgcacgaaggtcgaatcatcgcttcaaaccgttggtctgcgtcctcgcacaatgacggcggtgaactacatccggatcatgagcaccatcctgaattgggggccagatgcttcatggcgacatgactctgtggattgggagatggataagcccatctgcgagcaaatcttcgattacggcaccgacgtggaagtcagcaagaatggcatcaggctgggtgactaccacgcgaaagtcatgtcagcgaaaaagctgcctgacgttttctactttggtgatgcgttgacctatgccggggatctcagcggcggcaattccagcatcaaagaaaactacatggtcgtgaccaatgtttttttccctgaggcagaaagcacgaaaaacactctggagcgcaaacgccagttcactgtaaaccaagcctacgggccgatgctcaaattcgtgccggtgctggcggacaagaaggagagcttcgacactctctatgagtccatgaaagagggggctaagccagtcaagatcacctactcggtggttttatttgctccaaccaaagaacgtgttgaagcggcggcgatggccgcacgaaacatctggcgtgaatctcggttcgagctgatggaggacaagttcgttgctctgccgatgttcctcaactgcctgccattctgtaccgaccgggatgcagtgcgagacctattccgctacaagaccatgacaaccgagcaggctgctgtggtcctgccggtgtttggggaatggaaggggaccgggacctatcatgcagcgctgatttcccgcaacggccagctcatgagtctgtctcttcacgacagtaataccaacaagaacctggtgatcgcagccgaatccggctcgggtaaatcgttccttaccaacgaactgattttttcctacttgtccgagggggctcaggtctgggttattgatgccggtaagtcctaccagaagttgtcggaaatgctcaatggcgacttcgttcactttgaagaaggaacgcacgtctgcctcaacccgtttgagctcatacagaactacgaggacgaagaagacgcgatagtcagcctcgtttgtgcgatggcttcggctaagggcttgctggatgaatggcaaatctctgcgttgaaacaggtcctttctcgcctgtgggaagagaaaggtaaagagatgaaggttgacgacatcgctgagcgctgcctggaagaagaaaatgaccagcgcctcaaggatattggtcagcagctctacgcctttacgtcgcagggcagctacgggaaatacttctctcgcaagaacaacgtcagcttccagaaccagttcactgtactggagctcgatgaactgcaagggcgtaagcacttgcgtcaggttgtactactccagcttatttaccagatccagcaagaagtattcctgggtgaacgtaaccgcaagaaagtcgtcatcgtggatgaggcctgggacctgctcaaagagggcgaggtctcggtcttcatggaacatgcctaccgcaaattccgtaagtacggtggctccgttgtcattgcaacgcagtccatcaacgacctctatgagaacgcagtgggccgcgccatcgcggagaactcggccagcatgtacttgctcggccaaaccgaagaaaccgtggaatctgttaaacgtagcggtcgtctgaccctttcagagggcgggttccacaccctcaaaacggtacacaccatccaaggcgtgtactcagaaatctttatcaaatcgaagagcggtatgggcgtcggtcgcttgatagtgggcgacttccagaagctactttattcgaccgatccggtggacgttaacgccatcgaccagtttgtgaaacaaggcatgagcatacctgaggcaatcaaggccgtaatgcgaagccgtcggcaggctgcataa

SEQ ID NO: 49842 - DNA, 318 bp, Acinetobacter baumannii; identical to SEQ ID NO: 25062

SEQ ID NO: 49843 - DNA, 531 bp, Acinetobacter baumannii; identical to SEQ ID NO: 25063

SEQ ID NO: 49844 - DNA, 1266 bp, Acinetobacter baumannii; identical to SEQ ID NO: 25064

SEQ ID NO: 49845 - DNA, 672 bp, Acinetobacter baumannii; identical to SEQ ID NO: 25065

SEQ ID NO: 49846 - DNA, 1008 bp, Acinetobacter baumannii; identical to SEQ ID NO: 25066

SEQ ID NO: 49847 - DNA, 2796 bp, Acinetobacter baumannii; identical to SEQ ID NO: 25067

SEQ ID NO: 49848 - DNA, 861 bp, Acinetobacter baumannii; identical to SEQ ID NO: 25068

SEQ ID NO: 49849 - DNA, 642 bp, Acinetobacter baumannii; identical to SEQ ID NO: 25069

SEQ ID NO: 49850 - DNA, 321 bp, Acinetobacter baumannii; identical to SEQ ID NO: 25070

SEQ ID NO: 49851 - DNA, 969 bp, Acinetobacter baumannii; identical to SEQ ID NO: 25072

SEQ ID NO: 49852 - DNA, 909 bp, Acinetobacter baumannii; identical to SEQ ID NO: 25073

SEQ ID NO: 49853 - DNA, 528 bp, Acinetobacter baumannii; identical to SEQ ID NO: 25074

SEQ ID NO: 49854 - DNA, 990 bp, Acinetobacter baumannii; identical to SEQ ID NO: 25075

SEQ ID NO: 49855 - DNA, 1011 bp, Acinetobacter baumannii; identical to SEQ ID NO: 25076

SEQ ID NO: 49856 - DNA, 1278 bp, Acinetobacter baumannii; identical to SEQ ID NO: 25077

SEQ ID NO: 49857 - DNA, 1797 bp, Acinetobacter baumannii; identical to SEQ ID NO: 25078

SEQ ID NO: 49858 - DNA, 336 bp, Acinetobacter baumannii; identical to SEQ ID NO: 25079

SEQ ID NO: 49859 - DNA, 540 bp, Acinetobacter baumannii; identical to SEQ ID NO: 25080

SEQ ID NO: 49860 - DNA, 501 bp, Acinetobacter baumannii; identical to SEQ ID NO: 25081

SEQ ID NO: 49861 - DNA, 885 bp, Acinetobacter baumannii; identical to SEQ ID NO: 25082

SEQ ID NO: 49862 - DNA, 225 bp, Acinetobacter baumannii; identical to SEQ ID NO: 25083

SEQ ID NO: 49863 - DNA, 390 bp, Acinetobacter baumannii; identical to SEQ ID NO: 25084

SEQ ID NO: 49864 - DNA, 453 bp, Acinetobacter baumannii; identical to SEQ ID NO: 25085

SEQ ID NO: 49865 - DNA, 276 bp, Acinetobacter baumannii; identical to SEQ ID NO: 25086

SEQ ID NO: 49866 - DNA, 192 bp, Acinetobacter baumannii; identical to SEQ ID NO: 25087

SEQ ID NO: 49867 - DNA, 354 bp, Acinetobacter baumannii; identical to SEQ ID NO: 25088

SEQ ID NO: 49868 - DNA, 345 bp, Acinetobacter baumannii; identical to SEQ ID NO: 25089

SEQ ID NO: 49869 - DNA, 303 bp, Acinetobacter baumannii; identical to SEQ ID NO: 25090

SEQ ID NO: 49870 - DNA, 1626 bp, Acinetobacter baumannii; identical to SEQ ID NO: 25091

SEQ ID NO: 49871 - DNA, 300 bp, Acinetobacter baumannii
atgatcgtaaacccagagaccaaagcaaaggttctccggtatgcgatgggcaaccctgggaatttatccatcacaaagctggcggtcgcgctggattacgatgcggtagatgctctgggtgttcgttttaaagacactgtaaatcttgaggttcgcagagccaggcgctgggaagtctggcagtggttctggaaccatccggatcaaagtgtccaactgtcaatcaaattgggcgtggttggcgctgtgttgggagtcatgggcttcctgactggcgtagctccgtacctcttgggataa

SEQ ID NO: 49872 - DNA, 555 bp, Acinetobacter baumannii; identical to SEQ ID NO: 25093

SEQ ID NO: 49873 - DNA, 387 bp, Acinetobacter baumannii; identical to SEQ ID NO: 25094

SEQ ID NO: 49874 - DNA, 2454 bp, Acinetobacter baumannii; identical to SEQ ID NO: 25095

SEQ ID NO: 49875 - DNA, 204 bp, Acinetobacter baumannii; identical to SEQ ID NO: 25096

SEQ ID NO: 49876 - DNA, 606 bp, Acinetobacter baumannii; identical to SEQ ID NO: 25097

SEQ ID NO: 49877 - DNA, 270 bp, Acinetobacter baumannii; identical to SEQ ID NO: 25098

SEQ ID NO: 49878 - DNA, 219 bp, Acinetobacter baumannii; identical to SEQ ID NO: 25099

SEQ ID NO: 49879 - DNA, 558 bp, Acinetobacter baumannii
atgtctaactttgaacaagctctggagcgtactgacggtaaaacactgattctcagcaatgggagtaagtgggcaggccaagacccggacagcattcagactttactggatgtcctgggtgacaacgttcttgacccgatgtttgagcagtatcactgttatcgcccatacccgtttgaaccaatggtgaggacggggcgaaatggcgaaatgttccagccttggcttggggcagcctgcttctttgggaacttcctgaccgtctctcatgttttcaacatcatcacgaaagatgacggtgttgttgaggccttaacagaggcgatccggaagaatatggcgactgaacagtaccagcagaatgcctatgagcgttatgccggttggttctacgctgaaaccagcgaagggttaaggctagtctctccaagtgaggctgccgacatccgagctggcgcagtttcaaagctgcgttacccaagaaacttcgaggttatgaaaactgcggttctcaaaggtcctcgatttgatactgaattaagccgcaaggcttcttaa

SEQ ID NO: 49880 - DNA, 852 bp, Acinetobacter baumannii
atgattaaacagcattttcaaaacgaactggttaagtgtggatacccggatgatctgacgattgagtacagtctcggatactgccagggggatggcgtagccttctacggggatttgagcgttgatgacgtcaaagctctcatgaatcgcctattcagcactgagcccggccaagtggatgctgtcagccgcgtgaagaacctgatggcacagaaagacattgagaatatgctttctgtcctccgcgaatatggttcctgtgacctgtccattactcggaatagtcacgggcatcactacagccattggaactgcatgaacatcgacgacaacgtggacttcacagggatcttccctgatgatgattccatgattggcaccggcattgaagggattaaccaggatatggtcgagcgctggcaagacctctgggaacgctttgtgctggagctggcggatgatgtaaaaagtctttccaagaagctcgaagcggacgggtactcgctgatcgaggcctctccatgcgaagatgaagtggtttgggaacgggccactgaaaactacctggtgcgtgttactgaactccctgagcgggatttcgatatgggccactgggatgacgaagtaagagaccaaacaatttgttctatcctggaagggaaagagcgagtgcttggcctacgtgttgaggtactctctcgtgaaaacgagattgtcctgggtgaagagagtctgcacggcttgaccgttgccagtgatgacaagagctacgctggctacagacgagaacttctccggggcgctatccagcaaaccagggactttttctctcgccacctcaaagcggcataa

SEQ ID NO: 49881 - DNA, 147 bp, Acinetobacter baumannii
atgaacaaattccaagactttaagttggtttatcgtcaaggtggtcgtcgcttagagcgtgtctttaaggacactctttacgcgaatgtgaagcgtgtcgctgactcgtttcctccgaccgttctttggcgcattcagccagcgtaa

SEQ ID NO: 49882 - DNA, 387 bp, Acinetobacter baumannii
atgaaccaagtagctaaattggacctcgcccaaatccgtcaacaagccatcaatgatggtctgctggtggaccaatcttccatcggtaaacaagctggtttcctgaccaatgtggcagtgaccccggcaattgtcgatggagtatttggtgcagatggtaagcactcggtagaagacttccttttcatgtttttgcagctttgtgttgctcaaacaaaggtcgcttttaccgacaacaagaattggggaaagattcgtctttattaccccatgcccactgtagatggctttttcaaacccactgaggttgtgattaagtcagatcctgtaaccgcagatgtcacaatcatgatggcctcggaagatggcactcatttgtgcttgtga

SEQ ID NO: 49883 - DNA, 1728 bp, Acinetobacter baumannii
atgtcttactacaaagctgacaccgttcgtgaagctgcaaacggaaactggctattcatcctggcggccctagcgccccatcttgaaccagctctccgtaaacctggtcgtcatgtttcttgtcctatccacggcgggaaagatggcttccgactgttcaaggatgcccacctgactggtggcggcgtatgcaatacatgcggtgccaatcatgatggttttgagctgctgatgtggctcaataactgggactttaaacagtgcctgagcgaggttggtgattatctgggcgttgagaaagagcaaccccagtatcaacaagccgctgcaccgacacgagctcctgtccaggccaaagcgcctgttcagcaagagcctatgaaggtgaataacaaggttctcgattccaagaatcgtaaaaaatccattgccggtactctgattgcccacggtaaagctccttatgagcataacgaagacaacgagctcagctactttgccttcatccgtgacaagagcggtttggaacgcaccatctggggcgtggatcttgaaagagccattggtgaaagtgaagccaagtatggggatgagatcgtcatgacaaacctcgggcgcgagcctgtaactgtcgtcgttgaagttaaggacgagcaggggaatgttgtgagagaacaacctatgcaaacgcatcgcaacacctggctggtggaacgtcgcggcgctacggtaacgcagttccgcgctcgctcgaacggtggtgttgagccggtgagtcaccatgttgagtcggcccctgtggtcaaccgcacggtagaagctccggcaccgcaagtacaacatgcggccacacaaccggaagagcaaagcagcgaaaacaagccgaaagttgttccgatgtttcgtgaacaacctaagccttggctgcttgagctccaagaagaaatggagaagagaatggagcgcgaacgcgcttacagtgctcgtctccgtgagaaaatcgagaaggtatggaacgagtgtttgccgttctccagtcatgtgactgagccaatgcgtctgtacttcaaaaaccgcgagcttctgttcaaggttgatgaagtagaaaaaacagactgtctgcggttcaatccggctatggcctactacgacgaagatggcaatgaagttgggaaattcccggctatcgtctgcgctatccgagatgtggaaggcaacctggtaacgctccaccgcacctatctcacccaaaacggtaaaaaagccaaggtcggcaacgccaagaagatgatgcccattcctgacggtttggatgtcaatggcgcggccatccgcctcggtgaaccgactgagggtatcctgggtgttgcagaagggctggaaacagccctgtcagcttatcgagtcactcaaatcccggtttggtcaacggtcaatgcgaccctgatggagtccttcgaggttccagaaggtgttcacaccgtactgatctgggctgacaaagataagtctgtgactggtgagaagtcagcgaacgtgctgaaagccaagctggagaagcgcggcattcgtgtgtacgtcctgctgcctaaactcccgatcccgcccagagcgaaagggattgactggaacgatgtcctgatgagtcagggaagcctcggtttcccgaatgctcgctacctgcgcgatttcattgcgagaaggagagctgagtatggccgtcattga

SEQ ID NO: 49884 - DNA, 279 bp, Acinetobacter baumannii
atggccgtcattgatgtctcgaaggttgatacaacgcctggtaacgacgcggtgtgccccttttctccccctgaggggtgggagggggactctgcggcctacgttgagcttatgcggtctcggtatcgtcatctgatgcacggccagagaatgatggtgacagcctccttcgcaagaagggagcctatccaagttactggcccgtttgctgatgaagcgacgaagatcattaactcaatgaagatgaacaaggcgaagccaacagctttgtctgcctaa

SEQ ID NO: 49885 - DNA, 240 bp, Acinetobacter baumannii
atgaaaaagtttttgcgtattaagacgtggtttgtgcgtcttttctctcctgacaagaagactctgggagctatcggtgaagacctgcgtaaggtcgccgtaacagccatcggtgtcggtattgtaggattggctgtatctggggacactataaccgtcaaagaagccggtttggtgttggtcattggggttatcctgtggatctatggtataatcttaaccaaggtcagcaattcctaa

SEQ ID NO: 49886 - DNA, 726 bp, Acinetobacter baumannii
atgatgacactgactactgtctcgaagaaaacttctaataattcagcccttgtattctggcgcgttggtacaaaacggaaaggcatccttgatgttcgtattgattttgacaacgaggaggcagatcttttggctgagctcgtagccattcgctatctggcgctggacaaacaggttttttgcagagagccaggtgctggtgctggttacaagctggtggtatccaaaggtgcgattaaaaagctggcgctgggcaaatccaccaaggagtttgcattcaagtttgcggcttgcctcactggacgtttaaagggcgctactattgaagtttcgcagagcatggagtttatggatgagccgggtgagggcaacgttgagctcctcgatgtggacaagcaagcctatactcaaacccatgacgaaatctctacaccggccattggtcccgtccttgttactcaacatgccatcgatcagtatcaggcccggataacctctggagaccctaaaaaaccgtgggcctcactcgttggtcgcctccagcatccagagttacaggttcaaccctttgacgagaaagtggctcgccataaagccagaaagtatggccgcgtagataacgtggaagtctggggccatagagattccaagttcaagtacctgatggtgatcaacgacgacaaccaaaaacgtgttcttgtcacagtgtttgagcgaaatgagtaa

SEQ ID NO: 49887 - DNA, 3030 bp, Acinetobacter baumannii
atgagatcgagaccttcccttttactgatgcgaaacctgcggtcattggccgttgtggtgctcgcaactttgccatgcgttgcttttgcacaatggcgggttgtagccgtgagcaccgaagtagacaaaatgcgcttcaacaccatcatagacgcgcattccttcatgaagaattatcgctctggtgaggagcaagggaagggaacgccagttggggatgcgctttatccggttgccagttatggtgatggccgttatgtctccaggatctgttttaagtatctaggtgctactggcgattatgaccccactacctgcactggcgacccagctacggtctactggcgctcaacctatgttctgccgggtgagatggataaaacaccgttcctggacagggatctcggcttaccaacaacgaccatgtgtgtagggaaccctatccatcttggcaccggcaacaagttccaggctgaactggattatcaaagcggaggctccgaccctttcacattcaccagatactacaatagccaccttcctgatgaagagctcggcggctggcggcatacctactcgcggagcgtcgaggtcaacgcctcgaagtacggtgagaacatggttgtcctgcaccggccagaagggcaacaactcgcgttctacaactcgtcctctgtctgggtgccaacatggaaaaccgatgataccttgacgaaggatgctaccggctggcgttacactcaatctgacggggtagtcgaggcctatgatgaaaccggacgactgaccggcatcgagaagcccaacggcaatcacatcaccctgagctatctgaacggagagctatcctcgatcactgacggctttggccgcaacatccagttccagcatcaagatggccgcatggtcagtgtcaccgatcctgctggtggcagtattcagtaccagtacaacagcgctggcaagctggcggaagtgatctaccaggacaatacgagccgcagctatctctacgatgacccgaatgcaccgggtttgctctctgggctggtggacgagaacggcaaccgtttcgccacatggggatatgatgctcaggggatggcagttctaagtgaacacgccgggggcgcagagaagactcaggtaagctacaacgctgacggaagcgtctctgtcaccaacgccctcggccacgttcagcgatatacctacagccgtcacaacgggatgctcaagcctgatgttgttgagggtgcgccgtgtaccggctttgtgggaggcaaggaaacctacgtctacgacagcaaaggcctcgtctccagcattacagatcgtgctggacagaagcgcacgttcacccataacgaccggggattggaaaccacccagatagaccaggatgggggcaaggttacgaccgactggcttccttccaagtcgctccctgcaaaaatcacggaaccaaccaggatcactgagcttacctacgacactcatctccgggtgataagccgcaaggtcacagatcgcagctcgggcgcttcccggacatggacctacacctatgcccctgttggtacaggaaagccgagcctgttggcctcggttgatggtccgcgcaccgacgtcagcgatgttacgacatttgactacgatgaccagggcaacctgatccggacaacaaacgcgctggggcaggtgatgcagtttggtgactacgacgcgaacggtcgcgccgggaccattcagggcgtcaacggtgtaacccaaaccctcacctatgacgccagaggaagacttgtcagctccactggaccagaaggaaccacggcctacaactatgatgctgtgggcctcctgagctcgctgactaagccaaatggtgcaaccgtcagctatgagtacgacgctgcacatcggctggtggcggaaacagatgcacagggcaaccggcgcgagcttgagctcaatgacctcgggaacccagtagaagagcgactgctcgatgcgctgggccagacccgttggatagagcgccggatcttcaacgaaatcggctggctctccagtgtctccgacgcctatagcaatcagtcatcgttttcctacgatgtggtggcaaacctgatacaggagaccagtccctctggtaacacacactcctacaagtacgacggcttccatcaccggacacaaacgaccgatccactcgggaaggtcacgcaggtgctctacaaggataccggcgatgtttaccgtgtctccgaccctcgttcgcgcctgacctactacagctacaacggctttggcgaagtgactcaggtccggagcccggacaccggcaccaccgacattacctatgacgaagccggtaacgtggcaacgcgcaagacggccaagggacaaaccacaagctacagctacgacgcgctgaaccggatcatcgaggcatccagcggtgtcgctggcgaatcgccaattctgtacgggtacgacgaagcaacctcaccatacggcatgggccgcttgacctcagtcgatgatggcaacggtgtccggagatatggctatacacccgaaggatggttggcttacgagacctgggaaacccacgggcagagccttactacccagtaccaatacgatggtgcaggcctcatcacgaagatcacgtatcccagtggtcgtgaggtttcctacacccgtgatttagccggtgacgtcatcgaggtggcaacgacacaagcaggcaccacaacaagcctggcaagccagatcgagcgagcgccctttggccccgtcaccagtatggtcagatggaacggcatttcagaaagtcgctctttggatctcaattaccgagtcaccggcatcgacgctactagagtgcattcgctggtctatcggtacacgccagactcgttgatttcagccatagacgacaatctggggtcgtctcagaaaacggaatctatggtcactcccgtttttgcaacaccgattttgacgataaattggcttgcttga

SEQ ID NO: 49888 - DNA, 1005 bp, Acinetobacter baumannii
atggaaaacattgcgctcattggtatcgatctgggtaaaaactctttccatattcattgccaagatcgtcgcggcaaggctgtttaccgtaaaaaatttacacggccaaagttaatcgaatttttggcgacatgccccgctacaaccatcgcaatggaagcctgtggtggctctcactttatggcacgcaagttggaagagttggggcattttcctaagctgatatcaccacaatttgtccgtccattcgttaaaagtaacaaaaacgactttgtcgacgccgaagctatttgtgaagctgcatcgcgtccgtctatgcgttttgtacagcccagaactgaatctcagcaggcaatgcgtgcgctgcatcgtgtccgtgaatccttggttcaggataaggtaaaaacaaccaatcagatgcatgcttttctgctggaatttggcatcagcgttccacgaggagctgccgttattagccgactgagtacccttcttgaggacaatagtttgcctctatacctcagccagttattgctgaaattacaacagcattatcactatcttgttgagcagattaaagatttggaatcccagttgaaacgaaagttggacgaagatgagattggacagcgcttgctgagcattccctgcgtcggaacactgacagcgagtactatttcaactgagattggcgacgggaagcagtacgccagcagtcgtgactttgcggcggcaacagggctagtgcctcgacagtacagcacgggaggtcggacgacattgctgggaattagtaagcgaggtaacaaaaagatccgaactttgttggttcaatgtgccagggtattcatacaaaaactggaacaccagtctggcaaattggccgattgggtcagggatctactgtgtaggaaaagcaactttgtcgtcacttgtgctctggcaaacaagctggccagaatagcctgggccctaacggcacgacagcaaacttatgtagcataa

SEQ ID NO: 49889 - DNA, 1224 bp, Acinetobacter baumannii
atggaggtcgatgaatggacgggcttcacccgccacttcacacacctgaagaccagcgacacggccaaggacaaaaccttgctgttgacgacgatcctggccgacgcgatcaacctgggtctgaccaaaatggccgagtcctgccctggcaccacctacgccaagctgtcttggctgcaagcctggcacatccgcgatgaaacctattcgacggcgctggccgagctggtgaatgcgcagtttcggcaacccttcgccggcaactggggtgacggcaccacgtcatcgtcggacggccagaacttcagaaccggcagcaaagcagaaagcactggtcatatcaacccgaagtatggaagcagtccaggacggactttctacacccatatctccgaccagtacgcgcccttcagtgccaaggtggtcaacgtgggcattcgtgattcaacttacgtgcttgatggcctgctgtaccacgagtcggacttgcgcatcgaggaacactacaccgacacggcaggcttcaccgatcacgtgtttggcttgatgcatttgctgggatttcgcttcgcgccgcgtatccgtgacttgggcgaaaccaagctattcatccccaagggcgatgccgcctatgacgcgctcaagccgatgattagcagcgacaggctgaacatcaagcaaatacgcgcccattgggatgaaattctgcggctggccacctccatcaagcaaggcacggtaacggcttcgctgatgctgcgcaaactcggcagctacccgcgccagaacggcttggccgtggcgttgcgcgagctggggcgcatcgagcgcacgctgttcattttggattggctgcaaagcgtggagctgcgccgccgcgtccatgcggggctgaataagggcgaggcgcgcaacgcgctggccagggcggtcttcttctaccgattgggtgaaatccgcgaccgcagttttgagcagcagcgctaccgggccagcggcctcaatctggtgacggcggccatcgtgttgtggaacacggtatatctggagcgtgccaccagtgctttgcgtggcaacggcacggcgctggacgacacattgttgcaatatctgtcgccgctggggtgggagcacatcaacctgaccggcgattacctatggcgcagcagcgccaaggtcggtgcggggaagtttaggccattgcgaccgctgccaccggcttag

SEQ ID NO: 49890 - DNA, 1650 bp, Acinetobacter baumannii
atgccacgccgctcaatcctgtccgccaccgagcgcgaaagcctgctggcactgccagatgccaaagacgaactgatacggcactacacgttcaacgaaaccgacctgtcggtgatccgtcagcgtcgcggcgccgcgaatcgattgggcttcgctgtgcagctttgctacttgcgattccctggcacctttttgggcgtcgatgagcctccgtttccgcccctgttgcgcatggtggccgcgcaactcaagatgccagtggaaagttggagcgagtacggccagcgcgaacagacacggcgggagcacttggtcgagctgcaaacggtttttgggttcaagcccttcaccatgagccactatcggcaagccgtgcatacattgaccgagctggccttgcagaccgacaaaggcatcgtgctggcgagcgcacttgtcgagaatctgcggcggcagagcattatcctgcccgccatgaatgccatcgagcgcgcaagcgccgaggccatcacccgtgccaaccgacgcatttacgcggcgctgaccgattctttgttatcaccccaccgtcagcgcctggacgaacttctcaagcgcaaggacggcagtaaagtgacgtggctggcatggctgcgccagtcgcctgccaaaccgaactctcgccacatgctcgaacatattgagcgcctgaaatcctggcaagcacttgatctgcccgcaggcatcgagcggcaggttcaccagaaccgcctgctcaaaatcgctcgtgaaggtggccagatgacgcctgctgatctggcaaagttcgaggtgcaacgacgctatgccacgctggtagcgctggccatcgaaggcatggccaccgtcaccgatgaaatcatcgaccttcacgatcgcatcatcggcaagctgttcaacgcggccaagaacaagcatcagcagcagttccaggcttccggcaaggcgatcaacgacaaggtgcggatgtatgggcgcatcggtcaagcgttgattgaggccaagcaaagcggcagcgatccgttcgccgccatcgaggccgttatgccctgggacaccttcgccgccagcgtcaccgaagcgcaaacattggcgcggcctgccgactttgatttcctgcaccacatcggtgaaagctatgccacgctacgccgctacgcgccgcagttcctgggcgtgctcaaattgcgggctgcgcccgccgccaagggtgtgctcgatgccatcgacatgctgcgcggcatgaacagcgacagcgcgcgcaaggtgcccgccgatgcgccaaccgcattcatcaagccgcgctgggcaaagctggttctgaccgacgacggcatcgaccggcgttactacgagttatgcgccctgtcggagctgaagaacgcgctgcgctccggtgatgtctgggtgcagggttctcgccagttcaaggacttcgacgaatacctggtgccggtcgagaagttcgccactttgaagctggccagcgaattgccgctggcagtggccaccgactgcgaccaatacctgatgaccggttggaattgttggaggcgcaactcgccacagtcaaccgcatggctgcggccaacgacttaccggatgccatcatcaccaccgcgtcaggcctga

SEQ ID NO: 49891 - DNA, 558 bp, Acinetobacter baumannii; identical to SEQ ID NO: 25161

SEQ ID NO: 49892 - DNA, 606 bp, Acinetobacter baumannii
atgaaaacttatgcacaaaattcagaagcaaatttgggtcagaccttaagagcatctttcggacttctaatttttacccttgtcggctgtggtgctgtttatagtgcgattgctacaggtgcgggacaggtgttatttaataatcaagcgaatggtagtttgattgaaatagatcataaagttttagggtcaaaattagttgctcagccatttgttggagaggcttattttcatccacgtccttcagcagttgcttatgacccgatggcgatggcaggtacaaacttagcgcgtactaatcctgaactacagcaacaaattgatgctcagattcttgcggtgaaaaaacaagaccacacaggtaataaccctattccaagtgatttagtgactaaatctggtagtggtattgatccgcatattagtcctgaatctgctcagttacaggttgctcgagtggcccaagcgcgtcatttagaccctaagattgtggaagagcttttgcaaaagtatgttgaaccgaagcagtttgatgtattggggcaagcccgtgttaatgtattacagctcaatattgctttagatcaattacaatctacacattaa

SEQ ID NO: 49893 - DNA, 2034 bp, Acinetobacter baumannii
atgaatacacaaactcatgtaaatagccataaacaaaccatggcagtgccaaattttgaagtttggaaaaatgcatttgtgaaactgctaccacagcatgcaattaaaaaccctgtgatggcaattgtatggcttggaacagtggttacaggcattagtacaatcttaggttacaccacgctgatatttggtttagtggttacagcaattctgtttattaccattttatttgctaactatgccgaagctgttgcagaggccagaggtcgtggacaggcatcttcattacgtgcagcaagagaaaatttaacggctcgaagactcaactctttgacagaccgtcaagcgactcaagttgcagcgactgaacttcatttaaatgattttattgaagtacatgcaggtgagcttgttccagccgacggtgagattgtagaaggctttgcaactattaatgaatcggctgttacaggtgagtcagcacctgtgctacgtgaagctggaacagaccgttcaggtgttattggcggaaccaaagtacttacagatcgtattgttgtgcaagtgactgctgaatctggtcaaagtttcttagaccgtatgattgctttggttgaaggttcaaatcgccaaaaaactccgaatgagattgcgcttggctttttgttaatggtgatgacaatcacgtttttaattgtcgtgattagcttgccatttattgccaagtatttgcatattgaacttgattcagttgtgctcgtggcattattggtctgcctgattcctacaaccattggtggcttgttacctgcgattggtattgcagggatgaaccgtgccctcaaagccaatgttttggcgaaatcaggtaaagcggtagaagtcgcgggtgacattgatgtgcttttactcgataaaacaggaaccattacttatggtgaccgtcaagcgacctctttttatcctttaacttcggtaaccgagtctgagttgagagctgctgcttgggtaagttcacttgctgacccaacaccagaagggaagtcgattgttaagttagcaaaagagcaaggtttaaaacagcaagaacctgagcaagccgaatttatctcttttagtgcttcgactcgaatttctggtgtgaatttaccgaatggtgagcaaattcgtaaaggtgctttagatgcgatcttaaagtttgtagatgaagattattctcaagatttagagttaaaagcacgtgttgaacaagttgctaaaaaaggtgcaacaccattggttgtcgcaaatcaacatcatgtattgggtgtgattgagctttcagatgtaattaaacacggcattaaagaacgttttgcccgtttaagagaaatgggtattaaaactgtcatggttacaggtgataacccattaactgcggccgcgattgctgctgaagcaggggtagatgactatattgccgaagcaaaaccagaagacaaattggcttgtattcgcaccgaacaacaacgaggtcgtttagttgcaatggtcggtgacggaaccaacgatgcgccggcattagcacaagctgatattggtctagccatgaactcgggtacacaagctgcaaaagaagccggcaacatggttgatttagactcagatccaaccaaattacttgctgtggtcgagattgggaaacaacagctgattacccgtggtgctttaacaacattttcgttagcaaacgacgtctctaaatactttgccatcttgcctgcattgttcgctgctgcgattccacaaatgcaagtattgaatgtgatgcacttagcaagtccaaacagcgcgattttatctgcattaatttttaacgcgattattatcccgctattaattccaatcgcactccgaggcgtcaaatttaaaccttcaactgcaactcagttactacgtcgaaatatgttgatttatggagtgggtggtgtggttctaccatttattgccatcaaagcgattgatgtagtgattgttcaattatttggtttgtaa

SEQ ID NO: 49894 - DNA, 612 bp, Acinetobacter baumannii
atgactgattctttactcaagtaccgcgagcaacataaacaccgtttaaattatatgccatggctatattggacattgaaacccaaacaccgtgtttgggcggaagaatggcaaaaagaatatcaggcttatttaatggatatggaaacggtcgagatcggggagaactgttttatttcaccgttagcccatatttttgccgagccgggccggaaaattaagattggtaataattgttttatcgcggcagattgtagtttgcatggaccgcttgagattggtaatgaagttgctattaaccaccactgtattttagatggcggtcgagcaggcataaaactacatgatcaagttcgtattgctgcttattgtcatctctatgcatttgatcatggcatgcaactcgaccgtccactttaccaacagccggttcgctcacagggtatcgaaattgaaaaagatgtttggttaggtgcgcatgtggggattaaagacgggattaaaattggtaaacatgctgtagttggcatgaatagtatggtgacaaaagatgtggagccgtaccatattgtgggaggaaacccagcaaaatttatccgtttaagagaataa

SEQ ID NO: 49895 - DNA, 1191 bp, Acinetobacter baumannii
atgagcgaacaacaacaagaacttacccgttcaatgaatgtatcttatagtgaaccaccattaccgcgtgccagtttagtcatctggatcgtgggcattggtttagtgattttctttatctgggcatggttttttaagcttgaagaagtttcaaccggtacaggtaaggttatcccatcatctaaagaacaggtcatccagtctttagagggcggtattttaactaagctaaatgtacaagaaggcgatattgtccaaaaagggcaaattcttgctcagctcgacccaactcgttttgcttcaaatgtgggtgagtcgagatctttattaattgcagctcaggccacagcagcacgtttacgtgcggaagtgaacggtacaccactggttttccctgaaatagttgcacaagatccgaagcttgttcatgaagagactgctttgtatgaatcacgcagagctgatcttgaacaaacgctttcaggattaagacaggctttacaactggttcagcaagaattggccatgacagagcctttggttgccaaaggtgcggcaagtgaggttgaggttttacgcttacgccgtgaagcaaatgatttgcaaaacaagatgaacgatgcacgtaaccaatactacgttaaggcacgtgaagagttatctaaagcaaatactgacacgcaaactcaacaacaagttgtcatgggccgtaatgacagtttacaacgtgccgtatttaaagctcctgtgcgcggtgtggtaaaagaaattacagtgacaacgcatggcggtgtgattccacaaaacggtaagttaatgaccatcgtgccaattgatgaacagttattaattgaagcccgtattttgccacgtgacattgcgttcattcgtcctggtcaagaagctttggttaagatcacggcctatgactactcaatttatggtggtttaaaaggtaaggttacggttatttctccagataccattcgcgatgaagtgaaacaggatcaattctattatcgtgtttatatccgaactgactccgacaagctttacaataaagaaggtaaagcattcggtattacaccgggtatggtggcaactgtagatattcgtactggtgagaagactgtactggattacttacttaaaccatttaataaagccaaagaagcattaagagaaagataa

SEQ ID NO: 49896 - DNA, 345 bp, Acinetobacter baumannii
atgaaagatatgatggggaatggttttatagcgaatgcagaagctttcacactagctactcaaatttatgtgcgtatgcgcagagtaacgggacgggtgatagatgcaatgtatgttgttcgaaataaagactatgcgaaatatgtaattgcactggcactagaagcagaagatgacgaattaaaacgctgtgttgaacgattaatggtattgacggattcaataccagagcagtctcaaaaagaaatgacagtaagtattcaaactagtgaagaatcagaaatcacagccgaagacatttatcgggcacaagtgccacatcattatattggtgctttaaggtaa

SEQ ID NO: 49897 - DNA, 210 bp, Acinetobacter baumannii; identical to SEQ ID NO: 49289

SEQ ID NO: 49898 - DNA, 1563 bp, Acinetobacter baumannii
  misc_feature (879)..(918): n is a, c, g, or t
atgaattttcgtcaaattcaggcaatactacatagttggtttggaattattgttctttgggttatctttttcattttttttacgggctctattgcttattttcgaacggaaattaatgtttgggcacagccagaagcaatcagccatattcaaacagtcccttctgcacaacattctgcgcaaactgcgtttaactatctcaaccaacatgcaccaaatgccaaaagatggcgagtcacagtagccaatgagcggatgcctgtgaacctacttcaatggcaggataaagaggggaaacatcaagagctacaaaaccctaataccggagagctattaggacctgtacggaagactttgggtggagatttctttttcaaactacattacacgctttatcctttgccaagcacgttcggtagcttagttgtagctgttgttgccttaattctattaattagtttaatcacaggtgtgattacgcataagaaaattattaaagagttttttacctttagggcttttaaaggacagcgttctttattagatcttcatcacataacaggagttatcacttttcctttttatttggtgatggcctttactggactgttgattttattttatctagttttaccgtggggattatcggaacaatatggtaaagctggtatacctaagttctataatgaaatgcagtttaccgaggtggcaaaacctcgagaaccttccttaacagaagcgatgcaaccttttaatcaattcatggcacaaatgcctaagcgaacagaatctggagctattttagataaatttgaagttcaaaagcctaatacagccgatggcatgattacatttgactataactataaaaatattatnnnnnnnnnnnnnnnnnnnnnnnnnnnnnnnnnnnnnnnnaccttaaatactcctcaatatatttttgcaacaaatacggctgaacgactcaatcagccacgaaatttaagtgcaattgcacaattaggttcatcaagttatgggattcatttaggttactttgcttctatctggatgcgttttattttggcttgtttaggaataataggatgtgtcatgttggttgcaggcgcattactatggcaaacaaagcgcatcaaagaacaaaagaaatttggatatagattagtaagacatttgaacttttttactttcttagggctgccttttgcctcagccttttatttaatggttaatcggattatacctgcttcatttgagccgagggaactatacgaggtttcagcattttatatagcatggctattaagcttattgattagctttagctgctcaataaggaagggaataatcatcatgctatatattacggctgctgttttattccttattccagttattagtgtcgttctggtgccagaagcctctttattaaatagtctaaagtctgtgcattggtctcttgtcggtgttgatctggcgctcatactgctcgggctattctatttagtagtactacgcttctaccaaaccaaatttattacgttaggagaggccaaatga

SEQ ID NO: 49899 - DNA, 741 bp, Acinetobacter baumannii
atgaaagtattacgtgttttagtgacaactacagctttacttgctgctggtgctgcaatggcggatgaagctgttgttcatgacagctatgcattcgataaaaaccaattaattccagtaggcgctcgtgctgaagtaggtactacaggttacggtggtgctttgttatggcaagcaaacccatatgtaggtttagcattgggttataacggcggtgacatttcttggtctgatgatgtaaaagtcaatggatcaacttatgaccttgatatggataataacaacgtttatttaaatgctgagattcgtccatggggtgcaagcactaaccgttgggctcaaggcttatatgtagctgctggggcggcttaccttgataacgattatgatttaactcgtaacgttgatgcgactcgttcattccgtgtaaataaccaagactttattgcgggtgccgatggtgtcaaaattaacggtcaaatgtcatataaaaatgatattgctccatacttaggttttggttttgcacctaaaatcaataaaaactggggcgtattcggtgaagtaggcgcttactatactggtaacccaacagttaagcttgtttcgtcaggttctgcagttacaactggtgatcaatcacttgaagaggcagtaaatgcggaagctcgtaaaattgctaacgatgataaatacaaatggttgccagttggtaaagttggtgtgaacttcttctggtaa

SEQ ID NO: 49900 - DNA, 423 bp, Acinetobacter baumannii
atgccaactagatataacacaggcgagtatagctacgatcttgaatatcactatggagatatgtcagcaagcatggagatgcttagagcacgtttaattgaattgttgactcctcatctgtctggccgttatgtgaaatggagagaagcatatttcacacggtttacaaagtgcggcggggattcgggggggatgttttgtgtaggtccacacgaatttcatattgatggggcgttaaggcgctattactcaggttctattgatattacctacaaccagaaagatcgatatttcttggtgggtgagaaaaagaaagtcaaatgtaaggcttgtaaggggtttggcttcattcgagatgatgggtgggggcatatagataaatgtgaaatgtgtgatgcagaaaaaggagccagccatgagtga

SEQ ID NO: 49901 - DNA, 441 bp, Acinetobacter baumannii
atgaacgtaaaaaccttttcaaacaagcacaaggtaactggagttacagcaattgctgtacttgtagccttgagttcttgtgaatatcgaactgctaattctagcgtcccttctaactactcatatgaaagcaaacaagtcgttgcttctgaatatgaacttttaggcattaagcaaacaggtgaaaaaactggtgtagctgttatccgcatagacggcttcaaactaaacgtgagcttcgattttgacggcgtagctgatagctatggtgtagctggatctgattttacagcggctgaaattactaaccttgctattgagtcagtaactgacttaagcggcaaaccttggaatgatttcaccaatcatgacgaccataaaaacataaatattttattagcgggctatatcgaccgtaataaatggttggaggcagcctaa

SEQ ID NO: 49902 - DNA, 291 bp, Acinetobacter baumannii
atgaaagattataactgccctacttgcaagaagatgattcctgttgaccgttcaaaaatcaaagctggtgatgaggtttcattttgcagagtaacccaatcttctaaatctgctcgtttttcttcaaaagaaggaattgtcgattgccgtgaaggtgatgtggttttagttaaatatcgcaaagaaattattcctttaaatattaaggacgtctcacctgtagatgctcctagcccgcttacgtatgcctttgttggtgcatgcgaatgtaaggaggctgaacatgtctaa

SEQ ID NO: 49903 - DNA, 1035 bp, Acinetobacter baumannii
gtggtgaaagcccatagtggacacatggccacagcagactttgtagcgcaggcaattgaacgtggcgtagaaaaatcaaatatgccaaaaggtgtgtttaatatgatctacggtaatggcgtgggtgaacctttagtgaagcatcctttaattcaggctgtgggttttaccggttcattgcgtggtggtcgtgctttatgtgatatggccgcagcccgtccacaaccgattccagtctttgctgaaatgagcagtattaacccgatgttgatgttgcccgaagccttaaaaaaccgtggtgacaaaattgcacaggacttggctgattcagtggttttaggctgtggtcagttctgtaccaatccgggtttaatcttgggtattaaatcagctgaatttagccagcttattagcaacctgactgaaattatgggggctaagcctgcacagactatgctcaatgccggcaccttaaaaagttataccgctggtcttgagcacttaaccgagcatcaaggtattaagcatttggcaggtcaaactcaacaaggcaatcaggctcagccacaactgtttaaagctgatgttgagcttttactggcaggtgaccagcttttacaggaagaaatctttgggccaaccacagtcatcattgaagttgaagataaagcccaactcattcaggcattacaaagcatgaatgggcaactgactgcgactttaattgccgatgaggctgacttaaccgagtttgcagaggtagttcctgtattagaagaaaaagctgggcgattacttataaatggctatccaacaggtgttgaggtgtgtgatgccatggtacacggcgggccatacccagccacttcagatgcacgaggtacttcagttggaaccttggccattgaccgttacttgcgccctgtgtgttaccagaactatccgcaaagtttattgccggaagccttaaaagacagcaacccgttgcagattttaagattggtgaatggtgagatgaccagagaagcgatctaa

SEQ ID NO: 49904 - DNA, 1209 bp, Acinetobacter baumannii; identical to SEQ ID NO: 45825

SEQ ID NO: 49905 - DNA, 327 bp, Acinetobacter baumannii
atgcctgttaataatgacaaaataacgactattgattgcttcccaaacgataatattagtcgagtggtttatagatatggtggacttgttagaaacgaagataacgattcaactaatccttttgttgaagtgttattaattgagattagaaaaagtgatcaatggttatttttagataagtgctcaacattccttgttcccgtacttgatcttgatgctgttcaacatggcagtatttgggatggaaatgttttaaccggttttcaggaaaactcattacaaaacgattttctttcgacttcaccaataataaacctaagaatataa

SEQ ID NO: 49906 - DNA, 825 bp, Acinetobacter baumannii
atgcaccgggaacaggctgactacttgcatttgcgagagttgggcggtttagaattattaaaagctcattatcaccaaacacaattttcaaagcatactcatgaaggatattgtattggtgtcattgaagagggtgctcagtctttttttaggacgggtcaactacatgttgctcctaaaggtgacattattttggttaatgcagatgaaattcacacaggctcatctgctgttgaatcgggctggcgttaccgtgcaatctatcctacacccgaaatgcttgctgaagtaagccaagatttttttgagcaaggccatggggcaccttggtttccgcaagctgtaattcaggacttgggattatctcaacaactctgtttattatttgatttattagaacaaaaagacaattttttgcttaaagaaaccatgtatttatcaacattagcctgcttaatggtacgtcatggtaagtcaagacacaccttttgcgagttgccagaagcttattcaaaagtattaaaagttaaagatttgttagctgatatgcctgaaaagaatttttctttgcaggaattggctgatatggtcgggttaagtgcatggcattttttaagacaatttaaaaaacatgtgggtttaccgcctcatgcatggttagtacaggcgcgtttgcaaaaagcgagacaattattaaaacaaggcgttcaaattgtaatggttgcacagcaatgtggtttttctgatcaaagccattttaatcgtcattttaaaaaggcgatgggtgttacaccaacccaatatgtggcgagtcttaatctttaa

SEQ ID NO: 49907 - DNA, 234 bp, Acinetobacter baumannii
  misc_feature (111)..(120): n is a, c, g, or t
atgaacactgaatttgatcctatagagtttgagtttgatagctccgaccatgaagcccaatacaatgcatggtcaacacttgttgaggccagccgtcttgtagagtgtctnnnnnnnnnngcatggtttaaagacaaagttgaggtatcacaagcagatcaacgacttggaattccacaagatcaagtggttgcacgtctcaaaaaacgtcgtgaggaacgtaatcagctctaa

SEQ ID NO: 49908 - DNA, 396 bp, Acinetobacter baumannii
atgtcatcagtcagcattgctgaataccgcaagttatttcccataaagaaaaataaaaagcgccgttcagcaaagcaagttgccagacaaccaagtgtgggtgaaatggttctggcaacgcatttaagagcatgcaagatcggttttgaacaggaatataagttccatccaaaacgcaaatggagagctgattttctgattactggtacaaaaattttaattgaggtggaaggcgggatctggagcggaggccgtcatacaagaggtaagggctacataggggatatggagaaatacaactccgcagcaatgatgggttttacagttttacggttcagtactgagcaagtgaaagcaggcgtggcgattaaacaaattgagcaattggtgggatga

SEQ ID NO: 49909 - DNA, 516 bp, Acinetobacter baumannii; identical to SEQ ID NO: 49364

SEQ ID NO: 49910 - DNA, 303 bp, Acinetobacter baumannii; identical to SEQ ID NO: 49365

SEQ ID NO: 49911 - DNA, 219 bp, Acinetobacter baumannii; identical to SEQ ID NO: 49366

SEQ ID NO: 49912 - DNA, 435 bp, Acinetobacter baumannii; identical to SEQ ID NO: 49367

SEQ ID NO: 49913 - DNA, 648 bp, Acinetobacter baumannii
atgaaaaacgaagttggctttcatgttcctgttcgtccaatgcctccagaatggctttttgaaatggatacaccaaactttgcaccagctccagaaatatgggaatggattaaacaagtatttctagatccaaaatcgaaattatttaatcctgatcacatgcacttacgttcatttcgatatcccgatattgctgtgatgtgggctagatctggctttaaaaagcagggacgtcaggttatcggtactactgaaaaagtcatgatcaatgctggtggttggaagaaagaacgacaagaagaacaatacatccagtggttcaattatttacctgaatacttaattacttttgatgcttcatattcacgtatagcaagtgatgtgaacttttgtgctttggttgaacacgagctttatcacattgcacataagaaggaccaatacggaacaccagcatataacagagaaactggtatgcctaagttagctattcaaggtcacgatgttgaagaatttacaggtgttgttcgccgatatggagcaactgaggatgttaaacgaatggtcgaagcagctaataaaaggcctcagctcacacgtgctgatgttcattacgcttgtggcacttgtaacttaaaggtggtttaa

SEQ ID NO: 49914 - DNA, 480 bp, Acinetobacter baumannii
atggcaaggcttaataaacgggtgaaactctatatagtacggtcacttgctacctatgagacacctagtgaaacagcaagaggcgtccaagaagaatttggtatcaccgtaaccaaacagcaatgtgaagcatacgacccaacaaagaaaacagggcaggacttaagcgaagaatttaaaactgagttctacagagtgcgcaaggaaatgaacgacaaccttagcgcaatcccaatcgcaaatattgcctaccgcctcaagcgtctacaacggttcatcgatcatgaacaattcaaagaaaacccagtcattgtgccgagccttttagagcaggcagctaaagaggttggtggactttataccaatcgaaaagaaattacaggcaaagacggcggtccagtccaaacagttaattcagaaattccagttccaatggaagattacttaaaagcgcggagggaagtcttagatgagtactga

SEQ ID NO: 49915 - DNA, 1428 bp, Acinetobacter baumannii
atgagtactgatgcggctcgggataaagccatccggatcgaggcgcaagaagatttatatttcttcacaaggtacatgtttaaggagcgccgtggttataaatggatgcagaactggcaccacttagaaatctgtgaagctttgatgaaagtttatcgcggagagataaagcggttaattattaacgttccaccacgatattctaaaactgaaattgctgtaattaattttatggcttggtgttttggaaagaagcctgactgtgagtttattcatatcagttactcggcaatgcttgccgcaaataacgccttccagattcgaacccttgtgcaagaagaggcgtatagaaaagtctttcccgagcttacattgcgtgatgatagtaaggctaaagacttctggagaacttcccaaggtggtgtctgctatgcgactggtacaggcggcacgattaccggttttggtgcaggaaaacttcgtaaaggctttggcggctgcattattattgatgacccgcacaaagcacatgaagcttcatcaaaaactattcgagaaggggtaattgattggtttcagaacacactcgaatcgcgtactaactcgccagatacgccgatcattgtgattatgcagcgacttcatgaagatgatttagctggatggttgctaggtgatagaaaagacggcgttcctgtagctggtggtaacggtgaagtgtgggagcatctatgtctttcagctattcaggaagacggatccgcactgtggccagcaaaacacaatatccaaaagttaaggcaaatggagcaagctgcgccgtatgtttttgccgggcagtaccgacaaatgccatcaccgccagcaggcggtttttttaagcccgacaatattcaaattgttgatgctttgcctgcagatgtagtgaagcaagtaagggcatgggattttggcgctacagagaatgaaggcgactttacagcaggtgtgcgagaagctcttggtgcagatggttttacttacattgtcgatgttacaagaggacagcttggccctgacaatgtaaataaacgcttaaagcaaaccactgagcttgatggaaaaaacgtaactgttcgaattcctcaggaccctggtcaagcagggaaatctcaagctctggcatttacaaaacttctcagtggctaccatgtggttgcaaaaccagtatcgggtgacaagatcactcgggcacagccttttgccgctcaagtaaatgttgggaatgttcgaatgcttaaaggtgattggaacaaagcctttattgaagaacttcggaatttccctaatggaacaaatgacgatcaggtagacggtggatctgacgcttttaatgaattacatgaaggatttgaaaccttcttcgctgatatgggatttgcacgatga

SEQ ID NO: 49916 - DNA, 1251 bp, Acinetobacter baumannii
atggctggtcaaaccattcaaattaaaactgcatctggaaagcagttcagtgcatatctagcgacaccagaaacaggaaaaggacctggtgtggtgctttgtcaggaaatctttggggtgaatgcagcaatgcgggaaaaggcagattttcttgcagaagaaggctataccgttttagtacctgatctattttggcgtgtagcacctaatattgaactcggttatacaccagatgattttcaaaaagcttttgaactttatcagcaatatgacgaaaacctcggtgttgaagatattcaagacagcttagcttttttaaagatacgaccagaatgtgatacctctacaggtctcggcgtggttggctattgtttaggtggaaagctagcttatttggcaggctgtcgactttcggaagtggcatgtgccgtaggttattacggtgtaggcattgaaaaaactttagatgagttagctaacgtaaaaggacgtttggttttacatattgcagaactggaccaatttacaccgccagatgcgagacaagcgattgtcgatgcagttaaccaatattcaaatgtacaagcttatgtttacgaaggtgttgatcatgcctttgcacgaccaaaaagcaaccattaccacaaaccttcagcacgctttgctcacgagcgtacagtaacagcactacatgaaacgattgggccgaaatatgacttagttacactctgggaagagcatattcgtcatgagttcgatacgcgtgacgtccccgcaactatggcaacaatggtcgcagaaccttatgtcaaccatattccaacgttaactggtggggtaggccaaagccagcttgctcgtttttatcaatatcactttgttcatcaaaacccgaaagatatgaagatcacctcgatctctcgtaccgttggctcaacgcaagtggtagacgagttcattatgagctttacacacgacgctgaaattgactggttattaccaggtgtaaaaccaactggtaaatacgtcgaaattccaatgttaggtgtaattcagttcagaggttcaaagctgtgccatgagcatatttactgggaccaagcgtctgtacttgttcaaattggtttattagacccaacaggcttaccagttgcaggtattgagacagcgcgaaaacttcttgatgaagatcttccttccaatacgttgatgccatcttggtcaagtagtgaaggcaagccagtcagttaa

SEQ ID NO: 49917 - DNA, 1611 bp, Acinetobacter baumannii
atgtctgatttaaagttatctcatctgatgacagactcttccttggcacctgcactcaagccagcatttcctaaattatttgcaggaacgcttgctgccgtattttctggtttagccattttaactgccttgtggggcatgattcagttgattggttatttatcttcttattgggtgatcttttcagcggttttttggatagtcggggcggcattggcagcactagcttcatggttagtgcatgatgcagaggctggattttcggcacgattacgtcgtcaaattgctcatcatttaattcggttacctaacacaaccctatcaaaacagggtgaccaaaacttaaaacgactggtttcagatgatatcgcaaccttacaccatatggtggcacatttaccgtcggaaattgcgatttttgctgtaatccctttagtttctattattttattaattgctttggttggcccgatggccctttgggtattattacctggggcaattgcttcactctattatttaattattgttccccatgtatcaaaacgggatggcgctgcacgtatgcaggtcatgttagatattattggttctgctgatgattatgcgcgcggcattcgtgataatcgaatatatgggcaacaatcaggtgctttaacagcctatattcaatcagcacaaaattttactcaaaatatggtgtcttgggtgagtaaagtcgcaacactcgctgctgttgccacagccttactacaagctgttgcaacctttgccatagcctattttgtagcttatcaatacgacagcatgaccttggctgcaacacttttctttagcttggccatcgtgacaccttcgctacgtttagggcatggtcttgattatgtcgctgctgggcgagctgcagctagtcgtttatctgcattcttaaaagagccagtactctcgtcgggcaatctacaaaagattgagcaagatgtaacacttgaaatagtgaatgcaagctttgcaatcgaaaatcaaaaagtattggatcgattaagttatgcatttccaaaaaattcaattactgcaattacaggaccgagtggagttggaaaaacaaccttactgcgggcacttgctgggttcgctgtattgcaagaaggtgtcgttcaattagcaaaaacagatattttgcaattacatgaaaaactaagacatgaaaaggttttgtttattccacaaggtggagatgtattaccgaccacagtaagagaaaacttgtccttatctgccgttaatgcaaatgatgcacaacttgagcaggcattactcaaggcccaactaaaagtagatttaaatgcagatgcaactttactttcaggcggtgaaaaacagcgcctaggaatagcgcgtgcgtttttatcctcagctcctattattttattagatgagccaacgagcgcactcgaccagaccaatgcgacaaaaataatattggaattaagcgacttagctaaaaaacagaataaaaccatcgtcatggtcactcatgatcttgccttagctgctcatgccgacagtagattagtgcttaaaggcccaactgactcagggaaatctttatga

SEQ ID NO: 49918 - DNA, 861 bp, Acinetobacter baumannii
atgcgttatattcgcctgtgtattatctccctgttagccaccctgccgctggcggtacacgccagcccgcagccgcttgagcaaattaaacaaagcgaaagccagctgtcgggccgcgtaggcatgatagaaatggatctggccagcggccgcacgctgaccgcctggcgcgccgatgaacgctttcccatgatgagcacctttaaagtagtgctctgcggcgcagtgctggcgcgggtggatgccggtgacgaacagctggagcgaaagatccactatcgccagcaggatctggtggactactcgccggtcagcgaaaaacaccttgccgacggcatgacggtcggcgaactctgcgccgccgccattaccatgagcgataacagcgccgccaatctgctgctggccaccgtcggcggccccgcaggattgactgcctttttgcgccagatcggcgacaacgtcacccgccttgaccgctgggaaacggaactgaatgaggcgcttcccggcgacgcccgcgacaccactaccccggccagcatggccgcgaccctgcgcaagctgctgaccagccagcgtctgagcgcccgttcgcaacggcagctgctgcagtggatggtggacgatcgggtcgccggaccgttgatccgctccgtgctgccggcgggctggtttatcgccgataagaccggagctagcaagcggggtgcgcgcgggattgtcgccctgcttggcccgaataacaaagcagagcgcattgtggtgatttatctgcgggatacgccggcgagcatggccgagcgaaatcagcaaatcgccgggatcggcgcggcgctgatcgagcactggcaacgctaa

SEQ ID NO: 49919 - DNA, 762 bp, Acinetobacter baumannii
gtgattccaatagaacgacatcagcgtattttagccctggtggagcagcgtggggcggtaagcattaacgagctgacggagatcctcggcgtgtcccatatgaccatccgtcgggacgtcagtaaactggaggagcaggggctgctggtcagcgtctcgggcggcgtacgcgccgtcagccggctggccgcggaacccagtcatctggtgaaaagcacgctgcagagtgaggagaaacaggcgatcggcgcgctggcggcgagtcatatcgctaaaaacagttgcatctatctggatgccgggactaccaccctggcgctggcgcgggcgatcctcgaccggaacgatctccaggtggtcaccaatgattttgagataacccagctgctgatcgatgccagccagtgcggcgtgatccacaccggcggcactctgtgccgggagaaccgctcctgcgtgggcgaatcggcggcgcgtacgttacgccacctggctatcgatacggcctttatctccgccagcggctgggacagtcgcgggatattcacccctgatgagaacaaggttaccgtcaaggagaccgtcagccaggtcagcgcgagaagcatcctgctgtgcgacagttcgaaatacaatcaggtggccacgtttatggcgttacctttgacccggttcaccaccatcattaccgaccggcatctttccgatgccgccgccagtcatatcgcccggcacgcctgcgaggtgctgcgggccggataa

SEQ ID NO: 49920 - DNA, 903 bp, Acinetobacter baumannii; identical to SEQ ID NO: 30075

SEQ ID NO: 49921 - DNA, 633 bp, Acinetobacter baumannii; identical to SEQ ID NO: 30074

SEQ ID NO: 49922 - DNA, 624 bp, Acinetobacter baumannii; identical to SEQ ID NO: 49471

SEQ ID NO: 49923 - DNA, 237 bp, Acinetobacter baumannii
atgttcgttagtgtcacctgcgtactttgtgcttcggcaagcgcagattccacttcagcttttgctgctgcaatatttgcattacgttcagcaattgtggcaaacacttgtttggttgacgcagcaatactcgcttgtacagcaaccgtttttgttaaaacggcttttgtcattaagccaatacctatggcaaatgcactgtctgcaattaaattcaaattatttgctagtaactga

SEQ ID NO: 49924 - DNA, 2412 bp, Acinetobacter baumannii; identical to SEQ ID NO: 46112

SEQ ID NO: 49925 - DNA, 885 bp, Acinetobacter baumannii
atgtctagtttagcattaagttttaatgaagtgaaattcaatcccgtgccacggcaagatggccagatttggctttcttcaggtgaattggcacaagcattaggatataaacaagagaacgcggtcagtaaaatttttaatcgtaattctgatgaatttacggaaaatatgacacaaattattgataatcctcggctacccaatttgggtatgcggatcttctcactacgtggctgccacctaatagcaatatttgctcgtactgctgtagcgaagcaattccgcaagtgggtacttgatgttttagataaagaagttggcacaccagttgccaaaacccacaaatccgaacgtgaacccctaaccaatgctgtaaatcttcttgtagctaaaactaagcatttgaattacagcgatgcttataaattagttcatcagcgtttcaatgttcagcatattgatgaaatcccatacgatgtaatacctgtggctgtggagtatgttcaccacttaattgctatgtacagcaaggctgaaaaacaaggttctttatttgatgaagatcaatttaagctgctcaagaacctaattgatgcaattatttcccaaaactttgcgactagtcgaatctatcgagcagtacatatgcttaacaacgagcaaggacactacttagctgaatatgcttttaaaactaatattgcagttctaaaacttactcgggcaatggatttaagagggccacttaatagaaaaatcattagtgatgatttaaaaaccataagctacacaacaggcaatcaacattatagcgaccgttggtttcatccattgatggaatcgggaatgctagctggtgctttgcgaatttctggtggttggtag

SEQ ID NO: 49926 - DNA, 1524 bp, Acinetobacter baumannii; identical to SEQ ID NO: 32314

SEQ ID NO: 49927 - DNA, 741 bp, Acinetobacter baumannii; identical to SEQ ID NO: 32313

SEQ ID NO: 49928 - DNA, 1416 bp, Acinetobacter baumannii
atggactcatcagctgggaaaccgaaaagcggatttgttgaaaaccgaagtattgactttattcctgaaaatgaaaggcatggcagtatatttgcccaatttacgctttggttcggggccaatttacagattacagctattgttacaggtgcattagccgtcgtattaggtggtgatgtattttggtcaatcattggcctctttattggacaatgctttggtgctgccgtcatggctttacacgcagctcaaggtccaaaactcggcctcccacaaatgatttcgagtcgagtccaatttggggtatatggtgcctgtatccccatcattcttgtttgtcttatgtatattggctttacggccactggtgaggtactcgctggtaaagcaattgctcatctagcacaggtgagtaatacaacaggtattttaatctatgcttgttttattattatatttgcgacaattggctatcgtttaattcattgggtaggcaaagttgcaagtgttattggtttaattgcttttgttattattttaactcaaattttagctctctctaatatttcagaattgcttgctgtacggcattttagctggtcatcatttttattagcagtttctctttctgcttcttggcaaatttcatttggaccttatgtagcagattattctcgttatcttcctacaaaaacatcttcaacacgcgtattttgggcagttgggcttgggtctttaataggctcccaaatttcaatgatgctcggtgtatttattgctcaagtctcgaatggtggttttgttggcaatgaagttcagtacgttgtaggcatgaatccaatcgctcttgtgattacttttttatattttagtattgcattcggaaaggtcactttatctacacttaatgcttatggcagttttatgtgtattgcgaccatttggaacagttttaagccaagtgctcaaatttcaaaattaacgcgacttacaattgttcttgcaatggtaattatctcaacatttattgcagttgtaggtgaacatacttttttaagcgcattcaaatcttttattttgtttcttcttacatttttcattccttggagtgcaattaatttagttgattactattttatttctaaagaagaatgcgatgtaaatgccttatatgacccaaatggtaaatatggccgctggaacacgattggaatcgcttgttattgtattggtatcttacttcagttgccctttattgatagtaaattctataaaggacaaattgccgaaatgttgggtggagtcgatttatcctggttagtgggattgttatccactgcagttttatattatgtacttgccaaaagagctcaaataaaaatttcaaaagctcttcaacttgaacgagtaaaataa

SEQ ID NO: 49929 - DNA, 435 bp, Acinetobacter baumannii; identical to SEQ ID NO: 49446

SEQ ID NO: 49930 - DNA, 1332 bp, Acinetobacter baumannii
atgtggggaatgcctgtgaaaaatatcaaaacattaattcttgcaatgagcactatcagcttaaccgctgtagttatgccagctcatgctgctactgatgcagaagtagatgctttacgcaaagaagttagtgagttaaagcaactggtccagcaattatcaaatcagcaaaaagcggtaactgtagtaaatactccaaaagtgccgtcaactacaattgcagcaagctcacccgttcctcagagcaaaccgggttggatgcaaatgcctgatggccaaacgcaagtcaagctttatgggaatgtccgtgtagatgcaacctatgactttaaagggtcaaatggcagcatttcaaatggtgctaactaccctttaaataaagatgacccaagacaggactcattaaatgtatctgcagcgactacacgcattgggttagatcttactcgacctacacaatacggcgatttaacaggcaaaattgaagccgattttatgggaggcaatggcgataatggcagtggaactttccgtgtacgccatgcctatatgtctttaggcaaatggttagctggtcaaaccacttcacctttcgtcaatacagatacttctccggaaacactagactttaccggtgcagtaggtacaggaaccacacgtactgtacaggttcgctatactcaaccaattaatgctcaacaaaaaatattagttgccttagaaggtggtgatgttgaaaaagtgagtaatgctgctggaggaagccgtttccctgctctaacaactcgttatgatttcaaaaccgcagataataaaggcttattacagcttcatggtcttgcccatgaaaatcgagtagcgcctaaaaatagttcatctgaagaaaaatttggctggggtgtaggcatcggtggcaagtacgatatcacgcctcaggatagtgtcgttgccaactattatcatgttaaaggtgatggccgctatttatcttatagcaactctgcatatgcatacgatacaactactcaagatatcaacttaggtgaatttgatagtgcggtgatcggctaccaacggaaatggagccctattctccgctctactttcgcaataggtggtattcaatataaagatgataacgtctatgcaaatagcaatttaaccaatactagctataacaaagaaatttataacgctttggtcaacttaatctggaatccggttaaaaatattgatttaggtgcagaatatacttacggccagcgtgaaacttttgcaggtgataaaggtgattactcacgcataaatttattagcaaaatataatttctaa

SEQ ID NO: 49931 - DNA, 948 bp, Acinetobacter baumannii
atgaaaagtactttaattaaacatggctttttagcagggacattattaggtttgccgtgggttacacatgcctatgatttaccgaccgtaaatttaggcatgaccagctttctcgatggtggattacctgcagggcccggctggtatgctcaaacctattttcaaaattacgatagcaataaactggtcgatgccaagggacaaaaactcggtttacctaaaacagatttaaattatcaagtactggttgagcagattagttatttatcgaatgtccgagtaaaagataaagccagtctaggcataaattttttaattccttttgtgagcaaaatggacatggatgatggcttgaataatgctgccattaaagcccaaagtggctttggggacattatgatcggaccttttattcagtttgatccagttataggtgcacaaggaccgaagtttgtacatcgttttgagtttcaagtgaatttacctactggcgaatacaatcaacaaaaagatattaacccaagtaataacgccgtttcatttgacccttattgggctgccacatattggtttaatccaaaatggacagcttcaacgcgtatccattatctctataactttaaaaatgatgacccaagctatgcctttgctggagcaaatgatatgcaggcagggcaagcaatccatgcaaattttgcaacagactatgctattaccgaacagttccgtttaggactaaatggctattggttaaaacaagtcactgacactgaagtggatggtgaaaaagtcaaaggtcgacgtgagcaagtctgggcaattggtccgggtgcgatgtatagtttttctaaaaatgatcacttggttgcaaatgcttattttgagcaagatactgaaaaccgaccagaaggtacgcgattacaagttcgttatgtccatcatttttaa

SEQ ID NO: 49932 - DNA, 705 bp, Acinetobacter baumannii
atgaagccaatttcaccttattcacgtgtgacttttaacattattcctgaagtcggggaatacttttcatttccggcactaaccatcaatgggccttgcgacattatggtatttgaaggtattccaaatgggccaatggactgttggcaagatgtgaaaacaccagaacagcacctgcaatgtagtctggacttactcaagaaatttgtgccttgggaatatgaacgctgcgcaaatgttgaattaactgatgctggcggttatttggcagggcgtttcccgccgacggtacgtaagcccgttttaaccttaccctctggcaaaaagatttttggcatggcagatgccttagtggtcaatgatccaattaccgggcaaggctcaaacaatgcggctaagtgtagcaagatctattttgatgccattttagccaatgataatcaaagctttagtgaacaatggatggttcaaacttttgaacgctattggagttatgcagaaaaagtcgtggcttggaccaatagcttgttattaccaccagagcctcatgtcgttgaactcctagcagctgcaagccaaaaccagagcattgcttcaattatggccaataactttgatgacccgcgctcttttgctccgtggtggtttgatgcagatcaagctcaggcattcttagcttcaaaaaccgcagcaaaagtcgcttaa

SEQ ID NO: 49933 - DNA, 456 bp, Acinetobacter baumannii; identical to SEQ ID NO: 39382

SEQ ID NO: 49934 - DNA, 1215 bp, Acinetobacter baumannii; identical to SEQ ID NO: 25147

SEQ ID NO: 49935 - DNA, 1080 bp, Acinetobacter baumannii; identical to SEQ ID NO: 49480

SEQ ID NO: 49936 - DNA, 630 bp, Acinetobacter baumannii
atggccatagctgaagaattacatgttaaaagtttaatccaaccatattctaattctattattcaggctattaaggaggcgtggtcattgtggctgcaaagtcctttttttggaaaatggagttcacgcggacgtgccacattcgtttgggaaactgtaattaatttactcaaagaaaaatttatgggacgtagtgacgtttttattatagataaaggtgttacggtactttttgtaattcaacagcaagttgtttttcgttttaaattggcagataggactggaagaagtaaaaacgttcaaacagattcggctaaaagctttcatgatcctgaactcaattataatttattagctgaagctgatatagctagtaatattccacgtattgaagttatctatactttaaataagtctgctactcaaatcgataatatcaaaatgattgctagagataaaaattccgttgcttggaatgtaagtttaattgatagccaaacatcattcgttgaatttgacgaaagcaaagatacaagtgactttgatactgttaaggataatcaaacaaaacgtcgtttcaaagggaaatccactggcggtggatttaaaaaagcagaaggtgaatcgtga

SEQ ID NO: 49937 - DNA, 1707 bp, Acinetobacter baumannii; identical to SEQ ID NO: 45824

SEQ ID NO: 49938 - DNA, 399 bp, Acinetobacter baumannii; identical to SEQ ID NO: 48650

SEQ ID NO: 49939 - DNA, 1005 bp, Acinetobacter baumannii
atggcaactgtagatctttttgcaattggtaatgcattaatcgaccaagaatttaaagtttctgatgattttcttagtcagcaaggcttacaaaaaggcaccatgcagttgtctgatggtgaaacacaatctgccctttatgaaaaattaaaacaaactcaagattacaaaggtcaagcaagtggcggctctgctgcaaatacaactgtagcatttagtgcattaggtggtagcgcattttatggttgccgcgttggtcatgatgaattaggtggaatttacctgcaagggttaaatgatgcaggcatccagactacaccaaagtccatcagtgaaggggtgaccggtacctgtatggtcctgattagcccagattctgagcgtactatgcatacctatttaggtattaccgctgagctctctcaagaccaaatcgattttgaaccattaaaaacagcaaaatggctttatattgaaggctatctttctacaagtgaaacagcacgtaaagcggtaaaacaagctagagaaattgcaaaagctcacggcgttaaaattgccctatctttatcagatcctgcaatggttcaatatgcccgtgaaggcctagaagagcttatggatgatggtgtggatttattgttctgtaatgaacaagaagccttaatgtataccaataccactactgttgaagatgcacttactcaattacgttttaaaaaccataccgttgtgattacacaaagtgcaaaaggtgctttagttgcaaatccaactcaccattttcacgtcgcaggccgtcatgttgaagctgtagatacaaatggtgcgggtgatgcttttgcaggtgccttcctctacgcattaaaccatcatgaagatttaactgctgctgcacagttagccatcttaatttcaagtgaagtcgtgtctcaatttggtcctcgtttagccattaatgactatgctaaacttctcgaaaattttcagaaggaatgtgcttga

SEQ ID NO: 49940 - DNA, 1665 bp, Acinetobacter baumannii; identical to SEQ ID NO: 48483

SEQ ID NO: 49941 - DNA, 1494 bp, Acinetobacter baumannii; identical to SEQ ID NO: 13713

SEQ ID NO: 49942 - DNA, 186 bp, Acinetobacter baumannii
atgtcattggtgattgatcctaatataggaattcccaaggctaaagtgcaaaaaaatattctaatgaatatagatgttaatacagatgcttctcatagatctgaattagatttcttaaaattcattccattattacaagattcagtaaaaaaattaataagaaatggaggtacttatgttagttga

SEQ ID NO: 49943 - DNA, 399 bp, Acinetobacter baumannii; identical to SEQ ID NO: 46160

SEQ ID NO: 49944 - DNA, 450 bp, Acinetobacter baumannii
ttggctgacctgattactcaagctaaagatcacattaacaccttaacgcctgcacaacttgcagcagctaaagcccaagaagagctagaaaactggaaacaaagctgtgaagaagctgagcatgcaggtgaccttaatcaattaactgagtcgcttgataaagaacacatgtattaccagaacatgcgccaagcaatgttaatgagagctaaagcattgaattgcacgtttgataagcaacgtggcacttggattagtccacctgaatttaacggtatctcagatcaacaaagagatgaacttcaaaactttattgctgaacgtggcctcgatgtaaaaacagtttgtgagcacttaggtatcgatgcccttatccaaattgaagcggcaaaacttaaggcagttaaacaagaaattgaaaccttagcgaaaacggggatgacagcatga

SEQ ID NO: 49945 - DNA, 435 bp, Acinetobacter baumannii; identical to SEQ ID NO: 26756

SEQ ID NO: 49946 - DNA, 450 bp, Acinetobacter baumannii
ttggctgacctgattactcaagctaaagatcacattaacaccttaacgcctgcacaacttgcagcagctaaagcccaagaagagctagaaaactggaaacaaagctgtgaagaagctgagcatgcaggtgaccttaatcaattaactgagtcgcttgataaagaacacatgtattaccagaacatgcgccaagcaatgttaatgagagctaaagcattgaattgcacgtttgataagcaacgtggcacttggattagtccaccagaatttaacggtatctcagatcaacaaagagatgaacttcaaaactttattgctgaacgtggcctcgatgtaaaaacagtttgtgagcacttaggtatcgatgcccttatccaaattgaagcggcaaaacttaaggcagttaaacaagaaattgaaaccttagcgaaaacggggatgacagcatga

SEQ ID NO: 49947 - DNA, 522 bp, Acinetobacter baumannii; identical to SEQ ID NO: 46238

SEQ ID NO: 49948 - DNA, 927 bp, Acinetobacter baumannii; identical to SEQ ID NO: 46217

SEQ ID NO: 49949 - DNA, 642 bp, Acinetobacter baumannii
ttgaaagataagaagcattatgaagcttgggttctattagaaaggatagaaatagacatttctttcctagagaaaaatgtagacgaagattttataaaaaaatataagttggatttctacaaagagattgttgagagttggcaatcgttatttccttacaaaattttctttagtattggtgcaacaataaagcagtatacatgttcaatatgtgggcatgttattcggccaaggaataaatgtattcataaaaaaggtaaattatataatggtaaattgtgtgtgcatgtagcagatgggggctgtgagctgaaagaaatttctatggtaaaaaatcctgtccaaaaatcatgtataccaatgctagattatgattatagcgcagttgattttatatcagaaagattacaatctccttttgattattggaagccatttaaaaccaaaaaattaattgatcgttctgaatttaatactgttgacgaaaatgatatgtgtccatgtaaagaatctaaaaaaatattcaaagaatgctgttttaataaagaaaaaattgaatttccacatattcatatacattttagtaaatcacccccttctaatttggctacaagcttaattaaaataggtaggaaattgtaa

SEQ ID NO: 49950 - DNA, 846 bp, Acinetobacter baumannii; identical to SEQ ID NO: 46113

SEQ ID NO: 49951 - DNA, 630 bp, Acinetobacter baumannii
gtggtaaatttgactattaaaggtgctgttgttggacgtggtggagatggcgggttgccacatttggcatttggtgcatggtctaccgatccggattataactttactaaaacccgccgtgacggttttcagggagcacccggtttattaaaccggcacagtaaactaaacctgattattgatggtggaactctggctcgaggcggctcaggtggtggagcaacaccaagcggtatttatactggattatcgtatggagttcagggtattcccggtggagctggagcaccttttggtcgggttatgaccggacaacctattactaacgattcacaagactggcgttggtacttaaatggtgactttatggttgtcaaagtaaccgatgctgaagctactgtgcctggtaaaggttatcgaacccaaaatgaccgttatggatcgccattgtccggtgatggtggaagctggggtcaactaggtaccaagtccaccaatgatggaacatggaactggcaataccatggcacaactgaaggccagccggggccgggtggacctgcaattgttggggtggcaccacttacaactcaattgatcaatggagggaaaattctacaaacactttaa

SEQ ID NO: 49952 - DNA, 378 bp, Acinetobacter baumannii
atgacccagttccagtcttctaggctgagttcgtcaaatttaccgcctaaacctactccagcattattaatgacaagagtcacaggatgcccaaataagatttcagcagtttcagctaggtggttaacttgttcagcgtcacccacatcacagcgcatagcaaaagcttttgcaccctgttgttcaagcaacgttacagtttcttctgcagcttctaaattaatatctgcgcagactacgctaccaccacgtttcgccagttcaattgcaaaacttcgtccaatcccactgcctgccccggttacgaccgcatatgcgtttcggctcggctggtctttcttaccaaataaaatcatagtaaatcctaaaaaattttag

SEQ ID NO: 49953 - DNA, 255 bp, Acinetobacter baumannii; identical to SEQ ID NO: 48668

SEQ ID NO: 49954 - DNA, 441 bp, Acinetobacter baumannii
atgaacgtaaaagctacccctttcaactcatttgcatttgtcagcatggctgctcttgcaatttctggtggttctttagttgcttgccaattgcagccagctttccaaacaaaagaagtacctactctttttacacctaaaattcaaccaagtacttacggtgtgttaaccgcgaaaatcacaggtaaagattctggcgttgccgtcatcaaattagatagcttccgtttaaacgttagctttgattttgaagcctatccagacagctacggcgttccaggttctgaattcaccgctgttgatattacccaactcactgtaaatgaaatcactgacattaatggtaagtcatataacgatttcaccgaatttgaagacatccgaaacatcaatggtcttctaaaaggcttcatcgaacgtaacaagttggtggaggcttaa

SEQ ID NO: 49955 - DNA, 624 bp, Acinetobacter baumannii
gtggtagcaggcacagatggcagctggtcagtaccaaacccaggtttaaatgatggtgacgaagttgaggcaattgctacagatccagcaggcaacccatctttaccaggtacagctattgttgatgcagttggtccaaataccgatggcgttaacttcacggttgattcagtaacagctgacaatgtgattaatgcatcagaagcgtcaggcaacgttactgttacaggcgtattgaaaaatgttccggcagatgcagcaaatacagtggtcactgttgtgatcaatggccagacgtatactgcaactgtagatagcacagcgggcacatggacagtaagcgtaccaggtagtgacttgactgcggatgcagataagacaattgatgccaaagtaacgtttacagatgcagcaggtaatagcagcagtgttaacgatacacaaacttatacacttgataccactgcacctgatgcaccagtaattaacccggttaacgggacagatccaattacaggtactgcagagcctggttcaaccgtaacagtaacctatcctaatggtgacacagcaacagttgtagcaggacctgatggcagctggtcagtatgcaccggtgcttga

SEQ ID NO: 49956 - DNA, 438 bp, Acinetobacter baumannii
gtgattaatgcatcagaagcgtcaggcaacgttactgttacaggcgtattgaaaaatgttccggcagatgcagcaaatacagtggtcactgttgtgatcaatggccagacgtatactgcaactgtagatagcacagcgggcacatggacagtaagcgtaccaggtagtgacttgactgcggatgcagataagacaattgatgccaaagtaacgtttacagatgcagcaggtaatagcagcagtgttaacgatacacaaacttatacacttgataccactgcacctgatgcaccagtaattaacccggttaacgggacagatccaattacaggtactgcagagcctggttcaaccgtaacagtaacctatcctaatggtgacacagcaacagttgtagcaggacctgatggcagctggtcagtatgcaccggtgcttga

SEQ ID NO: 49957 - DNA, 216 bp, Acinetobacter baumannii
atggctaaaagaaaatataagagtgataagtttcaagtacgtcgtattaaccgtcaatggtgggtacttgaaaaagatttagaaactaactgttacagcaagcatgaacaggtagctactaagacattagctaacaattatgctgacgattatatagagcagtattatatgaacctctacattcaacaacagttgaaaaagccggaaaccgtataa

SEQ ID NO: 49958 - DNA, 327 bp, Acinetobacter baumannii
gtggatggcgttgactatccggcagtgaacaatggtgacggcacctggacgcttgcagacaatacacttccaacactcgcagacggtccacacaccattaccgtgactgcaacagatgcagcaggtaacgtaggtaacgatactgcagtggtgaccattgatacggttgcaccaaatgcaccggtgcttgatccgatcaatgcaacagacccagtgagcggtcaggcagagcctggttcaaccgtgacagtaacctatcctaatggtgacacagcaacagttgtagcaggacctgatggcagctggtcagaatgcaccggtgcttga

SEQ ID NO: 49959 - DNA, 390 bp, Acinetobacter baumannii; identical to SEQ ID NO: 45813

SEQ ID NO: 49960 - DNA, 231 bp, Acinetobacter baumannii
atggctgttttaaaaccaacaccttcaacaccaccaatgagtgcggaagcagggatgcgacaattttcgaaaataacgtcacaggtatgtgcgcctttttgccccatttttttatcgcgtttgccaagagaaatgcccggagtttggctatcgacgataaaagcagaaatgccgccagcacctttaatgtcaaagtttgtgcgtgccatgactgtaaatacaccagcatga

SEQ ID NO: 49961 - DNA, 291 bp, Acinetobacter baumannii
atgaaaaataatatatttaaaattttggttttggcggtattttctacttccccactattttgttatgcaaataacacaataatgatcaaaggaaatattgttgaagacacatgctcaacaaaaagtaatgagatagaatgtaacgcagtcaataatttgaatattaaacttgatagtgaatatttaaataaagatagtctctataaattagctcaacatacagagaagatggacactagcattgaaagtctaggttctaatcgaaagattatacttatcaattatcattaa

SEQ ID NO: 49962 - DNA, 180 bp, Acinetobacter baumannii
gtggtgaccattgatacggttgcaccaaatgcaccggtgcttgatccgatcaatgcaacagacccagtgagcggtcaggcagagcctggttcaaccgtaacagtaacctatcctaatggtgacacagcaacagttgtagcaggacctgatggcagctggtcagtatgcaccggtgcttga

SEQ ID NO: 49963 - DNA, 180 bp, Acinetobacter baumannii
gtggtgaccattgatacggttgcaccaaatgcaccggtgcttgatccgatcaatgcaacagacccagtgagcggtcaggcagagcctggttcaaccgtgacagtaacctatcctaatggtgacacagcaacagttgtagcaggacctgatggcagctggtcagtatgcaccggtgcttga

SEQ ID NO: 49964 - DNA, 240 bp, Acinetobacter baumannii
ttgattccttcttataatttaagagaagaatacattttatggttagctgggtttattcaaaaaattactgaagggggccctaagccaccccctcctatcaaagaatatattcccgagtttataaatttggaatcggaattagattttttaaccttaaatttagaaaaaaatcaaaataatggggaagagattgtaaattattttaattccaaacattataaagcaacttttaaaaaatag

SEQ ID NO: 49965 - DNA, 180 bp, Acinetobacter baumannii; identical to SEQ ID NO: 49963

SEQ ID NO: 49966 - DNA, 135 bp, Acinetobacter baumannii
atggttatgcgtaccaagcacgctgttaccgaagcatctccgatggttaaagcgaaagacgagcgccgcgagcgtcgcgatgatttcgcaaacgaaaccgctgatgatgctgaagctggggattctgaagagtaa

SEQ ID NO: 49967 - DNA, 3243 bp, Acinetobacter baumannii
atgacatataaagcaagttttacagggtgggaaaatcttaaaattgaagatttattggtggcttatagaaaggcaaaagctgattgtttttttgagaatactttccccacagcagtaaaatttgccgaatatgagcaaaatttattgactaatcttaaaagttttttaaaaaaattacggaatgaaaatgggtttattgagaatagtaagttattaggaaattatcgagtagttcctaaaaagttatcgatagatagaaaaaatatagaaggctatgcaggacatatacatttttctgatcccaaaaaaaatttaaataaactttttagtgaaaatgtagtagaaccttcatttcgccttattggagacttcccagtagagactcatcttatatctgccttatggataaatatgattggagagcaatttgatgaaagactaggtgaatcttgttacgcggcaagactaaaacgtattaaaaataatgaagattttactttagatactagaaagccttttcatcttagcgcaatagggtctttttcaccatattttcaaccatatcaaaagtggcgaaatgatgggttaaacgcaattcgtgatgagttggaaaaagatagaagtgttatagctgtctctttagatttaaagagttattatcactatattgatcctaaaattattgtttcaaataaattacatgaatcttttaatattatacttaatcatcatgaacttttatttactaagcaattagctatttttttagaaaaatgggggaatggtgcagttgaatactctaaaaatatttcatttgaatgtgaaataccgggtggtttggcgataggattaactgccagtagaattatttctaatatgattttacaccgttgggataaattaattaaagaaaaagttactcctattcattatggtcgttatgtggatgatatgtttttagtattaaaagatactggaaatatagaaaatagtgatcaattaatggagtttttacgagagagaattggtggtgatgttctgacccaagataataatgattctaaaaaatggtatattaatttacctaattccttagaagataaaacttcaattcaattacaagctgacaaacaaaagctatttcttttagatggtcaattagggctagatttattagatagtattgaaaaagatatttatgagctttcaagcgaacatcgtttaatgccatctcctgatcagttagatcagtctacagctgctaaagtgctttctgctgctggaagtgtgggcgaaaatgcagatacattacgtcgtgctgatggattaactataagaagattaagttgggctttacaattaagacatgttgagacacttgcaagagatttacctcccaaagtgtggcaaaaacaaagaaatgagttttatcaatttgctcataatcatattctaagaccggatagtatttttgagcattttacttatttaccgcgattacttggttttgctatcagtttaaatgaatggcatcaagcagaattaattgtattaagatcttataactcattagatattcttaaagctgaaattttcaatcaagatagatcaggtccgtatggcgaaattaatggagctaaatgtattcttcatgaagaaatttggcaagaaatcaaatattcactgacagtcctttttatagatgctgccactaaatattacgatccaaatgctctttttggagaggaagaaccaaagcaaaaaagtttggaagagattttcttccgtggtttatttggtagtatcgattcaattagtgactttttaaatactgatttaagtattactaattttaaagaaaaagctttattagtggtaaaatctgacttaggtaaaaatccttataagcaaattttaaaattagatatatgtgataagttaattgatataaatcatagagtggcaaatgaagaactttttgatgaatttcaaaaatctgatttagttttttctcagtttttaagagattttctgaaatcatcatttaaggaaaggtttaagaaaataaaggatgaggataaatataattttgagctttttttaccatatttatttcctactagaccttattcacctgcagagatttctgaactggcaccagaatgcgtgggcctgcccaaaaataataaaaaattttgtaaaataaaaccaactaagatatgggcaagatattgccaagcagtgcgtggaatatggataaaacctacattattggcaactgaaaatgataatagtgataaagtaaattgttctagatctttgcggataggtactgatagtaaaaatcaggtaatagttgcgttaacaaatttaaaaacatctgagcaagattgggcttattcagcggttaataaacctaacttaagtttagagcgatatcaaagaattgctgatttagtaaatgatattttacgattaaaacctaggccagattatgtatttttccccgagttatctattcctttagagtgggttgatagtattgcatctaggctttgtaatgctggaataagtattattgctggaacagaatatagacatactgcaaatgataagctaattagcgaagctttattaatattatctgataaccggctagggtattatacattttctaaaatttggcaacctaaacttgaacctgcagtgggcgaagataaagagttgataagtgtatatggtaaatcttgggattttactagaacaaaatacaagaataaaaaaggtcaattaaaagttttaaaaaaaccaatatatatacataataattttcattttggagttatggtttgttctgaattgcaaaatagcaaatcaagaataagtttccaaggaaaagttgatgctctttcagtacttagttggaaccaagatttagaaacattctctacattaatagaatctgcagctcttgatgttcatgcttacacaattcttgttaacaatagaaaatatggagatagtcgaattcgagtacctgctaaacaatctttcaatcgtgatttagcacgagtcagaggtggagaaaatgattttgttgtagcagctattcttgatattaatgaattaagagcttttcagagtcgagcaaaaagatggactcaagatggtgataaatttaagcctctaccagaaggttttgtgatatctaaaactcgtaaattatcaccaccaaataagtag

SEQ ID NO: 49968 - DNA, 345 bp, Acinetobacter baumannii
atgaatactgataatttagatttaaaaaaagaatttttaaaactttttttagatttagtcttagcaaattttacagcaattgttgtctttgtattagtaggaaaacatttgtttaaatcctatagaattcttccagattttataccattgtttttgagttatagcttcactgtcggtatatcattaattggatttttatttttctactatatactttatgagctttatttaaaaagaatgatagtaattctaaatattggggaattttcaaataaattttatattttttcagctttgagttttgtaggttttattgtttttactttaatttctactgttgcttaa

SEQ ID NO: 49969 - DNA, 831 bp, Acinetobacter baumannii
atggcagaacctataacttatgtaacaagttttctagtaaaaataataactattatattaggtccttttttaaggaagcctattgatataattagtaaatttttatatttggaggcctataaaatttcaacattttacagtttgtattttgatgtgaaaagaatgtttcctcatagtttagggggagttatagattataatataaattggagtgaaatatatcttaagaaaaaacaggctaattgtactcttcgtataagagcaaagggtaatctatcttatagtaaaataactttttgtgttactgcttctttagagagtttaaaatatcagtctgttgtagaggtttatgatgtatctactacaccttgtattatagctttaccaagtattccacttagaagtatagaaattaaaggtaatagaatatatgagccttataatagtatctcggttgaaataaaagaaatatttgatagtaataataatattatagatattagagggaagtggaaagatattctacatccaatagataatctagataagattattaaggaaaaagaaagtgatgtatatagatgggggcaatggtggaatttagatttcttagaatctgaaaaagaagaaatctcaagatttttccaagcttatagtgtgaatgcaaaattttgggggtcaaaaacaaggtatttttggcaacctgtcgcttggttcatgagtgtaccatttattctaaatatttatttctggattaggaatataatctgggctaatcaattaaataaagctttagagaagcatttaaatgattatgattatgagagttaa

SEQ ID NO: 49970 - DNA, 1272 bp, Acinetobacter baumannii
atgaagcggatcgatagtgtaaatgcgcgacctgacatgtttggtacaggaaaaaaaggtttccattcaaatgaagatgttcccggacaagatgcaacttatctcacacctgaatggtgcaatatggttcaggaagagattgcaaacgtacttgagaagcatggagttgttttaaacccaaataatcgacagcagctctatgaattgttagcaacttatccagacctagaaaacctcgcagcagcaattgaagctcgctttgctgctgaagctgcctttaataaaaacgcacgtaatgagctacaagctcagattactgcattactcaattatgtttcatatccaagaatccttgcttcaggtgtgttttattacaatggcggcgaaggtggcggtacggtaacgatgattggtggtacagatggctggattgctgataatgacaagattaaagcacctgacatctataatctaacagatcgtaatattggtatatttttaagccctgaagcagccaatgaagcaccttcatttgaccgtgatataaatagctttaaaccaaagatttataatcgttcaggtacaaaccgtattggttattctggtcaggtaagtttccaagtactccaacataagaatcctaatagtacaactgttgatggcgattatccggctggtttatatagtttcgttctacaaccgggtgaaacgaagctctttacactgatcggtgctggaggtggcggtggtgcatcacgtcgatctaataactcttcatatcctttaagcaatgggcaagctggtgctgatctattgcttaaagttaacggggaaaacattgctgttgttcacggtggcggtggtggcacccaaggcgtatggagtaacggttcagcttatgataatgggcaagctggtgctgttggtgctgtagacattattggtgcatttgactcaacgacaatcactcaaggtaaagtaggcaatgcaaccaaggaagaccacacaggtggtgcatctgtaagtcctattgctctatttggtaaaggtggtgatggtgctatgggaattggagatgaaggttggtcatttggtggtggcggtgcatcaggctctgttcttgtggctcaatacactaataatagtacaacaaatcaaacaatcactctggttgttggtcgtggtggtgctggtggacagaaaggtggctatgattcagatatcgtaggtagtaacggaacagatggatttgcacgagttgctagtgtttaa

SEQ ID NO: 49971 - DNA, 537 bp, Acinetobacter baumannii
atgacctttgagcaaacagtagagctttatgcttcagtacttcgtcaattactgccagcaggcggctatgacacttcacccaaaagtgttgtcgcaaaagatgtatacgctcatgcaagagtacttgcacaagctgatgttgatgcaaaacgtattttgaccacgttagagaagattccagaagaattattaagtgaatatgaagcggctctaggtctaccgctgaaatgtactgtgaataaaaccaaaacaattgaagaacgtcttcagataatccaatggattcaacagacaaagaatgttttaaaccgtacttatcttgagggcttacttggcttatttagcattaagttagttgatttaatacgctacagaccaatgcaatgtatagcttcatgcaactcaccaatcaacacagaaaacctgcggttcaaagtcaaattgatcttaaaagccccggtgcaagctgatatggcatgcatcattcaaaactacttaccagcttatttacgttatgacattaaggagcaatcatga

SEQ ID NO: 49972 - DNA, 1047 bp, Acinetobacter baumannii
atggcatatccgatcaagacatttgaccaattacgctctgacattattcaggaaatccaaaatttaactggattaactctagatgatgaagatgatgcagccattcgcgcagatggtgaagctgctgtagttgagggcctttatcatcatcaaagttatattcaaaaacagctatttgttgctacagctgatgagcctttcctttatatacatgcaaaacgcttggaatgtccgcgtaatggtggctctaaggcttcaggacgagtcaaagcaacatcaaacactgcggtcactattccagctggaacaaaagtcacggatggtaaaggtcattactggttaactttgtataaagagacatttaccgcaaataagcctaaagaaatccaagttattgctgagtttgaaggtgtgagctggaatttcgatggtgagcagctgctttgggttagtccattaccgggtgttgcagcacaagtggatgttattgaaatatctgcgggtgttgatgctgaagacgttgaagcttggcgtcagcgtatgatggataaagaggctttaggtcttattcgtgatcgtgaagctgatcttcgacgtatcgtaaaagatgtaccgggtgtggctgatgtttttatttttccgaaacgtcgtggccttggttctttagatgttgcaatcacagcagctggtaatccccctaactccccaagctctgcaattttagctttagtacaaacggctttagaagaatattcaggtttttggggtgacgtaagagcttatgcaccaacaaaagagtatttgaatatcactgcactggtaacaggtagtgtgagtcaaactgatgttgaaaaagtcattcgtgactatgttggattgttaaagccgggagaaacttttgttgcttctactcttgttagtcaaattagagcattgccgggtgtgacagatgttcagcttacaccagcaacaaatcaggcacctactttaaatgtgtttgtgactggttggctccggatcggtactttaacggtgactatgttatga

SEQ ID NO: 49973 - DNA, 2097 bp, Acinetobacter baumannii
atgagcggaagcaattctactgtttctcttacattgcagattcggggtcaacaagctgcacaagagatgaagcgcatctctgatcagcaagttcaggccacgactaaaatcaatacgcaatggacccagattggttctgctcaagccaaatttgttaatactgcaagagctggtacacgggagactttgaatactgcccgtgctggggatcaattattacgtaccaataagttgcttgaaggtgttctacgtcagcaaggtgccttattaaaacaacaggtgggttcagctcaacagctggcgaactggacaaaacaggttgaacaatcaagcaaacgtactcatcaatcaacccaacagactatgtcactttggcagaaaggtactgctgttacaggcggtgctattgctggtggcatgtacatatctaatgctttacaaaaacctcgtgattatgatcagcagttgacctacattgctgcaactgccactggtggacaagggatgacacctgaagcacgacttgctgcgcgtggtcagttaaatgaatacatcaaagcggctgtccgaggtggcggtggaacgcgtgaagacgccgctgaagcagcaaatgcattaattgcttcaggtaaatacgaacttaacaatgttgctccagcattaaatatggctgtaaaaacggcatttgcaaccaatgcggctgcaactgatgctgctgctctaacagttcggatgcaggactttggtgttaatgatttgcaacgtggtcatgatatcgctatgcgtggcggtcaattgggaagctttgaatataaggacatgtcgaaatggctggcacaacaaatggcagcagcacgtgttgttggttacagcggagaaaaaggtttagttgaactagttgcaatgaaccaagttgccatgaaaacagctggtactgctgatgaagctggtaataatgtggtcaacttacttgcaaagttatcaagccgtgaatttagcaaatctattagtgatgcggttgttgcacaggctggagaccccacaaaatctgatggtaagaaaaaaccaaaacaagtatttgactggggtacttattcagttcaacaacgtgagcaaggcgtctatggtgttgaagcatttgtaaaattattagagcgacaacttgctggtaatgcccaatatacaaagcttcagaaacaggctgcgtcttccgattcagtagcacgaaaagctgctttggaagatatgagtaacatcgctatgggttcagaaattggtgaaatcattgcagatcggcaagcacttatggctgctttaagtgttgtctataacaaagacacgttaaatgatctaagaaaacaactccctaatgcggcaggtacggtagcagcagattcagcaatgattcggggtactccttgggcaaaagatatcgcatttgagcaagaaaaattgtttgctcaatccaaagcttatgatgctatttcggagtctttaggtggtttaaaagacacaattactaaaagtgcagcagaaaatgaaaacttagctggtgtaacttatggtgcagctgtggcagttggaggtcttgcattagtagctggtgctgcggctttcacgcttaaaactatgggaggtattaagactccagatttgccctcaaccactggtggtttagcatctaaggcttcaaatgcagcgaaaacagctggtcttgttggagcagcttatacggggtatcaaatttttaaacctattgatgatgctggatacagtatggtcagtgatgtcttagcaaaagttggtattggttcaggaggtgaacgtcctgactttgttcaacaggccattgagcaaagcaaagcccagcaagcttcagctgaagaaaaaagtagccaattaattgctgaacagcagaagcaaaatcaattgagtcaagagatgatcaataagatcaatacattaattaatgtcaccgggcaaaacaaaactattaattttagtggtggcctattgggagcgatttctgaaaatgcagctgttgaagaaaaacgccacggtgcttcaaatgttcctttttacctacaacggcactaa

SEQ ID NO: 49974 - DNA, 234 bp, Acinetobacter baumannii
atggccattggtatcccatatgcagatgcaattaatttgcctctgcatattgcaatggctttccttggtgctacgcggcctttacctcgtcaagtggaatctgtaccttcagaaacaccacaagcgccaccaaaatcatccgtcacaacccatactcaaacaaatgggaacagctctacagtgacaaaaacatatgtgaccagtgttcgcaaacattcaaaatcaaagggctaa

SEQ ID NO: 49975 - DNA, 312 bp, Acinetobacter baumannii
atggaaagaatttttgtagatggtaatttgcctgtagccattgatcttaaacaggcaaagaaaacaatcaaatgcacgaaatacgtgatgtcttcaataaccgcccttgaatacgttgaagctcaagccaagattactggtctgcaatacattgctatttcagatattgtcgcgatgcttaagttagttgatgaggctggtaatcaatatgaacctacatatgaagatattgcccaaacttcatcgttcaatctcatccatttcaatgagaaaaaagcagaactggaagcaaaggtcaaagccgcgaattaa

SEQ ID NO: 49976 - DNA, 378 bp, Acinetobacter baumannii
atgtctgaagatgcagttggtgcaatcgtcatgagctttaacgggctggattatgacgttgctcgttttacatcatcaattactacgggcaatcgcccagtcccaacaatgaaccgaaaacaacgggtgaagtataaatcaaaaggaatcacaacctatcagttgacggcctcagttgtaattccagatggtaaagatacagtcaattggttggctgttgaagatggacgtctttctgttgaatcaccggatggcaaataccgcgaaacgtttattgactgtaatgtacaaacagtgagtaagtcatacaacgtggatggtgaaaccatgcgtgacattgaaatgttctgcttagattatcttgatgagacaatgtaa

SEQ ID NO: 49977 - DNA, 810 bp, Acinetobacter baumannii
atgacactccaagcaacactcgacacaatcaaaccgcttggtcacaccatcattgctgtgtcggctccaccagcagctggaactgacacaactgcatggatcgaccacttaacatcagttagtgactcaattgaacaacgtccagcaattttagttgtacctttttcagatattgaagcagctgaagcttttgcggcacaagctccagtaaaaaccaattaccgtgtgatttgcccttgctatcatggtgcaactggtcaagaacctgaaattgccgcagcaatcgcagcagctttagccgattctaacgacccggcattgccattcaatggtgtcaacttaggtggtcttacacctgttgctgatgagttcaagcttacgtttgaacgtatggaagcagcaatgaataaaggcgtttgtatgatcgaaacgggtgcagacggtaaaccggaaattgttcgtgccatttcgacttatcgtatgaacccggattctggtgagtctgacgatcttatgcttgatattaactgtgtattgattgttgactacacacgtaaagtcgtgcgtcaggaccttaaaaaagaacgtcgtcgtaaaaacacggctgctcaacgccgcaatattaaatctattatttcagcccgtttgattcagcttgaagatgctgagattcttgaaaatgtgcgtgaaagtctagatgagattgttgtgactccggatgcaacagatcagtaccgtgttaatgtgaaagccccaactcatttagtacgtggtatgcatgtcattgggactacgcttgatatctattga

SEQ ID NO: 49978 - DNA, 2640 bp, Acinetobacter baumannii
atggctcaacaaatcgtgattgaagtgcccggcactaagatcagtgaacttgaaaaggcttctagtatttcacgtaatgatgtaacgcctgtagtacaggatgatgaaactaaacaagctgaaattgggcagatagctgatttagtcatatctgagttaggttctgctgcattaaaaaatgaatctgattttgcaacaccttctgctgttactgaagcagaggcagcaagtcaagctagagatgatgctcaaaatgagcgaattgatagtgtggagcatggcttagtttcaatcggtagcggtgctgatgcttcattcagcacttatgcggaaatgattgcttatgttccaccaaaggcaaatgtttcagttcgaaataatgatcctgatcctgcattgcggggtgtatacacgtggacaggtacacaatatgttgatggttatgatccgcttgatgcatcaattgaatatataaatgctattagtgctctaactaagaatgcaacagtcttttatccattcagtacgaaaaaacgaaataatatttctgtaagccccgtatctgctatacatgagcaatatttaaaatcttatattttagatattaaagtgaatggcgcagacccaaacaaatactatcgtattcagcaaattagcacccctacgaatgcttctgtgccaaatcgctgggtgtttgaggttctgaataaggttaattttgatacggctgagacacgtgacaagttaattactgctgttttcccaattaccaaaaatactggaattcaaacttttgatctgattgatggtgatactgccattagtgttacagtggatactaataaacttccagctagtgatttttactcagtatcttcaactgataactcttatacatatattattgatccgagccgttatattgcgtcagcgtttaaaaaatctgatgctctcgcttatgttgattcgtttagtgcgctcacaaaaaactcaactgtattgtttccatttagtacgattaagcgaaataaagtcaatgaaagtacagttggttcacacgataatattttaaggaactatattttaaatatcagtgtaatgaatgctgatatgactaagtactatcgtttgcaacaatttttcagtccagatcaggctactactccaaatcgctggatatttgaagttttaaatcgcgctaatttcgatacgtctgaaacacgagtcaaatctattacagctgatcttccggtcatcaaaaacgttggaattaagactttctatattgttgatagtgatttaactattgctgttactgttgatactaacaagacacctgcaaatagtttttactcatatgcatcaacggataactcttacacctatatcattgatccaagtttgtatttctattctgctgtaacgcgtaatgatcttaatacaattgatgagagaattaataagcttacaaaaccaaatcagttagttaacttgctaaatgatttaagaaatcccatacaaactgtaaacatctgttttattggggattcaattgattttggtgttggcgcaactggtattggcacaggaacacacggtacagcaattgcacgatgccatgtaaatttaattcgtgattacttgggaacggcattctgcacaagtgctcgttttggtgatgaaacaattgttaacgatggtgaggcttactatacaagtaatggtgtaagtgttttaagctcacaattgtcttattttacgtttaaaaatagtgctacaggtaaagtattttcagtaaatgaaatgcaagctttagttggctcaaacccaagttccccatctggcacattcattgatttgaaaagcccatcaatttctactgctccaacggacatggagtttgactttaatggaagtgcattcactattaattatgcaaaacttggtaatggtagcgaaagtgagtcaatgattgatgtttttgtgaatgatgaacttcactcaagtttcaatgtgttctctgcttctccagactttggattttctacaactatttctgaccttgccgaaggtaaaaagaaaattcgaattgcgaatagattaaataattcatcaatttatgctcgactagtatctatcagtgcaactcgaaaaatttctgtcataaacgagggtgtgtcaggttggagtacaaataactggcttgctaacgattatatctctagcaaaatcacatctaagctgaactatgtttttacaaagctagggacaaatgatcgacatacaacccagaaaatcgggacgttcaaaaatcaatacaatcagattcttgatcgaatctacgctaaaaatagcaatgctcaaatcatcatagtatctccgccaccagtcacacaagatgaagatcctgttacgagcaattataaatttaggattgcagacgttgattacgcattagcgggtattgctaaatcacgaaatatctcgtttatcagtttatttgaagaactatcaaaacttaaggcaagaggcatagtttttcttggcgacaacattcatccgaatgattacgggtatggggttatcgctgaatacattatttctctgattttgagtagtctaagaggattagaatcatga

SEQ ID NO: 49979 - DNA, 612 bp, Acinetobacter baumannii
gtgattaatttaagtgttgtcgaacaaggccttaaacaagtcatggctaatcaggtcactgataaaaaatggacttgggttcgtcaaatcaaaacgtatggcggggaatttgatgatggcttgactgctattgttaaaggattcccagcgatatgggtggtttttgagggttctggcacccctaaaaagatcagttataacaagactcaatatccagtgacttttgtagtacttgttggtgcacgctctgttcgtaatgaggaagcacgtcgtcagggtgctggaggtgatattggtacatatgaaatgctggatcatgttcatcagctcttgattggtaatgatctttcatcagttggtgttaaagggcttgagcctttggaattaggcaaaaccaaaaccattttaaatactaaaactgctagtcagtcgattagtgtgctttctcaagcatttaccacgcaatacacaattactgcttctgatcgtgaccgtgaagaagctgatgaatctattggtgaaatccatcgaatcaatgtcgattatttctttgagccgggtgatgacgttaaagacgcttctgatctggttgaactgaaggaaaataaataa

SEQ ID NO: 49980 - DNA, 432 bp, Acinetobacter baumannii
atgtatgcaacggcagacgcgatgatcaaaaagttcggtgaaagagaattaattcaactcactgataatgaagaatctgaatatttagatgctattaattacgacaagttaaatgcagcactgcaagaagctaactcggaaattgatggttatttaatgggtcgctataagctgccgttgcaaactgtccctccattccttgaaagccttgcttgccatattgcacgctatcatgcatgcactggtgcaatgactgacgatgacccgatccgcacacgctatgtcgatgccatcaacaaattgaaagatatttctaaaggtattgttggtgttggtggtacgccagctggtgaatctgagcctgtaaaaacttcatctaacaatgtgatgtttcaagttggacgtcatgattttggaggtaaaggctggtga

SEQ ID NO: 49981 - DNA, 933 bp, Acinetobacter baumannii
atggttattactgaacaaaatggtgctcgtattctgaatgctttgagtacaagccttaaactagtattcaaaaatgcatttgatgcggctcctagtaactatgcaaaagtagcaatggaggtgccaagtactggtgcatctaacacttatgcgtggacggatcgctttcctgctttacgtaagtggattggtgataaagcagttaaaaaattaacaggtcatgcctatattctggtcaatgaagattatgaagctactgttgaagtagatcgtaatgatattgaagacgataacttgggtatgtacaccatcgaaactcaagctgctggtcaatcagctaaagaatggcctgatgatcttgtcttcactgttttgacaaaaggctttgaagaaaagtgttatgacgataagcctttttattcaactgatcataaagtcggtgaaggtaaaaatgccaaagtcttttctaacaaacttaccaaagcattaagtgtatcaacactggcagctgcacaagcaagtctgggtgctgcaatgaccatgatgcaagaactaaaagattcagaaggtaagccactcaacttaaaagcaaaccttttagttgtgcctccagcattacgagaaattgctaatgccttgatgactacagatcgcctagaagatgggaaggtaaacccatataaaggtgaatttgaagttttggtatgtccttggttagaaacaaaaactgaatggcaccttttagatgcatcacgtccagtcaaaccaattgtctatcaaccccgtaaaaaaccgaactttgttgctcaatttgacattaatagtgacagcgtcttcatgcgtaaaaaatatcgttacggtgtggaagctcgtggtgttgctggttttggtttatggcaaatggctgtgggttctactggtactcaggcataa

SEQ ID NO: 49982 - DNA, 420 bp, Acinetobacter baumannii
atgacatatatgcaaaatggaatcgtcactgaaatgcgtgacggtgagttaatccctgtcccattaaaagctggtgcagtggttctggtcgggacattcgcattggttgatgacacgggatttgctgttgcttcaacagctgcaattgcagcaactcaaaaggttatgggcgtttgggacagctcggcagataacactgatggcgaatctggcgacgttctagcctgtgtacgtcgaaaaaaacaattcttgttccgcaattcaacaactgatgccgttacgcaggctgaacttggtgaagacgtttttgtggaagataaccaaaccgtcgctaaaacaacaggtgctggtcttccgattgctggcaaatttatgggttttgatacgcaatttactgactgcgtttgggtggagatttaa

SEQ ID NO: 49983 - DNA, 1086 bp, Acinetobacter baumannii
atgcctaaatcaattcttgtcgcttcatgctcaattgacttgaatgccacatcgactcatctggtgcttgttcctgaaggaacattcaatggagttgatggacgaccttttgatgcaccgcattgggtacttactcctgaacgtggtgagcagattgttgctgcattaaatcaacgtaaggtggacatggttattgattatgaacatgccactttaaaagcacaggaaactggtgaaccagctcccgcttcaggatggttaaaagcagcatctttttcatacatcaagggagttggcatatgtagtactaattttaaatggctcgataaggccaaaggccatattgagaaggaagaatataagtatttatcacccgttcttttttataccaaaacaggtgaagtcgttggacttcatagcgttgcattaaccaacacccctaatctggataatctgcccgaggctcgtcttgctgccttggcacaggattacttcacccaaaattccacacaggattctgaaatggaagagttattagaacaactgcgctggatgttaaatctgccattgtctgcaacagcagaagaaattttggcagaacttaacaagctttcagcgcaaatcaaagaaaaaaccggtgttgctgtagctgcaaatggtcagcacctttttgatgccttagctgcaattgatcagcttaagctggctgcaaacagtcaagatcaagtcgatatgactcaattcgttccaatggctgtttatcaagaagcggttgcaaacgcaggtaatgctgaagctgctcaaaaggcaaaagaaattgatgacttgattatggctgcatgtagcgatggtcgtttaactggtcaagtaaccattgcatggatgaaggaacaggcaaaaaccaatcctgattttgtcaaagctcatattgaaagcctgccaaaaatcgcagctttaactcaacgtcaaactgagcaagtgaatttagcagcaaaccatcagcaacaacctgttgtagatgaaattgccactagcattgcgacccaattagggcttgacccagcagatttaggagctaatccatga

SEQ ID NO: 49984 - DNA, 504 bp, Acinetobacter baumannii
atgaactttattcaaatcaaaaatgatgctctggtttctcgtttaggccaagcagctgatcgtatgggggacaccacaccattatcggcagcaattgcaaatacatttgcagccataactgaagataactttgatgcagggggacgtcctaaatgggctggtctggctccggatagatcacaaccttcttacctataccagtcagggaatttgcgacgtagtatcacgactcaatatacgcgtgaccaagcaatcattggcaccaatgttccttacgcacccattctgcataacggtgggcaaactcgtccgcatgtgatacgtcccagaaataaacaagcattgtcattcaatggcaaggtgtttaaacaagtcaatcacccgggaagcaagttcccggcacgaccattcttgccaatggatgaacacggattcttacaacaagaggcagaagatgcagtgttagatgacatagatttttattggcatagaagctttgaataa

SEQ ID NO: 49985 - DNA, 1251 bp, Acinetobacter baumannii
atgccgaaagctcaaagtccggagttgaaagctttatttgaactaccgccaagtgatgctatttcctatcttgaaaaaaagggttttaagattggttgggattggcatgaaaccttggataatgcccacagtcgtgcctttacagttgctaaagttgcacgcatggatctattgcaagatattcgtcaatcattgattagtgcgatgcagcaaggccaaacactggagcaatggaaagctagtattacgcctgtccttcaggataagggatggtggggaaagaaaaccgtcattaatccagaaggtcgagaacaagaagttcaactgggcagcccacgtcggttacgtacgatctacgatacaaatatgcagtctgcttttgcagctgggcggtacaaagcaatgcttgcaggtgcggaaacacggccattctgggaatggcgtcatataacgattaacaatcctcgtaagcagcatgttgcgttaaatggtcgattattccgttttgatgatccgttttggaatgttgcttatcccccaagtgagtggggttgtaaatgccgggtgattgcacgttcagcccgtgaggttgaaagtaaagaaatcttatcaggtgaaggaaatgaatctgacatatatgaacgtgtgggcgtggatcgcaacactggagccgatgttattgttaagcgcactcagtttaatattcccactaaagatgggaaattaacttttgctccagcagctggttttaatggttcaccagcttctagctatttgttgaatgatgtaatgattaatcgagcgactaacttgatgggagaagctcgtggactaattcaatcacagaagttaatgactaatcataatcttacaaaggttaatgaaagttttgtgaatcatgccctgatgctttcaaaatctcaaaaacagtttagtccaattggtgtgcttcagtatgattcagtaaaattcttaacagcggcaggtcaatcatttgaatctaaaatgatatggttgagcgatgaagtacttgttaataaaaaatacactgatgtatctgtaactgaactgattgctttgccaaatttaattgccaatgtggagcaaaagctttgggataaacaaactcaggctttgttttatgtattgccacatgacgttgttattgagttcaaagtggtgtcaggacatttgcaagtatcccgtatcttcaaaaatatgcctccaaatgattttgaggtgattgaatga

SEQ ID NO: 49986 - DNA, 1620 bp, Acinetobacter baumannii
atggtgcagaatcctcaaattgtatttgcatctatcatggctaaaaaagaccgcacttctaaaaaacaagatcgtactgcattagaaacccagcaaaccgcagaagtatcttggctgtcaaatcagtggcaagagcatccagttgttgggatgacaccatatcgattacatcaattactgacagaggctgagcaaggcaatttgcaggctcaggctgatctgttttgtgatatggaagagcgcgacggtcatatctttgcggagatggataaacgcaaaaaaggtgtaaacaaacttgcatggggcgttaaaccacctaaaaatgccagtacacaagaaaagaaaattgctgaagaagtccaagagtggattgatgatattaaaaactttgagatgttcttgttcaatgcgatggatgctgttggacatggttattcatgccaagagattcaatggaaacgattaggtaatttgtggcttccagatagctttgaacatgtagtccctcgaaacttcatgaccccccataaccaattgaactgtttgcgtttaaatgatggctccccagatggagccgagttctgggactttggctggtttaatcacttacaccaagctaaaacaggttacatcagtcgttcaggcttataccgggtattagcatttccatttgtttttaaaaattatgctgttcgcgatgtgatggaatttttagaaatttatggcatgccgatccgtataggtaaatatccttctggtgcgaccaaagaagagaaaatgacccttcagcgtgcggttatgctaattggacgcaatgctggtgggactattcccaatgggatgagcattgattttgaatcagctgctgatggtgatactgccaaccatatgaatatgatcaagtattttgagcagattcagtcaaaagtcattgtgggcggtactttgatttcacaagcggatggcaaatcatctacaaatgcccagtcaaaaacacatgaaattcaatttgaaacattgataaagtctgatgctaaacaattagcacggtcaattactgacaatctcattgattatttgatgcgattgaattaccccaatattcctaaagatcgttatccggagttttactttgataccagcgatgttgaagacatggaggtatttagtaattcacttgagaagcttgttggtgtcggtatgaagatacctttgtcatgggcgcatgagaaattaggtattccacagcctgctaatgataaagagcctgtactagggattgtgcagcagccaagtcaattaccaaatcttgcattaaatacataccagccaaatttattaaataacttgattgctgctaactctgcccaattgcctgttgaagaacaggcattacagttattactgaaagaacaatctgaaactgctcaaactacggctgaggactggacaaagcaattattggctaagattaatgctggcaatgaggaagaagttttagcacttcttcaagatgtttacccagctgatgatgaaccagctctacaagaaaaattaacacgtttgatttttgctgccgaagttatgggtcacttaagtgttcaagcggagcaaagctaa

SEQ ID NO: 49987 - DNA, 795 bp, Acinetobacter baumannii
gtgcaaagtccaacaccacaaaaaacacctttctataaatcttgggtattttgggcagtaatttatggcgttttaattttgacatataacttagcgtttattttcctagaacctgaaaagaaagttctactaacctcaaatgaacttggggattttctagctggtgtttttgcacccttagcattcttatttttgtatttaggatataagcaacaaggtcgagagttacaacaaaatacacatgctttaaaccttcaggctaaagaattacaaaatagtgttgaacaacaaaggttgttagctgaggcaacaattgatgatttaaatataacgaaggaacaaatccaaactcaaagaagaaaagaacttatcgaagctcaaccattttggcatttagaaccaagtagtacttataaagaaagaccaagcaatgtcatgggaacaggggctagcattcctgattctgcatataattcattcattgttggagtaagcttaaataatagtagagctatagctagagaagttagtgtatcaatactaaaagaagagaaagttattcaaacgcacaactttcctatttttgaaaaaaacccaacaccgcaaaatataagcattcgtctaaagtatccagagttttttaatgataaagatgagcttaatttaaaatatgtaatagtctatcttgatgctttagataatccacaatatcaaaattttgaagttgtgattattagaaagagaaatacaccaactcaagaatttagaattgaacgaactgagcgttcttattaa

SEQ ID NO: 49988 - DNA, 1641 bp, Acinetobacter baumannii
atgaatgcacctaaacctcggcatgatacagtccgcattgttgattgggatgagttgccagaacgagcaagaatgctgccaaacagtttaaatccatttaatgacggtgtacttatgaaacaccaaatcgaatggattaagatttcaacagcaataaaagcatgtcctaaaggtcgtcgtactggtattacatttgctgaatcatttgatgctgtactcacagccgcagcaaataaagctgctggtggtatgagtgttttttatatcggtgataccaaagaaaaaggtctagagttcatcggctattgtgccaaattttcgcgcgtcattgctgaagcccaaggtcaaggcatttctcaaattgaggaatttctatttgaagaccagaatgataagggtgaaacacgcttaattaatgcttatcgaattcgatatgcaagtggttatcaaattgcggctctatcaagtcgtccagaaaatattcgtggtttgcagggaaaagtcgttattgatgaggcagctttccatccagatgtacaaggtgtgattgatgcagctacagcattattaatctggggtggacgtattgcagtcatcagctcgcataatgggaaaaacaatccatttaatcaatttgtaaaagaaattgaggaaggtgtgtttggtgaggatggtaaaacattaacagtcacatttgatgatgctgttgccaatggattgtatgaacgctactgcttcatggaaggaattgttcctacaatagaaggtaaacaaaaatggtatagcagaatccgcaaaggttacggcaatcgtaaagctgctatgcgccaagagcttgatgcaatccctcgtgatggttcttctgtatgtttgcctcaactatgggttgagcgtgcaatgacagaaacacgtacagttttgcgcttgtcgttaggtgatgaatttaaggaacttacacctgaacaacgtgatgcttatattgatgagtggattcagcagaatcttgaacctgaacttaagaaacttgataagactaaacaacatggcgcaggtcaagattatgcacgccatcgcgactttagttacatcatgcctttttacattgagaaagatttaagacgggttataccatttacgattgagatgcataacgttccagcacgaatgcagaaaaccatcctatggtatatgttagatagattgccacgctttggcggcattgccatggatgcaacaggtacgggtgaaactcttgccgagtacacggctgaaaaatatggtgagcatatggtccatcaaatcaaattgaaccgtaattggtacggattgtggaccccaaaattggttacagcatttgaagatgacatgattgatcttcctagagatgacaacctaaaaaatgattgtgctgctattgaagaagtagacggcattcatatggtcacaaaagctcgtacaaaagatttaaaagaccctgagctttatcgtcatggtgatggtgcggttgcgatgattttggcttggtatgcaagtctacatttggcaacagctattgaatttactccactaccttcaaaagaggagatggagttaaatcccgataattacgatgattggtttagttcggctgggtgtatttaa

SEQ ID NO: 49989 - DNA, 570 bp, Acinetobacter baumannii
atggctaagtcttttatgcataagttatctgatgaacagcgcgcatttgtagaaaaattactgcgtgaagaccgactgacattgaatgaaatgcttgatgagattcgtgctgaatttccagcagaatctattccaagtcgctcggctcttggtcgtgagaagaaaaactgggctgaagaagccaaagctatgcgtgaatttgctgctgcatctgaagtcttggtcaaggaatttggtgaagaccctgatgacaaaggcggcatgttattggctcaagctgtacaggccattgtgaccaaaaaagcactggatgaactgaccaatactggtgatgatcctcaaaagccaaaaatggatatagatgctgttggagctttagcacgtgctgcccgtgcagcgatgatgactaaggaaaaggcaatggataatcgtgaagaggttcgtcgtcaagcacgtgaagaattgctaaaagaacaagatgaaaacctcaaaaaagcagcagtttcacaaggtatgggtgaagaacaaatccaattttggcgtgagaaaattctaggaattaaacgatga

SEQ ID NO: 49990 - DNA, 294 bp, Acinetobacter baumannii
atgagcttcgccaatcatttaaaagaagacatgcgtttggtggtattgcgccttttacatgaattaccacagtaccgttctaactcgtcagtgcttgttgccggtctagatcggtttggtcatagcttcagtcgggatcaagttaagaccgaactacactggcttgccgatcagggtttagtggtccttgaaaatgatcttggttctgtattggtcgttaaattgactgagcgcggaatggatgtcgcaactgggcgtattacaacacatggcgtaagacgtccttctgcttaa

SEQ ID NO: 49991 - DNA, 303 bp, Acinetobacter baumannii
atgcaaatcaaccccgcaactgtgttggctctggtttcgtttctttgtaatttcgggcttggtgtttatatctttgtctcaaatcgccaagctgccaaagacaaagagttgcaagaaactaaagagcgtttgactcaagtagaagaacgcattcgtaacatgcctgatcaccaagtgatctatcaaatgtctggtgatatgaaagccttaaaagagtctgttgcggggttgaaagaacttatctcccccttagcaaaggcggtagatcgtgtgaatgattacttattgcataacaaggattaa

SEQ ID NO: 49992 - DNA, 345 bp, Acinetobacter baumannii
atgagccaatggaagcgaaattttcgacgtcagttagctaaacaaaatgctgtaaaaaatcagcttgtggctaatgaatcccaatccattcaaggtgtgccagtcaagctcaaaaagcggtggattgtagagaattggcgtagtggctggctgtggttatcaaactatgtatttggcgtgattggctatattgcaatttttggtttaccgcctgaagtcattgccttgttgccagcagattcgcaaaaggaagttattggcattctgtctgggctgggtattttagctcggtttttagatcagaaccgagctaaacctttaccaccagttgacgaggacaattaa

SEQ ID NO: 49993 - DNA, 501 bp, Acinetobacter baumannii
gtggataaaacttttcaaactgcactgaaacgagtgcttcaacatgagggcggttatattaaccatccctctgatcctggtggtgaaaccaattacggcattacaaaaagtgtagcacgccaatatggttataaaggctctatgaaagatatccctatggatatagttgagaagatttataaaaaccagtattggaatgcgatgagttgtgacaacttcccattttctgtggcttttcaactttttgatgcagctgttaatcatggtctgctcaatgctcgaaaacttctacaacgagctgttggtgttaaagacgacggcattgttggtgccttaactttagctgcagttcgcaagcaaccacagtttgctttaatcagtttattcaactccaagcgtattgaattctatacaaagatttcaactttcaatgcctttggtaaaggctggatggcacgtgttgccttgaaccttaaatatgctgcggaggatatgtcatga

SEQ ID NO: 49994 - DNA, 555 bp, Acinetobacter baumannii
gtgagcaaggactttgagtggctgaaatgggtagccctgtttcttgtaatcggtattgtttgcgctgtagtttattttgttccaaacaaaaaaaatgaccaaacttcaacacaacaaataactgagcaaaaagaattatcaccagatgaagcaaaaagatttgctacagggttgttaaaaaaaattaatgatgatgaaaagcttattagagatgcatatgagttaaaggaggaaaaaactcttgaaaaatatgtgcttaatgactggaatagttatgttcaaaagccttttagtgaggtagaagaaaaaatgggatacgggcatctttactttccaagttcggctgttatgtatccgtatacttcatgtgatacagcttttacagacttaaatctattagccaatgcactttatcaacaggtacgtgaagatactgcaaccatgcgaaagatagtacgtcaggaagatgctgattatctaaaatcaaaaaataaatgtgaagaacgtgttggcttaacttatgaggaagctttagctgctgaagaggctgagtaa

SEQ ID NO: 49995 - DNA, 705 bp, Acinetobacter baumannii
atgaaaaatatgggcaatgatgacaaaggcattaaaatccataagattttaggggatgtggtagataacgggcttattacagaagtcaaaaagctgaaaggcgatatagttcagggtaataaatatttgataaaaggtggtatagaagccccacctcaagatcatcctaatggtagagattgtcctcaatgtgaaggatggacttggaaacatactagagaatgtgttcattgtggatgtgatattcctactgttgaaagtaaggaagagctaagaaagcaacaagaattagctatacaaaatgaactgcgtcaacaacaaatcttgcaagaattgaaacgtcaaagagaattaaccgaagaaccaaaaactttgtgggatgtaagttctaatgaactcataaaagaacacaaatattgtaagaaacaaaaaatggaagtttattctaaaagatttatacctcttgcaataacggtatgtggttttgcgatttcaatttatctaatgattaatttagtccttccaaatatgtttagcttaaaacatacagactggtatttgatctatggtgttatttttggatcaattttcccttcaacaatttggttaaataaagtaagaaatagagatgataaattagtttcttactacaaggagcgtattgaaattattgtacatattttaagagttcggggtgatttgtga

SEQ ID NO: 49996 - DNA, 477 bp, Acinetobacter baumannii
atgatcattattttgaacagttttaatgaaagattacgttctgaagtagaaagaataggtgttagcaagttggcaagagacttgggaattgcacgaaatacactttataactggtgtgaaaaaggaaatattcctttagataagcttttgattttgagtgattatgggctggatgtaagctatgttattacaggccaaaaaatggtcacaacaataaacccagagtctgcaatagttgctcaaaaatatgagcaagcaaatgcagaaataaaaaataaggttttgatgatgcttttaagtgctgaaaacgcgacaaaaaatgtcgcaactgagatttctaatactggaaatggcactcaatataatgctaaaaaacaaactgttaataatgctccagtcacccagaaaaaaaccaaaatcaaagttggtaaacaacgtggtgatatcgtgaatggagataagcatgtagctaagtag

SEQ ID NO: 49997 - DNA, 228 bp, Acinetobacter baumannii
atgacgattaaaactccagcccaagccataaaaactccagcccaagttaaggagcagtttgaaaaaactggtgaaacagttgcagattgggcaattaagcatggttacctaccacaagatgtatataaggttttgaatgggcaagctaaatgcaaacgtgggaaaggtcacaatatcgcagttcaacttggcattaaacctaaaagcgaaacaaatataacggcatag

SEQ ID NO: 49998 - DNA, 162 bp, Acinetobacter baumannii
atgaaagcaaaaagaagagcaaatgaagtgttaatcatcgtctatgtgctgatttttatcgtgggctttggcttttttggatgggctatggcagagcaagacaatcaaatgctccgagaagaactggtttcactcaaatacaaagttgggagtgatgagtaa

SEQ ID NO: 49999 - DNA, 297 bp, Acinetobacter baumannii
atgtcaacaaccaataaatcggcaggaaaagttttatcagtcttattcgctctacgtggtcactacattactggcgttagtaataaacaactttctgaaagcctaaatgagtcaccaacatttatcacacgggcactacaaacgctggaagcaaacggctgggctgaaaaacgcgataacggcaactatgcaccaagcatgatggcaattcgtttcggcgcttcatgcaaagaagaatgtgaccgcatgcaagctcgtattgatgaatacaagcaacgtctacaaacacagttttaa

SEQ ID NO: 50000 - DNA, 888 bp, Acinetobacter baumannii
atgagcaatgaagtaattacagaagtcgacttaatacagcaacatacaaaagctgtggttggtttggcaactcaattgaattacagcggtgatttgagtgttggagcactagaagacggtattcgcttctaccaaagacgtacagttgaagacttatttgaattaggcacgcgtctcttacttcttaaagagcaaacaccacacggtgaatttacaaatcgtgttgagttgctaggtttcgacccaagccttgcacgcaagttaatgagtgcaacattgaaatttgcaaaacaggaaacgtctcccgttttgaaagctgtaaaaagccaatcgaaacttttagagctaattgtactggatgatgacgacattcaaaccattaatgaaggtggtagtttcggcgaagtcacattagacaaaatagaaactatgtcagtgcgtgaacttaaacgagcattgcgggacgcccaacttgataaagaagcatctgaccagttaattaaaaagaaagatgaaaagattaatgagcttgattcaaaaatcactaagctccagagtccagttcaaatcaaaaagcgtgcagaatctgaagagcaactcattgctgcaaaggctttagaagaagccaccagcgcatgtttaacaatgcacaacgacacagtgcgcttcaagaacactatcaactctgttttagacaccatcaacgagcatggtctttacaacatccaagaacaactagaagccctcgttatcagcgcatttcaacagattgcccaaactagtgttgaatttggaatccaaattgattttgaaacgatggtaaacccagcatggttacctgcggatcaagacgctactccatttgatgcaacaaacgtggagcagtaa

SEQ ID NO: 50001 - DNA, 1752 bp, Acinetobacter baumannii
atgacaaatccaaacttagcaaaacaagattatttgcgcgaaattgcagccaaacttgcagctgccgagtttggtgggaaagctgcgattgttaaaactgcatgtgactttttgagtcttagcaagccacaactttaccgtgaacttgaaaaagtaggttttaaatctgaacgtaaacagcgctctgataaaggtaaaacagttgtaccaacagaagttgctgaaatggtcggcggtatggtgcacgtagcaacacgtgccaatggtaaaaagacattgccgatgactacagcgctggaaatgcttatcgccgacggtaaagcaccaagagtatcagcagcaacagttgcgcgtgtcatgaaacaaaacatgtgccatccaaaacaactggctacaccgtcagcacatacacagcaaaaatcgttacatccaaaccacgtttggcaagttgatgcctctgtctgtgttttgttttacctgcctaaaggcggtatgcaagtgatggatgagaagaagttctacaagaacaaacctgccaatgtgaagaaaatcgaaaatgaccgtgtgattcgctatgtcatgactgaccactattcaggctcaatttatgttgagtatgtctatggcagtgaaagctctgaaaacttaattgagattttcttaaatgcaattcaaaagcgttctgctcaagagccgatgcacggtgttccaaatatcctttacacagacaaaggttgtgcaaacaccagtggcttattcagaaatttacttgaacgccttgatgtaacttttataccccatgcaactggtaattcacaagcaaaaggccaagttgaaaacgctcaaaatattgttgaaacacagtttgaaggccgcctgcgtttcatgcagatcaacaatatccaagagttaaatgcacaagctactgcatggcgcatgtactggaatgaaacaaaaattcatagccgtactaagcgcagccgtaatgctgtttggcaaaccattaagcctgaacaattacgcattgctccaccaatggaattgtgccgtgaacttatcagcacagtaccagttgaaaaaacagttaaagccaatcttacggttagtcatgccattcaaggctatggctcacaagactatgacgttcgtcatgttgatggggtttacccgaaagctaagttgcagattgtagtgaatccataccgtgcgccatgcatcgatgtattgactaaagatcaacacggcaatgaggtcattttcacatgcgaaccgatgcaagttgattgggttggctttggaaatgatgcagcaatcatcggtgaagaaattaaggcaatgcctcaaagcaaaattgatgaaaaccgcaaacgcatacttaaaaaagcttatgacgctgaaactcttgagcaagttgataaagcaattgccaagaagaaaccagcctatgacggtcagctcaatgctatggcagacgttgcagcggttgaagttccgacttacatcaaacgtgctggtgagcaagtcactacaactaaacaacgtcgtgaatctgcacctatttcaacagtagaagcagcaaaagaaatccgaggcttaatcggtgacctgtggaccacggatcactacaaggccctcaaaaaatcttatccagatggtttagtccctgccgatgcagtacgtgaaattgctgaagcaataaaggctgaacaagaacttccacaacaacggccacaacttcgtgttgttggttaa

SEQ ID NO: 50002 - DNA, 1278 bp, Acinetobacter baumannii
atgaaacaaaaagactgctcgacaaaacttaaggacctcattttagacaacggaattatacaagctgatttagctcgatacgtacagctaagcccgtcatcgatcaacatcatcatcaactgccttagatggccgaagaagaatactgattttgtgaaagcccgttttagagagttcttggtcaacgcaaagattagcgagtcagaaatcgatgatgcatttaacgaaatgtttgatgcaccaccacaaaaaacacttcttgaaagacttggctcagaggcagctagtgaaagagaactagaccatgtgtatcgcgcattagtagcacgacacggaaacaaacaaattaatgaacttttaaatgaggacgaacaagccatgttgctcgcaaaacagtcgttgactcaacaagctaaaaaacattttggcttgtttgacaaccctttcacaaatgaagttcgtgcagttgaagaactattcttgaatagcgacatcaactatgtgcgtcaagccttatatcagacagctaaacatggcggattcattgcaatttcaggtgagtcaggttcaggtaaatcgactttacgacgcgaccttttagatcgtattcgtcgtgaaaaattaccaattttgattatcgaaccatatgtcattgcgactgaagataatgacattcaaggtaagacacttaaatcaagccatattgctgaagcaattattaatacggttagtgctggtcaagagaaaccacgcatgtctgccgaggctcgtttccgccaagtacatatgattttaaaaaattcaagtgaagccggttatagccatttattagtgattgaagaagcccacagcttgccaatcgctactcttaaacagttaaagcgtttctttgaattagaggacggctacaaaaaactaattgggatcgtcttaatcggtcagccagaacttgcaaacaaattaagtgagcgcaacccagcggtacgtgaagttgtacagcgttgtgagagtgtgacactggaacctttaacaaatacttcattagttgagtacttacaacaccgagttaaaagcgtcgataaaaaactggagtcgatcatctctgaagaaggcattcaagcagttgttgaccgtctaactcaaatcaatagcgctggcaaaaccacacgctcacttttatatccacttgccattggcaacttaattaccagttctatgaacctcgcagcagaaatcggcgaggacgttatcacacgcgacatcgtgatgggggtttaa

SEQ ID NO: 50003 - DNA, 219 bp, Acinetobacter baumannii
atggctgattttgcagatgtagcaagcactttgtctgaacaagatttagaccatgcacttgccaacattaaacactttgaccaagtcagtaactatgaatgtgaagactgtggtgccgaaattccagagcgtcgtcgcactctgggcaatgtaaagctttgcattgactgtcaaacagcagttgaaagcaaatccaaacatttccgaggtggtctatga

SEQ ID NO: 50004 - DNA, 231 bp, Acinetobacter baumannii
atgaacatcaaacaaaaacgcgctcattttcccaaggatttggacaaattggtcagtggtgattatgtgcttgtaccaaaagaatctgctcagttttgtgcagaaaaaactattgaccatgtccatgacaatattcgtgagtttggtgaaaacgctgaacttgaagccgaatggaaagcccatgctcatgcattgatggttgcaacaggtgacacacgctatgaaaactag

SEQ ID NO: 50005 - DNA, 672 bp, Acinetobacter baumannii
atgaaaactagatgtccagcatgcggagcaacaaacagcctagatgccctattagggcatggtgaagcaagcaaagctttcgttgcttcactaaatctggttggtgatttagctacgccactggtcaagtacttgggaatgttccgctctcaaaatcgtgagcttacttttgaacgcacagctaagttacttggcgaaattgctgcggatattaatgcgcagcaaatcaaacgtggtcaccacagttacccagctcctaaagcagcatggatctgggcaatcaacacaatgcttgagcgtcgtgaccaaggcaagttgcagttgcctctgaaaaaccacggctatctatatgaagtgatcagttcattcaagccagaaaatgcaccagcaccaactgagcgtcgagctgctgtgccactagagaaaactgaagctgaacgtgcagctgagcaagctgaacatgaacgtcaaaagcatatacgcccaaacttcagcgttaccgaaatgcttggcttcacaaaaatgaatgagaagcagccagaacgtgggctgaagaatattccaaaagaacaacttatggcgcatgtcgttaaacacaagcatccagatgaaactttagaacagtgctaccaacgcttaaaagcagctgaaacacaggagcaaactaactaa

SEQ ID NO: 50006 - DNA, 504 bp, Acinetobacter baumannii
atggcacgtaaatcactcaaagaaccacaacttcaaagttgggaagcagttgatcaaacattggcacaaatggctgagatcaaccgtgacatcgcacttgaagaagctgtttgtaatgaacaggtcggcaagctcaaggaagcaaccaaacaacgtcttaaaccgctattggaacgagttaaggcgtatgaacttcaacttaaagaattttgtgatcaccgcaaaaatgagtttttgcaaatcaagagtaaaaagttgacacacggttcggttggctaccgcttatccaccagtgtgactattcctgatcctgtttttacttgccagatgctcaagcaattaaagcttgaacactgcatccgtactaaaaccgaacctgataaagagtcaatcaaacaactcacacccgaactaatcgctgaaattggtgcaactcttaaacagcgcaacaactttggctatgaaattgaaacagttgatccaactgctacagctgctcattaa

SEQ ID NO: 50007 - DNA, 168 bp, Acinetobacter baumannii
atgtacacagttaaagcacttgaaccgcaactaaatgatgatccgcaagccctgtttgcaatcgtccgtgatgacgacgttttagtcggtcatttctaccgccacgaacatgcagaaattgcatgtgcagcacttaaccaaaatcaagcaactactgaaggaaattaa

SEQ ID NO: 50008 - DNA, 288 bp, Acinetobacter baumannii
atgaacaaatcagaacttatcaaacacatcgcttcttctgcttctcttactcaagcacaagctacagctgctcttaatgcagttgaaagtggcatcagcaaagcacttgctgctggggatgacgttgcattaatcggctttggaaccttttccgtaaaagaacgtgctgcgcgtacaggccgcaatcctaaaactggcgaagagctacaaattgctgcggcaaaagtaccttccttcaaagcaggaaaagcacttaaagaggctgttagtaatggcaacaaaaattaa

SEQ ID NO: 50009 - DNA, 180 bp, Acinetobacter baumannii
atggcaacaaaaattaagggcttagacatgcttgaaaagaacggtttaagggttgtccgtaaatacaacatttgcggatggttcgagtatcacgttttgaatgaggctggtcagagaatttcacggcatacagttcaacaacgtgcgattgatatagctctgaacacgcttcaagcataa

SEQ ID NO: 50010 - DNA, 714 bp, Acinetobacter baumannii
atgagtatgacccgcgaagaagcaattctaaaaatcaaaaaatgtttagcattggctaaatcagccaatgaaaatgaagcagcaattgcactacgtcaagcgcagtctttaatgcgcgaatttcagattgatcctgatctgctcgatatcgttgaggctagttgcgaaagtaaagcaacaaaaataccgcaagcttgggaagcaagtttagttatgacaattgctagagctatgcagtgcaaacctatttttagttctggcagtagaacttggggcattaaagcttcatggacatttattggtgtcgatccagcaccagaagttgcttcctatacttttgatgtcttatatcgccaagtgattcgttcaaggaaaagttttattgaaaacagtttaaaacgtgtgacggttaaaaaaaataaggtgcgtcgtgcggatttattttgtgaaggttgggtggattcagttaagcatttaataactgacttagatattgaagttccagcaaataccattgaacgtattaaaaaacatatggataaagctcatggaaagcttggttcatttacgcccaaagaccgcaataaaggcaaagctttcaatgatagagcagctaatgattatcatgcgggtaaacaatctgggaaatcagcaaaactaaatcaagcaatgaatggtggtaaacaatttgaaaagttgggagcacctacatga

SEQ ID NO: 50011 - DNA, 288 bp, Acinetobacter baumannii
atgaaaacaatgagactgtcagataaagaagcacagttaattttagatcgtcgcgctgaacaacaccacaaaaaggcaacttttgcttttcaagtcaggtcgattcaagtagcaaatgcatattttgaatgggctaagaagaacagttttctagaacctactttgggaacgtttgttaattcattttgttatgacggacccgacgccaaagttatgtgtggtgccgtacatcaaatatggaaacttgtattttcgtttcaaattcctatggagaaaccacaatgctaa

SEQ ID NO: 50012 - DNA, 213 bp, Acinetobacter baumannii
atgctaataattgcttatttcctcgttttcttcatcggtataggaagctgctttaaagaagctaaattggcgtggttatcgcgtaatagtattggcttaactatctttgaaaaacgtgcctacactttaaaagcatgcattgcgattcttatcgccatttttggtctattaggtctactagaagcaattgtctgctctggagtgttgcaatga

SEQ ID NO: 50013 - DNA, 438 bp, Acinetobacter baumannii
atgaaattcaataaaaaagccaatctgattaagctaatccatgtgggcaaaacaaaacttggtttagatgatgagctttatcgagacattcttattagcactactggtaaaaccagttcaaaagatttgaatctagcacagcttgaagctgtgctggatcggttcaaacaacttggctttgaagttgaatcaaaaaataaatctggagttaaaaatttagctaatgacgaccaaagtaaattaatccgtcatttatggttacagcttcatggggctggtcaggtcagaaacagtagtgaaaaagctttagcaaaatttgtagaaaaaagagttggtgtgagtgccttgcaatttatgagcagtcatcacgcagacatgatcattaatcacttaagacaatggtgcaaacgttgcggcattgaaagaacagaacaataa

SEQ ID NO: 50014 - DNA, 450 bp, Acinetobacter baumannii
atggtttatcgtcctcacattaccgacgcacaacaattattttcagatgaagaactcattgcacttatgcctaaaaactttgcatttgtggcgaagctcattggtgtaaaaccagctttaagtcttattgaaagttatggcggcattctagttttcgtgccccataaacacgctttaggcattcatcatgaactttcacagatcattggttattctaagttacagctgctctcagagcacttgggtaacacttcaatagaagtacctatggctacaacaatcacgattgcaatgcgtaatagaactattcgtgaaatggcagcaaaaaaagaaagtcgctcaaagatagcccgtaaatttggcgtgacaatcagaacaatacgtcatatcgtaaatggcgaagaaaagcttaaattcaatttagatcagaatctggatttattcgaataa

SEQ ID NO: 50015 - DNA, 138 bp, Acinetobacter baumannii
atgaatagattattagtaacatcacttatttttgtatgtagttacagccttgctcatgaaccttatgttgcgccattagcgtataaaactgagcagacacaagtaccggtagtgatacctaataatataaatatataa

SEQ ID NO: 50016 - DNA, 429 bp, Acinetobacter baumannii
gtgagaaaattatgtattgcctgccttattggtatggctatgttatctatgtctggttgtgccgtatttatggctggcaatcaaccaagtaaaaaaaatttaaatgttttaaatccgggtagctctcgtaattatgttattgcagagtttggggcacctgtattgtctgagtaccgtgatgggacaagagttgaaatctatacattccagcaaggttattcaaagtgggtgaaagtaggtcgtgcatttgggcatggggttgcagatgttgcctcaataggtttatgggaagtatttggaactccagctgaagcatactttaatggtaaagaaacaacttatgaagtgacttatggtgaagatgatttagtaaaaagttataagcttattgactttaatcaagcttttccaaaagtaaaagaacaatga

SEQ ID NO: 50017 - DNA, 1200 bp, Acinetobacter baumannii
atggcgtcaccccaatccccttcttcttcccctcgacattactcactcttcttggcaattttttctctcgcagtaggcggtttctgtattggcactacagaatttgtcgcaatgggtcttattcaggaaattgcacacaatttaaagattacagtacctgaagcagggcattttattagtgcttatgcattaggtgttgttattggtgcccctattattgccattttgggtgccaaagtacctagaaagaccctattgctttgcctcatgctgttttatggtattgccaatgcatgcacagctttagcacataccccagaaactgttttagtctctcgttttattgcaggtttacctcatggcgcatattttggtgtcggcgctttagtcgcggctgaactagcaggcccttcacgaagagcttcagcagttgcgcaaatgatgatgggactaaccgttgctaccgttattggcgtacccttagcaacatggttaggtcaacattttggctggagagcaggttttgaattttcagcaacgatcgcattctttactttaattgctgtagcttgctttgtaccgaatattccagttcaagctactgccagcataaaaacagaattagctgggcttaaaaatataaatatgtggttaacccttgcagtcggcgcaattggctttgggggcatgttctcggtatatagctatgtctcaccaattctcactgaatacactaaagttaatatccagattgttcctattgcattagcgctgtggggcattgggatggtgattggtggtttagctgcgggttggcttgcagataaaaacctcaataaaactattgtgggcgtactcattagctcagcgatcgcatttgtagtcgcaagctttctaatgagtaatatctatagcgcaattggctctttattcttaattggcctaaccgttatgggtttaggtggggctttacagacacgcctcatggatgttgcaggtgatgcacaaacgctagcagcttcacttaaccattccgcctttaatcttgctaatgcattaggcgcttttttaggtggttgggtactgagccatcagatgggttggattgcaccaatctgggtaggttttgtactgagccttggtggccttattatcttactcattgcatttgctgtagaaaaagcaactcaaaaagcctga

SEQ ID NO: 50018 - DNA, 984 bp, Acinetobacter baumannii
atgcgaattttagcatggaagacagtacgtcggttcttctataataaccttcataatcatgattacgaaacggcagtaagtagatgtattaactactttttagttttcttaattattgggaatgtagttgctgtattactagaaacagtaaatgatctgtattacagctaccgtatatggtttgactactttgaaaatgtctcaattgcaattttcagtgttgaatatctcttacggctctggagtatagtcgagcgtgatccgacacaagctgcatggaagcaacgtttagcatggatgaaaagtggtgaagcactgattgacctcatggcaattttgcctgcgtatctaaatttctttgtacgaatagatcttcgtatgttaagaattttacgattacttcgactattaaaattaactcgctatttcatctcattgcaaatattgctatgtgtgattaagcgagaaaaaggttcctttcaggcagtgatttttattttaatcattatgattattatgactgcctctggtatttatgtcgttgagaataaagcgcaaccagaagcttttagctctattcctaaagcaatgtggtgggcggttgtgactttaactacagtcggatacggcgatgtcacaccagtaactagtttaggaaagttattgggagccttaattacaattctaggggtagggattgctgctttaccggctggtattttagcttctggtttggccaatgaacttaaccagcgtaatcagcgccttgaacaagagttccgtgagttacttcaagtgcgtggtattgatatcatgcatgatgaagttgaaatagaacgtattcgacaaaaagtagggctaccaaaagaacaagcgcataatctgattattcaaattatgcgcgaaaaagtattagaagagaaagaagctgttagagagaaaaaatgttattgcccgcactgtggtgaaaagttaacagattag

SEQ ID NO: 50019 - DNA, 600 bp, Acinetobacter baumannii
ttgagtttaattaaaaatatatgcattttattattaagttttttattggcatcatgcttatattctccatatactaagccagacgcaatttacgtatttagtgctgtcaccaaaactccagaaggtgttgtattttttaataaaaataaacgtcatcaaggaatgattttttataaaaaatcattatcactcctatataatcttggattattttctaaacttaattttaattttagaggttgttcagagtatgctgaaattacaagatgtgtgtggtctgcggatattgtattaaatcattcggaggctgcaagttatgggagcttgttattaaatgattattgggaagtagaagataaagagggactattttatatacgtactatagatgccgccaaacggtttaaacgattattaaatacaaaccagtcttatattaaatttttttatacggctccagatggaaattctgagaatgttggtagatttgtatctgccaagaatataaaaaataattatattgaaattatacctcagaaagttttaatttttaaaaaacctagcagggttagtcgcatacttcatgtcgatatgagataa

SEQ ID NO: 50020 - DNA, 951 bp, Acinetobacter baumannii; identical to SEQ ID NO: 46780

SEQ ID NO: 50021 - DNA, 1317 bp, Acinetobacter baumannii
atgtctgatctgataactgtcagagaatatgcatacattagcgttgtacatactggatgtcctgaatcaacgatagaccatgcttatatttcagcatctgcttttgaccatttatgtgaactttcggctacattttctaaacatggtgcaaaagtatttgaattagctgggcgtagaaagctcagactagatcaatatgttggagttatcgaaaccaagtgcggtacgcgtattgaaatattgcccaagcatgttgatatcaatcttaatgaatccaatgaaactgcgattgaaaaagaacgtgagctcttaaaaaagatgctcaaagtatctttacatttaccatatcgtgatgctgggcaggctagcctaagtcgttttaaacaacctatacatgagtggatcatagatcagtttctttgtaattttgaaaaactaattcaacgcggtttacgttttgattatcatcgtgtgcaagaagagcaaaagtacttgagaggacaattacagcatgtgaaacatatgcgacaatccccagcaagaaagcatattttcccgattgagcatgacatctatgaagttgatcgccctgagaataggttgattaaaacagcattagatgtcgtttgtaaaaaaacacgaaattctaaaaattggaaacttgctcaagagcttcgcttaatgactggggaaattccaaagagtcaaaatatagttcaagatttcaagcagtggcagtcagggcgtttactcgcactatatgcagagataaaaccatggactgagttgattttaagtgaatatatgcctgtatctactcaaggtggttggcgtgggatgagcttactatttcctatggaaaaactttttgagcattatgttgcttatcatttacgtcgtgagttaaaggagtgggatgtaaaaacacaagtatcgaatcaacatatttgtacttttaatgaaaaaccactttttagattgaaaccggatatttatattcagcacaagtgttccccgtacaaaattattttagataccaaatggaaattattagatcaaaatgatcggaatcgacgctttggattgaaagatagtgatgtgcaacaaatgtttgcctatagtcattattatttagaccatgccagtgaagtaattctaatttatccttatcagaaaaataaatttgaagatgaaatttgctttaaatttaatgttcaaaatgatcaagctatgctgagggttattccatttaatttagataagccatatgactttataaaatctatttcttcatcaaattttgagagtgagatttaa

SEQ ID NO: 50022 - DNA, 2538 bp, Acinetobacter baumannii; identical to SEQ ID NO: 46344

SEQ ID NO: 50023 - DNA, 3261 bp, Acinetobacter baumannii
atgagatcagatgcaactttagaaacgatttttcagaaagatattcttgaacaaatgcaaagccacggttggcaggtcggttcgccacaaggttacaaccgtgaaaaagccttatatgaacaagatgttttagactttgtgcaaaagactcaagccaaagaatggcaaaaatttaaaagtatatttccaaatgatactgaacgtcatttcttagacaccgtagtggcacagcttaaaaaagcggacattaacgccaccgatattgaatcccgcagttacgggactttgggcgtattgcgccatggactgaaaactcgtggtacacgtttttcattttgccagtttaaacctgaacatggtctaaacccacacttaaatgaaatttacaaacagaatatttgtcgtgttgtacctgaattagtatatagcccatatgccaacaaagccgaactcgaagcgacaggtaaacaagccaaaaaatggcgtatcgatttagtcctgtttattaatggctttccagtcgcaacgctagaactcaagtctgagtttaaacaagccgtgcaaaatgccatggcacaatataaaaaaacacgcctgccgaaagaccctgaaaccaacaagccagaaccattattaacctttaaacgtggtgcattggtgcattttgcggtgagccagtatgaagtctatatggcaacccatctgaatggtgacaatacttatttcttgccatttaacaaaggcaccaaagaacaaggtgcaggcaatgatgcacctgaagatgtgaatgaatatgccacaggttatttatggaatgaggttttaaccccagatagcttactgaatattattggtaactttattcacttacagattgaagaaaaagaagattgggaagggcgtaaatataaaaaagaaagcctgattttcccacgttatcaccaatggaaagtcgtgaccaaattagtcgaagactccttggcagaaggcacaggacaaaaatatctgatccagcacagtgcaggttccggtaaatctaattcaattgcatggaccgcacatcaactatctagcctatacgatgctaacaataaaaagatgttcgattcagtgattgtagtaactgaccgaacgattctcgatgcgcagttacaagatacgatttatcagtttgaacatgctgacggtgtggtcggacgaatcaacaataaagagggcgatggttccaaatctgagaaattggcaaaagcattggaaatggcgcagccaattattattgtgactattcaaactttccctttcgtacttgatgcaattgaaaatagtactagtttaaaagaacgcaaatatgctgtaattgctgatgaggcacattcttctcaaagtggtaagacatcagttgaactaaaaaaagtattaatgtctgatgaatttgatgaagataaatctacaaatgaaaaaatttcagaaacaatggcagctcgaattggtaattataatttaagttattatgcctttactgcaacgccaaaagataaaacgctacagctatttggacgtttgcccaatccaagtttaccaccatctaaaaccaataaacctgaagcttatcatgtctattcaatgcgccaagcaattgaggaaggctttattttggatgtcttaaaaaactatacaaactataaagtcatatataagttaaagcagaaaattgaagaaaaagacgatcaggtcgatgtaaaaaaagccaagattaaactaaatcaatgggtacgtttacatgaccataatatttctcaaaaagtacgtgtgatcattgagcattttaaaaagaatgtaatgggcctattgggtggccaagcaaaggcgatggtggtaacgagttcacgtaaagaagctgtacgctataagcaagcctttgataaatatgtggctgaacaaaattatgccaatattcaagcgatggtggcattttcaggtgaagtagaatttgctgaaaatgatgcggacagtcgtcatttacttgggcaaaaatttactgaaagcaatatgaatttgaacttgaaaggccgtgaaatgcgtaaggcatttgatagtgatgactttcaagtaatgattgtggcaaataagttccaaacaggttttgatcaaccaaaactttgtgcgatgtacgtcgataaaaaattaggtggcgtggaatgcgtacaaaccttatcacgcttaaatcgtatctatcctggtaaggcagagtccggcacatttgtactggatttctttaacgaaccgcaagatattttggatgcgttccaaccttattaccaaacagcagaactagcagacgtttctaatcctgatattgtctatgacttagctgaaaaacttaaagcagcacgtattttcttaatgaccgaagttgaacaatttgttgatgctttctatagcaaaaataaatccaatgctgcactcgccaatatctgtaaacctgcgatgcaacgttggcagcaaagctatacgaaagcaattaatgattatgatgtgacaaaaaatcgtttggaaattactaagcgaacaggcgaacccgttttaattgccaatgctgaaaatgaatttgccgaagcgaaaaaagcgcgtgatgcactcgaaatctttaaaaaggatttaggtagttttacgcgcttttatgagtttatgtcacagattgtagaatataatgataaagaacttgaaaaaatcagtttgtttgctcgtaacttacgaccgttattgcgtgagcaagcggctgatgaagatgtgattgatttaagtaatgttgctatgagtcattatcgactctctaagattcggcagcaggatatccaacttaaagccaatagtactgaacataaattagaaccagctaatgatttgggtacggcaaagccaaaaaataaaaatgaagaatttttatcagtcatcttgcagcgtgtaaatgaagtatttattactgataagctgacagatcaggacatgattaattatgtatatacggtagcagacaagatgtctgaaaacactaaaatgatgaagcaaattcaaaataatactcgtgaacaagcaatgttgggggagtttgatagtgctttagatgatgctgttttagatagtaatactgcacataatgaacaaactatgcagttgatgagcgatccctctaagatgcgccagtttgcgaatattatttatgatgtattagcaagcaaagagaataaatcggtaaattag

SEQ ID NO: 50024 - DNA, 2277 bp, Acinetobacter baumannii
atgacaaatacgaacttttctcaggttgctgcttttatttggtctgttgctgacctattacgaggagattttaagcagtcccaatatgggagagtaattttaccttttacattactacgtcgtttagaatgtgtgtttgagagtagtaaaaccagtgtcttagagacaaatgagaaagtgaaggcgatgcctttaccagaagaagcaaaagaaaaaatcttattaaaggcaacaaagggcctgtcattttttaatacctcagagcttgatttgagtagtttagggcaaaagaatattcgggcaaatctcggtaattacatccaacacttttcaaaagatgcgcgtgaaatctttgaacattttaagtttgatgaatttacgggtttattggatgatgcaaacttactttataaagtcattcagaaatttgcttcaaccgatttaagtccagaaaatatttctaatcatgatatgggcttagtatttgaagagcttattcgacgttttgctgaaagttcgaatgaaaccgcaggggagcactttactccacgtgatattgtacgactcaccactggcctcatttttagtcaagatgatgatgccttaaataaagagggtgtgattcgaacaatttatgacccaactgctgggacaggtggtttcttatcttcgggtacggaatatgtttatgagcataatcctgaagcagtgatgcgtgtttttggtcaggaacttaatccagagtcctatgctatttgtaaagcagatatgctaattaaaggacaagatgtccgtaatattaagctaggaaatacattatctaacgatcagctcacttatgaaaagtttgactatatgctgtcaaatccgccatttggtgtggactggaaaaagatcgaagatgaaattaaagatgagcacgaacaaaaaggctttaatggtcgttttggagctggtttaccccgtgtgtctgatggttcactgttattcttgatgcatttgattagcaagatgcgagatgtggatagcactggtcaaggcagccgaattggtatcatcttaaatggttcacctttgtttacagggagtgcaggcagtggtgaaagtgaaatccgccgttatattttagaagcggatttgcttgaagcgattatcgccttacctacagacatgttctataacacaggtattgcgacctatgtttgggtactcagtaataaaaaagatgctgaacgtaaaggcaaagtgcatttaattaatgcatcgaacctcagctcgaaaatgcgtaagtcacttggttcaaagcgtaactatctaacagaatcagaaattaggacaattacccaaaactacggagcgtttgaagcagtagatacactgactttagatggtgaaagtgaacagcaaaaaccattctcaagcaaaatttttaacagctatgagtttggctatcgccgtgtgaccattgaacgtccgttacgtttatcagcgcaattgtctgatgaccgaattgcaactttacgttttgcacctaagccatttaatgccgtgatgcaaaaagtctatgaaaactatggcaaagattggactgaaacaagctatgggcagttgagtgacgatgctcaagttgaaattcgtgctctgattaaagctgaatttagcgaactgaaagaaaaagatattaaaactgtacttgagccaaaactctggcttgaacaacgggctttaatgcgtaaagcacaaagcttacaaaccaagatcggtacagcacagtttgatgattttaatatctttgatgagctacttaaacaggctttaaaagatggcaatattaaactcgaagcgaaagagaaaaagcagttcttggatgcggtaacttggaagaatgttgaagctgaacctgtaattaataaagtcattaaagcacaagaaaacccgctatacggtcagtttaattacaagggtaaagtggttgagtttgttcaggatggcgatttgcgtgatgcagaaaatattgcgcttgatccaagccaaagcaccaccgatttaattgagtcttattttaagcgtgaagtacaaccacatgtagctgacgcatggatcaatgctgataaacgtgatgcacaggatggcgagattggcatagtcggttatgagattccatttaaccgtcatttttatgtgtatgagccgccgcgtgatttggcggagattgatgcagacttggatgcggtgagccgtgaaattatggcacttcttcaagaggtgcattcataa

SEQ ID NO: 50025 - DNA, 882 bp, Acinetobacter baumannii
atgaaaaaacttggtttagccactgctgtattattagccatgaccggtgctcatgcttatcaatttgaagttcaaggtcaatctgaatatgttgacacaactgcaaatgataaaaacttcactggtactgctcaaggtacttattacttcaaaaatgttgatgcatctaaaggtcctttagctgaagcagctttcttaaaccaagcatctaacgtttctgttgcttataactatatcaaatatgatgagaaagacactgtaaatgttgaatctcatacttatggtgttaaaggtgaagcataccttccaactccttacttaccagtttatgctagcgcatcttataaccacactatcaatgattttaaagatggcgtgagcgatgacaacggtgaccgttatgcattagaagctggtgcaatgttgttacctaacttcttagttgcagttggttatacaagcgttgctgatcaaatttctttagatgcgttcggtgttaacaaatacggaatcgctaaagcagttggtgaatcagttgctattgatgaaaaacaagatgctgtaactgctcgtactaaatatgttggcaacatcgatggcactaacatggctattggttttgaagcatttggtgtatttgctgaagacaacgcttacggtatgaaaactgaccttttcgtaactcctaagttaagtgttggtgcatcttttgcggatgtgtctgcatttaattctggttacgaccatgtttggggtggtcacactcaatacttcatcactcctgctgtagcagttggtgctgacttcgttaaagcaaatgcgaaagatggcaacccacgtgatacacaaactatcggcttaaatgctaaattccgtttctaa

SEQ ID NO: 50026 - DNA, 1398 bp, Acinetobacter baumannii
atgaaatttgaatttaaaaacttaggcccaattcatcaaggcgaaatagaacttgctgatttaacggtattgtgtggaaaaaataacacaggtaaaacatatgtaactaatgctctttattcattttttcaaaattggctggatttaatagattggagtttgcctgactctattgaagccgaaatacaccataaaggtattgcaagtattgatttagaaaaagatgtcattagtaacatagatactaaacaagctatgaaaaatttatcggaaaatttgtctaatttttttgcttgttctcctgacttatttaaaaatgttgaatttaatatccaatttgaaattaaggaagattggcaagaatatgaatttagctctaaaacaggaagtccttcaggagaggtatttttaactataaagaagccaaaaaatagtaaaatagctgaaattgcatggttggatagcgactcagctcctcctttatttcttttagatgaatatataaagaaaaacttatttgaagcctgttttaaaactacatttccggaagtctttattgcaagtgctgaacgtactggagcatcgatttttaggaacgagttaaactttaacaaaaatcagcttgttagcttgcttgctgaaatggaaaagaatggtaataaaaaatttaatccattcgatatcgcacgtagttttaaacgtacttatgctcagtctgtggagcataatgtagattttataagttacagaatagaaaatttagttaaaaaggggcaaagtgaatttattaaaaaaaatgcctatttattagctaaatttcaagaaattgctggaggggtttataaataccataaagatacaggagtttattttcaaccaaatggtgcaagaggagtaaaacttggtttaggagaggcttcaagtgctgtgcgttctttaatgattatttggttttggttaaatcatgttgctaaaccaaatagtttattaatgattgatgagcctgaattaaaccttcaccctgaaaatcaaagaaaattagctaaatttgttgcggccttagtcagtgcgggcgttagagtttttatgactactcatagtgattatattattcgggaattaaatactttggtaatgctcagttgtgataaacctcacattcaaaaagtacgtgataaatttaattatgatgataatgattttataaaaccagaaaatatagctgtttacaatacaacagaagatctttttgaagtggaaggttctagccgtcgtaaaaaaatgggcacaattgagcgttgggatgttgtagaacatgttggaattaaaattcagagttttgataaagaaattcgagaaatgaacaaagtacaagatgctcttcgttatggaatttag

SEQ ID NO: 50027 - DNA, 582 bp, Acinetobacter baumannii
atgccaatagaagaaatttttacttgcttaaaacgagaaattaatcctagtatttgttgtgttgcgaaacctgctgagaatggagttgaagttattttaactgagaaggttcggcgaactgatcctaatccacctgcattaaataaactaacattatttgggtttgatgaagttatttcgattaatcaagatcttgtaagagcttattatccaattttattgcccactaaaaaagcaattaataaaacttgtgatggaatattattggcagctattaaaggaaagctatattttttagtaactgaaatgaagtcttcattaagtaatatgaatgagcatattttaaaaatgcaagctggaaaaaatatggttagttacttgaagtgtattttatctgagtatctaggtattgatacatcttcttggaatacatactattgtatttttcatattgctgatcctaaacgtgaaacaaatgagtcattattaattagctgtgatcctaaataccctatgtatttttgtgttgagaataatgatcgtttttcagctctaaaattaattaatgaatctttaatttaa

SEQ ID NO: 50028 - DNA, 558 bp, Acinetobacter baumannii
atgaaaaaaacattagtcattgttacgcatcctcacatagtccagtctgtaattaataaaagatgggtagaggagttagaaaaatatcccgaccaatttaccgttcaccagatttatcaagcctacccagatggcgtaattgacgttgccaaagaacaagcgcttgtagaagaacacgaaaatttagtttttcaatttccagtgtattggtttaactgtccgccgcttttgaaacaatggcttgatgaagttttggcgtatggttgggcttacggttcaacaggtgataagcttaaaaataaaaaatttatgctggcggtgtctgcgggtgctcaagaaaaagtttattcagagcaaggcgaatataagctttcgttagaccaagtttttagttcttttcagctcactgctttatatgttggggcggactatcaaccacttcatgcattttatggtttagacactaacccttcagaagatgacgatgttccgactcatcaagacgtagcaaataatgcgattgagtacgttcagaagttgttagcgttgtctgagtga

SEQ ID NO: 50029 - DNA, 594 bp, Acinetobacter baumannii
atgaaaaaaattaaactttatactattgctttaggggtagctgttgctacgcaacttactggttgtctttcagtcaaatcttatgttgatcctgcttataaatctgttacctattcggatattaaaagaccagttcaacctattccagtggttttaactactgagttccagcgaaatggaacagttattccaaaagcaagtaaagaactacaatcagcagttgaacgtagtttaagagcaacaggtatattttctccaacagctcagccgaacggtgggacgcaggcaaaattatatgtaactgcaaataatgtggcggatttaggagaagctgcgggtaaaggagttttaactggcctgacttttggcgctgttggtaatgcaattgctgataaatatgaatttaaatttaactacgttgatgttcagggtaaacaaatatctcagcgttatccgcatatgattttaacaacggttggaaacaaaaaggcgcctattgaaaatgtgcaaccaatgtcgatcaacgaagcatttaataaagttgttgatgacgttgtgatccgtttttcttctgacttacaaaaacagcaataa

SEQ ID NO: 50030 - DNA, 735 bp, Acinetobacter baumannii
gtgcctttttatttggtttatagaataaatacttataaaataagagatgtaaaagtacagtattttattcctgctatgtgtgccaactttaagcctttaactcttgcccaattgcagcaacttcagttgcctgtggtcggctttagctatgccgatgaggtttatccgagtgggacaatgccattattattcaaatcaccgcaaggttttgaatggcgtgaagtcatgttcggtttggttcctaaatgggcagaagatacgaatatagcaaaacatacttataacgcccgtcatgaaacgattttccaaaaaccgagttttcaagaagctgctcttaaatgtaagttcggtgtgatacccgtcacggagttttatgagagtaaatatataaatgataaacctgagcggtggggcgtacgccgtaaagatgggcaggctttttttatcgcagcaatctatgaaatttgcaaaatgaatgaaacgattgtccgttctgcgagtatgttaaccatggatgcgattgatcatcccatgatgaaagacttccatgaaccgggtgatgttaaaagatcagtcattgtgattccacatgaccgcttagatgaatggttaagtttagaaacaccagatatttcaagctttattgaaggttttcctgttgaggagtttgaatgtttacatgttcctaaagagaagattataaaacctacacctcaattaagtatgtttgaataa

SEQ ID NO: 50031 - DNA, 465 bp, Acinetobacter baumannii
atgaaaaataatacactgaaaatgactacattatgtatgttgaccataggtataagtcaatttgcatcggctgaagtgacgcgtgcgacattaccattactcaaagcagagcaactcccagcatggtgcgattctaatttaaaaaaaaatcagcaagagatttctagttttgaaaaaacgcctgttaaaaacgatgctgccgctgctccgatattagccaagtgggataaaatttttgctcatcttgaagatttttcgggacccataggtctatatagtaatgtagacccagatgcgaaattacgtaaggcagcagaagactgtgaaatcaaaattaatcagtttcatactgatatatttcaaaattatataacgtcattaagaataccaaagcgactgatccgattgaccagaaataccgtcaagatattctggatcaatttgaagacacaggggttcagttag

SEQ ID NO: 50032 - DNA, 1785 bp, Acinetobacter baumannii
atgaacttgaaattaaaattttttaagctcgtcattttaagtctggctattacatcagttccttgtgcttacgcaattacgccagcgcaaccaaacaaaattttgcatgttgcctatgaggccccagatgatggtttcgatatggtcaaaaccaccaatttctatagtgctagtattgctgaggcaatttttgagcctttactcaaatatgactatctagcgcgtccattacagttagtacccaatactgtagaaagcctgcccaaagtggaacaagacggtaaagtttatatatttaagattaagccgggtatctattttaccaatgatccagcttttaaaggtaaacgccgtgagttggtagctgaagactacgtctatacaattaaacgcattttagaccctaaaaatagagcgccttctgtttcttttattgatggtaagttacaaggtgccgatacagttgtagctcaagcaaagaaaactggaaaatttgattatgctgctccgattgctggagttaaagctcttgatcgatacactctacaatttactttgactcgccaagactttaattttccttatattcttgcctatattacttttggtgctgttgctaaagaggttgttgactattacggtgaccgtattggtatgcatcccgtaggtactggtccttatatgttaagtaaatatgtaccgagaagtaaagtcgagttagttgctaatcctgattatcgtggttttgtctggaattttaagtcaacaggaacaccttgggataaccaacttgttaaggaaatgtctggaaagaaaatgccacaagttggcaaggtggtggtcagtattattgaagaagagcagtcacgatggttagcttttcagtctggacaactagactttgataaactcacagcgaatgctgttcctcaagctttagatggaaatcagcttaaagcttcttttaagaagagaggaattaagcactatccaaataaggatcctgagattacctatactatgatgaatatgcgggatccagtgatcggtggttttagcccagaaaaaatagcgcttcgtagagcaattactctgtcatacaatcaaaaagaaagcatacaacaagcttataaaagtcaggctgttagatcacaaatgtttatacctgaaggtgtaaacggatataaccctaaatataaaagtagcgtaggatataatccgctgttagcaaataaactacttgattattatggttataaaaaagcggctgatggctatcggaccttaccaaatggtaaacctttaattttaaaaatcaatacagaaaatagctcagcatcggttattcattcagaactctggaaaaaaaatctagatgcgattggcattcgagctgactttaaggtaagtaactttgcagataacttaaaagccgctactcaatgtaaatatatgatctggagcggtgcatggattgctgactatcctgaaggagataattttgcacaattactatatggaccaaatgctgggcagggaaaccatgcttgttatcagtctaaaacctatgatgctctttatactcaggccattcatttaccacctcaacaacggctcccatattacgaaaaacttaaccgtcagatagaagctgataatccttggattattcatgtaacacgaattcgtaattggttagtacagcctcaagttcaggggtttaaagctcacccaatgatgaatacaaactggcaatatcttgatatgacccctattaaaaaataa

SEQ ID NO: 50033 - DNA, 3831 bp, Acinetobacter baumannii
atgtccatcttaaagctcaaaccaatcactaaagacacagtattggttgcgatttattacatgattgatttcatgcattatcagagcaatattgctcgatttttccttcttataatccataagcaaatagaacttaacttgtctgtagcaaagcaagctttagcttttgcccgtcaagaaagtgactttccaaaattggatgaagttattgaagtcttatataacgaggctatcaaaaacattgatgaatcagttatccaacaccttaataacagttccagaaatgttattgaacagctagagactattgtcagtctttttgcttgcgataaagagctgaagccatacaccactaaaaagaataaaacattacaggttattggtcttaaaggcatcaaattaaccaaagctaaagagtttgacccctatgccttttattatcagggtgaaattcttgtacgctcaaaacatcttaaagctattccagactctcttctttcagaagatcagcaacttgtaaaaggattgttcttacatgtatcaaataccaattcagatgtggaatcagttggcgaatttcgtctcagatccagaggaccaattgtttctacaactggatcaggaaaagatgaacttgaggcttcagaagcagtcagaaatgatggagaagtttgggtactcagagacagtaatactggcttaccaaaaagtgatgatgcaagtttacttggcggccgaaatcctagaaatgaatcttcaaatggagatagtggaaccagtgctaaccggattaacagcagcggaagcagtgaactatctggtaagagatcatctcttaaacgagcaagagatcgatcaattatacaatctgctaaatcagttagagctgccatagatgaaaagctagatgctcaattaaaagcagataaggtagaaactatatggagtgatgcttcaaatattgacgaagctttgccatatctacaatctgcacagcgtggtgatgtttttaagactgaaaagcgcttaatagaggaaaatcagaaaggtattctttttactaatggcacaggtactggaaaaacctttactggtctgggtgtagcaaaacggtttatcaatgctggccttaagaatattttaattgttactctaaacgataaaatcgctaatgactttgtcaaaagctcaagccctttaaatatcaaggcttacaaattaaaaagtattaaagaaaatggcggtgaggatcactcagtcgtggtcacaacctttgctaattttggacaaaataaaagtttagttcacaaacattgggacctgatattaattgatgaggcacatactctatcgcaatcatccgatggtaaagcaactgcagcattaaacaaactaagagccttaaccgggcatttgcatggttttagtgaatggtttgaagataaatttgctgatcagatgccaattgaagagctcgatgaagatggtaaagaaacagaacaatacctaagtgcttataacaaaatgcagatccttcgaaatgaacaacgaaagatctggaatttgaattggaaacaccagaaaagtaaggtcaaagttgttttcttatctgctacgccatttagttatcacttttcacttgattgggcggaaggctatttatttgattatatgtctccttcagtatctgttgatgaccaaggtaatttagctgaaggctttagtaaggctcgagagcacttctatatgggaaatcttggatatcgaaagcgatatggtaagttgacccgacctgaagctaaggtagatacaggagtacttgaaagacagttcgctgaaaatcttaaaaacactggtgctatgtctgggcgggatttagaagtaaattttgactatgatcgtaaattcattctaattggctctcgtgttggtgaacttattgatgaaggtttaacttatcttcgcaatggttataaagaaatagaagggcacaaaacaagaacttttgaagaatgggctgctcagactggtaaaccaacaacaggctggggacgtcatgcatctatgcaagaatatgatcggctatttactggcaaccgatttaaaaaaatatacgaaattattgcaaaacgctttgattacttagcaagacgccgtttgttagaagctattaaagctgaagcttgtgttgatatggtgaaaaagcacttagcattaggtcgtaaagtagtaatttttcatgattataacgaaggcggtggttttgcacctttcttgattagtaagcttgatatcgaaaaatatgaaagcccacttagagaagatattgagcttgaatataatacattcaaagaaaatagaccggatctagtaaatctcaatcttgattatgattcacctgttgaaactttaaagaatgcatttcctaatgctcttttatttaatggccgtctttcaaagcaacaacgtgaaactaatgtagcgttatttaatactgatgatagcgggcacgatattctcattctgcagtcagatgctggttctactgggattagcttgcatgatacaactggtaaacaccagcgagtactcattaatattggtcaaccaacaaagccagccaagttgagacagacggaagggcgtatctatcgaactggacaagcatcaaatgctattcagagatacttgactactggtactgcatgggaacgggctgcatttgcagacacgattgctggacgcgcagaaacagtagataactttgcaaaaggtgctgatgctgtagtaagtatcaaagaagcgttaattcaggcttatgaagaagctaaatatgaagagccaagtctaaatgatggtattggcggtaaagcatatgatgaagaaaatgcccgtattgctaagttaaccccatttgatcaagcactaacattctactatgccaaaggcaaacgttctgaaagtcgtaataaccgcgaaggtaaggaatggtatgcaacgcctgaacctctaggattcaaaatgattgaatgggcaggggtacacactggcgattctgtgcttgagcctagtgctggtgatggagctattggtcgttttgttccgcaggatgtagagttgacaatgattgaaccgactgagtctttagctagtcgtgctcaaatggcaaatacaggtgctaaagtaattgttgatacattcgaatctttagaatcattaaataagtaccatgcgattgtgatgaatccgccatttggtcatgctggcactttggcaattcaacatatcaagaaggcttttggtcatctttatgatggtggtcggattgtggccttggtaccacgtggttcgatggattctaaagtggacgaatttattgatagtacacctggtgcaattctgacagctgaaatctggttgcctcaatcgacctttaaaaatgctggtaccgccgtttcaactcgtattatcattattgaaaaacatgcagactctaatgatgttccagcaacacgagaattagactttacgcaccttacaagtgtagaggatctattttcagaaattcgcgatatcgcaatgccacctaggaaactacgcattgacgagcagctagctaagtatgaactttatgttagaactgaacgtagcaagtacgttttcaatggcgatggcgttgataaacctcagatcaagaatatcatgctgaaattctggggttcagaagtaaatgagtttgatgagattgttatgccatataacaaatctgctgaaatcattaagaagattgatgagtttgagcaagagaataatattaatctagctgcttaa

SEQ ID NO: 50034 - DNA, 168 bp, Acinetobacter baumannii
atgaataagtttattcaaaaatattcgacacttgttgatatggaaaaagctccaactagcctgcaagaagatactaagcgtgccttatcttaccagccaatatatcttaaaaagctcagttcagacaaagactacttgggtcagttacagtgtatcaatttaaaatag

SEQ ID NO: 50035 - DNA, 162 bp, Acinetobacter baumannii
atgtctcagaatcaagataaatcaaaacagcagcctactcaacagaatccttcatcaggtcaacaagaacaggcacagataaagaacaatccacaagtacaaccacagcctcaacaaccaaatactcaacagccaaaagatcataacgatcagcttaaataa

SEQ ID NO: 50036 - DNA, 477 bp, Acinetobacter baumannii
atgatatgggttttcataataattataatatgggttatatatgtaatttttgaaattagaataaagaagcatagcagggtgcttgaactacctgaatttactttaaatatagctggaaaaatatactctgaaaagggtgaagagtacgagcatgaagtaatagttgcactctaccagaatgagctgaaaacggtgattggcatccagagtgaaaaacatatcaaggtagaaaggattgtaattttagcgatcgaagatgtagataaagtaggtgtatatttagatgctcttagaattgggtaccttgataaagatagtgcaagagaattttgcaattttataaaaacaaaaaaattatcgttgaatgatggctttgaagtagaagctataataatgggaaatttggaaggagatagatggttagttcaattaaatatgccttctaaacttcagaaatttagattcaaattgtactaa

SEQ ID NO: 50037 - DNA, 147 bp, Acinetobacter baumannii
atgctttgcgtacttaacaatactttctttgatggtgtaatggtaatggcggatgatactgacctaaaagcaaaccatttacatttattggctcagttacgtaacttgtttactgctgtggctgatgtgagtgtgttgcaggtttaa

SEQ ID NO: 50038 - DNA, 474 bp, Acinetobacter baumannii
atgaataccacttcaattaaaaaattttaccgtatagatgcttaccttgttctttgtcacatccttttgctggcatccggttatggtctatggaagctatatcctcatatacaaaccaaaccagatatgagcggcctgttctttatgattatctctattctaggcggttttgcagggctgattatgctagctataactttgcctcgtttagagcgttctgttcgtaatttatcagtgaacaaatttattttggctctgctgtattgggtttctagtaccattattttcgtgctatttggcatcagcaaattcttcttcaataatccgctagttttactggtttttgttttggtttttttcagcagtgtttatctttcggtgattcgccttgcagatatgcgtaaaaaagactggctgatcttaagcggaatttttggagctattgtgctgttcttctttttgccagagctttag

SEQ ID NO: 50039 - DNA, 624 bp, Acinetobacter baumannii
atgatttctttagagcttttcattacatttttaattactacaattatttttgcttatattccgggtccagcaatgctgtataccgctgcacagacgctttctcgtggtagaaaatctggtttgatggctgcatttggaattttcgtaggaggttgtttccatatcatagcggcgtctttaggcttaacgaccatctttcaaatcattccaaaactctatgatattattaaaattttaggtgctttgtatttagtttggttaggcattaaattaattagatcgacctcgtccccgactcttcagcaaaatgttgaaaatggtcagttatctttgaggcagagcattctggtcgaagttttaaaccctaaaaccgctattttttatatcgcttttttacctcaatttattaatacctcattagattttccagtttggtctcagttcatcattttagggctgattgtgaatctgatctttgtttctgctgatgtggtttgtgtgtttttagccaattacattagtcaaaaattaactaaatcgaagaagccccaaaaatctatgtcagtgatgggtggactcatttttatggggctaggcgtttttcttggctttaaaaatcagtag

SEQ ID NO: 50040 - DNA, 285 bp, Acinetobacter baumannii
atgaaacttcataaatttatattggttttaaaccttgtgttcggtgtttacagtattaccaatgatgatgccaatgctcagcaggaatttaaaagaatttgtttgtcaggtgaatacatgcaagccagttgtgattgtatttgccaacagcttgcacaggtgtattcatctcaaaccgtacaacgtttaaaacacaccagtttgcaaagtcctgttctcccacaggactttgcccctaacttgtttagcagcattcaacgctgtgacaaaactgaaatgggctaa

SEQ ID NO: 50041 - DNA, 786 bp, Acinetobacter baumannii
atgaatattacatacatcctacctaatactccttacaaatcaaggaatatctctaagaatctaaccaatatttattgtttacattgcaaaagtgaaataaaacatgaattcctagttggtctacaaacttatgaaagtactgaagatgatagctattatgctgaatatgacctattaaaatgtataaattgtgattctataacatatagaacagatttttattcaaattatgatatggaagaagtacctaatgaatttggaaaaaccgaatgggtaagaactacacgcccaaattattatcctacaagagataaagagctaggcaatataaatcatgttattgatcttctcccagattctattcaagacacatttaatgaagtcgttgttgctcttaataataagcttgaaattttatcaggtttaggattaagaacattgttagaacaaatatgtaaacactttattaaagatgatgatttaggggaaattttaaaaaattttgaaaatgaaggttatatctcaactaaacaaagagagttattagatgatattcgttatatcgggaacgatgctgctcatagggcagaaccaaatagtataaaaaaacataaacttagcttaaatattcttattaatcttattcagctcttatttgcatactataaatatgatgagccacaaaaaaaaattgagactggcgtccctcttagaagaagccctaaaggtgaaacgccaaaagtaagagaaactacgagtaaaagaaaacctcaaaaaaaactctag

SEQ ID NO: 50042 - DNA, 738 bp, Acinetobacter baumannii
ttggttataactgtttttacattgttttctatttatttaagcgcgggccgagagacaggagtagcttttttaatttctattttggttgtctatctttctgtttataaaaaaataccagtgttggcgacttctatattttcatttcttgcctttatgtatatattattcggaaaaacttttttatttgctttaaataatgaaaattttgataaagatgatttttttgaaaatgatttttggaaaactttatatgactcttataatattattgtctcagaatttagtcatcaatatttatctttaattaattttatgcaatatgagtataactttagatatttcggtgactatgtttattgggtatttaagccctttaagcttttaggttttgacattcctgattcaatttcatattttaatacgtatatagtttatggcgtttgggatagtgaaatacctccgggtgctgtagcttttggatatatacaattaggtattgtaggggttatatttcatggctttattttaggtatgttctttaggttttttgatattatgtttagggctaagaatcaagaaaatcctattttattgggtttttatgccttcatagttacttcttttacttatatgctctctaattctgacccagccttatttctgcaaaataggataccgaatatcttatttttaattctattattatgcttttttaaaacaaaaatagtgaggaagtaa

SEQ ID NO: 50043 - DNA, 1152 bp, Acinetobacter baumannii
atggataaaaaatttcttttaatttgcagttatctcccatcagttttgaattttcgtggaaaattacttcaagctattcaacgtcaaggttttgaaattcatattattgcacctgatttgagattatttaaaacagaacaacaggagttggaggctttaggttatcatatacatgaaataccaatgcaacgtaccggtactaatccaatcagtgaccttaaaacattatgggcaacatataggctgatacaaaaagtaaaaccagactatgtattatcctatactattaagcctgttatttatggaaccttagcggcatggctagccaaggtacctcatcgtttcgcgctgattactggacttggttatgcatttcagaatgtagaacaaggtagcagtcgcagtttttttcagaaacttgtgcatggactatatcaatatgctcttttacatagccataaagtcttctttcaaaatccagatgatcaacagttgttccgggaactaaatttaattgatcataataaaccagctgtagtagtaaatggttctggagtaaatgttcaggattttactgtggtagagccacctaaaagccattctgggcagcttaaagtatcgttcctacttattgcacgtttattagtagataagggggtaagagagtatgctgaagcagctaaacagattaagcagtcttatccagaaactgagtttcatttagttggatggattgacgaaaacccaacagcgattactcaacaagaattagatgagtggattgctgatggtagactaaattattggggcaaactttcggatgtgcgtcctgcaattgaagctagctctgtatatgtattaccttcttatcgtgagggaacacctcgaacagtattggaggcaatggcaatggggcgagctattatcacaaccaatgcgccaggctgtaaagaaaccgtaatccatggcgataatggttatttggttgaagtcagatctgttcaaagtctgttagaagcgatgacgaagttaattaacgctcctgagttgattgagaaaatgagcaaaaaatctcgtgaaattgccttaaataaatatgatgttgatgcagtcaataaacatatgctaacagaaatgggattactaaaatga

SEQ ID NO: 50044 - DNA, 609 bp, Acinetobacter baumannii
atgatcaaacgtttattagatattctgattgcctctactgcattattccttttatctccgttatatatttttgtcgcctataaagtaaaaaagaatttaggttcgccggtattgttccgtcaagttcgtcctggtttgcatggtaagccgtttgaaatgattaagtttcggacaatgaaagatgcaacagacacgcaaggtaatcatttaccagacagtgagcgtttaacaccatttggtaaaatgttgcgttctactagtctggatgaaatgcctgagctttggaatgttattaaaggtgatatgagtatagtagggccaaggcctttattgatggagtacttaccgctttataataaagaacaagcaaagcgtcatgatgtacgtccaggaatgactggacacgctcaagtcaatggtcgtaatgcaattagttgggaagaaaaatttaaactagatacgtggtacgttgaaaatagatcactttggttagactttaaaataatgctgcaaaccgttaaaaaagtaattgctaaagaggatattaatgaagctggcgaggcgacgatgacgaagtttacaggttcaaagtcggaagcagataaatga

SEQ ID NO: 50045 - DNA, 660 bp, Acinetobacter baumannii
atgaataatcaggtctatgctatttatggtgcttcaggctgtggtcgtagtttgatgcctgttgcaagacaacagcttcaacgtcaaggtatttcagctgaaatttattttattgatgatagtttacaagaagaaaaattagtaaatggccatagagctttaaactatcaatcttttaaatcaatagattgctcaaataagtatgtattaattgcgattgcgaatagtcagattcgtgaaaaaatcgcaaatcaattggttgttgatggtattaaactttggtccatacaagctgataacacagtaattatggataacgtagaaattagtgaaggcgcagccataagtccttttgtttcaattacatcaaacataaaaattggtaaatgttttcatgctaatttatacagttatgttgagcatgattgtgtgattggcgactatgtgacttttgcccctggcgttaaatgcaatggtaatattcacattaaagatcatgcctatattggtgctggagctgttattaaacaaggtacacccgataagcctttaataattggtaaaggtgctattgttggaatgggcgctgtagtaacgaaaagtgttcctgctggtgtaactgttgtaggtaatcctgcaagaattttagaaagaaagtaa

SEQ ID NO: 50046 - DNA, 1176 bp, Acinetobacter baumannii
atgttaaacactgcatttgaaccatggccaagttttacaacagaagaagctgacgcagtcaaaaatgtattactatcaaataaagtaaattattggaccggtcaagagtgtagaatttttgaaaaagaattcgctgagttttctgatacaaaatatgcggttgctttagcaaatggtaccgtggctctagatgtcgcattaaaagctttagatattggcgcgggtgatgatgttattgtgacgtctcgtacttttttagcttcagcaagttcgattgtaacagctggcgctaatcctgtttttgcagatgtagaattagattctcaaaatatttcacgtcgtactattgaggctgtaattacaccaaatactaaagccattatttgtgtacatttagctggttggatgtgtgatatggatccgattatgcaacttgctgccgagcatggtatatatgttattgaagactgcgcccaagctcatggagcaaaatataaaggtaaagcagcgggctctattggtcatattgcggcatggtcattttgccaagataaaattatgacaactggtggtgagggcggtatggtcaccacgaatgatgaagcgctttggaaaaaaatgtggtcttataaagatcatggtaaaagttacgacagtatttataataaacagcacccaccaggtttccgttggttacatgatacattcggtactaactggcgtatgatggaaatgcaagcagtgattggccgaattcagctaacccgtatggctgaatggactaaaaaacgtactgaaaatgcagaaaagattttaaaagcctttgacggctctcctttctttaatgttcatactccctctgtagattatgttcatgcatattataaatgctatgtccaagtgaatttagaagccttgccagatggttggtcacgagatcgcattatgcaagaaattaactctcaggaagtaccttgttttagtgggtcttgttctgaagtttatttagagcacgcatttgatggtacaccatggcgcccaaaaaagcgtttggaaaatgctcaaaaattaggtgaaactagtttaatgttcttggttcatccgactttgagtcaagacagtatagaaaaaacaattcttgcaattaatgctgttaatagagctttacaatcataa

SEQ ID NO: 50047 - DNA, 1875 bp, Acinetobacter baumannii
gtgaaaaagattatttatcagtttgcgtcagctcctcggcttacaaaacaatgttttttggttcttatcgacctgtttgctttccccattattttatggctgtgttatgccatccgattatttgatttaggtgctgaggttattccaggcattaactatggcgtggcgtttgttacaattttagccatcctaagcttaatgctaactggagtttatcggtttattgtccgtacttttaatgaagcctttattgctaaattagcgattgcggttacattgatggtcattgttttatatagcatgaatgctttttcacctgcatttgttccgacttcaattccattaatgtttggcttcttaatgtttagttgggtgtggtgtagtcgtgcatttattcgttttatcgtaaaagctacgttacagactggtgaagagcgtaaacgaattgcaatttacggtgctggtgatgctgggcagcaaattgcagcggtgctttatcgttctggtaatcatttgcccgtttttttcattgacgataatacatctttacaagaccatatggttggtggtttaaaagtactatctttagaaaaagctttacaacgttttgaaaaatataaaactgatgaaattttactagcattaccttcagtaggccgtgtacgtaaaagtgaaattattcaacaactagaacccgcacatctcaaaattactgaacttcctggtcttacacaacttgttgatggtgaactaaaagttgcagatattcgtgaagtagacattattgacttactgggacgtgaccctgtaccccctgtagatcatttacttgcaaaaaatatccataataagatcgttatggtcactggtgcaggtggatctattggttctgagttatgccgtcaaatagttaaaaatcagccaaaaatgttgattatttatgaaattacagagtttgcgctttatagtatagataaagaattacgtttagcggctcaatgtgaaattgttcctattttaggtacagtgcaagatcaacaaaaattagagcgtattattgagcaatatagtgttcagaccgtttatcatgcggctgcttataaacatgtacctttagttgagtgtaatccaattgcaggattaaagaataatgcgattggtactgcgaatagtctaaatgcagctgtgaaaaaaggtgtggaaacgtttgttctaatctcgacagataaagcagtacgtcctaccaatgtaatgggtgcatctaaacgtatggcagagctctattgtcaagcaatggctgaagcccaaaagcaaactcaaattagtatcgtccgttttggtaatgtattagggtcttctggctcagtagtgccgttatttaaacagcaaattgctaaaggtggtccaattactgtgactcatccagaagtaacacgctacttcatgactattcctgaagcatctcagttggttattcaagctggtgcgctaggtagaggtggtgatgtgtttttacttgatatgggtgaacccgttcgtattcaggatttagctcgccaaatgatttctttaagtggtttaactgtgcgtgaacaaggttcaatgcaaggggatatcgaaattcactatagtggattgcgtccgggtgaaaaactttacgaagaattattaattgatcaagaaaatactgaatataccgagcacagtagaattcttcgatcatttgaaaaattctatcctcttacagaaattcaagaagtttttgatcgaataaataatatgactgctgttcagcaagatattgattgggctctttgtcaactcgaacactatgttgatggttataaacgtagtaaagatattatggttaattag

SEQ ID NO: 50048 - DNA, 1494 bp, Acinetobacter baumannii
atgagtgagattaaactgatccctgttagtaaactactacttgatttggaaaatccaaggtttccagaagaggttactggacaacgagcagcaattaatttaatgctaaaaattcaggaagataaaattacaaatttggcaaaagatattgcagttaatggacttgacccatcagaaaaactaatggtttttgaaagtgatgatgagccgggcttttatgttgtggctgaagggaatagaagaacaactgctctcaaattgttagctaatccaaattccgctgatagtgagaagtttaaaaagatattcaataaaattaaagagtcagcaacaaattcaattagcaaggtaagttgcgttgtgtttgatgatgaaggatatgagcactgggtaaacttaaaacatacaggggataataaaggggttggcaggtcaagttggacaactccggaagctgatcgttatagagagaaacatggtaagacgtctattcaaaggcagttgtatgattttatggaacgacaagaagaagcatatgcagatatcttgatgaataaaaagtttgttcatgcaacgaacctaagccgtttatttggtgataagagaacaaaaagatgctttggtttaacgacaatggatggttatttgtatagtgcgttaccattcaatgagtttgtcagtaaattaaagaaaatacttgaagtaatgactgaggtatcagatggaaaaaatagtcctgacttcaatgtgaagagaatttataaaaaggaagatagggcagattttcttaatgagttgggatttgaccctgaacctcaattactacctcattcgtggaaacttgatgatcctaaagctgggtatgtcgataaagaccctcaacaagggaaagctgaagaagagttgccaaaaccgcaaggggaagtcgagaataaaggacaaaaaaataatgatgtaaaagatgatgaggttgatgagcctaataagccaaagataattaataagccgattccaaatacaaatcgtaatagcttagttccatccacattgaaattaaattttggtggagatatgaaatgttccaaaatcttttatgagttgaaaaataagttggggcacgatgaaacgccatattctttagctgtaatgctaagggtatttattgatttatctacgactgcatttatggagaagaagggtatcaaatatgtggatacaaaacagccgacaagaagtccaggattgcatgataaagtcgttgaatgttgtaagtatttaaaagagcaagggttgcttacacagccacaagtaaccgcgatatgtaccttttcaaaagataaattaaaggcggatggttcattacagcaatatgtccataatcaacacctgaagccttcgaaagacatcgttaacactgagtgggataattttcagccgttatttgagaaaatttggtcaactgagatgcaagttactaataaaggtggggcataa

SEQ ID NO: 50049 - DNA, 870 bp, Acinetobacter baumannii
atggccttctatagtccattacgatatcccggtggaaaagggaaactttcgtattatataaaagcacttattaaggaaaataatctttttgatgggcattatttagagccttatgctggtggggctggagtggctttagagttgctcatggaagagtatgtacgaaagattcatataaatgatattgatcctgctatttttagtttttggcattcagttctttatgagacagaggatctttgtcgactaattaatgatacacctgttgatatgacgacttggcatgagcaaaaagcagtattagccaatccagaccaacactcttctttgcaaataggtttcgcgacatttttccttaataggacgaatcgctctggaattttgaaggctggagtaattggaggtaaggagcagtcaggtcaatggaagttggatgttcgctaccaaaagaatgaacttttaaggcgaattaatgagatcgcaagctatcagtctagaattggactgtcgaatgttgatagtgctgagctaataaaaagtctacctcaaggacctcataataatactttggtttatcttgatcctccgtattatgctaaagggcaagacttatatagaaatttttacaatcatcaagatcatgttgaaatcatgagagcgcttaaaagctcatcgataaaaaattggattgtttcatacgataatgtcgatgctattcgagagatatacaaagattttagggtgctagaatattctttgcaatacactgctcagcagaagaaaattggtgaggaagtgatgatcttttccaatgatgtgttaattcctaatgttagacttggaaagtctattgatgtgtcggaagtttaa

SEQ ID NO: 50050 - DNA, 729 bp, Acinetobacter baumannii
atgtttggaaagtatgtattttatacaggttggttgttagcaaccttgagtttaagtgtatcggcatgtgcagataattcaaaagtgaattgtaatacaaataatgtttatggagatttaaaatgcttagagaaagaaaataaaaaattaattaatcagctggataataaaaaaaataaagaaagaaaagattataatcaatggataaaagaaataaaaaataaatgcgaaggtaagataagctatgcttctggagagggggctggtttaattaaaaatcagtgttatcgagaagagtatttgtctagactctcttttattaatacgggaaaagttaaaaaaagtgacacaaatattcatggtttagaattaacgtatttaccatataattcaaatgatcatcttaaatgtatcatgaaaaaagaagtaaatagttgttctaaagttaatttagttaaatcatctaatctaattaaatattatccatttatttcacctgcatatggcgatagcattgttctgcctgaaacagatgacagtaaacaaataattgtttctccttttgaagacaatgaagatgaaggtccacagttagaaatttctattattaatgcttttggtgtggtagaacaaaaaactatatctgcaaacaaaaatgtaataatcgataaaaactataatttaatttataaagaagggaataaagaaaaaatattaaaattaaaataa

SEQ ID NO: 50051 - DNA, 2148 bp, Acinetobacter baumannii
atgaataaaaaatcattagttacaatacaaatcttagatttatttggtagcccaatttcaaaagcacaatatgaagtaaaaaatcagagaacggggcaagttatcgctgctggaacaacaaactcatctggatgtattgttgaaatcagccgagataaaggaactgctttagatgtatatattaaaagtatgtttaaaggctcaatggttaaagtacaaagttttgtaatgtctaaagaccgaatggtcgtaaaaattacaagtcccaaagtacttttaaatttaaaaacattaacaaatcaaggtaataatgggcaatataaaagaaaaacacatattgttaaaaagggtgatacgctatttgaaatagcacaaaaaaatcatacgaccgttcgagtactagaacgtttaaataaaatagacgatccaaataagattagtattggacaagttattaaattaccagttcatattcctgcttctggaaatcattcacaccaagacaaacctaagcacaagcactcagctcaatctacaaataaacctactgcgagcagtacaaaaactaccccagctccagcagcaaaaaggccagctaatcctgcttctcaaacaaaacaagaaaatgggcttccagaaaaagcacatcaactttatgaagatactaaaaaagcattgaatgaagctgcaagttcagtttctaaaattttgactattgatgatcgtagtcaagatggaggtactcctaaagcaaatactacaaatatttgtaaaaccaatcctcaatgtatttccagtggtaaaagtgagttaatcagagaagttaatattcgtttagcaggttttggtggagcattaccaacagatgaatttacagaactgactgcaacatgtattagacaattccaacgggattatatgggggttccagacactgggaagatttgtggttctgttttagttgctttagatcaattttatgatgaataccccatttctagcttcatgggaaaagctgcatgtaattgtggtaagtgttctggttttggaaatggaaagatgggagtgcaatcaggtataaatactgctaatgaatatccaggtattcatagatctttaatctggatattaaaatccttaaatttttatttaaaaaatgaatttaaagataagaagattaatgtggcatatatagaatctggttatagatgcattgaaaataataagaaacatgagagaacatctgtaaaccatatggggctagctctggatatacattttcataaaaatggagttagaacacgagaattaagtgatatggaatttattcgaaaaaatattatggcaaaaaaaatgggggcatctgaacaaagaatcagggataaaatttatttagaacctaaagtctttagaagtggagaggctggtgcaacttcttgggtgcattttgatattacaatgtttctagctaaatattttaataataatatgtttaaaacaaaagtaagtgacttaaatggagttaaactagttaatcttgcggcttcgtcacgtattttaagttgtgggggcatagttgcattaccaaaatctcaaaataatataacagatgaactagtattaagtaatgaagatattatagacattatgaaagtaaccgaaactgaagttataaaatttaagacagaaaaatattttttagaacaagcggctggcgttgtcgatactattatgaatagaactaaatcaggagtatggggaaatagtgtaagaaaagttgtgaatgctgataggcaattttctaaaattactggaccgaagagtttggacccatatggtagcgttgaaaatatgcctatgtcgcatgtaagcagaaaagttagaaattttgttaatagttatcttttagagcgagctaacggaaaaaaatcaattattggagagaatctaaactatgcaaataaatattactcagatgaaaaaaacagaaaagcttgggtagataaatttcataatgaggcggtgaaaaatggtatgatacttggtacaggtaaagctatacatgcccacggaacggttcgagagttaagagataaaatgccaaaaccgtttaaaattgttctacctaaggatttcaaaggaatttaa

SEQ ID NO: 50052 - DNA, 195 bp, Acinetobacter baumannii
atgagtagagaagaattaatttattgtatcgaaaaatttatagataaaaatgatatctctatcaagaatacacaaagaatagaagttcttcttgatgacttaaattcagaggaagagataatagagagtatgtttctaattctagcgttatatgtcctaaaggtgatgagtacttgtatggtgaagatgaagtga

SEQ ID NO: 50053 - DNA, 732 bp, Acinetobacter baumannii
atgtatgcgaaaatatctagcgtgattctcttctgcattttaatttcggggtgtgccacaaatccagaaaagttacagacaccagttgaacttacttgtatcttccttaaagagcctctttcaactacagggctttatggtccactcaatgtggagtggaccacccgtctagaacggggaccatattggtcagaaaagatagatgaaaagggcacgttctttcgaggggcacctggtagtatttcaattcgaagtccagactatccatcaattccaggacaacctgcagcaactgatggtggcttttacttaccaaaagaccctaaggagccagtcaaaatttatcgctacttcacaacaaaggcagtacctgttgaagttccatctgacaatgtgacgtgtaatactctagcttatactaaagaacccgcatcccataaagttagtctagtatcctttgccacagctggcacagtaggaggtgttactggtgccataattggtaagaacttttcctcaggaaatatgagctacggtcaagctacaggagctggcgctgcagggggagcaattggtggattgattgttgctgctatcatcaacgctgaagtagggaaaatcattggtggtctaccaataaaggaatctagttttatggaaaagcttcgcgaacttggggcaaaacgcgagcctcttaaacaaatttctttactaccaccttctagtccataa

SEQ ID NO: 50054 - DNA, 1503 bp, Acinetobacter baumannii
atgggtaattttttcttattacaagcatttacggttgtatttgccttatcaattgcgaccaccatatttaataagcgtattttgggctttcctcaggctatcggtgtacctcttgtttctgcgatttttgtcttcattttgcaatggggagccagtcttttaaatggtaatcaattcattactatcaatattcataatattgaggaagcagtacgtcatatcgatttctatgattttttaattaatggtgttatttgctttattctgacgtcttcagcacttaaatttaaaatttcagatctaagaagctattggaaacagattagtattttggccactattgccttggtaatctgcgctgtattgtttggtagcttactttacggtttccaattgttagttgggcatcatgtaccaattttggttcttctattattaggtgcggcattgggtgcaacagacccgatcggtattaaaggtgttttaagttcaattcgtgctcctcatcatctcattgttaaattagaaggagaatctttatttaacgatgcgatgtgtattgccttatttatgacattactgaatgttttacagggtgaacatttttcattggttgcgacattagaagctttgctttatgaaattgtggtagctgttggtattgggtgggcatttgggataggtaccttacgcttattgcgtggtaaacacgaaatggaatccctgattttaacaactgccttacttgcaagcggagcatatttggtggctctattcgcccatgcttccgcaccgattgcctgtgtaattggtggtttaatcgtcggtaataaatggaaagaaattcgtgaagagcgtgagatcagagaggttaaccatttttggcatacagtagaagggattatcaattcattcttatttaccttaattggccttgagttatttattcttgatttaaactttagcctgattttaggtggaatagttgctttctttattctgcatatttctcgttttgcagcaaactttatgtcttttgctttcttcccaacaatgcgtaagaccaaaagttacaatggtagtttaactattttatcttggggtggtgttcgaggagggatttcactcgctttaattttggcggtcgcgaatattccggcgctgagtccttatagtagtattctgattggatatacctttattagcgtattgttatctggtgtagtgtgtggacttggccttcctgcggtaatgaatgcgttttattacaatcctaatgaagaaacggaagggcttaaaggcttttatcaaaagctatgccataaaatgaatcgccgtggctttcaatatatagttggagaagatgcattaggaagagaaacaattactatctttaacccagatgttattgttgatcaaaaaacagaagacgggattgcaaccatgcatgatccaaataagttacaagaagtaaaacgtttcgaaagtcccgataatttctaa

SEQ ID NO: 50055 - DNA, 1269 bp, Acinetobacter baumannii
atgaaatataaagggataatttctttatcattattaatgagtattactttgcagcaagccaaggctgaaagcgaagataactcggcgctaaatgaaaaaataattaaattacaacagcaaatagattatctcatggagaggcagaacttaaatcaaaataacggattgaataaagcacctgaattgagtccaaacaaaacatcaaacactgataagtctgtttcggctgatcagactaaaattaaattttatggaaatatacgggttgatgctgcatatgattttgaaggttcaacgcgttcaattgcgaataaaacagggtcaataccattagacaattcaaactcaagaagtaaatcattaaatgtttctgctgcgacttcacgtgtaggggtggatatcgttaagccgacctcgaagggagatttggttggaaagctagaagccgatttcatggggagtggtggagataacggtaatggttcgattcgggttagacacgcttatatttcactaggaaattggttgattggtcaaactacttcaccttttgtgaatagtgatacagctccaagtttggttgattttacaggtgcgatgggtacgggaactcagcgtaatatccaaatccgttatcaacacattgttgatgccaaacaaaaaatattagtcgctttggaaggcggtgatgttgaaaataaaaatgtagaaggtggaagtcgttttcctgcattaaccatgcgatatgaatttaagaatccagattttttggttcaattgcatggcatgcttcatgaaaatcgagcaatttctaatgcgaatgaggagcaaactaaacttgcttggggcgtcggattaggtacgaagtataacctttctgaaaatgactcagttgtgtttaattactatcacatagctggtgataatcgttatatgctttattcaaaagataatgatgccttctactttgatcaaaatcgaatgtatttaagtgaatttgattctgtcgagttggggtatatgcgtaaatggaatgaaaatttacgttcttctttgtccgctggtagcctcgtctacaaaaattcagatttttcagaaaataaccctgaacaaaataaaaggctaatcaatgcaagcgttaatttattttggacgcctgttgaaaaagtcgatcttggtgttgaatacacttacggtaagagagaaacattttcagatttagaagggaaattatctcgaatcaacttattaggtcgatataacttttaa

SEQ ID NO: 50056 - DNA, 879 bp, Acinetobacter baumannii
atggaaattaaagtactggtagatgtaaaaacaaaacttggagaatgcccaacttgggatgctgttcgccaacgcctattttgggtagatattgttgatggacgattattctgttgtgatgaattcggtgggaatatacgggcgtgggaagttcataaaaaaataggttcttttgctttacaagaaaattataacggcgcaattgttgcgctcgaagacgggctatatcaactcgactttgacacaggcaacttaaaatttatttgtaaccctgaaccagacctacctcaaaatagattaaatgatggtcgtgtcgatcggcaaggtcgattcgtttttggctctatgaaccgccttgaagatgggaatactgcgtctctctatcgattagatgcagattataaaatagaaaaattagaaaataatattaatacttcaaatagtatttgttggagtcctgatggtgctaagctctattttgcagacacatggcaaggtgaaatctggtcttatgattatgatcttgaaacaggccaaatctcaaataaaactattttttgtaagatagatacctcagacggtggttcagcagatggctcgactgtagatcgtgagggttatttatggaatgcaaaagtatattcgggtcagttagtacgttatcgtcctgatggacaaatcgatcgtattattgaaatgcctgtaaaaaaaattaccagtgcagtttttggtggaaaaaatcttgatgtcttgtttgttacatctatgtcgcaaccgcctcttccgaggttccctgatgacaaccaattgcgaggcagtgtttttgccatttatgggctaggcatccaaggaatagccgatgctcgatttatggggtaa

SEQ ID NO: 50057 - DNA, 462 bp, Acinetobacter baumannii
atgattttatatgtttgtagttatgttttaagaaaaccatttttttcagagaaaagagttgatctaaaagaaatcggttgggaaaaactatcaaatatagtcaagaaggttttttcttgtgggggaagcataattattcataaaacagatgctgactattctgaagagtctgagcgattagtatatagtgatattaatagctacagcatggtttgtgattctagatatggttatttatttggatgcagtattagtgaaaatgaggaatatcctgctggtacttatttacgccttgtaaacagaaaaactaaaaatcctgatgagatttatatttttgagccccatgaagatgaatggaaagcaaagtatgttaaccaagatttagagttagccttaaatttatttaaagatatttatgagtatggcgatttattagaagattcaaatattatgcttgagtag

SEQ ID NO: 50058 - DNA, 606 bp, Acinetobacter baumannii
atgagtaagcgtattattattgctggttctggctttgcaggtttatgggctgcactcgctgcacaaagagcaatccatttagcatcacaagaacaaaacattgaagtgctgatggtttcccctagtccaaatgtcgggattcgtcctcgtctttatgaggccgtgcttgaaaacatgaaccctgatatttcagagttattaagtgtggtgggagttaaatttctggcaggttgggtcaataaaattgatgtcaaccaacaaactatcgaagttgcaaccaccgatggcaacaaacaaaacttaagctatgaccgttttgttctggcaaccggaagtacgacttttatgccccctataccgggtctaaaagaatatggatttagcgtaaatacattagaagatgctgaaaaactagatcatcatcttaaaaacttagccactaaacctgcaaatgcagctcgtaatactgtagtcgttgctggtggtggtcttactgggttagaaaccgtgaccgaaatgcctgaacgtttgcgtagcattttaggtgaaactgatgtccgtgtggttttggttgattcctcgacagacattggtgcggatgggtga

SEQ ID NO: 50059 - DNA, 4800 bp, Acinetobacter baumannii
atgagaatactaataggttttgtatttagcttcttttgtttgattattcatgctggacaaatagattgggctgttgcaaaaacttcatttccgagtgatcaaagtattggtgatactgggcatgaaaagacacctaatggttatgtagatttaatgagtggtaatctaatttatgatactcctgaagtaatattaaaaggtgatagggggttagattttacactttctaagtcttacggaaaagtgaatagtggctttcgtgccatgggtaactgggaattggaagttcctagactagtaatgaatacgggaccatctactattctaaaaggagatatagatggaaatggaatttgtgaggccaacggagatgcaacaaacaattcctctgggcgacctagttttacagcatccttattaaatacttcatttaaaaataaaattgaagaatcatatgtaaaccaagtaaatttaaacttagcgaatcaaactttaaattcaattgtctacttacttggacagtttggaactgcaacaggggattcgaatgcccagtataataatcaacaggctcaatctgctctatcgaagttgcaagctcagctttacgatgcatttaaaacaaatgtaaatgcaatttctattagtagtgccgaggcaagtaccgaaaaaagtaaatataaacaaagtttaattaatactttgcaaacagggcaagtgaaaattcaggttaatggtatatccttgacaactggtaatattagttctgtgttagatgatttagctattaattctaattttactgtgaagacaaataacgtaatacttgacacagtgataagacaagttattgttggatacctctattatcataatataatagtagcaaagtctaatgaagtattgaatggaatttactcaacagtatcacttaatacatcttcatatgttgactcaagacaaagagtgattagtttatatcttccaggccaaaagaatattattttttatcccgttaatgagcgtgtaactggattccctaagtctgctaaatatgtatcccaagataactggtttattagctgtgcggaaagtggtaaagactttgttgtacgatctaataatggtgttacttactatttccctaattctaatcgagaaaatcaaacaggatttacttctttttttgcaaatgagtatattcctggaaaagtaactgtctatgcttcaaaaatagagaatcaatataaagaggcttatattttaaactattttagtaagcaggctaatactttaatttatagtgggtttaatacttctaataagttttttctaaaatctgttcaacatacattagatgataagcttataaattcaacctcaccagaaattagaattgattatgtaaaaagattagatacaacagaaaatacagatgaaagtcaatttgatagtgtaaaaggagatatcctcttaaagaaaatttcccgattcatcaatggtggctataaagattgggtttcttatacctattcatctggtgctaaagcaggtacgacttataagttaaatgattcaattctattaaatggtaatattggtagttttcaggatgaaaacgctgcgctcttttatttagatacagtaagttatatatctggagataaagtatcttatgcatatggagggccatatcgtattgtgggtaatataagtccatccgaaataggtggtataaccgcacaagattttctttggttttatagtgatttgacagcaattaagtattataagaactctaagagtggcttagttaatgctctctctgtggattggacttatgagttggtaaatagctcaagaccaggttttacagaagaaaagtcttttaaagttacaagttctaaatactctatagcgaatgctaattcatatgatgtgacttatagctatagccgagatgactctacacatgagcaaacaacagttgttactagcaaagattctgtaactggactttcaaaggtttatacttatgtaatgcatgcatttttaggtggtggtgctgagaacttcttacatgggcttttgaaaaaaattacgataggtgatcgagaagaaagttatacatggacaaccctatctctaattgggcaaaaacctaagactatagatgataactatactgattatgaggatgttcgtttagtccgtcttgctagtaaagcaattagtcattttggtgagtataaaactacctatagtaactttgaccaatatgggaatgcacaatcagtccagatgactggattgaatggttcaagtactgttcaatttccagcaacaacggctacatattttaatgctaatgctgcaagtgatgatgtaaatacaggaaatttaccttggattatcggattaccaaaaaaaaaaatatcaggtagttttacgttacaaactactgaatatgatgcacaaggagcaatacgtagtaatactcaagctggtcgtgttaccaaatataaatatgaaacggtatcattctcaacatgtcttggaaatttagcgagctttcaatggtcaaagtttgttagttgcttatcaaattatgtattaggtgatcaacatgtgggtttaccaattgaagttgatgttggaaatggtaaagaaattactcaatttgctggttacaaaaggggtattccaactcaagttaaacttgcaaatggggcgacagaaacaaatattgtagatgactttggaaatataactcaacatactgatgcagatggggttatttcaagaaaacaatatgatgatgctggccgattatatatagatacaccaattgttgggttaaattactctacattcacttatgatggtttaactgtttctagggttgtaactggtggcgggcaactgagccgaatagaaaaatataatggtgatggtttactgatttcgagtgaggataagatatcaaataaatctattattaactctaataagtatgatgcatttggaaacctgatatttaaatccaatcctggttttagtgctataacaagtggaactacaagcagttatgatgtctttgaccgcccaattactgtcaatgataatggaagtgttgtgacatattgctatcagtcctgtggaggaaaaactggtgcaattgtacaaacaacagatagctttggtacaagagaatctaatctattagcagcaggagattttagtgctgatttaaaaacactggttgcacgtaaaggtacagatggatcagtctttcagacaacaactgaatttgaaaacgcacttttaaaaccaaaagttgctgtatcgggtagttctacacaaagttatacatataactctaatacaactttagcaacagaaaaagataatagtattagtgggcaaaagacatttaaatatgatgatactggccgaattacttcaattacccatccagatagttcagtagaaacgatcaaatattttcaattaaaggacctcatcgcgtcccggacatggcgagaagttgagacaacttatagttattctcttgctgggcgtttaaaaacaacgactaatgcaaatattagtgaagcatttgatcttgatacatatggccgtgttataagtcatacacaaaaaatcaatgccaatgataccaataattcatatgtcgtaagatatggctataatcaattaaaccaagttacttcaattcaatatcctaatggtaaatctgtaaatttatctaatcagaatgctttaggggaagtaacatcaataccaaatgtaatacaaagtttgaattataatgcacggcaacaacttacaactgtgcaagccaataccgatactttatggtcatatacttataatgatagcgggttgctgaataatatctctgctacaagtctggaaaagtgtgtcctcaatgttgattatggttacgataaattgaaccgagttaataagctttcggacaaatgtggatcagtttataacgctacaattgaccgttatggtacaggtttgatgagtactgttgagttagatcaagcacgttatcaatatagttataataatgatgacattactaaagttaatatcacttcaaaaagctcgacagtagcaccagctatctatatatataactatgtaaataacacttctcgattagcaagcgtaagtggctcaacttatagctttacttatgatgcgatgggtaatgtaacaaatgatggtgtgcgtactctaacttatgataattatagtcgcctcaataagaatggtaatgagacctatctttataatgctgatggactaagagtccgtgctgtaagggatgatggtttaacagattatatttatgatcttgatggtaatttattatatgacataaattataaatctggttatagccgagcttatgtctatgtagcaggtaagctggtagcgactttagaacgctatcctgatgccaataaaggttttgactttgttaatgattttgaagctgccgaattaggattaacagatctattaggtagctatacagacactgataatgatggattacctgattatttagaacgttttattggatctgatcctaacaatcctgatacagatggagatggacacaaagatggttatgagtatcgcttattaggtgcgaaaggggtattgagctcttcagttaagccagatgttgctgatcctaatgaaaatcttgcagcatggatgactccaatattagccttgattctggaagatgactaa

SEQ ID NO: 50060 - DNA, 315 bp, Acinetobacter baumannii
atgttggaaaatttaattttaatagtttttctcggagtaactattggttgggtagttggtttatgttatgagaaagtatttgttctaacttatgggggaatggagaaagttttttttaaaattttctccattaacattttttttaaattaatttcattgcttttttcatgcttaataactcttttgttttttttaataggaatgttgtttttgccagttattcctgatgctctttggaataatttctatatctccttctttatgggaattgtagtgggtgtggcgatgaaaggcgtagtctttaaaaataaataa

SEQ ID NO: 50061 - DNA, 2031 bp, Acinetobacter baumannii
atgacaagttacgccaatttattaaaaccattacatttgggcttcacaaccattaaaaaccgtgtggtcatgggatctatgcatacgggattagaagaccgcttttttaattacccaaaactggcagcttattttgaagagcgtgccaaaggtggagttggtttgattgtgactggcggtatttctccgaaccgtcaaggatggttggctccggctggcggaaccatgaatagtttatttgatattccgcagcaccgtttggtgactcatgccgtccataaacatggttcaaaaattttgatgcaaattttgcatgcaggacgctatggttaccagccatttgtagtgtcttcgagtgcaataaaatcaccaatttcaccatttaaaccacgtcaactttctgaaaaaaatattctcagtacaattgaagattatgcacagtgtgccgacattgccaaaaaggcaggctacgacggcgttgaaattatggggtcggaaggatatctgattaaccagtttttaagtcgccatgtaaaccagcgtacagaccgttggggcggtgaaattgaaaaccgtatgcgttttcctgttgaaattgtcaaagcgatccgcgcaaaagttggcgaaaaatttattatctgtttccgtttatcgctgcttgaccttgtgcatgacggtaacactatgcaagaagtggttacggttgcgaaagctttagaaaaagcaggtgtcactttattaaatacgggtattggttggcatgaagcacgtgtgccgactattgtcacctcggtccctcgtgccgcgtttgttgattatacggctcatgtaaaacaacatatttcaattccggtaattgcgtctaaccgtattaatatgcctgaaactgctgaagagattttggcaactggcaaagcagatatgattcaaatggctcgccctttattggcggatgctttttgggtaaataaaactgcgaccaatcgtgtagatgaaattaatacgtgtattgcctgtaaccaagcatgtttagatcatgcatttaaaaataagcgtgtatcttgtttagtaaacccacgtgcaggccatgaaactgaattggtttatttaaaaaccaaacaaccaaagcgtatcgccgttgtaggtggtggtgtagccggtatgtctgctgcaactgttgctgcaagtcgtggtcatgcagtgaccctgtttgaagccaatgcagatgtaggtggtcaatttaactttgcaaaggttgtgccgggtaaagaagaatttcacgaaacgattcgctactttaaagtacaacttcaaaaaactggggtagatgttcgtttaaatactcgtgttaatcgtgaacaacttgaacgtgaaggttttgatgaggtgattgtggcgactggagtcgtgccgcgtgcattaaagattgaaggaagtaattcacctcaagttctttcttatgctcaagttttacagggcgctgaagttggacgaaaagttgcagtgattggggcaggtggtattggtttcgatgtctcagaatttttacttaaaccaccacatcaaccacagcctcaacctttagccgagtggcaacgtgagtggggtgtagacccagatccaaattatgtttctgaaggtggtatgcaaccaccagtagttgagccagcgatacgagaaatttatttgctgcaacgtaaaacaaccccactcggtattggtcttggcaagacttcggggtgggtacatcgtgcccagcttaaaaagcacggtgtacgcatgcttcgtggcgtgcaatataaagcagttaccgatgaagggctttggattgagcataatggtcaggaccagcttttacgtgtagataccgttgtggtgtgtgcggggcaagagtcggtaaaagacttgatgccaaaagaaggtgagtcgactatagcgaactaccatattattggtggtgcaaagctcgcagcagagctagatgcgaagcgcgcgattaaagaaggagcagaattggctgcccaactgtaa

SEQ ID NO: 50062 - DNA, 1542 bp, Acinetobacter baumannii
atgaaaaattataaaaaagcagtattagcattagctgtactagctgctatgcctctttttgccgatacagcaaatcaaagaatcgaagtaacaacttttgcagatgaagatggtgaaaaccctaatgcttgttcgttaagggaggcgataaaagttgctgaaacacgaagatctgattacggatgtacagtttataacacttctaaaagtcaggtcatccagctaaaagcaggaacttataacttaaataaagaactagctccaaatgcagatatagcgatttatggatttggtgaaaaagatcaagataaaaattggtcagagaagagtgttttaaccaatgattatccagcattacaaccgttacagacgagaattaatgctgctggtaaatcacgtatctttaatacggcagtaaataaacaacccttattccttcaaaacattattttggaaaatggttcagctccagattttggtggcgctatttatgcaggtggtaatgttaccttattaaatagccaaattttgaattcacaagcatctaaaggcggtgccattttcctcggtggcgataatgttaatttatctgcaactcactctttgattcaaggtaatactgcaacagcaggaagtgtactttcaatgagttgttggaatggtacagcctatgcaaaacgggaagtaacatttacctcttctagtattatgaataatggttcaaatagttccaataatacttttgagttctgtggagagccgaaagcaacctttacaattaatacaattgctcgaaatattgcaaatacagtcaatggtagcattttgaaatttactggtgatgctactcctaacgggacacctaatccttcgaccatacttagttctaacagtagtttaaccttaaagaataatactattgttgaaaataatgcttataccacgtttttatatgacacattaggaagtaaagaattaagatttaacttaattggttataattctggaatttatgcgtgtcattattttataggaccggccactgatttaaaaaatgctggtttcatactatcctttaatgcattaaatttaacgaatgatgctggaaaatgtgatttgccggcggaagctcttacatctacgcatcgaacggttgatatagcgggacaggcttttaatttattgcttgaacctttacattcatctgccccagaaactggctttttaccaatttactatccaaagaataatattggtggtaagaatttagtagatgtagacccagaaggtagagatacatgtacttctatagatcaacgaggcctatcacgacttgctgatagtaagctctactatcaaccaaataaccgtaatagttgtgatattggttcaattgaactaatgaaactgactgctggtgatataaaaggtttagggaatacttcccttacagatctacttgcaaaatatcaatcacaatatgatacggttcagaaaaatatattaaatccagattatgcatatttactctgtacacgataa

SEQ ID NO: 50063 - DNA, 729 bp, Acinetobacter baumannii
atgtttaaagatattctaagaagattcgcctttttatttgtatttttgccagcattgccagcaatatggtatggatgtcaatatgctttttatttaggacaaacagaagcaataggagcctcgcttgctgaagcaggtttaagcaattatgaagttactttttttggctctttaacgtttacagagattttatttgaatcctttgataaaattaaaatagctttccataaattaatattaatttttattaaagtcatatcttttttaacgttaatgtttatttcgttatggattggctaccacccatctcgtcgatatgaaattaaaagctttatttatttgaaatactctgctttgaaattttactatacctataattataaaacaccaaagccaattaagcttttagagtattactactttactatatttgttctttttttactcaccataggttttgcttttatacacaatgcatataaaaaaggtgagaaaaatattaaagaaaatttatatcaaatttacataaagaaagactattctttctcaggcactgttactgaaggtgataaaaaatataaagcatataaaatagtttgtggtaattacaaatgtattggtttagatcttgataacaatagaaatactaccttccttcctgaacaatacaaacaaaattttgattatcaaactttcaaggataaatttaaggaaaagaagagcagttga

SEQ ID NO: 50064 - DNA, 465 bp, Acinetobacter baumannii
atggcgcttaacttatcaaaaattaaagcagaagcaagtgaagataaaaaattggaggaaataactgctgaaaatcacaagaaaattactgacggagtagctaaacatagaaaggatttaaaagagtggtttatttctcttttcccaggggaaaatattgaatctgattatgtcgaaacatcagttttatttgatggcgattggaaagttactttagctctacaattaatgactaaagcacccgaaggcaatctagttcaagttaataccaaagcaaattttatgtttaaaaagactaaaaatgagcgaataatagcttcagccgcttttattgatgaaactgattatttaaatttagagccagaaagtaaggattacaaatatagctataccgttcaagatcaaacaaagtatttcacttttgctgaattagagcagttcgtccaatatgtaattgataaataa

SEQ ID NO: 50065 - DNA, 591 bp, Acinetobacter baumannii
atgataaaaacatttttatttataagtgttttaggtttttcgctaacaggttgtgtagctgtcccgatattagcaatgcaacatgggcagccaactcaaacattaaataatgcagcttatgataagcaaactcaatcaagactgcgtgtttactctcaatatgcaaatgtgaatacttatacgaatacaagttgtaatgaatggagtagtaagaaaattaaaaattattttaatagcgttatgaccagtttacctaataccgaaaccatttctgtaggtatgccagcaacaaaagatagtcaatcaattcttaagacacctcaaaaaggatggggacctaaactaacctttaaagaggttattttagaagcaaataaaccagtagttcttgatgctcgtcgtgtcgaaacaactgcaagatatacttgtcaagttgctgtaagttttacccctgaagctggaaatgactatgaagcttggtatagtgaaaataatgatacttgtagtataaaattcaataagattacggaaaataaaactgataatctctattctacgcaagactttgataatattagtatgtgtaaataa

SEQ ID NO: 50066 - DNA, 411 bp, Acinetobacter baumannii
atgaaagatttgccgattgatgtggccaaagcaatttatcggaaacagtactggattgaaccacgttttgatcaagtaaattctattagcttagcagtagcagaagaacttttagacactggtgtgaactgtggtatcaacttcgcaaaaccacttttacaacgtgctctaaacttgctgaataaccaaggtaaagccgggtatgcagatttgaaagttgatggcgtttatggctcaaatactttgggtgctctaaaaacctatttggccaagcgcgggaaagaaggcgagaaagtcctggtgcgagtcctcaacattatgcaaggtcagcgctacattgaaatctgtgagcgtaatccaaagcaggaacagtttttttatggctggatcgctaaccgaattttattatga

SEQ ID NO: 50067 - DNA, 138 bp, Acinetobacter baumannii
atgaacatcgaacaatatcttgatgatttaattgaacgtgaaggtggttacgtaaataatcctgccgatcgaggagggcaactaaacacggaattactgaagcagtatcacgtgcaaacggctataaaggcaatatga

SEQ ID NO: 50068 - DNA, 774 bp, Acinetobacter baumannii
gtgaaaaatataattttagcaacaataatgggcttcagtggaatcagtagtgtatttgctgagtgtacatatagctttgatgcaacattaacccagttgcaatcattaggtaatacttctgttcagaagttcccaactattacaggaaataagttttcttataagacttctcagcaaagtcccatttactcggcttacagtcaagattatctaacaagggcattagccacgaatgaccctcaagcttcactctatacgcgtggtgataaaatactacctacaaccggaattatagcttttgaatataaaattaaagttcctacactaggcaatacgggttatgtaaatattttcccagccttatctggtggaattatgcagaacggtaaggctgtacatttcatagttgcttaccaacatgggccgacaactaataatttttattttcaaactacatcaaatgatagtgcgttagttactaatggatttagtttagctccagaagttacttctgatggctatcagaaaattggtatctatattaatcagaactccaatcaagttggtttagtttttaatggggttaacaaaggctattttgcgacattcccttctaaactagataacctatatttttcattaacttcaaattattttgatttggcagcaactgatgcgaacaaagatgtctcggtcgagtttctgctggatcaatctaaaattacacaaacttatccaactggtactaaggatatttgcggagtcgctttgtaa

SEQ ID NO: 50069 - DNA, 390 bp, Acinetobacter baumannii
atggaaccagtttccactagcggttttacagcacttttaaaattatatgggattgcaatcatggtgactttagcagtcggtttggttgcagcagttgtattgatgacacgtatgccacgctcaccacaagagtgggcagtgggcttgatctgtacggttgtatcaagtttagctggcggttcattcattattgtgaagtgggggcttcatgaatgggttactgatgtatggggaatgattgcacttggtgggttcttctttgtttgtggtttacccggttgggctttagtccggtggatctttaacttcattgataagcaggaaggtaaaacgattgttgaagtgatcaaagaatttaagaaagccaaagatgatatacggaatagttaa

SEQ ID NO: 50070 - DNA, 987 bp, Acinetobacter baumannii
atgaatcctaagtatctaattcttattacatctgtattttgctcaatgtcctcctatgcacaaagttttgagttaaattcagacattacagatgaacttaatacagcactgaaaaataataagaatgtaacaattcctcctggtgactacaaagttgatgctcttaaatcaattaagccccaaaatggttctgttataactatgtcagaaaatacgagattgaatgtcattccaaataaaagcggagcctataaagtatttgatatttctaatgtaaaaaacgtaacaatcacgggaggcgaacttatcggtgacaaatattcgcatttgaataaatatggcgaatggggaatgggcattgatattcgtgattctcaaaatattaggatttcaaatatgaaaatttcaaaaatgtggggggatgcaatctacttagggaacaacaacaacttttcaaactctgatattgtcttatcaaatatcatcatgaatgataatagaagacaaggcgtctccgtaattacagctaaaaatttgaatgcaaacaatctaacaattaagaatacctccggtactggacctgcgagcggtattgctattgagccaaataacaataaatcgcatttagaaaacttaacttttaaaaatattactacagaaaataataagggagctggaatacaaataacactgaagttttataagaaccctaaaaacccagttagtatttctgttattaatcataaagataaccgatctacttttggatcgattgtaaatggtattgatagtacacaagcaggtcaaatcaacttcaacaaattagcttataaaaataactccaactcaaatacgtgttttagtaattggtcaaataccaaatttaatattaaatttactgaagcaactttagatggctctaaaggtgtaagtgagtggtgtcacgatgttagtaaaaataaaagaattttagtgcaaaaaaattaa

SEQ ID NO: 50071 - DNA, 999 bp, Acinetobacter baumannii
atgatcgggactatttatggatctgcacgttatgggcagcttgttacaccaattgatgcagatgattcgactttacaggttgagttaaatacagcgagccagattttcagtggaaccttagaagatgctcaagccgaccagacactttgtaaagtgggggatgagtattttaattatcaagtggccacattaaacggatctggtttatataccttaagtgatgttctacgtggacgctttgatgatgcacaaagccataatgctggtgagccatttgttcgtttggataaagctatattcaaatatccatacaatgacggtttagtagaaaaacagatctttttaaagttcaccagctttaatggtttggaacgtaaggagcaggccttagatgaggttacggcgtatagctatactctaagtggcggacgtccagcaggtgttaaaggtctttcgcttcaatctccgtttgtggggactacttttaaagttcaatggcaaacttcaactggtgcggatggctatcgtgtacaagtctggtcgaatggggcaatgattcgtcaagttgatacaaccaatacggattatagttattcgatcgaagaggccaagcaagatggtttaggccgagcttacacaattcgagtggccagcaaaaatggtgatcaagttagtacctttgctgaattgagtattagtaatcccgttccgccagtacttctcaatgtgtacacagcagcaactgtagattctattactgtgaattgggcacctagtgaagtacctgatctgaaagagtatgctgtatggctaagcgctacacctaactttgatccaactcaagtgccgccatcatggactggtacagaaacaactacaacttttggaggactacaaccaactaccccatattacattcgtgttgctgcacgtgatgtatgggaaaacacagtctggaactatacaaatcagattactcaaagtacttctgaagcttaa

SEQ ID NO: 50072 - DNA, 492 bp, Acinetobacter baumannii
atgtcaaaacaattagaacagatgaaaatccgcctatcggccgttgcacatggggtgcaaatcgctgtaggtgatgcctttaatttagataactttgccaagttgctgctaaagcttgaatcaattgatgaaatgacaccgcaacttgccgaagctcaagcatacgccaagtatttaccaatcgaaggtttggaaggtgcggttattggttcagcaagtgtcttgcagcgtaaaaaaggtgtagggcgtggtaagcgattctcaggtcaaggtaatgacgtgccattagcagaagtgatgtatgactctcaagcgtcaaatggttatcagggcggaaatgaagagccgggtaatgtgaatgcaccatctatatttgagccaccgctggatcttacggatggcaagaataagtatgggttgctatttctggtggggctaattggggcggctgtaacgtctgggctagccttgataatacgacctatgaaatga

SEQ ID NO: 50073 - DNA, 471 bp, Acinetobacter baumannii
atgtctttaacccctcaagctattccgggtatgcgtgctcgtttgcacatgcccgaagaaatcttatctttaccagtcgcgggtaataccgtgttaagtgacggtgaagtggtggttcagtccactgatggcaaaactgttactgcggtaactggtgctactaatacaaagtttggtgtggtggttttacagcacgtcggcaaatcaggaaaaaatgccttaggtaaagaagcatatcaagcgaaagactgtgcaccgatcatgcaaattggttctatctgggtaaagccaaccgcacctgtgattgatattaacgcaaaggtatatgtgcgtattgccaaccctacagcgcaagcgccgcttggatcactttcttctgcagcattagattcgacagaactacctaatgcctcatgggaaactattacgggtccagatggcttggcaatccttcgattacgtggagcataa

SEQ ID NO: 50074 - DNA, 1200 bp, Acinetobacter baumannii
atgaaagacatttaccgcttcaaggtaggtgactttgctccaagtgaatccacacgctcatttacaccggaaggttatttgaaatgcgtaaacgttcgcttgggtaaagcacctcaggtacgccagtactatgcatatgagtttccaaacttagaaggcttttcagcagatcagacgattaacgtctacacacctgcagaagagctttttaagcctaaccctatcaaaagttgggatggggcagacgctacagattatcacccacctaagaatgaaattaatgctgccaattggaaggaatatcacattggctattgtgagaatgtccgccaagaaggcgaatatctagtgggcgatttgctcattaaagataaagacagcattgatttaatccagaacaacgagcgattagaaatgtcgctgggttatggagccacattagttctagaacagggccttgcaccagacggcacagtgtatcaagcaaaatttattaactttattggcaatcatgtagcactcgttaaatatggccgttgtggtggtgattgccgcatcggtgacaaacagcaaactccaccaaaggggaataaaacaatggaagtaattgtaaacggtatccgttttaacatcggcgataacacgcctttggccgatgcattaaagcagcaacaagagcagctggaaaacatgaaggctgcaaaacttaaagttggtgataagcaattttctatcggtgatgagcttggagcaattcaagcggtcgtagatcaattgcataccgataaaacaactcttgagcagaaagttggtgatctggaaaagaaccagatgactcctgaaaagcttgaacaagctgctgctgaacgtacagctgtcattgccgatgctaaagcattggtgccaacagttaaaaccgaaggctgcacatgtgagcaaatcaagcgtgatgtaattgcggctaaagcgggtgatgcgttggtaactgccttattaggtagcgtatcggtaggtgatgccaagcctgatcagatcgatacaactttccgcgctttgtctgccgtgaagggaacacacccatctaatcctgtaggtgatgcacttcataagcaacaaaacattcaagcaggagatggtaaaccagaggatggggaacctaaacctaacaacaaaaaagaagcgtggaaacaaagcttctaa

SEQ ID NO: 50075 - DNA, 633 bp, Acinetobacter baumannii
atggcaaaaactccacaaacaagagaagagcttaaaaagcatcttcgtgaaaatttagcatttctcaatgtatcaaataaatcgtttgatgagggattgcatgcagaagcgaagaggcttgctacaactattcgtgtattagtacatgacacacttaaatcaaaatctttattagagcaattaggtgtaaaaaatgatttaaagtttttaaacacatcttatgaatatagtcctactaatttgatgccacatacgggtttagttatgatgcgcatgacttctaatggtacaagctatctggctcccttacatgatggtccaccagacaggtatacacaacctggattggaatttagtcagtggtgggatcagcttgttattgatgataaaagtggtggagtttttactagaaaaaatctaattctatttatggcaaatcaagatggtggtgcccatgtagatccatcactcgattcttcatatgctgcactaaagcgcgataatagcgttggctgggtttatagtgatggaatatctgaacatcctattactgatattgaattgcatagtgttcggcaaattgcatatgaacttattgagactttaaagccactagatatcaatagcctttaa

SEQ ID NO: 50076 - DNA, 189 bp, Acinetobacter baumannii
atgagtaaatttaaagctggtgatgttgttgagttaaactctggcggcccggtaatgacaatcttggaagttaaaaataatggatgggttgtatgtgaatggtttgataaaaatcacacttataataaaaaagaatttttggaatcgaatatagatacctacgaaatgttagaggcatttaccatttga

SEQ ID NO: 50077 - DNA, 813 bp, Acinetobacter baumannii
atgtcggcgatcattcagatgctgaaacctcacctccagcaggcgaagaagagtaagaaaggccgtaaggcttccaaacctagacccgtaaaagtaaatcgccgtgtagagctttattacacacggcaattactggctatttcaaaatattgtcaggaaaaaacaaaggaattagttattcctacggttggccagaatattggtgatgcttggttttccgacatgatgacttcgtttcgagagaagctgacaaagtatgttgttgagatttctaggcctctagctacaaaggttgtgactgacacacaaaaggaagtggacaaacaaattgcagagcacaccaaaacgattattggtgtggatctcacgccgttctatcgtgctgcagatattcaggacgaagtagatctcaacataacttcaaacgttagtttgattaagtctattcctcagcaatatgcagacaagttagagaacttggtaacgaatgctttgcagactggacaaactaatgaagatctcgctaaagagattaaggcattagggcagtctacagattttcgtgcacggcttattgctagtgaccagatgggcaagatcaatggacagatcaacaaagccagacagctttcaatgggtgttgagacatatacatggcaaacggctaaagatgagcgtgtacgtccagatcatcaacataagcaaggtcaaacctttagatgggattcaccaccagctggcgggcatcctggtcagcctattcgttgtcgttgcactgccttacctaattatgaggatattttgatcacttaa

SEQ ID NO: 50078 - DNA, 1335 bp, Acinetobacter baumannii
atggctgaaactaaaaagcccgatgcaattggcgatgcaggggcatacacaaactttgtctcaaatattggtaccagccgtgataaggcttcacatggtcattttgttcaaaaggaaattcctgatgatcaactggaagctgtatatcaacactggttggccaaacgtattgtgaaccgtccagcaagtgacatgttgcgggctggttggttttatgagggaattcaagatagagacctaatcaaactagaagaggcgtgtaaggcttttcaactgaaccagatacttttatcaagcttgatcttatcgcgtctatatggcgtggtttatgtgctgttagggaccgtagatggcggtaatttggagcagccatttgatttaaagaaattaggagtaggtcgtttagagttctttacggtactcaagaaaaagtacattaagccagataccacgacgtatttatcacctaaggtctgtggcggtttattaaagcaacctgagttctataaactacaaatggatggcaaggcaccccaacgtattcaccatagccgtttaatcaaattctgccatgccgatgtagtgaatgaagagccgcaaagtattcttcaggaagtatatgaagatctgctagaccatgccgccgttaaaaagggttcagccagtcttgtccatgaatcaaaaattgatgtgattaaaacacctggtctagtggacaaaatcaaagaggatatgaaagccgtagcagaacgttttcttagtgtcggattgcttaaaggtttaaacggcatgatcgtgctggatgctgaagaagattacgactccaagacttataactttgctggcttaccggacatgatgcgggaattctcaattcaaactgcgggtgctgctgatattccatacaccatcctattcggtcaatcacctgcaggtatgaatgctacaggtgagcacgacacacggaactattacgacagcatagcgactaagcaaacatggatgcttaaacctttcatgatgcagattttagatgtcatttgccagactacattcggccgcgtgttcccaaatctggatattgtctttaatccattatggcagttggatgcgaaggtccgttcagaggttgagaaagctaattcagaacgagatgccaagtatttagagatgggcattattacagaaccacagatagcacggcagttactcattgacggcgtttattcagtgattgatgaagctcatatcaaagagctagaaataatggtgaagttaaatgtcggcgatcattcagatgctgaaacctcacctccagcaggcgaagaagagtaa

SEQ ID NO: 50079 - DNA, 1491 bp, Acinetobacter baumannii
atgaactcaaaggtaaatactaagctgctagaaatgcagttagagcgagaactctgtgagaaagaacatttattctttacacgtcgttttttcttgcctcgtatgggttttaagttttcagtcaattggcatcatgaatatattgccgacaagattgacgaggtaattgcgggcaaggttaaaaacctagttattaacgttcctcccggaagcggtaaaactgaattactaacaaaccttattgcacgtggcatagcgcgtaatgctcgatcccgctttctgtatttgtcattctcacagtcacttgtagaggatgtatcagctacagctagaaatattgttaagtcggaagactttcagaacttatggcctgtaaagatttctaccagtacggatgctaagtcgagctggaaaaccaccgttgatggttatgatgctggtcatgtttattctgcttcaatgggtgggcaggtcactggtcgccgtgctggtacattagctaatgagggctttaccggtgcgattattctggatgacccattaaagcctgaggatgcatttagccaaacagctagacgtaaagctaaatctgacacgccaattattctgatcatgcaacggttgcacgttgaagatccgaccaactttgtgctgacgggaaatgtgcctggtgaatgggaacagatcagtattcccgcgcttatcgatgatgagtacatcagtaagctaccagagcacatacagcgcaaaattccacgtgatgttgaacgtgatgagaaaggcagacaaagctattggccgttaaaagaatctttactttctttgcttcagctggagaaaggtggggaagataaagacggcgccacagtgtcacgctacacctttgctagccaatacatgcaaaaccctaaaaagctaggtggtgatcttgttaaggctgaatggttcggtcgttatgaggaattaccacttcttaaatggcgggcaatttgggcagatacagcgcaaaagacaaaagagcataacgacttctctgtgttcttatgtgctggtcttggctatgacaataacctttacatcattgatgtgaagcgcggcaaatgggaagcacctgaactattgaaagaagctaaggcctttatcaataagcataaggacagcaataccaagatcggcaaactacgctatatggccgtagaggataaatcgagtggtacaggattgatccaatccatatctagacaaaccacattacctattcgggcaattcagcgtgatacagacaagctcacacgaaccatggatgtagtgttctacgttgaagagcgccgtgtctggttgccagcagaagcaccatggcttttgaactacattgaagaaattgaagggctcacggctgacatgtcacatgaccatgacgaccaatgggacccgaccattgatgcaattaatgactcattagccaagaagccaactgtatttgatgattag

SEQ ID NO: 50080 - DNA, 483 bp, Acinetobacter baumannii
atggcaaggctaaataaacgggtaaaactctatatagtacggtcacttgctacctatgagacaccctcagaaacagcgaggggcgtccaagaagaatttggtatcgaagttactaaacagcagtgtgaagcatacgacccgacaaagaagactgggcaggacctaagcgaagagtttaaggctgagttttacagagtccgcaaggaaatgaacgacaaccttagtgctattccaatcgctaacattgcataccgtcttaaacgcttacaacgattcattgacctagaacaatttaaagaaaaccctgtcattgtaccgagcttaatggaacaggcggctaaagaggtcggtgggctttatacgaatcgaaaggaaataaccggtgctggtggtggaccactccaaagcgagaacataacccaagttgttgcaacgcctgaacagatacggcaggtgttagatgaactcaaaggtaaatactaa

SEQ ID NO: 50081 - DNA, 453 bp, Acinetobacter baumannii
gtgatatgggctaaatttggttttaaaaagcaaggccgtcaaatcattggcacaactgaaaagctcatgatcaatgctggtagttggaagaaagagcgacaagaagaacaattcattgaatggtttgaatacatctccgaatatctcatcacttttgatgcttcatattcacagattgctagtgttgttaacttttgtgtcttagttgagcatgagctttatcacattgcgtataagaaagatgagtggggaacatctgcatataaccaagaaacaggtgtgcctaaattagctatacaaaagcatgatgttgaagagtttactggcgttgtacgtagatatggtgcaagtgaggacgtcaaaagaatggtcgaagcagctaatacaagacctgagatgtcgcgagcagatgttcactacgcatgtggcacttattacttgaaggtggtttaa

SEQ ID NO: 50082 - DNA, 345 bp, Acinetobacter baumannii
atgaatgaaaatgcagaacttataaagtacattgatgtcgctgaaagtgtttatgagcgggtatacgaaaataaccaaatttctaacagcttggttgttaacttaaatcgtgtaatggacgaaataaaaaaacaagctaaagaaaaaaatttgaagttgaaatatccttctattgattttgaatattgtttaagtctgcctttagcagatagagatgtaaaagtagatttaagtttgattcctcattttgagtatcgtgatgaatgtattttgtggctaacaaactttattggaaaaattagtgtgcctcaaaagatgaataggcaacgattaaactctcgttaa

SEQ ID NO: 50083 - DNA, 459 bp, Acinetobacter baumannii
atgcccagatatttagctatcgccgatacggtatataaaaagattaaaaatgaaaaattatttacggaagacatgattgaaaatttaaactgcctgattagcttgatccgacaagctatcaaaggaactgaatttaaacttaaacatgactacatcaatttcgaagagtgtcttacaaagcctttagctgattgtacggtcaaactagatctgtcgcttatgcctaattttaaaaatgaggatgagtttgttttatggctagctggttttattgaaaaaattacaattggcggaaaacctaaatttccacctatatctcaaatgattccaaaagactttgtatttactaaggaaacctttccagtaacaccaacccctaaaaaagaagaaaatgctgaaatgataattaattattttaaatcagaagattaccttaaaaaaacaaaaatatcttcgtga

SEQ ID NO: 50084 - DNA, 279 bp, Acinetobacter baumannii
atgtcaaatgtgggaaatatacaccgtgaaagtaagaattgttcattagtcgcaaagatagtaatgatattgggagtaatttggggaattgcatttatagttgcttttggtcaagttgaaacccgaaatgaatatcttgagatcattaatgtttggtcaacaaagatgatagttataggctgtttaattattctgaatggcttaggtttaggttatttaattctcaagattagttgtattttaaggaatcaagaaattctattaaatgaaaaaagatag

SEQ ID NO: 50085 - DNA, 1779 bp, Acinetobacter baumannii
atgatgcgaactcattactgtggctctttaactgaagcccaaatcgaccagaccgttacattatgcggttgggtacatcgtcgccgtgaccatggcggtgttattttccttgatatgcgtgaccgtgatggtctcgttcaagtggttattgacccagatactccagaagcatttgcaactgcagataaagcacgttctgaatatgtattaaaaattacaggtcgtgttcgtcgccgttatgaaggtactgaaaacccaaatatggtgagtggtcaaatcgaagttttaggcaaagaaatcgaagttcttgctgcatctgaaactccaccattcccattaaatgatgacactattaacgtgtcagaagaacaccgtttaaaatatcgtttcttggacatccgtcgtccagaaatgttagagcgtttacgcttccgttctaaagtaaccaacttgattcgtaactatttagacgatcatggtttcttagacgttgaaactccgattttaacccgtgcaacccctgaaggtgcgcgtgactatttagtaccaagccgtgtacaaaatggtagcttctatgcacttccacaatcaccacaattgttcaaacaattgttgatggttggtggtattgatcgctactaccaaatcgcgaaatgtttccgtgatgaagacttacgtgctgaccgtcaacctgaattcactcaaatcgacattgaaacatcgttcttaaacgacgatgacatcatggatttgatggaaggcatgactgttaaattatttaacgacttgcttggcgtaaaatttgaaaaattccgccgtatgccatacagcgaagcaatgcgtgattatgcatctgacaaaccagacttgcgtattccgttaaaactcgttgatgttgcagacttaatgcaagaagttgagttcaaagtatttgcaggtccagctaaagaccctaaaggccgtattgcagcacttcgtgtaccgggcgcaggttcattaacacgtagtcagattgacgaatacactaaatttgttggtatctatggtgcaaaaggcttagcgtacattaaagtcaatgaaatcgaaaaaggaattgaaggtcttcaatctcctatcgttaaattcatcgaaccaatcgtaatgcaattgcttgaacgtgttggcgctgaaaatggcgatatcgtattctttggtgcggacaaagctaaaattgtaaatgatgcaatgggtgcacttcgtgtcaagatcggtcatgacttgaaccttgcgacttgtgagtgggctccactttgggttgttgacttcccaatgtttgaagaaactgacgatggcaaatggacttctgttcaccatccattcacattacctaaatctagtgtagaagacgtgaagagcaatccaggcgaagcactttctgttgcttacgacatggtattgaacggtactgaagttggtggtggttcacttcgtatttacacattagaaatgcaaaaagcgatttttgaagcgcttggtatttccgatgaagaagcagaagaaaaattcagcttcttactcaatgcgcttcgttacggtgcacctcctcacggtggtttggcatttggtcttgaccgtttagtaatgcttatgactggcgcgacttcaattcgtgatgttattgcgttccctaaaacgaaaactgctgaatgtccacttactcaagcaccggctcctgttgaagcaaaccagcttcgtgacttgggcatccgcttacgtgaacaacaaaagaaagaagcttaa

SEQ ID NO: 50086 - DNA, 1026 bp, Acinetobacter baumannii
atgagccaatatcaaacagtatgtgagcaattaaaatatcagccaaaaacgtggttaatcactggcgttgctggttttattggctcaaatttacttgagaccctattaaaactagaccagaaaattgtcggtttagataattttgccactggtcatcaacataatttagatgaagttcaaagtttggttacgccagagcagtgggctaagtttacatttattcaaggtgatattcgtaatcttgaagattgtcaaaaagcgtgtgcaaatgttgattacgttttacatcaggcagcattaggttcagttcctcgctctattgccgatccgattacaactaatgcagcgaatattacaggttttcttaatatgttagtggctgctcgtgatgcacaggtaaaaagttttacctatgcagcaagtagctcaacttatggtgaccatcctgcgcttcctaaagtagaagaaaatattggtaatccattatctccatatgcggtgactaaatacgtcaatgagttgtatgcagatgtgtttgctcgtacttacgactttaaatgtattggattgcgttactttaatgtatttggaaagcgccaagatccaaatggggcgtatgcggcagtaattccaaagtggacagctgcaatgattcaaggcgatgatgtctttatcaatggtgacggtgaaaccagtcgagacttctgttttatcgaaaatacagttcaggcaaatattttagctgctactactgaaaatgaagaagcaaaaaatcaagtttataatgtcgctgtaggagatcgaactaccttaaatgatttatttaatgcaattaaaaatgccttaagagaaaatcagattatgtatgttaaagatcccatttatagagattttcgtaagggagatgtaagacattcgcaagcatctgttgaaaaaattcagaatttattaggttacaaagcccaatatgttatttctgaaggtgttgatttagcaatgaagtggtatgtaaatattttaaaatga

SEQ ID NO: 50087 - DNA, 1320 bp, Acinetobacter baumannii
gtgaaattcttcctatctctttttacgctgtttagtattttctgtactactcttaccaatgctgctctacttaatattgctcctgaaagtgttgaagccgctgcatggacaattgtagatacccaatctggtcaaattattgctgagcataatagtcatgtacaacgtgcgccagcctctttaaccaaaatgatggtggcctacattgcattaaaagagattaaggctggaaagttaaaactgaacgaagtcattactgcaacaccagtcgtaagcgtggtgcagtgggatgaatcacaaatgtacctcaaagcgggcgagcaaatttcagttgatcagctcttggctggtttaattgttatgtctgcaaatgatgcagctgtgactttggctgaaaaaatttctggtgatgtgcctcatttcgtacaacgtatgaatcaagaagcacaagcactgggtatgaaagacacgcactttagtaaccctgctggtattacaatgccggatcattacacgacagctcatgatttgagcttattaagtcaggcagtgattcaccagacccctgaatatttacattattcgaaaatgccgagctttagctacaatcaacgttttcaccacgcgacgaaccttgctttaaaatatgacccatctgtagatggcttaaaaactggctataccaaagcagcaggttataacttggctctaacagcttcacgcccttcattttcaccgaacttaccgcaaagacgtttactggtaattgtcttaggtacaccaagtgctgtgaaacgtgctgaaattgcagataaattaatgaatcttgcttatgcttatacacgtgatgaagtggttattcctgagcaaaaattaattgctgaattgcctgttattaaatcaactttaaaaatgtttaaagtagaaactaagcagccaaccattgttacgacttctttatatgctgagccaacaccaattgatttaaatacgtttgattatgctacacagcgtattcaagttcttgatagcaatcaacaacctaaagttattgctccacttgaaacaactcaaacacgtgtaaatattcagttaaatgagcaaaagttaacagcaccgttaatgaaagcgatgaatttggcaacagtttcaatttatcaaaacaaccagctcattcgcagtcttcaaattgaaaatgatgtacacattgaagaagcaaatattttccaaagaattatgatgtggttctcaagcctattctcaatcttttcatcaagtgagcacagtgcagcaaaactctaccctatagattcgcactaa

SEQ ID NO: 50088 - DNA, 1002 bp, Acinetobacter baumannii
atgaacatcaatacttatacatatgagcttgcaaattttgtatgcaaatttaatacacataatttagtagatatgctccatgagattatactaccagcctttactattgaagatacatggaaagtcaaaagaggaagctttttctttcagtctactgaagttatccaactccctaatagtaaggagaaaacttttgctattgtaggcagattcattcgtgatactcgattaactagtacacaagtatatgactatgatgcaaaagaactaaagccacaaaaacgatcaatacagacttccccatctgctatttttgttctaattctaaataatcatcgtttaatttatttaaaagaaacgccgcatgcacccactttagaaatgttcaaagatacctgtcagacatttttccgtcgtcaaaccaaaagatatgctgagtcattacttgaagaagctagaagagatttcattaaagagtatggtttacccgatgtaaacattacccctctaaatacccgtgaaagtcttgaagagttcctaaatcaatacaaaaaaatagaaagtattagaattactttaaagaaaagaaatgatgaactccaatttaaaaatgatctaatcaagaaggcacaactaaaaacggatgctattaagagttcaacaactacaatttcatttacaaataaaaaagatggcttagactttgatcaaacattagagcaactcgatgaagctactgagcagggcaatcagggtatactaatcgaaggaattaatgaatctggtgatgtcatcaaagggaataatgaaaaatttaaagttattaaaacgattagtggtattaatttggaaaatattttagagactggaaaaaaactttatgggtcttttttaaaattaagtgctcaaaagaaaattataatcccagaaactaaaagctctgttaaaaataagttacagagtcttaatataattgagaaaagtgaagatggaaaacaataa

SEQ ID NO: 50089 - DNA, 615 bp, Acinetobacter baumannii
atggaaaacaataaaaatgtacaaatgtgtgaagagttgttaaatgaaaataacttatttgaagtttatagagtttccagaaaaattccattttcaaaaacgaataaatttctattaattatattttgtattatctctttaatttttactttaggaattgacggtcaagagcttgtaaaagatattccagtattatcttctactctcttagcagccgtcctaactgttttaggatttttaatagcaggttatactatattttgctcagtattgaatcataatctttcaatggaactctataattctgaagaaaaacctttaggattttcccagctaaaatattcacatttactatttatgagagtatttttctattatttagtatatgctttctttttattttctgtagttttttttagcaaatcgacttccttatcgtcgattatttcagttatttcaaaccacgatagatgcattttttttataataaattacatattatataattccctatttataggaatgtccttcctaatgctacaactagcttctttcatatttaatatttaccataccgttatgacctcaatatgtctgacagaaataaacaaataa

SEQ ID NO: 50090 - DNA, 642 bp, Acinetobacter baumannii
atggagcagatcagaccatttccaccgactgattttattgatcaagctgaagaagaggaagcaattagactaacaccagcaccggacttaaaaaaatgggtggttgctaattacttaactattggtggatctctttataatcccgatcatgatcacatagctgagctgcttcacgataatgaagaatttttagcatttgcttgggcctcttctgcatataaaagcaagcaagctatggtgttaggccagtgcgaaaaagtcatgttcaatgttggtggctggcgcaaagctagacaagagcaacagatgcgagactggttcggctttgttccaacttacttaatcactattgatgctacattttgcgacaaagcaaatgatcgtgagttttgtgctttgcttgagcatgagctttaccatataggcgcagaacgtgatgaaaacggtgagatgatctttagtagttcaacagggttaccaaaacattatttagctggtcacgatgtcgaagagtttattggtgtaactaaacggtggggagcaagtaagagcgttaaacgtcttgttgaggttgcgaagaatccgccgtttgtttcaaatctagatatttcaaaatgctgcggaaactgcgtaatcaactga

SEQ ID NO: 50091 - DNA, 1098 bp, Acinetobacter baumannii
atggcaaatcttttatttagatttagttgggaccaccgaccttttgtttataactcatctcaaggtaagcggcaatttatgctgccttttgcttcgggcattccaaacctcactccagactggactcaagttacgggcttaggtgcagcggcaacaagaggtgttggagtagaaagcggtaatgtagcagcttatggttcttatggtttatctaacttaggttatggtggatctccaacttcagaagccggaaatgatattgatgctggttataaagcagggggacaaaagactcgttttaagaatgcacccactagtatttatacaaatccctatatagctgcttatgcaccttctatcgtggttactcgtggagaatttacaggtacggagttatttttaccatattacacctcaacacgcgccaattgtatggctgtaattgcatggaattatgtgccatccactgacactttaagtaaagcagagcaaatcgtttatacgagcaagaacaatatcgtttatacgaccgataacagcgcgaccagcggcaaattggttactgttgagacttctggcgaacttcgctccaaggggttcactgttgattcgaacggggtttacaaggcagcttcaccgattgcaagactatttgctgattcacttgaactcaatgaagatgcctcaaaacagccgattaactttgaaaagttaggtacaggtgactacctgataaaaggttctctcggatttgctaaagagggctggtacattgaaatgcctaaagatgctaacggtaatgttcttgttgctgtgtcatatgagcagcatgaagatggggatattgcagtaaaaacctacaagaaaaaatttgatatcgaaacagcctcaattattcctgatttcgataatcctgtagatattccagaaactcgctggattgatattcgattgcatgaagaacccgaaccagagcctgaagaaccgttgagtgaaacaccattggagttccagccgactaaattatctcaggcagtagctgcagccttgaatggtgtggaaccgccagagatctccgacacagatgcaacatattaa

SEQ ID NO: 50092 - DNA, 834 bp, Acinetobacter baumannii
atgaaagaaattggacataaattattttttgtaggcacattactggtactttcagggtgtgtttcaatggagtctgttaaaaattactcaacctattctcgaacaacaatagaatccgttaaaccaatcgctaaagattttcaaacttcttgccttcgtgcaaatagttataagccattgaaagcttacagtaagtgtaattctgaacaagaggcttctaaatccattttaattgttgcctcagtccttgatgcttatggagccgctttaggggcattggcgtcagatgaacttgcaagttataacactcaaactgatgaccttaaaggagaattaataaagcttaaggtagcagatgaacctaaaataaaagcagttggaaacttatcatcgttgatagcaaatgcagttacaaaaacttatcaacaaaaagaaatagtcaaattcattaaagaaagtgatgactcggtaataagcgttagcaacgcactggcggatattattgaacagaactatgttcaggcaatttcatatgagatatccgcttgggaagatgcatataaaagagttgaaataattgaaagagacgctaagcctttagaatgggaggcttattcaaaaacacagtggcaacaacgttctgatttagaagccaagcaagcggcagcaatatctttagcaaaaaatattcgaaatattggagaaacacaccacaagcttaaagaagatgctaatgagctttcaagtaaagaagtatacgcgatagtcaggaatttcgttgatacctctaaaccagttattaaggatgtcaaagaagcttttgcagataaataa

SEQ ID NO: 50093 - DNA, 411 bp, Acinetobacter baumannii
atgagcaatgaactttcaccagatgaagtctatgaactttctaaatcatttcatgatctatccgttacactcggaaactttagatatgataattggaataatttaacccctgttcagagaaatgatcttgaggctaaacaatggactctatttaatacctctagtgatctgaatgcacaatcggtaatattaaaaataaagcttttagattcagatattcaaatattgaaaaattgtacggattcaatgaaagaatctgctgataagataaatagtgtaaaacaagccattgcgatagctacaaaggcagttgcatttggaggttcactctatattgcagcttctacaggaaatattacagctatgattgatgcggcacaaaatctttatgatgagataaataaagattaa

SEQ ID NO: 50094 - DNA, 324 bp, Acinetobacter baumannii
atgggattgaattttagaaaaagtataaaaattgctcctggaatccgtgtcaatgttagtaaaaaagggctatcaagtgtttctttgggtgggaaaggtgcacgtgtaaatgtaagtaagaagggtactcgcacaacagtaggtattccaggtactggcttatcttattctaagttctctagtcatactaagaaaacaacacctagaagagaacctgattttaataatccagataatgtatggggttaccctaaatctgaatggataatcagtggagttattttatttatagctttaataatttttatttggattattagctaa

SEQ ID NO: 50095 - DNA, 684 bp, Acinetobacter baumannii
atgaaaaagattattttatttggattcttagccttaggtccatttatggttgctaatagtgcagatgttactgtccaatatccagctctcttaaaattaaaacaacaagagctaggccagttaatttttaaattcatgccaaacaaggatgatcaaaatttttcttggaattatcgggctaatgatcctaatgtgatttggattgataaatcatatatcgaaactaaattggatgatggtacctattattcgagtagaaaaggtattgcgagagtaaatgttttaggcgtaaagggtaaatatctagatcataaagaatatgaaattccttgggcgataatatttgaaggaactgttggtaagttcggagttgatacaatatctttttaccctgctatgccagaaagagatggggatatatgttttggagagggttttagagattgtgaattctccccatttaagtctttaactaaagctggaataagttttaaaaaaatatgtgagagacaattgagtgcgggaaattttgaaaaggcttatattctcagtgctaccaagaaaaaaagtgtatatggagtttggggagcaagtagtggatctggcggctcaagcaatacttttaaattaatacaattaggtaacgagaaagaaatgtgtaaacacttaatgggtgggttgtga

SEQ ID NO: 50096 - DNA, 327 bp, Acinetobacter baumannii
atgaaaaaaatacttttttgtttattaataggttgcaccagcatagcaatagcagatgacggttcgcaaaagcttaaattctgtgaatctgtttcgaaatatgcagaaatcatcatgcataatagacaacatggtgaacaagctattgctcccattaatagaattgagaagagcttaaaagatcatcagattaaagggttttatatagctattataaaagatgcttataaacaaccgctttggaatactgaagaaaaaaagaaagaagcagaaactgagtttgctaacgaggctttaatgatttgccttgatacatttaaagattaa

SEQ ID NO: 50097 - DNA, 1173 bp, Acinetobacter baumannii
atggctactttaaatccacgtgacgttgtgattgttgatggcgttcgttctgccatgggcaaatctaaaaacggtatgttccgtaatgtacgtgccgacagtttatctgctgaacttgtacgtgcgctcgttgcccgtaaccagtttgatgtaaatgaagttgaagacctgatttggggctgtgtaaaccagaccctagaacaaggtatgaacattggccgtaacatcggtttattggctggcttgcctaaaactgtggctggtcaaacagttaaccgtctttgtggttcttctatgcaagcgatccacactgcggctgcacaaattgcaacaaaccaaggtgatatcttcattattggtggtgtagagcacatgggccacgtaggtatgatgcacggcatcgaccttaaccctgaagcatctaaacactacgctaaagcatctaacatgatgggcttaactgctgaaatgttaggtcgcatgaacggcattacccgtgaagaacaagatgcgttcggtgttgaatctcaccgtcgtgcttgggctgcaactcaagaaggccgtttcaaaaatgaaatcattggtgttgaaggccacgatgcaaatggctttaaaatcctttgcgacatcgatgaagtgattcgtccagatgcaaaccttgaagcgttcaaagcattaaaacctgtatttgaccctaaaggtggttcagtaacagcagcaacatcttctgctctttctgatggcgcttctgcaatgttgcttatgtctgctgaacgtgcacaagcattaggtttaaaaccacgtgccgtgatccgttctatggcggttgctggttgtgatgcagcaatcatgggttatggtccagttccagcaactcaaaaagcgcttaaacgtgctggcttatcaattgctgatatccagactgttgagttaaatgaagcatttgctgcacagggcttgtctgttcttaaaggcttaggtctgtatgacaaacaagacatcgtgaacttaaatggtggtgcaatcgctcttggtcacccactaggttgttcaggtgctcgtatcaccactacgttgttaaacgtaatggaacaacaagatactcaaatcggtcttgcaacgatgtgtatcggccttggtcaaggtatcgcaacagtgatcgaacgtgtttaa

SEQ ID NO: 50098 - DNA, 3006 bp, Acinetobacter baumannii
atgagtacaagattaattcaacacctcaagaataaatgcgaggcagatgataatgttgcaattttatatgctcaatgggagttcgatcaaaagttagtaggaaaagcattagaaaatattggtggtttttacccacattttagtaatcacaatgcttcacattcacagcagattttagtgaatatcgagcgaattctaggaaatgatattgaactattaagtgctactgatacttggcttattcttgaagcggcttattggcatgatgttggcatgttggttgatgctaaaaatgcaaaagaagtccatacaaatcctgatttcaatttcatgattcaaacaatagcaaatgaaaaagggcatgatcttcaaaaattttgccaagcttatgttgagcaaaattggttatcagccattggtattgtagaccatccttttgatgggattgagcaataccgtcaattagttgctgagtggtttcgacgcaggcatgacaagcgagttggcaagattgttgaagatccctttaaagatctaggtattacatcacccagaactgaactattaccaaaccgaatttatcgatatttagggcaaatttgtgtctctcatggtatgaattttgatactttaatggaaacacttccctataaacaaactggtttggggactgaagattgtcatccgcgttttatagggtgtttacttcgtttaggtgatctatttgatttagatgacaaccgcttttgccctgttatggcaaagcacgtcagcaatatgccctctgtaagtaaacatcatcatgataagcatttatcattgcgtgaatttcaacttgataaacgaacagtaaagcttgtcgcagaatgtcctgatgaaatgtcttatgtcgaaactcaaaattggtttggttggatacgtcaagaattccaaaatcaaatgtctcaatggaactttattgtaccaagcttagagtttggttctttaccaacaattgagcagctagacgtaaggatgcaaggtaataaaattttattaagcaataagccaatgaaatttactattgatgaaaacaatgccttagagattttagaaggaagtggattatataaaaatgatactaatatctttagagagttaattcaaaatgcaatcgatgcaacattaatacaagtatggtgtgattttgagaaaggacgtataaaattacccaaaaatccccatccttttgataataaagtacaaaatattttaaagagttatgctcttgaaatatcctttgaacggatcggaattattgatggtagcgatgatgcttggtgggaatttaaaattgaagataaaggaactggaattagtttacttgatttgaattatatgcaaaaggttgcaggttcgagtagaaatatagagcgtcaaaaaataatcaatagaatgccaatatggatgagaccatctggccagtttggaataggattgcatagtgcttttttgctcttaaaagatatcaatgaggaagatcagaaaattacgattattagtacaaattcagttgattataagacatacaaaattgaattaaattctccattaaaatctaaaaaaggttattgttttattgaagagcaaaaagaaataaaaaaagatataggtacaactttaattttgagattaaaaaagaaaagaagagctagaagttattcttacaacaactcagagctatataaatttttgtatacaaaacatgaccctttaaaggaggaaatgtttgatgtgtttaatatagccacgcaagttgagaatataaaagatgaagtcttgagaaatatatgtttgccttatgaatttaatgaagaatggcaggtgaaaattaatagtgtttttcctcaacaaaaaaacacttttgataatattatttgggtggataaatatagtctttatttaatagttgatgaaattaaaatttccaatttaaatgaacttcatagtagacttgatggaggatttaaaggtcagaacgttggtagaataagttattataatcagatatttggtttttatttaatgttttttggcttagaagcaaaaagtacactacaaaccaatagaaatgaatggagtaaagactttgagcgtaaatttattgagcatagatttttgcatgagttatgtaggcatattctagatgagtataaagatcagcttatagatatattaaaagatagtaaaattattgatttatttgatttttgttttaatgaggataggagtaagatttcttggaaagaaattcagatgtttaatgttgataaatggcctaattataaacataaaaataaaaaatgtaagatttataataaaagttttaaagagttgttaagtctaaaaaaatttaatttttattacatagatgagttcataaatcctaattttgatatatctaatttatcaactaatgatttagtttatccagctccatttaatagttggtttaaagactattttgaccaagattggattgataaaggtgggtttgtttctactgaaaaaattaaaggaggaggagaaattgtacgatattcgacagaaaaaacacatgagatcgaaagtggggattttcgtatagttaatcagataaaatttgcaatacaacaagataggaaaagaattaattttaatcaagagtggatgtctaaaatattttttagagaatttaaagccttatttactaaatcaattctagtagagcggttagtcggattagagaacttaaatgttaagcatttaattctaccattctatattttttctaaagatttagaagcggggccgaatattagaatagactatttagaagataatgaattagtgagatctacgtgggattcaagagatgaagaatttgaagatttaaaatttgaagattttctaacactatataaaaaattagaagaaaaaattagtaagcttattaatacaatttatccaaattggatacaaaaataa

SEQ ID NO: 50099 - DNA, 189 bp, Acinetobacter baumannii
atggatgttccttggcctactcccccttcggtatttgtcccagcaaaagcatttggagcaaaacaaattacacccgataaaactgccgctgatagatttaaagtttttgatttagtctttgttttactttttgcaatttcagaggttgcaacccatgctccaatcgaagcattccaaatgaccttgtaa

SEQ ID NO: 50100 - DNA, 906 bp, Acinetobacter baumannii
atggctagcaaaaatagaaagacaaaagttctatcttacaacttacatgaccgatgccgtaaatataccggtgttgatcgaagtaatgtcgatgttgatgcaatggtcaacttgatcaacagtgaccatgtacaagaaatggttgctactaattcattacaaggtttttacggtcatcaaattcgacagcgctatggtatggtgccgcctgaaacggtgatcattaaaggtaaagttgtatatctttcacgggcgtttaaaacaattgaattacgtgcttcaaaggatggaacagttgaacaccgagaagagttttatgataacgagcctggtgagatcgcattacaagattataaagcccaagcgggtggttttagcacatcagtcaattacaagaatgtcggtggccgtttaattccaacgggtttttttggttttgatttcgttgcacaaccaaattatgcaagtaatgtaggggatggtcagttatttgatggattatttgttcctgaagagccagaaggtgttgtttcttgctttgatagcgcaacagatatttcacagttatcacagcccgaaattattattgcccaattacttgaagatcaaattttacagacatacgacaatatcaatagtcagctgcatctattaaccgagttaggaaatgctcaaggattagtgggtgaattatcagaaaaatttgataaacagaaacgcctgcaacaacttagagaagaacgcaaaaaagaactctatacgggtatggtaaatcctgtgaagagttttgattcagtacaacaacaagctgaacaaatcattcaaagtttggacaatccaaacgtaaaagagaaacctaaaaagccgaaaaagtcttttggcagtatctttagtgtatgggggtaa

SEQ ID NO: 50101 - DNA, 324 bp, Acinetobacter baumannii
atgaaaaaatttattattttcgctgtaataggtttattaattgcactagtagttgagcaagtatttgataaagcaatgaagagtgatgaagatacaaaatacattgaaaaaatactttctgatgactcgaaattaaagaaggattacggagaggttgaaagctatagtattgtatctaaagggaggttttctggttcaccaagtgtacctgctcataaccattataaaatccgtattcaaacgaaaaatcatagccaagttatatttcttaatatatttaaggatgattctggaagattattaaagtatgaatactctgattaa

SEQ ID NO: 50102 - DNA, 4074 bp, Acinetobacter baumannii
atgcatttgaaaaaaattatttctatattagtaactacaagtattgttagtagttcgatattagctgtagaaccgatatatgttggtactttaccgcccttaacattctacggtacgccagatcctgtattggacataaaccagattaattcaacctcacaaatcttttatcaagatatgcataaaggaattcatcctttttataattcgaacccaacagctagtttttttaagaatgatgaatctagtgattgccaaactccaaatccagtaagaattaacacgggtgagaaattgcatgaagaagctgtttttacaacgaattgggaaatgccgttaaactattctgaaatttattattcacaagataaagatagaaatattgaaaatgacatcggttttaatctatccataaaaacctttggaaaaagatggaaaaataattatgaagtaacaatgaatgaggctggtgtttatatttatcaaaataaagtaaagttggggcgagaactggcagatggttccttttctctagttagggaattacgaggttatgatcaagtttcaaatccaatttatttaccaaatggtgacgttgaaacatatgatgttagcgtcattggtacacaaccattgctgcatagtggttctttaaaaagtagaaaaaatttacacggtattggatgggttcaatcaagagattcagcgacatggatcactacgattacccacacgaatggtaaaactattaaaataaaacccatgggtaattctacaactgagataactgatccagcaggtaatgtttatacattgaaatcgaatggtcaacgtctaatagaaattgtatacccaaataatttaggaaaaaaaacattccattatggagaaaatggagcaagtgagaatcaacttactggaatttccattgatggaaagcgttattcaacttatatctacgatggtgaaagaacaatacaaagtggccgcagtgatggaacgcaaacttttaaattagaatatggcaataattatactattgtaactaatcctttaggtgctgtttctaagtatatttatacaaatgataataaagataagttgactaaaatagaacgtagtggtgtaaataattgtccaaatagtaatgctgtaactaactacgataataatggatatgttagttctgaaatcgattggaatggagttgaaactacttatcgacgtgatgcaaatgggttgttgttagaaaaaagtacacctgcgagtaaatcacttaccaaatacacttggcttaactcaccatatttaattagtaaagtcgaaaatcttaagaataatatcgtgacatctgacatcacgtattcatattattcttcaactgatactgctaaaaatcgaattaaaagtattaaatcttgcagtaaagttggaacaaatacatgtaaaacaataggttatggttatacattccatagcaatggtatgcttaaagatgttgcaataaatactaatgaaaaaacatcaacttatacttatgatgctatagggaatcttattcaatataaaaatcctttaggccatattacgacttattctaattatgatggtttgggtaatgtcggtaaaattactgatccaaatgggtttgtaattgagttgagctatgatgcacgtggacgtgtcattagtaaaaaggaaacactagccagtgaccaaatacgtacaaccacgtatcaatatggagcttttggaattacgcaaacagaaactaacgggatgcgtgaaacgattaattataatgataacggtacagttgcgagtataacaaacgggacaggtaacacgatcttaagtggtcaatattttacttattctaaattaggaaaattattacgtgtagattataaagagggttctaatattcgctttagtcaaatgaaagagcataatcaacttggatggacgacagcaaataaggggaataacgcgcaaaacttcacttatgaatatgatggaaatggaaatataatcaaagaaactgactcttttggaaaaatcactacatatacttatgatgcaaataactatttaacagaagtgaaaagaccagatggttcaacgacccaatcaatctatgatgctaatggtaatctgacgtctataaaagatggtaaaggtaatactacaagttatacctatgatggttttggaaacttattatcatctcaaagcccagacaaaggattaacaaaatatagttatgatgtcgacggaaacgtaattcagctgacacgtgctaataatatagttaccacatatacttacgatgcattaggacgacaaactaaagcgcaaacaggtagtcaagtgcatgcatgggtatatgataattgtacaaatggaaaagggcgtttgtgtggcacatcggatggaactagttcatcaggatatgggtataacaaagctggacaaatgattgttcagaccagagttataaatggtacaaattatcaaactaactgggcatatgataactatggacgcttaatcagtgaaagctttgcaaatgatagctacaaagtttcatatggttatgacactttgagcagaattaatactgttaaagttcgtatacaaggcgctgataaagatgtagtaaaaaatattacttatgaaccttatggtggtattaaaagttggacttacgggaatggtttaacacgtacaactagttttgataaagattatagaattactggtattaatacagaggccatccaaaagttaagtcatagctataataccaataacttgctaagcaatgttgataatagtctggaagtaaatcgatcagctacttattcttatgatgctataggacaacttactaaagctgcttctactcaatatacagaaagttggacttttgataaaaattcaaatcgaagtactcgggtaggaaatacaaatctaactacaaattatcaaactaatattggaaataggttagctagtacgacaactacagaagcaaaaggctttacctatgatgtgcttggcaatctaattaaaaaaactggtcacggcgggactgtagactacagctatgatggctttaatcgcctaaaaactgtgaaggctggaagcaacagtactagttatgactatgatgtatttaatttacgaactagaaaaactggtggagctggtaacgtaaattatatttactctcccgatggtagattattaggtgagtcaaatacttcagatacaaatatcagtacagcttatgtttggttgtatggacaggtaattggtgtggtccgtaacaatacattaaattttgtacataatgatcatttaggaagaccagaagttttaactaatgcttctaagactgttgtatggaaatctcaaaataacagttttgacagcaatgtgattcaaagcagtattggacaatttaacattggtttaccaggtcaatattatgatgtggaatctggcctttggtataactggaatagatattttgatggaacagtaggtcgttatacacaacctgatccaattggattagctggtggagtaaatacctatacatatgtaggtaataatcctgtgaattatattgacccgtatggtttatggtctttaagtattgaaggttattatggtgtaggtggtggtgcatcaattagttataacaacggcaccttagaagttcttggaaaagtaggtgttggacttggtgctggggtaggtcttgacccaaatggtaaaccctctaaacatgcattagattgtggttcaggcgctatcgctagaacaaattcaaaactagaaatgggtgccggaattggaccaatagaagctacgctttttggagtttcaggatatacagggaatggacttgtacaagcagaaaaaggtggtgattttcaattcaacaaacctcaattagttatacctggagttactgtcgatccttcgaaaaagttttcatggcgcattggcgccagtgttggcggtaatgtttctgcagaattcggtcattattctaattggtaa

SEQ ID NO: 50103 - DNA, 615 bp, Acinetobacter baumannii
atggactctataagctttactcggcctatcgatgaacactatgtaagtacgggcttgcaaaccgcacttgctaaagcatttaaacaagtatttgcacaaaactttgagcagtcgatacaagatttactggactacggttgtcctcatatcggtagtaaaacagttgtagaacggttctctaaacaaaacggacttgttgtattacggcgaaataacacctctgatacgttaatgcgaattatctatgccaattggagcagcatgggtaataaaagaggattagcgtttttagagtttgttttacgaatgttgtgggggaaagatcattttcagattatccggctatggcacagcttggaaaagctaaaagaatatccagcctatttgtctgattttgaaaagccaaattacttcttaacaagtcggattaggattgttttagataaaactgttgatgcaaatgaagtggtagagctgtcaccgatattacggcgtttagtaccagccaatattgtcgttaaagttcactcaatggcatttgatagagatttaggcaccacaaactgtgcagctgcaatagcagctaagccttatgagatttatgatttaatttaa

SEQ ID NO: 50104 - DNA, 732 bp, Acinetobacter baumannii
gtgaaggccgaactgaatgataaagtaattgttctatctggcgattttagtgatgactataagccaacatttgaaaacgccgtaagttgtgttgctaaacttatccgtgaagcacaatctaaaatccaagaacaaaataagcgtgaaaaagttagcttaccgccgcgccgtacttctgtagatcagaaaatgaaagaagtcgaagaacaagagcaaaagcttgatgaggatttagctaagcaaatagctcaccgtgaccagctgaaagaacaaattgaacatgctaagcaacaacttggtataagttcggaggctggtcaatccgaactgggaaagcctgaatttgatagtgcgagtccaatcaaatcagttacagcaaatatcacacgtggtaaagctgcaatgaacaaagccattatggaaaaaaccacagtgcatagagctatgtatcgtaatgatttaggctgggtggattttgagtatggcagtgataaacagggtattaagcatattatcaagcgccgtatggaaagtgatggcatgacatatgatgaagttgtgcatatgcttgtggatactattgtgcaaacaatcgctcaaggtagtacacaacggcgtacagaacgtggtttatctacaagaataaatattgtatttaattcgcatgaagcgtcattgattaagcgagaaggtagtaatgcatggctgcttacagcttttgaagtgcattaa

SEQ ID NO: 50105 - DNA, 438 bp, Acinetobacter baumannii
atgcaaaaaattaatattgaccgtcatgcaacagcacaaatcaacatgttagcaaacaagcttatgttgaaatcaagtaccgcttatacacaaaaatttggtatcgggatgactgaatggcggatcatttcagttttatccagtgcttctgattgttcagtacagaaaattagcgatattttaggattagataaggcagcggtaagccgcacagttaaaaagcttgaggaaaaaaaatatattgaagttaatggacattctgaggacaaacgcacctatgttattaacttaacttcaactggacaagagctttatgacgtagcttcggattttgcacttgagagagagaaacaacttcttgaagaactagaagagtctgagaaagaccaattattcaatttattaaagaaactgcgtaacaaagttgatcaaatgtaa

SEQ ID NO: 50106 - DNA, 981 bp, Acinetobacter baumannii
atgaagtttgccacattaaaaaatggaactcgtgacggtcaactagtttttgtaagccgtgatctaaaatttgctcgacctattccagaatttgcacaaaccatgctgcaactattagaacaatgggatgagtgggaaaatgggctatatgaagcttatgaattatttaatgacaaccctgatcaaaatggatttgtatttgatacacaaaaaactttagcgcccttaccacgctgctatcagtttgtagatggctctgcttttttaaatcatggccgaattatgaaagaagcctacaaaattaaaaatgaagaaccggaagggattccgattttaatacaacgccaaagtgatgatttccgctcaggtgtagatgattatacttttccttcgacaagagatctgtgcgattttgaagcagaattcgctgtagctgtttcagatattccaatgggaagctcaaaagacacaattaaatcaagcatcaagttagtcatgattttaaatgatgtcagcatgcggggtattttaaatcgtgaaataaaaatgggatttggttttatccaagcaaaaactgccactatttttgccccagtcgccgttacacctgatgagcttggaaaagcttgggaaaatgaaaaaattgccttaaatattgaagttaaacgcaatgatcagtggtttggagcaccgaatggaaaagagatggattattcctttagcgatcttatttctcacctagtttataaccgtaatattaaggcgggcaccattattggctcaggcactgtatcaaataaagatgcaaaacataccggttctgcttgtctggccgaaaaaattgctttggaagtcattgaacatggggcagccaaaagtgaatttattcaatatggtgaaaccatcgaaattaatgtcttcgataaaagtaagaaatcaatttttggagctattaaaactaaatttattccttattcatga

SEQ ID NO: 50107 - DNA, 1143 bp, Acinetobacter baumannii
atgacagggatcgtagatattgccattatcggtggtggcatagggggcatgtgcgcagccatccaacttaagaagcttggaaaaaatgtatctttaattgaaattaaagatacgcttaagcccataggggctggtattaccttaagtgcggcaacgcttcgcgcgcttaaagaagttggtgtcgtacaagagttatttaaagtatctggccaattttcacaattcgatatgtacacatcagatggtcataagattgccgaagcgcccattaagccagctattggtgcagaagatttagctgcaaatagtattggggtgatgcggtccaagtttgctgaagtattggaaaataaattacgtgagttaggcgtaaacgttattttgggtactactgtcgacaagttggaaaataacaaaggttccgtcaaggttctatttaccaatgggcaggagcaacaatttgatttagtgatcggagctgatggcatacattcaaaaatacgccatctggtctttcctgaattacctgaaagtacttttacccaccaaggggcatggcgaattgtagtgccaaaatattttaataacttttcaatgctgatcggtaagacgcttaaagcttcttttagtcctattagtgattcacaaagctatatgtgcgtattagaccgtcatgaaagtgatgattttattgaacagcatctatggcctgaaaagttatctggtttattagctgaatttggtagcgttgttcaggaagtaaaagctgatatcgatcaaggaaaaattaaagcagaagatattctttatcgtccattacataccttacttgttgaagagtcttggcataaaggtcgtgttgttctattgggtgacgcagtgcattcaacgactccacatcttgcttcaggagcgggtcttgcaattgaaggagcgattcttttaagtgaagagttagcaaaagatcagcctttggaagatgcattaaatcattatcaagaacgacattttgatcgagcaaaaatggttattagtgtctcgactcgtctaggtgaaattgagatgagtaatggctcacctgttgagcatcgagagttggcaactaaagcatttgaagcattaacacagccgcttaaggcttaa

SEQ ID NO: 50108 - DNA, 1161 bp, Acinetobacter baumannii
atgtttgtttattttccaaaaaactatgtttggagtatgtccaccgttattgctgcaacacatggtggaagtatcggtgaaattgatgagttttgccgtccattattagaaaagtcttctgatgatgcagatgttggcactgtcgagtttcttcatgcatggattggcggtgcagataagctgattaggatggctgaacaagatcttgagaaaaacagagaattgtctgctgcaaaaaaatattatcgtgctgccttatattatttaattgcagagcgtatgcaagaacaaggtcatcctgaacgtttaaaagtatataaacgctatttagagttagctgagctataccgaaaatataagaaagatgatgttaagcgagtagaaattccatatcaaaatagccatctaagcgcgatttatgcaaaaggaaaaacgacagatgaaaagcaggccattgttgtcatgatgaatgggcttgattctactaaagaattaatgtcttacagtcctttagctgatgaactcgtagagcgtggaatatcagtacttatggttgaccaaccaggtacaggagaggcgattcgcttacaagatttacgagctgtctataactctgaaatatgggctactccaattgttgactggttatgtgaacaaccagagattgatcaaaatcgaattgctgcttttggaatttctttaggtggatattattgcccacgagctgttgcttttgaacctcgcttttgttgtgcagcaatttggggggcaaatcatgattggcgagcagttcaacaagctcgtctaaaacgtgaaggcgaaaacccggttcctcactattggaaacatgtggaatgggtatttggggctaaagaccagaaagaattttttgagatagcagagaacatgcacctcaatggaattcttgaccgcattaaagtgcctttcttagtgactcatggtgaaaaggatcgccagattccattgaaatatgcttatgaaacttatgatcaattaattaattcaccagataaagagctattggtcattgatgatgagatgggaggcgttgaacacagttcaattgataatccattaaatgccggtgcgtatattgcggattggttggcagaacatttaggtggtagaacctcaaagtaa

SEQ ID NO: 50109 - DNA, 360 bp, Acinetobacter baumannii
atgtcaaataaaaatatttttatcgcaaaaacttcggaacttagtcaaagcacggcgaaaggaatttcattagacggagtaaatgatcagctttttttggttatgacagatacagaagtagcggtatgggtaaatgactgtccacataaccatcgtccactggaatatcaaaaggataagtttttatcggctgatgggaatcatattgtttgttatgcacattctgcacattttgacaaagtttctggagagtgttttgcaggcccatgtaaagggaaaaaattaagaaagattcagcatcacgtaatagatggtgagatttatgttgaatcgaaaattttaatcgatcttaaggattaa

SEQ ID NO: 50110 - DNA, 930 bp, Acinetobacter baumannii
atgaacattcttggtttagaaagtctggtttttggagtattagacttagatgcgtgtcaccagtacttgctagattacggtttaaatcttgttgaaaaaaatgaacgtgggggaacttacgaagctttagatggcggtactgttatttttaaattagatacagatccatcattgccaaaagcgaatgctccagcacctaatatccgtgaaacagtgtacggcgttgctgatcaaaatgaattagatcttattgcagcagaactttctaaagatagagaagtgagtgttgacgatgaaggaacaatccattcttttgatgatagtggatttgcaatcgcatttcgtattacacgtaaacgtaaaatagttgcccctcatgtagggataaatgtaccgggtcaagaacctgggcgtgctgttaatgaatgtggcgtattgcttgaagatcatagtaaaacaccacgatctctttctcatgtcgtttatttcgttccagatcataaaaaggctgaagctttttatgccgatcgactcggtttcatcacgactgatcgttttatcaatattggaccttttatgcgtccagctggcttaaatgaacaccattctttatttctaatccaaagctttaatccacatatggtgggtgtaaaccattttactttccatttcggatcaggttatgaggttttaagaaatggttgggaatttgctcagaaaggatataagagcttctggggaccaggccgccacattatgggaagtaatttcttttggtatttcaatagcccatttggtggaacgatggagtttgatgcagatatggacttgcatgatgacaattggacaccacgtgcaatgccaatgggaagtgacgcctcacaagtcttcttatttgatcaacgtaaaaaatggtcaccaggagaataa

SEQ ID NO: 50111 - DNA, 1161 bp, Acinetobacter baumannii
atgcataaaatcgaaagtaagcgaggaatgcttgcgctcatgacgtctcactgtgcaggtatggttgacttggttgccttacctatctggataggcacactcattgcgaattatcattttggttttcaacaagcaggtggcctagtcaccctgttcttattaggagcaatgctggcaagtttaatatttgcgcctatttttaaccgttttaatcctaaatggcccgtgtttattggattcttttccgcttgttgtgctttttacctagcctcaaaaaatactcatttttcagtattagcaatattacatctggtaggtggcttttctgcaggtcttgccttgagctttacgcatggcactatgggaagaggtttaaaccctcatagaatatttgggtttgccggtctagcacttggtatttttgctattttgtttttagcaggttctttaaatttaattaggaattttggcggctctacactatttttgattcttgcctcaattatggctgttgctgcgtttattgcttttttattctacccccaagtcaataaaaaacaggacaatattcaatttgaagcgtaccatcgtcctaaattttcaaaatacatttggtgctgtatttttggaatatctttattagccatgacaaattctatgaatgtcagcttttatgaacgtattggaattgcacgtggttttggagaaagttctgttgcactgacattaattatttacagtattgtttctatttttccagcaccgatcgcggctttcacccaaaagtatttaaatccactcgccgttatttgtattggtcccatttttcaagccatattttcattagtgcttacccatagtcataattattttctttatacagtggctgggtcatgtatggttttcactattttatttactcatacatatgcttttggattactcgccagacttgagccaacaggacgagctgttgccggaactcctgccatgttaatgttcggtgcagccttaggaccaattttagcgggtactttagttcaatatattagctttgaagctattgggatcatgggctgtattttggttgttggtcaattgattttatttaatatcgttagagcgtactactctaataatggtttagctcaaaatgcttaa

SEQ ID NO: 50112 - DNA, 915 bp, Acinetobacter baumannii
gtgtatgaccccattggtaaatcgggagacgctttcgctttagccaaagattatgcacttgaagcaaaaaattggggagctgatctatctttaaaagcatatgttgatgaacgtatagctgctgaagatttgaaagttggaaaatgtgatggtgctattattagcggtttacgtggccgtcaatttaataaatatacaggttctttagatgcagttggtgcattaacaaatatgaaaacggcaattaatgcctataagctgttgtcctcacctatggccgcaaaaaacatggtggtaggcccttatgaaattgcaggtttaggcacaattggtcctgcctatttatttgtaaatgatagaagtataaatactctcgcgaaggctgccggtaaaaaaattggggtatttaaatacgatgaagcccagccaaagcttgttcaacatgtcggtggtcaggctgtatcggtagacgttaccaatgccggtgcaaaatttaataaccatgaaattgatattgtgcccgctcctattgtggcgtttaaaccttttgaactctacaaaggtttaggtgagaaaggagcaattgttcgtttccctctgactcaaatttcggcaaattttattatacgtaaagaccaattccctgcgggttttgggcaaaagtctcgaacttgggtagccagccaactcaatagaacatttggtattattgccaaatatgaaagtgatattccttcaaaatattggatggatattccgaaaaatgaacaattaaactatatgaaaatgatgcgcgaggctcgtatacagctaaccaaagcaggtatctacgacccaaaaatgatgaactttttgaaaaaagtaagatgtaaagaaaacccaagtaattttgaatgtgtattaaacgatgaatga

SEQ ID NO: 50113 - DNA, 636 bp, Acinetobacter baumannii
atgaatgtttcgccaatcattgtacttgatttcgagaccacaggagccagccctgaggctggtgatcgtattacagaggtcgcggctttacgtattgtagaaggtgaaatcacagagcgttttgtttcattaataaactgtggtgtaaatgttccatactacatcacaaagttgactggtattactcaagatatggttaatcatgctcctttagtagaagaagtcattccttctctattggactttattggaacagatcctttacttgctcacaatgcaggatttgatgagaaattcctaaaagcagaaagtattcgacaggagttaactccatcacacaatggactcatttgttctttgaaacttgctcgccgtattttacctcatcaactcagttatcgacttggggcaatggcagacttattcaatattaagtttaatggcacagctcatcgtgcagaagcagatgctgaagttacggctcaattatttaactatctttgtatgaatatttgtcacacatatggcttcaatagcattgatcaagatttattgttagccattaataaacttactatatctagagtaccgaaatacctaaaaaatatagctgcccaatccttacttcttaaatag

SEQ ID NO: 50114 - DNA, 192 bp, Acinetobacter baumannii
atgaatgaactcgaaaattttgcacgaggaaaaagtctgcgcttacttgttttagatacacgtgaaggtgatgtatccgagcttttatatagcaaaattggatttgttcgtgtgggtgtaattccgagttttgccttaagttcaaacggcagctatgacggtacagcgatttattataaaaagcttgtctga

SEQ ID NO: 50115 - DNA, 678 bp, Acinetobacter baumannii
atgaataaaagtgcttcagctgtaagtattctatttattggattgacattcttttttcttatattcagtatctttagcatattgtatttttattggggcgatttaaaggttatccaagatagcctttcaactacaggaagtatctttggagctattgctacattaggagcagcagcagtagcagcttacctttttaatgattggaaggaacagcataataaacaggttcagaatagttttgcacttcaagtctttgatttcttttcggtttttgaaaataatattttagaatattcaatgtttatttcacacttgcaagatctaagaagttcatatgaaaattatgaattaacttgggaaattttgaataaagatggaaatactatttatattcaaaatataggttctaaaaaagatgagttggatttatcgttttacaggttaatgagcaagttaaaaaactactatatatttaatcatgatatttatgattttaacaaaaaacatgagacctattttaataaatttattgaaataaacaaaagcttattacctacaaatacattagtagaagagctaattgaatatgaagcaaagcttataggatacaaagatctaaaaaatatgattgatattttagatatatctccaataattcagcaactaaatgcaaaataa

SEQ ID NO: 50116 - DNA, 612 bp, Acinetobacter baumannii
atgattattgaaaaacttaagtcaataagctcaatcacagagttagtatcagtttttattattataaattttatagtacaggtaagttttaaagtaggctttctaaatgtatatggatattggacaatatcacttttcaacccaatagaaattatgtttggaaacttagagttaatgcttatttatattctgattttttcaagtataatttatgagaaaagtttagcacaaatggtatatatggttttgtgtattacaatattaccatatattattcctatgttgctccataaatattacttatcacctctaagtatttatggggtaatagttggattaatgggaatttttataactaaatttgcaaaacaaaactcaacttcggagatcgcatcattaacaattttacttataattgcacctctattatttgggattcatctcaataatagactaaacacaaacgacctatcatttattaatttaaaagatcaaacttctgagaagtggtttatattagataaattttcagacagttttttactaattaatgaagataaaagtaaactaaaaattattaagattgaggaacaaaaatcgataattttataa

SEQ ID NO: 50117 - DNA, 588 bp, Acinetobacter baumannii
atgccaaatcaatttgaaacacatacttcagatgcgggaactactattcatttaaaaatgaacggtgagcttatagaaaatctaatagctttggactgtatagcgataactttgtttgacattgtatttgtatatggtgtttatgaagtgtatgcagaaaatgatagtgttctaacacttgttttaatatttctagtattaccatttattttctacttacattatgaatatagaaaaaataaacgatgggctaaaaatgcagaggaaatattttttatttctaaaaacaatcttcacatttccaaagaatgtcttggggaaaagttgttaacaaaggatattaatactcaaaagattattgaaattgtctacagaccgtggggtggacgcacaaatccgccgtttttaccagattgtggccaaggtactattcacttaattggatatgaaggtggttgttcatttggtattaatcttaacaaagaagaagcagaggcattcattaccgaattgcgttcattaattatgcaatatcaagaacctagacactttatttttgccccgcatatgcatttagcaaaagattga

SEQ ID NO: 50118 - DNA, 1050 bp, Acinetobacter baumannii
atggcacatcaaatagaaacgatggcattcgttggtcaaaccccttggcatggcttaggtaatcaactccctcagaatcaaccaatagaagtatgggcacaacaggcgggtatggactggcgaatagaatcatccaatgtcagttttatggcaaagaatgaacgtggacaaaatattctgatgccttatgaagagcaacgagtactttatcgctcagatactcatgcgccgttatcggtagtgagtcagcgttatcaggaagtgcagcccaaagaaatcttggagttttaccgagacctgaccgaacaatcaggctttgaactggaaacggcaggtgtacttaaaggtggacgtaagttctgggcattggctaggaccggacaatcggcagcattaaaaggcaaggatgtcagtaatggctacattttgttggcaaccgcatgtgatggcacactagccaccacggcgcaattcaccagtgttcgtgtggtgtgtaacaacaccttggcgattgccttacgcgggcagaatagtagtgctggtgtagtgaaagttccacacagtaccaagttcgatgccgagaagattaaacagcaattgggtatttcggttcatgcatggggcgagcacatgtatgaaatgaaacaactcagccagcgtaaagttacccagcaggaagcagcagcttattttgatgcagtgtttaataacacgaacctgagtattgctgaacaagatgaaagtatcattcagttctaccgtaatgtagctacgcctaaacaaatcaactcatccaaagccgacaataaaacagaaccaaatggacgtgctatgtctaaggtcatggccatgtttaatgggcatggtcgtggtgccgagttagcttcagctaaagatacggcgtatggactgctttgtagtattacggagtttgttgatcatgagcgacgtgcgatctcaacagatcaccgactagattcagcatggtttggggtaggagccaaccttaaacaacgtgggctggaacaggcattaagaatggttgtataa

SEQ ID NO: 50119 - DNA, 981 bp, Acinetobacter baumannii
atgactaagtacgcatcagatgctttaattgcagctacacattcgtcatgcagcattcaacctatttgggcttacgatctgattggttctgagaagtcagcaaaagctcttgggggatcaaaaactacgagcatgtttgcaaaacaaaagtctcaaaatagtaatcaggcattatctctcagtaaacctgttgagttgattaggtcagtatatccattagtgacaggctcccctgtcactaatgggatgttatctgttcggctaaagccagagaatgaattgtttattcagtttattaaacagatagggcctatgctcaatggtgggatttactgtaacgatcagtacttttcgtatcaaattatgggctatcaatatacgctcatcacgagacagttcaatgagaagttaatggcgtggaatgcagagcaagttcgcactgaagagttatttgatttaacaatgaaggctctatacaagaactatgcaggcttcgagatacatgagctatatctgccaatactatttacgctttcgacgaatgcaacaacgtattctaaacagcaatatttagatcagcagaagaaagagatgattgcccttttcattaatgaaggcggtaataatgatgttgttgcggtattttcaaaatgggaacttacgccccaaggacaattagcactcagactagtgttcttactagaacgtcagtttataaatgatcctgttggttggtctgatgagaatgctttcacagccttacatggtaatttggagagcctttttaattgcaaagcatatcctgtatctatgccattaaatgggtttatgcaaaccaatcgttttttaaaaaacgatccaaagtgtaaagaccttattaagttgctcaaaacgtatctggttggcaccgatacaatccttcgaatctgggatacacagtccagttttgatgtgttgttttccaagtttacaaccaactag

SEQ ID NO: 50120 - DNA, 720 bp, Acinetobacter baumannii
atgagcgcacttttagaaaaggattttagcccgactgagtttacattgttttctgaaatattatggaaacttggttcagggaaagggcaatacaatttacgtgaaaatatcattgcagatattgccatcttgttgcgggctgattttgccgcgtcttatatttgggattcaacgcataacttatcgaaagatggtgtgatatggaaaatcgacccaaaagcgatggaggactatgagtgtatttggcaatttgatgatcccattactgcacagcttcataagctccagaaaccaacatttgtaaatgaagtcatgcctctctcagacctgaaaaaaacaggctattacaatgagtttttaaaaacctatggtttgtatcacggtataaatatttattttgttcgaaacggtgtggatattggtgatttacgaatttggcgtgcgcaagacgctgaaatgtttggtgaacgtgaaaaaagaatattaactctgcttgaaccttattttacccaagccttaccactagatttatcaacacaatatggtttgactccacgtgaacaagaagtggttcatttggtctctaaaggtttaagtgataaagaggtggcaagtttacttggtattgggtttaccacattaagaacccatctgaataattctatgagaaaaataggaggcaataatcgcactgaaatggccttactcattcaacattaa

SEQ ID NO: 50121 - DNA, 504 bp, Acinetobacter baumannii
atgaaaatttgtattgtaggaccttctggcgctggaaaaacaacactaagtcatcaattggcaaaaaagctaaatatctcagcttatgcatttgatgaaatttactggaatttaaatggaactgattttataaaaaattcagaggaattcatttctaatggagttaaaaaaatttctattcaagataggtggattgttgaaggagcttacgataaacgtttacttcccttacttcttgaatgctctttaattttaaagatggaagttcctttttatttaaggacaataagactcttacaacgttacttaagctctgtagttacagacaaggaacccaaggaaactctaaaaaatactttagagctgattcagttttcacatagttttgataaacgtttagaaaaatttctgtgtagtaatgctcaactctctaaaaagactattccttttaataacttttcaaaagctataaatattattcagacattttttaaaaataattaa

SEQ ID NO: 50122 - DNA, 453 bp, Acinetobacter baumannii
atgcgtacagacaataaactttcccgaatacttcacgtacttttacatatggcaaggcaaaaccgcagttttacttctgaagaaattgcaaaaatgctatcaactaatcctgtagtcattcgtcgcactatgattggattaaaacaggctaacttcgtacaatcagaaaaagggcctggtggtggctggcatttaattggtgatatagaaaaaattacgctttttgatatttataatgctgttggtgaacctacaatttttgcaatcggcaatgaaagacaaaatccagaatgtgcagtagaacaagtcgtcaatgcagctctagatgcaagtattcaagctgcacaggcgattttgatccagcgcttaaaaggaactaccctagccgatcttgcaaaatcatttgatcaaatttgtatcgaaaaaggatgggattcaaaacactcacattga

SEQ ID NO: 50123 - DNA, 891 bp, Acinetobacter baumannii
atgctttacgacgttacgattatcggcggcagttatgcgggtttatcagcagcaatgccgttagcccgcgcacgtagaaatattgcgattattgatgcagggcaaagaagaaatcgttttgctgaacattctcatgggttccttacccaagatggaactcgagctagtgaaattgttgaaattgcaaaaaatcaattagaagcatatagcactgttcactggaaaaatggatgggttaaacaaatcgcaaaaatagatgaaggcttttgtatttgtattgatggggtagtttccattcagacaaaaaaaattattattgcggcaggagttaacgatcagttgccggaaatatctggtttggctgagagatggggaaaaacgatttttcattgcccatattgccatggatatgaattacaacaagggaaaatcggtattttggccacttctgagcacagcctgcaattggcgatgatgttgcctgattgggggccaactacacttttacttaatggagatgatcaactcatccatacagaatggcatacttccttgcaaaaacgtggtgtagttgtagaaccaggttttattcaggaaattagagcgaatgctgaggtagtttttacagatggaaagattattgctctagatggactgtttgttcctacacgtacctatattactcaaccttgggtggctgagcttggatgtgaagtcgaagacacaccgtttggacaaataatcaaaacaagcgcgacaaaagacaccacagtaaatggagtttttgcttgtggggatattgcacgtttaggtggttcagtaccattcgcagttgcagatggaatgatggctggggtgagcgctcaccgttcacttgtttttaatgtgtaa

SEQ ID NO: 50124 - DNA, 534 bp, Acinetobacter baumannii
gtgttatatgaagcctattacccaagtgagggtagcgacaatcatccaataaaaatcttttatggcttcgtgcaagaggggtttgaaaagggacatcaattaactttggtggttttttatcctgaattaacaggtacatctttgtttaatttgatggatgagacgaaggctggtctagcaaattttttactacagaaacatgtttatggtgttggagcttcacacattaaagtggcttttgtatgtgagcatgtcaataaaagagacttctatactgaaatctggggcgtagacgtttttgaaaactacgctttagagcaactcgaacaacaacctaaaagtttactcagcggcattttgggaaataactctaaggaagtcagtattcattcaagttatttgaacatcggattaactgattcaatcaaattgattgatgaagggcatttagatacggagcaaacggcttatcttttaaataaactgaaagaaaaaactgattacggaaattttaataaaatttttggtgagtaa

SEQ ID NO: 50125 - DNA, 1110 bp, Acinetobacter baumannii; identical to SEQ ID NO: 49715

SEQ ID NO: 50126 - DNA, 276 bp, Acinetobacter baumannii
atgccaaatcaagtcgaagataaaaaaaagattctgacgcgtgtcagacgaatcaagggtcaggctgaagcgattgaaaaagctttagaagacaatgtggaatgtggtgcaattctgcaacaaatatgctctgtgcgtggtgctattaatggtttaatgaatgaaatgttggaggttcatttaaaggacactttagtatcaggtgaaaccacagaacaacaacgaaaagaagaattggctgaaatcgccaagattctaaaatcatatttaaaatag

SEQ ID NO: 50127 - DNA, 144 bp, Acinetobacter baumannii
atgaaaaaactgaaagagatcctgcaaggtattgcctttttatttgttgggattccgatcatgatcatggccagcatcatagatcaacgtgccttcaaaaaagagatggatgaacgccaaaaagaaaaagaccaggcatcctga

SEQ ID NO: 50128 - DNA, 1650 bp, Acinetobacter baumannii
atgcgaatggacatgcctaatcaacagacaattcaccactttgacgtgattattgtgggcagtggcggtgctggtttaagtctggctttatcgttaccaagtcattttaatattgcagttttagctaaagctgctttaactgaagcaagtaccttctatgcacaaggtggtgttgctgcagtgcttgatgaaactgactctattcaacaacacattaatgacactatgattgcaggtgctcatttatgtgaaatggatgcagtccagcatactgtagaaggcggtcgcccttctgttgatttccttttaaagcaaggtgtacagtttaccttagatgaagatgaacagcttcatttgactcgtgagggtggccattcgcagcgccgtattattcattctgctgatgcaactggcaaagctatttcaaccactttggttgaacgcgccaaagaacgtaaaaatatcactatttttgaaaactatattgcgattgatttaatcacgtcgcataaattgggtcatacagatcaagcgaatcgcgctattggtttgtatgcactagatgaaagtactgaaaaagttcataccttccttgccccatttaccgcacttgcttgcggtggcgcaatgaaagcttacctttatacgtctaatccggatattgctactggtgacggtattgcgatggcataccgtgcaggttgccgtgttgccaatatggaatttaaccagttccatccaacctgtctttaccatccgcaagcacgttctttcttaattactgaagccatgcgtggtgaaggtgcttacttacgtttgccagatggcgaacgttttatgctacgttttgacgatcgtgcagagttggctcctcgcgatattgtggcacgtaccattgaccatgaaatcaagcgtctcggtattcgccatgtgtggttagacattacacacaaatcaccggattttattaaagagcacttccctacactttatgcacgattgcttgagctaggtatcgacatcactaaagacatgattccggtggtgccggctgcacactatacctgtggtggtgttgtggttgactcaaatagccagactgatattgaaggtctatatgcaattggtgaaacctcttatacgggtttacatggtgcaaaccgtatggcgagtaactcattacttgaatgcttcgtttatggcatgagtgcagcaaaagatatcgaaagtaagtttgataaaaacttcaaattaccggaagtaccaacttgggacgattctcaagtaaccaatccagatgaagatgtcgtgattttacaaaactgggatgagttacgttcgaccatgtggaactacgttggtattgtaagaaccacaaaacgtttagaacgtgcgttacaccgtattgaaatgctaaagcgcgaaattactgaatattatcaagattatcgtgtcagcaaaaacctgattgaactgcgtaatcttgtacttgtttctgaaatgattgttcgttgtgctatgcaccgtaaagaatcacgtggcttacattacacacttgattatccggaaacttcgagtgagattcgtaaaacggttctgacgcctccaaactttgcagtagagcaacctttggtgaatactagtgtataa

SEQ ID NO: 50129 - DNA, 1029 bp, Acinetobacter baumannii
atgtcgatgcattctgatcaaatcaatccagattcaaacgaaaaccaagatccaaacaatctgattgatcaattttttagttccaaaggcgttacaattccttcggattttaagagcggatttgtggcgattgtaggacgtccaaatgtgggtaaatctaccctcatgaatcatttattgggccaaaaactctctattacttcacgtaaacctcaaacgacacgccataaaattattggtattgattcgcgtgaaaaaatgcaagcggtttatgtcgataccccaggtatgcataagaaagaagtacgtgcaatcaataaaatgatgaaccgtgctgcgcattctgcgttacgtgacgtgaatttagtcttatttgttattgatgcccacaagtggacacaaaatgacgatttagttcttgagaaactcaagaatgctgatatgccagttattttggtgattaataaagctgatacttttggagataagagagagattctccctttaattcaagaacgtgccaaacttatgaattttgctgagattgttcctgtttctgcactccgtggagcaaacttagagcacttaagtgaaacgattgaaaaatatcttccttatcaaccacctttatattcattcgatcaaattacggaccgttcagagcgcttcttggcaagtgaaatcatccgtgaaaaaatcatgcgtcagttgggtgaagagctaccttatgatttaacagtacaaattgaatctttcaaaacggaagaggcaactgttaatgaaaaaactggtcgtttaaaaccagcatgtacctatattgatgcaactatttttgtggatcgtcctggtcaaaaagcaattgtgattggtgaaaaaggtgccaagcttaaaacaattggcatggatgcacgtaaagacatggaaaaaatgttcgaacaaaagatcatgcttaccttatgggttaaggtcaaaggtggttggtctgatgatgaacgtgctttaaaaagtttaggatatagtgatatctaa

SEQ ID NO: 50130 - DNA, 261 bp, Acinetobacter baumannii
atgactttatttattggtggtcgccatcatggacaattcttgtcgaaagacgagtcagatttgaagttagaaagtattccaaagcagtatggaccaagaacaggtatgcaaaggccaacagagtcatactttagaacccaagtaaacttccaaggagaagtgaaaacgttttatataatttctggaaaacaaccaatcgaaatgagagatgaaatacttgatttatgggatcaagtaaaatcagacatatatgctatctaa

SEQ ID NO: 50131 - DNA, 345 bp, Acinetobacter baumannii; identical to SEQ ID NO: 46787

SEQ ID NO: 50132 - DNA, 663 bp, Acinetobacter baumannii; identical to SEQ ID NO: 47237

SEQ ID NO: 50133 - DNA, 2559 bp, Acinetobacter baumannii
atgccaaaaaaaaggcaagaatcttataaattattaaaacgccatatttgttattacttggcttctggcgttgttacaatgacaatgcctgtgttcgtgcatgctgaagaagcagctgcgagtgcgcctgtagaagctgaatttgattctgcttttttaattggtgacgctcagaaagtcgatatttctcgatttaagtacggcaaccctgttttaccaggtgaatataacgttgacgtttatgtaaatggtcaatggtttggtaaacgccgcatgattttcaaggcattagatccaaatcaaaatgccgtaacttgttttactggaatgaaccttcttgaatacggcgtaaaacaagaaattttaaccaagcatgctccccttcaaaaagaaaataatagttgttataaaattgaagaatgggtagaaaacgcattttatgaattcgatacgtctcgtttacgtgtagatatttcaattcctcaagtggcattacaaaaaaatgctcaaggctatgtcgacccaagcgtatgggatcgtgggattaatgccggctttttgtcttatagtggtagtgcgtataaaacttttaatcagtctggtgaccgaagcgaaacgaccaatgcttttatgggggttacggctggactaaatttagcaggttggcaattacgtcataatggtcagtggcaatggcaagatacgcctgcggaaaatcaatctaaatcagactatcaagaaacaagcacctatttacaaagagctttccctaaatatcgtggtgttttaacactcggggatagttttacaaacggcgaagtatttgactcatatggttatcgtggtatcgatttttcaagtgatgatcgaatgctaccgaatagtatgcttggttatgctccacgtatccgtggtaatgcaaaaaccaatgcaaaagttgaagtacgtcaacagggccaattgatttaccaaacaactgttgcaccaggtaacttcgaaattaatgacctttaccctaccggctttggtggtgaaattgaagtttctgttatcgaagcgaatggtgaaatacagaaattttctgtgccttatgcctccgttgtacagatgttacgtccaggcatgaaccgttactcattaactgtaggtcagttccgtgatcaagacattgatctggacccttggattattcagggcaaataccaacaaggtattaataactatttaaccggctataccggaattcaagcatctgagaattacgctgcaatattgcttggtgctgccgttgctacaccaattggagcaattgcattcgacgtgactcactctgaagctgagtttgaaaaacaggcttcacaatcaggtcaaagtttccgtttaagttatagtaagttaattacgccgaccaacacaaacttaacacttgcagcttaccgttattcaaccgaaaacttctataaattgcgcgatgccctacttatacgtgacttggaagaaaaaggtgtaaacacttatgctgctggtcgtcaacgtagtgagttccagattactttaaaccaagggttacctgagggttggggtaacttctatgtggtaggttcatgggtggattattggaatcgtagcgagagtactaaacagtatcagattggttatagtaataactatcatggtttaacttatggtttatctgcaattaaccgtaaggttgagtacggctcaaatgatgcgtcgcatgatactgaatatttaatgacgctttcattcccaattaactttaagaagaattcagtcaacgtcaacgttactgcttctgaagacagccgtactgttggtgcaagtggaatggtgggtgatcgctttagttatggcgcttctgtgtcacatcaagactatgcgaacccaacatttaacgctaatggtcgttaccgtactaactatgcaactgttggcggctcttatagtattgctgactcttaccagcaagcaatggttagcttaagtggtagtgtagttgcacattcagatggtattttatttggacctgagcaaggccaaaccatggtacttgtgcatgcacctgatgctgctggagcaaaagtgaataacacggttggtctaagtgtaaataaagcgggttatgcagtagttccttatgttacgccataccgccttaatgacattactcttgacccacaagaaatgtcgagcgaagttgaacttgaagaaacaagtcaacgtattgccccatttgctggtgcaattgcgaaagtagattttgcgactaagacaggttatgcagtttacattaatagtaaaactgctgatggcaacagtttaccgtttgcagcgcaagtctttaaccagaaagatgaagctgtaggtattgttgcacaaggtagtatgatttacttacgtaccccacttgctcaagatagtctctatgtaaaatggggcgacgaaagtaatgaacgttgttcggttgagtacaacatcagtaatcagttgcgaaataaacaacaaagtatagttatgactgaggctgtctgcaaatga

SEQ ID NO: 50134 - DNA, 612 bp, Acinetobacter baumannii
atggatttatcgaagaatccccctccaagctattatgatgcatcactgaatgatgaaacattaagcttttttgctaaccatatgctagaagttttttcacaaactactcaagatcttagtagaaaagatgatgataattacactatcagttgtgcaatttttggaagatgccgtaataggtttgctcgtgaaattcgtagtggcaatgccccatctccaacatatttagaagattcttcaaataaattcacctttaaaattggaaacacacctggtatccgtttttttaaagaatctgatcatttaaaaccgaaaagaccaaacttttttaagcaaagttacaatctagaattatttgaatctgattcaaaagttcctgttttttggcgattcattttggttccagctaaaactgatgacgaagaaacatttatcgcttttgttggttttaaccagaaattacagccgattacagcttggacatctaataagacttctagatttatttttgatccagcggctatattgccagaaccagcagaattgaaacgctataatattgatgatctattagctgatgatgatttagatgatgcaagcggaatcaagtaa

SEQ ID NO: 50135 - DNA, 1083 bp, Acinetobacter baumannii
atgaatacttattttaatggtctagaattgcggctcttacgtcaatttaatcatttgtctttagaggacttatcaattcatgttggtaagtcacgccaattcttgcataaaattgaaatgaaccaagttgttcctacacctgatttaattgatgtacttagcaacttcttcaatgtaaaaacggatattttttacagttctcatccgattttacaagaagaacaaatcaattttcgaagcaacaaaactgccaaaatttttacaaagcaatcagtgatcgctcagggtgaatatttaaaaaggttagtagaatttatagaggcaaatttaaggctccctaagtattcaataccttctgttgaatctgtaaagaattttcaagatattgaaaatgctgcgcttcaatttagaaaatattttaatttagggttgggacctattagcgatatgactcaattaactgaaatgcttggaatttttgtaactacttttccaagtgtttcaagcgaagtcgatgctctatctattgcatctaaaagaccaatctttgttaataacgaaattagtagtacttgtcgccagcgttttaatttagctcatgaattaggacatcttgtactacatgatggttgtgttacaggtgacactctcactgagtcgcaagcgcatcgttttgctagtgctttacttattccacaagaaatgatgatttctcatttccgtaattgctttaatggtagatttaattggaataaattaagtgagatgaaaacaaattggaaaataagtaaggcagctttgctctatagagctaaatctttagatcttttaaatgaaacaagttatcgtagtggctttattcatttgaagcgtactggtgaggctattttagaatcagaagatcatgaaatacctaaagaagttccaactttactaaatacatgtttcaaagctttaagtaaaaaaggaatttcagcaattgatatagctaatgaattaaatatatctctagatctattaaataaaattacgcaattagatttacagccacaaaatccttctaaacttaaattagttatttga

SEQ ID NO: 50136 - DNA, 765 bp, Acinetobacter baumannii; identical to SEQ ID NO: 6031

SEQ ID NO: 50137 - DNA, 669 bp, Acinetobacter baumannii; identical to SEQ ID NO: 36186

SEQ ID NO: 50138 - DNA, 1110 bp, Acinetobacter baumannii
atgaaatctcgtgcagctgtcgcctttgccccaggaaaacctttagaaattgttgaagttgatgttgcaccacccaaggctggtgaggttttaataaaaattacccatacaggggtatgccataccgatgcttttacattatctggcgatgacccagaaggtgttttcccagcgattttaggtcatgaaggtgcaggtgttgtagttgaagtaggcgagggcgtaacaagtgttcaacctggcgaccacgtgattccactttatacagctgaatgtaaagaatgcttattctgtaaatccggaaaaactaacttgtgtgttgcggtacgtgcgacgcaaggtaaaggtgtaatgccggatggcactacgcgtttttcttataatggccaaccgatttaccactacatgggctgttcaacctttagtgaatatactgtagttgcagaggtctctttagctaaaatcaatcctgaagcgaatcacgaacaagtttgtttacttggatgtggtgtaacgaccggtattggcgccgtgcataacacagctaaagtacaagaaggtgattcggttgccgtatttggtttaggcggtattggtttagctgttgtacaaggtgcacgtcaagcgaaagcagggcgcattattgtcgtagataccaacccagataaatttgaacttgctaaacagtttggtgctaccgatttcttaaatccaaaagattatgaccaacctattcagcaagtgattgtagaaatgacaggctggggcgtagatcattcatttgaatgtattggtaacgtcaatgttatgcgctcggctctagaatgtgcacatcgtgggtggggacaatcagtcattattggtgttgctggtgcaggccaagaaatttcgacacgcccattccagttagtgacgggccgtaaatggttaggtactgcgtttggtggagtaaaaggccgttcacaacttcctaaaatggtcgaagatgccatgaaaggcgatattcaacttgagccttttgtaacacataccatgcctctacaagacattaataccgcttttgatttaatgcaagaaggtaagtcaattcgtactgttattcatttctaa

SEQ ID NO: 50139 - DNA, 1872 bp, Acinetobacter baumannii
atgataactaatcgacaaaatgtgcaaaataatactaatacatcacctcatccaattaccaaaaatacacttattgatcggtttagtcctatttactggagaatagacggcccacaaaccatgtcttttgccattacaaattatggaaatggatttgaagcatcttttagatcacgtatgacaaatgacttggtagggattagctgggattcttatgatacgaaagatcataaacttttagcatatgaaaccaaatatagttatgcaggggtagtttgggattttgatattgaattatcggcttctatgcccgtacttaataatccaagtttaacgccaactttaacggtgtactatcatgacaatggcgtagataaaattgcatatatcgtcttatttaattatgcaaataatccttcgtcgcgaacggcgcatattcatattaactgggatacagttaaagccggtttttctgctacagatagctttccggtaaccaatattcaacgtatctcattttcaggctttactagccactataacggccagtcagctacgcctttaagccagccggaagatggttatattcgtattaccaattcagtcgtgactggaacaaatgcaaagttaaatctgagtcgtgttgttgtaccccagcacaattatgggatctgtaccagctatgatgaccattatgacttgaacccgcagcgcctagtcaacaatatggtcgctttgggatatcagggattggtaaaccactattgtggaatgtcgcattatcctgaaatgacatggaaaagcgatattaataaatggcaaataccggatacgttggtaacaggtgaggccgtcgtcaacgcatgtacccgaaaatggcatgaaaaatatgcccaagctctacataatgcaaacatgcaacccatttttggggtaagttttgagatgtattcacttggagcaaatgagttttgggcacagcgtgactggaatagcaatttaggtaaaacaggttaccaaccaccgagttatttctttagcttaagtgatcaaaatgctttggcttatttgcacaaagtttttattgagttcgcagatacaatggttgctggtggctgtaatgttaacatacaaattggtgaaccttggtggtggtataacacggacacgaatctaccttgtgtgtatgactatccaacaaaattagcctttaatgccgatacaggactatatgcgccagacctaggcacaatctatgaggctatgaataaaacaggtacgccgtatgatgagtttaaaacttggttaagaaataagttaggacagacctgtcaaaatattcgagcagccattaaagctaaatatgcaaatgctcaagtgtgtcctttaatatttttcccatccattcgttctccaatacaaaccctagcaacctatatcaactatccaagccagcactactcatatccaaattttgattacatcatgactgaagcttatgactggcttttagaagctaaattagatttagctcatcaagctgtttctcagataccaactcaagatttaggttatccggcaaataaagttgcatatttatctggatttgtaccagatgcatctattgcttatatctatggattcgacaaaaacaaaccttatcgaactccaagttggcagaggatttttggcgatatgaaaaataacgtatctcttggcctaatgaagcagtttatctgggcctatccgcaagtcatgttcgattcaattacaattgatacgacccaagccccaaatggcttctttgttgaaaatacactttactcaccaattagtgataacacaccgtatccaccagatatttacctttaa

SEQ ID NO: 50140 - DNA, 2973 bp, Acinetobacter baumannii
atgccacgccgctcaatcctgtccgccaccgagcgcgaaagcctgctggcactgccagatgccaaagacgaactgatacggcactacacgttcaacgaaaccgacctgtcggtgatccgtcagcgtcgcggcgccgcgaatcgattgggcttcgctgtgcagctttgctacttgcgattccctggcacctttttgggcgtcgatgagcctccgtttccgcccctgttgcgcatggtggccgcgcaactcaagatgccagtggaaagttggagcgagtacggccagcgcgaacagacacggcgggagcacttggtcgagctgcaaacggtttttgggttcaagcccttcaccatgagccactatcggcaagccgtgcatacattgaccgagctggccttgcagaccgacaaaggcatcgtgctggcgagcgcacttgtcgagaatctgcggcggcagagcattatcctgcccgccatgaatgccatcgagcgcgcaagcgccgaggccatcacccgtgccaaccgacgcatttacgcggcgctgaccgattctttgttatcaccccaccgtcagcgcctggacgaacttctcaagcgcaaggacggcagtaaagtgacgtggctggcatggctgcgccagtcgcctgccaaaccgaactctcgccacatgctcgaacatattgagcgcctgaaatcctggcaagcacttgatctgcccgcaggcatcgagcggcaggttcaccagaaccgcctgctcaaaatcgctcgtgaaggtggccagatgacgcctgctgatctggcaaagttcgaggtgcaacgacgctatgccacgctggtagcgctggccatcgaaggcatggccaccgtcaccgatgaaatcatcgaccttcacgatcgcatcatcggcaagctgttcaacgcggccaagaacaagcatcagcagcagttccaggcttccggcaaggcgatcaacgacaaggtgcggatgtatgggcgcatcggtcaagcgttgattgaggccaagcaaagcggcagcgatccgttcgccgccatcgaggccgttatgccctgggacaccttcgccgccagcgtcaccgaagcgcaaacattggcgcggcctgccgactttgatttcctgcaccacatcggtgaaagctatgccacgctacgccgctacgcgccgcagttcctgggcgtgctcaaattgcgggctgcgcccgccgccaagggtgtgctcgatgccatcgacatgctgcgcggcatgaacagcgacagcgcgcgcaaggtgcccgccgatgcgccaaccgcattcatcaagccgcgctgggcaaagctggttctgaccgacgacggcatcgaccggcgttactacgagttatgcgccctgtcggagctgaagaacgcgctgcgctccggtgatgtctgggtgcagggttctcgccagttcaaggacttcgacgaatacctggtgccggtcgagaagttcgccactttgaagctggccagcgaattgccgctggcagtggccaccgactgcgaccaatacctgcatgaccggttggaattgttggaggcgcaactcgccacagtcaaccgcatggctgcggccaacgacttaccggatgccatcatcaccaccgcgtcaggcctgaagatcacgccgctggacgcggcagtaccagacgccgcgcaagccatgatcgaccagacagctatgctgctgccgcacctcaaaatcaccgagttgctgatggaggtcgatgaatggacgggcttcacccgccacttcacacacctgaagaccagcgacacggccaaggacaaaaccttgctgttgacgacgatcctggccgacgcgatcaacctgggtctgaccaaaatggccgagtcctgccctggcaccacctacgccaagctgtcttggctgcaagcctggctcatccgcgatgaaacctattcgacggcgctggccgagctggtgaatgcgcagtttcggcaacccttcgccggcaactggggtgacggcaccacgtcatcgtcggacggccagaacttcagaaccggcagcaaagcagaaagcactggtcatatcaacccgaagtatggaagcagtccaggacggactttctacacccatatctccgaccagtacgcgcccttcagtgccaaggtggtcaacgtgggcattcgtgattcaacttacgtgcttgatggcctgctgtaccacgagtcggacttgcgcatcgaggaacactacaccgacacggcaggcttcaccgatcacgtgtttggcttgatgcatttgctgggatttcgcttcgcgccgcgtatccgtgacttgggcgaaaccaagctattcatccccaagggcgatgccgcctatgacgcgctcaagccgatgattagcagcgacaggctgaacatcaagcaaatacgcgcccattgggatgaaattctgcggctggccacctccatcaagcaaggcacggtaacggcttcgctgatgctgcgcaaactcggcagctacccgcgccagaacggcttggccgtggcgttgcgcgagctggggcgcatcgagcgcacgctgttcattttggattggctgcaaagcgtggagctgcgccgccgcgtccatgcggggctgaataagggcgaggcgcgcaacgcgctggccagggcggtcttcttctaccgattgggtgaaatccgcgaccgcagttttgagcagcagcgctaccgggccagcggcctcaatctggtgacggcggccatcgtgttgtggaacacggtatatctggagcgtgccaccagtgctttgcgtggcaacggcacggcgctggacgacacattgttgcaatatctgtcgccgctggggtgggagcacatcaacctgaccggcgattacctatggcgcagcagcgccaaggtcggtgcggggaagtttaggccattgcgaccgctgccaccggcttag

SEQ ID NO: 50141 - DNA, 1086 bp, Acinetobacter baumannii
atgaaaagtaagttaggaattagtaagcaactttttattgccttaactattgtgaatttaagtgttacgctattttctgtagtactgggttatgtgatttataactatgcgattgaaaaaggctggattagtttaagctcatttcaacaagaagattggaccagttttcattttgtagactggatctggttagccactgttatcttctgtggctgtattatttcattagtgattggcatgcgcctcgcaaagcgttttattgtgccaattaacttcttagccgaagcagcaaaaaaaattagtcacggcgacctctctgctagagcttacgataaccgaattcactccgccgaaatgtcagagcttttatataattttaatgatatggctcaaaagctagaagtttctgttaaaaatgcgcaagtttggaatgcagccatcgcacatgagttaagaacgcctataacgatattacaaggtcgtttacagggaattattgatggcgtttttaaacctgatgaagtcctatttaaaagtcttttaaatcaagttgaaggtttatctcacttagtcgaagacttacggactttaagcttagtagagaaccagcaactccggttaaattatgaattgtttgactttaaggcggtagttgaaaaagttcttaaagcatttgaagatcgtttggatcaagctaagctagtaccagaacttgacctaacatccactcctgtatattgcgaccgccgtcgtattgagcaagttttaattgctttaattgataatgcgattcgctattcaaatgcaggcaaacttaaaatctcttcagaagtggttgcagacaactggatattaaaaattgaggatgaaggccccggtattgcaaccgagttccaagacgatttatttaagcctttctttagattagaagaatcaaggaataaagaatttggcggcacaggtttaggtcttgctgttgtacatgcaattattgtggcactgaaaggcactattcaatatagcaatcaaggctcgaaaagtgttttcactataaaaatttctatgggtcatgaagagatagggtaa

SEQ ID NO: 50142 - DNA, 930 bp, Acinetobacter baumannii
atgtatattcactttaaataccctccaatcattgcgatagctagcctttcattagttatagcatcaggacagattttggcagcgccaaatggtaaccctactctgcctggcggcactacccaattttttattgctgaatttcctccaattactggaaattatcttcaaattatttctagttattctaaagcggatcaatttaatgatcagaatggtgataaaaaatatgatcaagaccttaaagtagctgcacaaactttaagacttacaactacttgggataagaaaattttaggatcagatattacgatatctgagattattggaacttatgttgatttaaataatcaaatacatacgccatatggagatgtcaaacttaacgatgatggactcgcagatgttttatttgagccattaattcttcaatggaataaaggacaacagaaacaatggcaaatggttgctggtttaggttttgttttacccatcggtacttatagtaaaagtcatgatgtgaatgttgcgggccactatttctcgattgcaccacgcgtagctcttaaatacaagtttgaaaatggacttgaagcagccataagtccgatggttaatttcaactggaaaaattcagattctaattacaaaacgggtaatgaactgaccattgattacttacttgcttaccacagcaataactggcgcttcggagcgactggatattattacactcaacttgaaaatgacgaattagatggccaagaaattaaagattcaaaaacgaaatcattttctattgggcccgctatccaatatcaatttatgaatggaaaaggtccactagttagtgcgagctggattaaagatgtggagtctgaaaataaagctgaaggtcaaactttctggctaagtgcagcaatcaaattttaa

SEQ ID NO: 50143 - DNA, 786 bp, Acinetobacter baumannii
atggaaaattttcttaaagatcgaaaatatattgatctctccgttactttagagaataacccatatacagaccctcctcctttattgccaaaaattgaatatatggatcatcaagaaggttggcctgaaatggaagctatgtttcccggtttagagttaaaagatttacccggagaagaagcgtgggctgcagagcgtttaattattaccacgcatagtggaacacacatggatgcaccttggcattacagctctacaactgatggcggaaaacctgcttatggaatagatgagctacctttagattggtgttttcgaccaggtgtaaaacttgattttcgtaataaaccagatgggcatgtaatatcagcatctgaagtgcaagaagaattaagcagaattggatatacacttagtcctttagatattgtacttattaatacctcagctggggcttattttggacaacctgaatatttaggtaaaggttgtggaattggtcgtgaagcaactttatggatgctagaacaaggcgttcgagtagttggtacagatgcgtggagttgggatgctccctttaaatatacaaaagagagatttgccgaaacaaaagatgcttctattatttgggaaggacataaagctggtcgagatatcggttatggacaaatggaaaaattagcaaatctagaaaacctacctgactatggatttttagtatcatgttttccttataagattaaacatgcttccgcaggttttgtgcgtgctgttgctatcttataa

SEQ ID NO: 50144 - DNA, 393 bp, Acinetobacter baumannii
atgatccttcggcataataatttatgcaaaagtattttgctgattttattgtcgggtggatgtttaaatattccaaatactgtgttcgcaggcgatttgcctccaccaccaagagacattaatgaaattaatcaactttttaaactgtatctcgatttggttgtgaaccaatattcggtccagcaagttgtgccagtgattgtgaaaaatgatgagtacttcatacaaaaaaagaagctgattgatgaattagaaattaagatccctcaagagttattaacaaacactgacacatctttatcgaatcaagatgttttgacattggggtttagtggtgacgcgagtgattggatatctttagataaattctctgtacacgataaaaatagataa

SEQ ID NO: 50145 - DNA, 834 bp, Acinetobacter baumannii
atggtgatttgtatgaacaattctgcatttattaaaaatggcattttaaaatcttttttatttgcaagtacattatcacttgttacacctgtgatggcacaagcaacttttctaatttggccgatttatccaaaaattgaagccaatgaaaaggcaactgcggtttggcttcaaaatacgggtaagaccgatgcgatggtgcaaattcgggtatttaaatggaatcaagatggcttaaaagataactatagtgagcaatcagaaattataccaagcccgcctgtagccaaaattaaagcaggcgagaagcatatgcttcgcttaaccaaaagcgccaatttgccggatggcaaagagcagtcatatcgtctgattgtagatgagttaccgattcgactttctgatggcaacgagcaagatgcctctaaagtaagtttccaaatgcgttactcaattccattgtttgcttatggaaaaggaattggcagtggattaaccgaagaaagtcaaaaacttaatgcaaaaaatgctttagcaaaaccggttttacagtggtcaatccgcaataatcaacaaggccagtctgagctatatcttaaaaataatggtcagaagtttgcgcgtctttcggcactgaaaacgtcaaaaacaggtaatgatatctctttaggaaaagctgcttttggctatgttttatcaaatagcactgtaaagtttgctattgatcagtcgacggcacatgagttgtcaaaaacatctaaaatttatggtgtggacagttctggtattaaacaagaattgatcgaaatcaccaaaatggaggatccatcatga

SEQ ID NO: 50146 - DNA, 711 bp, Acinetobacter baumannii
ttgaatagcaccgctcactctgaaggggtcgagtttgataaattcattaaagaaattgatgaatatccaaatgccgttgttttagatttaggttgcggtggtggtcatgtagcttataacgttgctcgccatgcagatctggtttttgcttatgatttatctcatgaaatgctcgatacagtgtcaaaagctgccaatgctcgaaaaataaaaaatatttttgtacagcaaggtattgctgaagatatgccttttactgatgaacaatttgatgtaatcattagtcgttattctgcccatcattggcagcatgtcccaacagcaatgaaagaaataaatcgtgtattaaagccaaatggcactgttatttttgttgatattattagctcaagtttccctattttagatacatttttacagactatagaagtgattcgagaccctagtcatgtaagaaattacagtattaaagactgggttcactttattgaagatgctggttttgaattaacaattttagaaaaacaaaccctcaaactagattttgatagttgggtacagcgcatgaagacacctgaagatcaaataaaaacccttaggtatctccaagaaaatgcagcagatgttgttaaaaagtattttaatattcaaaaagatggaagttttgaaagtaaggtcgggtactttgtatttaaaaaactatccttctag

SEQ ID NO: 50147 - DNA, 1677 bp, Acinetobacter baumannii
atgagtttagaatttgaaaaaaaagaatatgaagaaagattaagatatcgacttaaaattctttcagagaaattaagtgaaggtaaagttaaatttgctagtcacttagttgaagattttaaagagagtatgagaaagattaggtatgataaaaatggtgagattattttagattctgttgatggacgtattcgttcaatggctcttggtatagaacaaattgatactcgagataaattaaaaaaacaaatttcattatttgaaattcaaaatctatattttgaacttatagagcaaaattttggtcaattttatgaaaaaatgaatgagctaagagaaaatcctcataatattgctgattttttatctaggaaagaagactttgttgatggaatggttgagcaaatcccaagtttcatggaagcaattttagaattttggagaaatgttggtgacgtaggatattggcatttagaagacagcttcgacaatattactggagtatttgggggagatctattcccaacacatgacgaaaatattgcatctaaatgtggtatatacactgatactatagttttacctgatccttatgtcagatcaattcatgttttcaaacactatcctaaagaaagcaaagtttattttttgattaagcatgcactcaatttattaaagtataagaaactagcttgtacggatgcaggaaatcctgcggttgttattcttccagatttatcaaatttagaagaaaatgggagagattttatttatgagttttcccaacaagatgctttaattcatggtagtaagatatttggaagaaaatttgaaaatatagatgaatttgatgaattttgtctaagtttaaatactgtagagaaaacaattaaagcaataaaaaataaggaaagagttttatttgacagtgagtggaaagattcattggatatccaaattaaaagagctttaaaatctaatgaaatgaaagcgtatggtcgcacagaaccaggactattattccggatgcaaactgtaggtagaatgaccgtaactaatgagttgttgctcaaagccagacaactttcaggaactccaattatagaagctgcaacttcttggcagttctttaattggaaattggaatatgatgctgagcaagcccagaagtattatggttctgagaatttacatattactaaaggtttgacggatttatctaaaacagatttaccttggttagggaatattccacctgaatcattattagagttacgcaagcaaggcgctttagaggaaattagaaatatcttaggtcatgagattaaggaattaataaaaactaatcctactaattgttctagaactagggatcaaatattacaaaatatcgaacaaagttttgatagacatcggaaaaaacttgatgagctaaaagcaaaaaattggaaatttgctggaaaagatattggctcatgggttgttacaggaactttaggaataggtgctgctttgacaggtgaagcaacatgggggctaggagcttggatcgcaaatgaagttatggatgcacccaaattaagagaaataccacaaagatttcgtgatttggttgatcaaaataaacaagtaaaacaatcaccagttgggatgctctttaaggcaagtaaaagttga

SEQ ID NO: 50148 - DNA, 2157 bp, Acinetobacter baumannii
atgcaaaggactacgaaacactttcaaattaatgcattagcacttgcaatagcaatgagcacaatttcagcgcatgcagagactgatcagcagacttcggaatatggaactcttcctaccattaaagtaaaagctggaagtggcgaagaaaatgaaaaaagttatatagcagggaaaacagaaacagcggtaccactgggtttatccgttcgtgaggttccacaatctgtttctgtcattactcaacagcgtttacaagaccagcaattgtcaactttggttgaggtcgccgaaaatgttacaggggtaagtgtcaaccgttatgaaaccaaccggggtggaatctattcacgtggttttgtagtagataactatattattgatggtattcctacaacatatagcttgccttggtcttcaggtgaaattttctcaagtatggccttatatgatcatattgatatagttcgaggggcaacaggtcttacatttggtgctggaaatccatctgctgcaattaatatggttcgtaagcgtgctacgagtacagagccaacagctaacgtagaagtgagtgcagggagttgggataattaccgtgttatgggcgatattgccaactcccttaatcaatcaggaacagtgcgtggacgagcagtggcccaatatgaacaaggcgacagttataccgacttgttgtctaaagaaaagctatctttactgttaagtgctgaagcagatttatctgaaaatacccttttatcgggcggggtaacttatcaggaagatgatccgcgtggaccaatgtggggaggtttacctgtctggtttagtgatggcacaaaaacgaactggtctaaaaataccactacaagtgctgactggacacgctggaatgttaaatataccaacctatttgcagatttaactcataaatttaatgacaactggtcagctaaactgtcttattcttatggtaagcgtgatgctaattctaaacttttatatgtttcaggtagtgtagataaaaatactggtctagggctatctccttatgcatcagcgtatgaccttgaggtagagcaagataatgcttctttgcagctcaatggtagttttgatttgtggggcttagagcaaaaggttgttttgggttatcaatattccaatcaggactttacagcgtatgctcgttcaactgatacaaaaatggaaattggcaatttctttgaatggaacggcagcatgcctgagccagtgtggaatgcacctacactcaatgaaaaatataatattgaacaaaatgcactattcgctgcgacttatttaaatccgattgagcctctaaaatttattttaggtggacgttttacaaattatgaaaagaatatatatggtcgtagttcatccataaaatatgatcacgaatttgttccttatgcaggagttatctatgatttcaatgatgtctatactgcttatgcaagttataccagtatttttcagcctcaagacaataaagactttgatggaaactatttagacccggttgaaggaaacagtactgaagtaggcttaaaatctgcatggtttgatggacgtttgaatggtactttagcactttatcatattaagcaagataatttagctcaggaagcaggggacgtcactcgtaacggggtaaaagaaatctattatcgggcagcaaaaggtgcgacgagtgaaggtttcgaagttgaagtaagtggacaaatcacaccagactggaatattacagcaggttatagccagttctctgccaaagatgcaaatgatgccgatgttaatacccaacttcctcgcaagatgattcagacatttaccacctataaattaccgggcaaattagaaaacataaccgttggtggcggggtaaattggcaaagcagtacttatgttaatgctaagaatccgaagaaagttattgagaaagttgagcaaggagattatgcacttgtaaaccttatggctcgttatcaaattacaaaagatttttcggctcagcttaatattaacaacgtatttgataaaaaatattacggtgttttcccggcatatggccaaattactttaggtgcccctcgaaatgcggcactaacactacaatataagttttaa

SEQ ID NO: 50149 - DNA, 324 bp, Acinetobacter baumannii
atgactaatttcaaaaagcaccctgatggctacatgtcatttttaggccgtgatgataagggcctctactctgttcgcattggctggcaagtgtacgcatctaatgctaatggctcagttctttacaaagttaaagacggagttaagacgcctttaaatgtgttcaggttccaaacttcttatccaaaagtttggaatgaactcacccaagaaatcgattttcagcgcagaaagcagctcgctataaaactgcgtgaaacaaacatccctacctatgaccgcaaagcttataaaactaagcgcggcttcactggctcaagatga

SEQ ID NO: 50150 - DNA, 864 bp, Acinetobacter baumannii
atgcctaaaaaatttgaggactttaataatcctaggaaaaaagcacttgcagggatgaaacaaagcatttcagctgaactttgggacaaaaatcttaattttttaaatcaattaagagccaagatcgcgaaacatccagtatctcatcatcctgcaatagaaactttaaataacggtgaaattaataaagaaaacttaaagcgtattcatttagagtatcgccatgcaatcgtacaaacatttacagacgctttattaatggctcaataccagacaaagcagttagaacctaggttgcatgcaggtgcaaagatgtttccgcgctgtcttttgagtcttaacatatttgatgagtttgggtttcggcctgggaccgacaaagacggttattatcaaggtaacccagaatatgcacattatcctttatttgaagatgtgcttgatgattttgaagtaacggaggaagagcgccagagttatcaaccaacagaaattgcacatcaggtgagagagtttctagaaaattcctataaagactataaagccgtttctgctttattagctgtagctgaaaaagaagttattttgtacagtccacctttacgaaaagcaaccagtgctgtaggtatagcggtcgagggtggtggctattaccatgtgcatggagtatctgaagatgaaactgctgaggcagcagatgacgatcatgaagaagatctatggtttattttaatgcaagcttgtacagaagaagattacacttatttagaaaacctatgcctcgaatattgtgatttatgggaaaagttttgggatgttcaaatagaaaactcgaaatcaatcctgaaacaaaatttagcttaa

SEQ ID NO: 50151 - DNA, 162 bp, Acinetobacter baumannii; identical to SEQ ID NO: 46834

SEQ ID NO: 50152 - DNA, 522 bp, Acinetobacter baumannii; identical to SEQ ID NO: 46790

SEQ ID NO: 50153 - DNA, 489 bp, Acinetobacter baumannii
gtggtatcgattgtatatgtttgtgtatcgttaacactgctgctattacctgccgcatctgtaaacgttactttagcatcaatcgtcttatctgcatccgcagttaagtcactacctggtacgcttactgtccatgtgcctgctgtgctatctacagttgcagtatacgtctggccattgattacaacagtgaccactgtatttgctgcatctgccggaacgtttttcaatacaccagtaacagtaacgttgcctgacgcttctgatgcattaatcacattgtcagctgttactgaatcaaccgtaaagttaacaccatcggtatttggaccaactgcatcaacagtagctgtacctggcaaagatgggttgcctgctggatctgtagcaattgcctcaacttcgtcaccatcattaaggccagggtttggtactgaccaactgccgtccggtcctgctacaactgttgctgtgtcaccattaggatag

SEQ ID NO: 50154 - DNA, 1434 bp, Acinetobacter baumannii
atgcaatcattaaattatcggaataatgatgcatcgcaacatggaagttctgcacctttgaaacgagcaatgagtactcgacatttggtgatgatctcccttggcggtgccataggtacaggtctttttcttgggtctggcgacgtaatctctcaagcaggtccaattggcgcaattatctcttatttcttgggcggtctaattgcctataccgttatgctgtgtctcggtgagctagcggttcatgtccctgagtctggctcttttggtgaatacgcacggcgttatatcggtccaggtacggggtatatgattacttggctatattggctgacttggactgcaactttggggactgagtttaccgctgcggccctgttggttcaggagtggtttccatctacctcggtgtgggcttggactcttttctttggcgccttggttttctttcttaatgtaagttcaacccgcttatttgcagagtctgaattttggttggcgcttgtaaaagtaatcaccattatctgttttattggtttggggctgcttgcaattttcggctttattccttatcaggggcatgaaacagcaccattgttcagtaatttgactgctcatggttggttcccaaatggtcttttcccaatttttgccactatgctcatcgttaattttgctttttctggcacagaattaattggggtggcggctggcgaagctgagaatccggcaaaaacagttcctaaggcaattaatgcggctatctggcgcttattgattttctttgttggtacgattgtagtgattagttcactattgccataccacctagcaggtcttagtgcaaatgatgtgagcagtagtccatttgtgactgtatttaattacattggtattccttatgcagaggatattatccgttttgtaattattacagctttactatcagctgctaactcgggtttatttgctgcatcacgtatgatgtggtcactttcagcaaaaaatcaattacctaaaatttttgcgaaactcacgccgtctggaacacctattattgccattattgtgacaatgtttggtgctattccggggttgctttcagaacaatttgcaccagaaacaatttttaaaaatttgttaggtgttgctgcttttacaatggttgtcgtttggattgcaatttgtatttcgcaatttaacttccgtagacagtggtataagtcaggaaaaacagtaaaagatctacgtttcgctgcaccactttttcctcttactccaattgtaggcgggctattctgtatagttacttgtatcagtatggtatttgatccttctatgcaagtgggctttatctgctgcattatttttatcttgctatgctatgtcagctatttcatcttttatcgtaaaaaagatatagctcaaaactaa

SEQ ID NO: 50155 - DNA, 468 bp, Acinetobacter baumannii
atgaattattactttcagtcgagagaatggaattataaaaatattaaacctaaaattttagtggaaaattttttagaaactacagagcctttgttagatttcaggtttttctgttttcatggtaaagttaaaatgatttttgttgatatagacacagcagctgaggacggtacacataatccttctgctaaaagaaatatctatgatcgtgagtttaatttaatggactttactgtaggaagagaaaattttgatactagtttagttaataagccatataacttagataagatgattgaatacgcagaaaaaatctctaagccttttatattttgtagggttgatttatataacttaaatggagatataaagtttggggagattactttctacccaggtggagcaactcagcaatttagtagtgagcaagctgatctagaagtatctagttggttaaatatcaaatga

SEQ ID NO: 50156 - DNA, 894 bp, Acinetobacter baumannii
atgcaaatcaccattgtatctgcgggtaaaattattccagcgtctgagctgattagtgcaactttaagaactgatctcgtacctattcccgcatctattgagttcacagttcaatctactactgaattagactcccttttaaaagaaggggagctacttactgtaaatgacatatctcatcctttcgaacttatcaaagttacccctctaaaaactcagactattaaacaagatcggcgagtaggtggcatctcatgtattggtattttggctggttgtaaaagacttatcgaatattcaaagcaagcaattattagtaatgaaacttcttttaattcagtaattcgagcttgtggtgcaacgatcagtctgggcagtgatttacctttgcctaaatttgtttgtttaaagggtagtatgcctacacagcgcttggctcattatctgcaacaagaagcagctgtaatttgctttcaaaataataaagtgtctgctcaaaaaattgattctttcttcaaaaaggaacctatcacaaaactagatcctagcagtgtcgtttggatatcaagtaaacctttggaactgatgcaaaaatcatctttcgtgaccgtggagaataacggttcaacggttgttggtgatgactcaataaccccaggccacactgttacgcaaagagctggtttagatgcccgacaagttaaaaacttagaaaaagttttgatcttgcggggaaccataatcaggccgctaaatttgaattggaatgcgggcgatatattcgaaattgatagtaagaagtatatcgttttaacagctgcacatcatatagatacaggcgcaatcgggggatcaatggggacttcatcaaagttctggattgctaatttgtag

SEQ ID NO: 50157 - DNA, 672 bp, Acinetobacter baumannii
atgattgacaaaagtaagtcctcactaagcgaggttttatcgcagattaaagatggtgcaaccattctgattggtggttttggtaccgcaggacaacccgctgaactcattgacggtctgattgaacttggcgttaaggacctgaccattgtgagcaacaatgccggtaatagggattatggtctggcgaaactgctcaaagccggttctattaaaaaagtgatttgctctttcccacgtcagtctgactcttatgtgtttgatgaactgtaccgtgccggaaaggttgaacttgaactggtaccgcaaggcaatctggcgtgccgtattcaggcagcaggtatgggccttggggcggtgtttaccccaactggctttggaacacttttagctgaaggcaaagaaacccgccatattgatggtaaagattacgtgcttgagtatccgatcaaggctgactttgccctgattaaagcctataagggcgaccgctggggcaatctggtttaccgtaaatctgcacgtaactttggcccgatcatggccatggctgctgatgtcaccattgcccaggtttgtgaagtggttgaactgggtggattagacccagaacacattatcaccccaggtatctttgtacagcatgttgtacaagtacagcccgcacagtaa

SEQ ID NO: 50158 - DNA, 1125 bp, Acinetobacter baumannii
atgtttcagtttatccaacagcaaaccgaattggttgatgttcttcaacaaatggatcaatgttcaacttatgggcttgatacagaatttattaaggttgataccctttggcctaaacttggagtatgtcaagtcaatgtcaacggaaatgtatatttattggatggagtgtctttagatttaagcaagttttggaaaaaaatctttcttgctcaacaaaatatttttcatgcatgtggtgaagatattgatttaatctatcactatgccgatgaacaaaacctattaaatgtttttgatactcaagttggattatcctttttgggacatggtttacaagtaagttatcaaggtgcattaaagctttgtttagagattgatattgaaaaggatcagactcgatcagactggttggcacgtcctttatctccgcaacagctatgctatgcggcaaatgatgttttataccttatgcaattggctaaccatattaaagatcagcttaaacaaaaagggctttatgagtatgttcttgaggattgtagtagcttaaccaaagaaattattagtgaaacaccaaccccattgttatatacagatgtgggcaattatcgtcattcacgtcgtcaattaatgcaattgcaaaatttaagtgagtggcgtgaagaggtagttagagcaactaaccagccacgtagttttatccttagaaactcgacgatgattgatttagtcgaaaaaaatccacgcaatagtttccaattatctcaagtaaaagatatccgtccgaatgttgtccgtgaatatggaaagattattcttgatcttttaaaagacttacctgttgaaggacactggccagctaaaattgctaaaccttttaaaattacatccaaagaaaccctaaataaaatggatgcattgattgctaaagcgatagaacaaacctctataccaaaagaagttttacttcgtaagaaatggttaaatgcgattcatcagcatgtgcttactaaaggtgatgaacaggatctcccagattatttattgggttggcgctatgagcttttaactaagccgcttattcagttatttaaagaagagaaagccagtcttttattttag

SEQ ID NO: 50159 - DNA, 486 bp, Acinetobacter baumannii
atgcttgtgattattttaaagcaaacatgtaatctttcttctgcatctaaagccttgcccatcaagtgcttaccacaatcattttatcgacgtatgcagcgcttctttgcaggtcagtattttgattatcgtcaaatttctcagttgattttcaatatgttttcattcgaccaagtgcaactgactttagatagaaccaattggaaatggggaaaacgaaatattaatatcctgatgctcgcaatcgtttatcgtggaatagcgatacctatcctttggacattgcttaataaacgtggaaattcagatacgaaagagcgtattgctttgattcaacgctttatagccatttttggtaaagaccgtattgtgaatgtgttcgcagacagagagtttatcggtgagcagtggtttacatggttaattgaacaagacatcaacttctgcattcgtgttaaaaaaacttcattgtcaccaatcatttag

SEQ ID NO: 50160 - DNA, 381 bp, Acinetobacter baumannii; identical to SEQ ID NO: 47132

SEQ ID NO: 50161 - DNA, 771 bp, Acinetobacter baumannii
gtgacaaatgatggcctaagtttagattctttccgtagaaaaattgacgaaaatgatttaaaaaatttagattttgctgatttaaataagagcgactttgataaatattataatgaattaggtttcttaaaagttaatccagaattaatcagaagcaatgattatatttataattatgctcactatagtaattcacatataaaatcaaaattcccaactataaaactaaaagaactcctatccttgtctggcaaagtcaaagtgggagaggatacaaatatacctattatgagtatcactatggaacatggcttaattgatcagcatgagaaatttaaaaaacgagtcgcaagttctgatatttctgggtataaaaaggtttttaaaaatgaacttgtaatggggttccctatagatgaaggtgttctaggatttcaaaaatattacgatgctgctgccgtaagcccagcatacaaaatctttagattaaaacgagaagttaatgtagaatatttggatttgattttgagatctaattctctaagaaaaatatacaaaagtaaaatgcaaggcagtgtagagagacgacgcagtattcctgatgaaatgtttttgaatattgagatcccgaatcctcctgaagaggttaaagatcaaatagtaaaacaacataaactaataaaggaaattgagaatagtctcaaggaaaatcaaaaaaaattgcgtctaaagacagaagcattatgggaacttcctcaaaattacaactaa

SEQ ID NO: 50162 - DNA, 537 bp, Acinetobacter baumannii; identical to SEQ ID NO: 47236

SEQ ID NO: 50163 - DNA, 420 bp, Acinetobacter baumannii
atgaaaagtaaatattatttaacattagcagatgctgagtttttaatggaagaagctcagaaatatgcaattgaacacaactttaaagtcagtatagccattgttgatgaaacaagctctttattacttatgaaacgtctagatggcgcttctcctctcaccacacatctttgcttagaaaaagctaaatgctcatcaatgagtggtcgtccttcaaaattttacgaagagcttcttcaaaatggtcgtcttggtttcttgagcatgccaagtgctaaaggtatgctagaaggcggaaaagcgattatttatgaaggccagattttaggcgcgattggtgtttcaggtgttcaatcttttgaagatgctgaaattgctcaacacgctattgatgtttttttaaaaaaacaaagtagctaa

SEQ ID NO: 50164 - DNA, 285 bp, Acinetobacter baumannii
atgagttatctatttttatcgtgtacagagaagaaattattttataacggtaactatatgccatattcagatctctcatttcgcgcgttaagcgtcctccataagtctcgatatctttttaataaacatggttttcataacgtaggagtagaccgcattgtgcgagaagcagaggtgccaaaagcttcgttttataactatttccactctaaagaacggcttattgaaatgtgcctacactttcaaaaagacgtcttaaactctgtacacgataaaaatagataa

SEQ ID NO: 50165 - DNA, 1899 bp, Acinetobacter baumannii
ttgattttttttaaaaaaataagagaaaaagaaatcggtacacgaattttcgcaattactggtaattcaggtttaggtaaaagctcgttaattattaccctttctgaaaaagcaaaaaatcttcatcagaaaaaaaagttgttcttatatgctattgatgtaagggcagcaaagtctcctgactatatatattccgcattattaaaaacactaaaagaagcacaaaagaagggattcggtaattcaaagattgatttacaaattacaaatgttaatcatccactagaatcagaatctatagcagaatatttaaatagtcttaatacctcgaaacaactcatagtattagtttttgatcaattcgaagaattatttagtaaacctgatttattggaattatttaataatgcaagtaatattttattagatgcagctagcttaaaagctaatttatgtattgggtttgcgtggaaaactgatagtacaatgccttcagaacataatgcatatttcttttggcatagattatcagattatcggattgttagaaaattaaatcctttttcagatagggagtcgcatgcagtaattaataagtttgaggaagtaattggtgaaaaaatccatagtgatttaaggcataatttaattgttagtagtcagggatatccatggttattaaaaaaattatgtatccatttacatgagaagattttatctggccaaaaacaagaagatctattagataataaactggatatatctagtttatttgcaagtgatttagaagagctaaattctaatgaaataaaagctctaaaatttattgcccagaaagcaccagttgatttagttgacactattgatacgtgtggtgaagatatagttacaagtttactgcataaacgtttaattataaaaagtggtattagattaaatatttattgggatatatttagagagtatattttaacagagactgttcctattatctcattaagatatttgccttctaatgatttttcaacaatatggaatgttgtaaagtatttgtctaagaaaccaatttctattcaacagttgcaggaaaaaactgatttttcagagggtacaattcaaaatataggaactgatgttttattatttggtttagcaactagagaaaactcacaatatgtattatcggaagatttgttggaagaagaaaatacacaagagaatattctgaatataattagagaaaaatttaagaaacatattattactttacatctaaaagacctttcaagtggaacattattaacaattacaaatttcatagatttaatgaaagaaacttatcctgataataaatatgcagataagacttggagatcttatactattagacttattcgctggttagaattaacaggtttcttacagccagctacagagccaaatacatggatttataaagatttaggaagtcccaaaacttctgtgatgagtagaagacgtacttctaacttttttgtgccaagaattacacctcagttatttatatcgatatatcctcagattgcaggtaagaatcttcaagaattaataaatgatggtagaactaataaggctttagaaattttaaaaaaatttgaattaatagataatgaatttattttagatattaaagattttgagtctgtggtttatgctaaagctaattcagaatttagtatccaagctatgcttgaaattaaagagctatattctgctgataaactatcaggacaggctttaggtaagttgcttaaagaaaaatatgatttaaaatggactgatgtaactactcaatattcaggcaataaattgaatagttgggctaaatgggttaaatcttatgaagtgaaaaatgaataa

SEQ ID NO: 50166 - DNA, 2034 bp, Acinetobacter baumannii
atgactacacttaattatacggtaaggtttcaaaaaaccgttttggcaactttaattgggctttgtataagccaatcgagtttcgctcttgaagaactctctgatgctggtttgagtgaaactactggtgaaggtattgctattttacctcaaaatacttacatggtattgcgcggagctggagcgaacgaaaccaccaatcaaattttaacggatcgtactaaagatacaggttatattaattatgtgcctgttgggcctttaagtatgactgctgcagatacgaataaaaacggtacgatcgactctggggaccgtgcagtaggtaaagctgatatttttctttatggcttagctctttctaaatcagataacgatacaaatacccgtcttgcttctaccgatacagcagctgcaatttcgagttggggtacagctattaatccgtggatttttaaagttgcgacagaaaactctgtgcctaatttcagtgcaacaaattgtagtggagcagctgatccaacttgccaagtaacctatttagctttagaagcgcctttatatgaagtagggacaagagatactgctggacttgatgcctataaacttaaattaggtttatggtcagatatttttgttcgtaatccaaataaaataaatggtgcaacagatcaatttaactatggtgactctaatggtttgatcggcacgagtactgatgcaagccgcgcgaatcgtttacgtctgcaaggtatttggaataattttagtttaaatggtagccgtctacagctcttccaaactttgggtggtgcaacatccgcaaatggtttgagtccattttataacaatactttaggttttgcgggtgttgtacgtttaaatagtggcgatgcaactaatttaagagcaacaattactgcaaataccccaacatctacagtaggaccatgggtaaatcgttatagtactcaatatactggagcgcctagcaataattcccctagttcagattggttatatcgtattcgtagtcaaacgactactattacttcaacaggttcatggactgcaccaactgatagcgctatgaataatgtattacgtttaagtactcgtgaatctggtactggacaggggaatttaattactcccgctattaatggggggcttgcaccaacctttgatgcaaacgaaggtttatatctttataaccctaatattaatcttgtattagggtctttatatcaacctttagttttgagttcagatggtaaaaactttagtttggaactagcgcgtattccgaataaaccagaaatctataagaaaatttatactgactatactggaacagatagtagttacctcggctccacctgtaatgtttaccaatgtggtgccaatgtaaccttaggtggtaaaacctatcaaggttctaacgcaacacatagtagtatctcgattggttctactgtttataatgcaacgactaatactctagaggcatttaaagggaataatgctcaagatgctgtaggtatttcttttgggaaattaccgacaggaactgttactgctacaacacaaactagaaacttctatcaattacaaaatcaagaacgtcgtgtaaacagctatacatgtagtttaatttttacttgttatgattggcaataccgtacggcaacaggctggacaggaaatgctggctcaggcttaagatttgattctcaaggagcaaactgggcgaatattgatagtactgcttattataatccgacaaccaacacgacagggtacaccaccacagatgcagggaatggggctcaatttgttgtaccaaatggtacacctttacctgatgcactttacaataatggacgttggtatacgactacaccaaatgcagatataaacacatataaattatcaggagcacaaattagctcttcaattagtaataacatggggtcagctgttattgatggtgttttaattcaacatttaaagctcaccacaaaaggtctataa

SEQ ID NO: 50167 - DNA, 138 bp, Acinetobacter baumannii
atgagtttatttcgctatggtttagactatgttcaaatggcgattcagcgtttaattggttttgggaaaaaagaagagtttaaggaaattttggcaattttaagaaggcagaaccctgataggataagggttctgtga

SEQ ID NO: 50168 - DNA, 1443 bp, Acinetobacter baumannii; identical to SEQ ID NO: 45920

SEQ ID NO: 50169 - DNA, 555 bp, Acinetobacter baumannii; identical to SEQ ID NO: 49177

SEQ ID NO: 50170 - DNA, 630 bp, Acinetobacter baumannii; identical to SEQ ID NO: 49179

SEQ ID NO: 50171 - DNA, 573 bp, Acinetobacter baumannii; identical to SEQ ID NO: 49181

SEQ ID NO: 50172 - DNA, 225 bp, Acinetobacter baumannii
atgaacaatgatacctcgaaagttaatagattaggtaaaaaaatacaattcggtataattatatttgctttaactttaattttgcagttactgaatcaagttgtttttagaaatagtgataatgaaattttttcaaaactatcattattattcttaatttttactatgtcatcggtagttattttagtatacttagttaacgaatatagaaaaagcaataaataa

SEQ ID NO: 50173 - DNA, 198 bp, Acinetobacter baumannii
atgggttttaaatttagtttaattacctcaattattacggtattaggtatactacttgttttaataggtttgtattggtacaaatctaaaaaatatcaaaacgatttatgggttcagaatgtaggtcagatgactttttatataggtctatttctgagtataaacggcatcggtttatcaattaaattaaaccaataa

SEQ ID NO: 50174 - DNA, 279 bp, Acinetobacter baumannii; identical to SEQ ID NO: 49315

SEQ ID NO: 50175 - DNA, 645 bp, Acinetobacter baumannii
ttgtatgcaaatggtgcccattttgcgaccaatacttatgagttaggaaatgatcaactcagtaaggaaaaatcaaataatgttgagttaggtttgcattttgataatgacaaacttgattaccatcttcatgtttaccataactggtttgatgactacatctatgcgcaaacccttgaccgttataaagacttccgtttagttcaatacactcaagataaagctcgtttctatggtgcagagggtgaaattggttatcaaattacgccaatgtacaagatcagtgcttttggcgattacgtgcgcggtaagattgatgccgagggcaatgctccacgtattccggctgggcgtttaggtactaaagttgatgcagattttggtgacggttttagtggttctgctgagtactatcatgtctttaatcaagataagattgcggcttatgaaaccgaaacagaaggctacaacatgctcaatttaggggtagcatactctggacaatatggtgcaaaaacagattaccgtgtttatatgaaagcgaataacttgttagatgacacggtttatcaacatgcgtcgttcttatcaaatatcccgcaagttggacgtaactttaccgtcggtgtagattttagtttctaa

SEQ ID NO: 50176 - DNA, 699 bp, Acinetobacter baumannii; identical to SEQ ID NO: 48630

SEQ ID NO: 50177 - DNA, 723 bp, Acinetobacter baumannii
atgagtgaatcaactttatgggcggttgcaatgcgacctgaaggttacagcccttttaagcaaacgccagcagcttcaaaagagatagctgagcgagctgttgagcgttatagaaaaatgcatgaaaaggaaggcaacaactttttcttagaaatttttgatgatgttatcaaagttcagaaatggcacggttcccgcaaagatcatattaaaaatctattttatgttgagagttggtttagtgaacctatgtaccaatgctttgatttgaagacagctgaacgtgtttttaaatttgatgaaatagtaatttgctacaagaaaggctctgcccctcttgtaaccaaaagctttgatgaagcaaaactattttatggatctagtgagacgggttttaaatatcagatccagccaatagaaccacctgaaaaccttttcaattggtttcatccagatattgaattgtttgacaccattgaagaaggagctgaagcctatacaagagaacagtgggcacaacttcaaatgaatcttagagttgaaattgaaactcaactattagattacgatgaaataccaaatataccggaagatgcagtagtttggccaaactggaagccagaaccgccagaacaaggactctttttaattgcagcatttgattcagaagatggccctgtactttggtgggcaaatcctaaagcggaaagtaaggagaaataa

SEQ ID NO: 50178 - DNA, 1647 bp, Acinetobacter baumannii
atggcacttaatgtttttaaattcaaaaaaatatgcaaggatattacactatcaaattttaatttgcttttatctatctggctaggtttatttctgaatataggtttttttaaaaaaatccatcaacttacaccttataatggtattaagtcagttcttttcttaggggcgacattagttattttaatagcggcatataatttaatttttcaattaataaattggaaatggactgccaaaatctttgcaattttattgatatttattggtggctttagctcttattttgtaaacacattgggtgtcattatttcacccgaccaaattcaaaatatggtgcagaccgatgtttcggaatttaccgatctaatctctttacgctttgttttatggacagttttttttgttattttgcccatttttttaattactcaagttaaatttaaacaagaaaaagcatcacggttgttattgaagaaagtattctcactggtagcttcatttgcagtggtcggtgttttactttttacttactatgtcgatttcgctgcaatatttcgtgagcatcgtgatttaaaagggatgatttcaccgcaaaatagtatttcatcgcttatgtcttactatcataagaaggctccgaagaaaaatctgcctcttgtgatatatggacaagatgctcatcaagttcagcaagtacaaaagaacctccctaagttaatgatacttgttgtaggtgaaacggcacgtgccgaaagtttctctctaaatgggtatgcaaaaaatacgaatccggagctttctaaacaagatattttcaacttctcgcaagtgagctcatgcggtacggcaacagcggtttctgtgccatgtatgttctcgggtatgccacgtgtagattatgatgagcaattagctagtcaccgtgaaggtttactagatattgcaaaacgtgcaggttaccaagtgacgtggattgataataactcgggttgtaaaggtgcatgtgatcgtgttgaacaatatcaaattccagaaaacttaaagaaaaaatggtgtaaagatggcgaatgttatgatgacattctcattgacagcttaaagcagtatttggctactattgccaaagatgatgatcgtccgcgtttgattgttctgcatcaagtgggtagtcatggacctgcatattacaagcgtgcacctgaggcatatcaaccttttaaaccgacttgtgatacgaatgcgatacagggctgttcgcaaactgaattgctaaatagttatgataatacaattgtatatacagaccatgtattaagccaaatgattaatactctaaaagaaatatcaaaatatcagacaggtttatggtatttatctgatcatggcgaatcaaccggagaacatggtttatatttacatggttcaccttatgcaatcgcaccgagccaacaaacacatgtaccaatgattatgtggttctctgaaagttggaaacaacataatcttgctcaagtgaattgtttaagccaaaaaactaaacaaaagttaagtcaggataatttattcccaagtttgttaagtttgctggatgtaaaaactaaggtagtaaataacaaacttgatatgttgagccaatgtaaataa

SEQ ID NO: 50179 - DNA, 186 bp, Acinetobacter baumannii
atgaaatattatcgattcttaggtgatagtcgttttttattaagaatgagtgaagaacttatgaaatattgggtttacttttatatcgagcatacaattgaatatggtgaacctttctataaagaatctgggtggtctttgggttttaagaataattatattgttgtaagtttgatgcatagctga

SEQ ID NO: 50180 - DNA, 1521 bp, Acinetobacter baumannii; identical to SEQ ID NO: 46149

SEQ ID NO: 50181 - DNA, 1386 bp, Acinetobacter baumannii
atgagttatcgcaatattgtcgccaatcaacagtatcactttgctgacctaaaaacgttaatggccaaagctacaccgttacgttcaggcgatgagttagccggtgtagctgccagagatgcaaccgaacatgttgcggcacaaatgactttggctgatgtgccattaaaaacctttttaaatgaagttgtggttgattacgatactgatgaaattacacgactgattattgatgaacatgatctggcagcctttgcccctatttcacactttacagtaggcgattttagaaattggctacttggagaagatgccactccagaaagcttaaaagcattagcatcgggtttaaccccagaaatggtggctgctgtcagcaaaattatgcgcaatcaagatttgatttatgtcgctagcaaatgtgaagtggtcacccaatttcgcaacacaattggtttaaaaggacatctttctacccgtttacaaccgaaccaccctaccgatgatgtgctcggtatttcagccagtattttagatgggttgatgtatggcaatggtgatgccgtaattggcattaaccctgccacggataacctgcataatttgtcagagctactgaaattgcttgatcatgtcattcaggaatatcaaattccaacgcaatcttgtgtacttacgcatatcagctcaggcattcaactggctgaaaaaaatgtaccgattgatttaatgttccaatcaattgccggcacccaactggctaatgaaggttttggaatttcacttgatttactacaagaaggatatgaagccaccctcgcacttaaacgcggaaccattggacaaaacgtcatgtactttgaaacgggtcaaggtagtgccctatcaagcaatgctcatcacggcgttgaccaacaaacattagaaactcgtgcctatgcggtggcccgtaaatacaatccgcttttagtgaatacagtcgttggttttattggccccgaatatctctttaacggtaaacaaattatacgtgcaggactggaagatcacttctgcggtaagttacttggcgtgccaatgggctgcgacatttgttataccaaccatgccgatgccgaccaaaatgatatggatgtacttcttactctatttggcgccgcaggcattaactttattatggggattcctggttcagacgatgtcatgctcaactatcaaaccacttcctttcatgatgctctctatttaagacaactcttaggtttaaaacccgctcctgagttctccgcttggcttgaacaacaagggatttttaaacagcaaaactctcaaatttgttgggcagaccatatgcctgaccaattctctcgtctgctcatgaattag

SEQ ID NO: 50182 - DNA, 1437 bp, Acinetobacter baumannii
atgaatcaaccagaaacagcttccgttatttcttcaagtgcagaagtctcatcagcagaatattttgctcagcgccaacttaaacaaggtaccgtgggttggttactcctgattggtttaggcgtagcttatgtgatctcaggtgattttgccggctggaactttggtattgctcaaggtggttggggtggtatgtttattgccactgctcttgctgcgcttatgtacttatgtctatgtctttctatgtcagaaatgtccaccatgatgccgacagcaggtggcggttatagttttgcccgtgctgcctttgggccttttggtggttatttaacaggcacagcgattttaattgaatacgcaattgcgcctgctgctattgccgtatttattggtggttattgcgaatctctatttggtattaatggctggatgatttacctcgcctgttacgccatttttatgggtatacatctcaaaggtgctggcgaagctttaaaaatcatgtttgcgattacacttgtcgccgctgttgcccttgtcgtgtttattggggcaatgattccacactttaatgcacaaaatttatttgatattccagttagtacaggtgttggcgcaagtctttttttacctcatggctacttgggcatctgggccgcggttccttttgctatctggttttttcttgcagtagaaggtgttccgttagcagcagaagaagcaaaagatccagccaaatctctgccacgcggtttaatcggtgcaatgctcatcttaacagcatttgccatgcttattttgttcttgggtgcaggcgcagcaggtgcaagtactttacaaaactcaggcgcccctctggtagatgctttggttaaagtttatggcaccaacacttggcttgcgacattcgtaaactttgtgggtttagctggtttaatcgcaagtttcttctcaattatctatgcctattcgcgtcaaatctttgcattgtcacgagctggttacttaccgacgtcactctctttaaccaataaaaataaagctccttatcttgcaattattattccgggcattatcgggttcttactttcactcacaaaagaaggcgattcactcattttaatcgcggtttttggtgcaactatttcttatgtgctgattcttttatcccacatcaaactgcgcttatctaaacccgacatgcctcgtccttataaaactccaggaggaatcatcacttcaagcattgcactagttttagcagtcgctgctgtggtcgcaggttttgttgttaatccgaaagtgtggtttattgctgccggtatctatgtcgtatttattgcttactttttgttctacagccgctatcatttagtgaaaggaacaccagaagaagagtttgcaaatattaaagccgcagaacaagaactataa

SEQ ID NO: 50183 - DNA, 294 bp, Acinetobacter baumannii; identical to SEQ ID NO: 46219

SEQ ID NO: 50184 - DNA, 2139 bp, Acinetobacter baumannii; identical to SEQ ID NO: 42639

SEQ ID NO: 50185 - DNA, 471 bp, Acinetobacter baumannii; identical to SEQ ID NO: 42638

SEQ ID NO: 50186 - DNA, 375 bp, Acinetobacter baumannii; identical to SEQ ID NO: 42637

SEQ ID NO: 50187 - DNA, 1326 bp, Acinetobacter baumannii
atgacaaaatttaataataatcaatctgacaatttgttttctcaggtcttcggagtggctaaaaagctcagttctactggtttaaacatcttgcagcaaagtcaaattggtgaggtaagtaaattggttgagccactttcaaatggcaaaacagtagaaggtagtgccagaaataaaagtccgtttgaagtggagcagtatgaaagcccacaacaaatgttacgtgaacatttacctaaagttactcgtcaggtatttggacgccattttagaaaggtcaatggtatcgctacatttatttcacctgactggaatgaaaaaatatcaagctatttatttgattggttgaatgactttagttcgaaaagtacgttaactgaaaaaattttagaagaagcgggggctaaagacttatttgagcttacaaaagatacctcacgctcccaacgtttaagtcaggcacttattgaacaaaataaattgattgccagtattcaaggtgcaattacgggcgtatctggaatggttggagcagccgtagatattccagtttcattagtcctagttttgagaacaatttaccaaacaggtagatcacacggctttgatttaaccgaagcaactgaccaagacgtagttgaatttatttttaaagaagttgatatcagcttaattgcggaaaagcagactttactcttggcacttaaagccttacgaaatatgttggagactcaagatattcaacagttccagcaagtacttggctcttcaaatgatattgaaaccttaaaaagctggttagttgatgaaaatggtgagtttaaatggaactggttaaataaagttccgcaacttgctgtggtaggcaagtttactccagtagctggtgcagtgcttagtgctgtttatagttggaagttacaagaagatgtaggccataaggcacaagctattttcggtgcagcaagacattatttaaatgaacatccaaatgagcatttatcaccattacaggcgtactatgcggcggtaactctaattcaaaaagcgagtccacgtcttttaaatgtgggtgaaaatggtagtgtccatgctacgcagcatcataaaattgaaaatcatgatgtaatttcaaaagtatctgttgtggtcaaatcaaatacttctgaaaaaagcgaagaaaaagttcaagaaaatgttcaccaaggaattgagcatcttgcagagaaacatgtagttgaacatgaacatagtgaacaaaagccagcattagagcctgaaagtgaagaaaatgatgacgttatagaggggcaaaagtactcttaa

SEQ ID NO: 50188 - DNA, 1230 bp, Acinetobacter baumannii
atgaaacgtgttgtaatcactggtatgggtattaactcatgtatcggtaactctttagaagaagttactcattcacttaaaaatggaatctccgggacacgttttaacccaacttatgctgaactcaattttaaaagtcatgtcagcgctgcggcagaacaagattttgacaatattgatcgtaaattaaaacggttcatgggcgtatgtgcaatgtacgcttataactctgctgttgcagctgttgaacatgctggcttaaaagcagaagatttagcagataatccacgttatggtattgccggtggttcaggcggtggttcaactgcttctgttgtagaaatgactgaacttttagaaactaaaggtgctcgtaaagttggtcctttctttgttccacgtaacatgacaaatacaatcactgcaaacgtgggtgtagcatttaaacttcaaggtattgctcactcaattgcaagtgcttgtgcaacttctgcagacgcaattggttatgcatataaccttatcgctctaggcaaacaagatcttatgcttgctggtggtggtgaagaagatcactggtctcaaagcctattgtttgatgcaatgggtgctctgtgttctaaatacaacgacacacctgaaacagcgtctcgtccatattctaaagaccgtgacggtttcgttattgctggcggtggcggtttcgttgttcttgaatctcttgaacatgctcaagcacgtggtgcaaatattcttgctgaagttgttgcttatgctgcaaacagtgacggtgctgacatggttgctccaagtggtgaaggtgcaactcgctgtatcttgatggctcttgaagaagcgaaacaacacggcgtagataaaattgactatgtaaatacgcatggtacttctacaccagcaggtgacgtgactgagcttaaagcaatggaacgtgctttcggtgaaggtaaagttccacctcttagttcaactaaatctatgactggtcacagcttaggtgctgctggtgttcatgaagcaatttactctgtattaatgcttcaaaatgactttatcgcgccaaacatcaacgtgactgagcttgatgaaggtactgaaggctttgatattgtgcttgaaaaacgtgatacaaaattgaatactgtaatgagtaacagttttggctttggcggtgttaacgcttgcctaattttcaagaagtgggatgcataa

SEQ ID NO: 50189 - DNA, 453 bp, Acinetobacter baumannii; identical to SEQ ID NO: 42634

SEQ ID NO: 50190 - DNA, 861 bp, Acinetobacter baumannii
atgaaaagtctggcttttattcatcgtaacgatactcgctttgcggtcggtgatttttatccagttctttctgttttttcctaccatgagttaggcaataccctctcacccttcttactactcgaccatttaggtcccggaaaaattgcaccttctatgaaacgtagaggagttaatgatcatcctcatcgtggatttgaaacggtaacacttgtttatgcaggtgaactggagcataaagattcatctggtggaggtggatttataagtgctggcgatgtgcaatggatgaccgcagcctctggtgtgattcatcgggaattgtttagtgaagagtattctcgatctggtggtccctttgaaatgattcaactttgggtcaatttaccagcagcaaataaaatgaattctccacgctatcaaagtttaaagaaagctgaaataccgatggtgaaactggaaaatgaagctggatttgtacgtattattgcagggcagtttaagcatgttatgggccctgcacttactcacactcctattaccgtattagatgtagagctccaggcaggtcaacaagctgccttccctgctcaatccggtgaaacagctttagtttatttacgttcaggtcgggcacaatttcataaagatgaagacgttttagaggaacaaggcctagcagtcatgtcaaaccaaggagagcatttctctattactgccctgcaaaactgcaaattacttattttgacaggacaacccatcgcagaaccgattaatggtcatggtccatttgtaatgaatacttatgatgagattttacaagcctatgatgatattaaaaatggaagatttgccaagtaa

SEQ ID NO: 50191 - DNA, 561 bp, Acinetobacter baumannii
atgaacttatttattagcaaaactatgttcactctcaacgcttttaaaattgtcatatatcgacaatttattattttcaccctttttatatttcgtcacttaaaaagctatccaattcgatttcttacacctgaagaaaaagctttagcacaaagggtgtttgggagtttgctagattgtgaacgtcctaaaattattgctactcgttacttaccgtggcaagcgcatggaattttgatggctccaaatgggaatatatatgtcaatctttctgactacagcagtaattacgcgctagagtctaaattcatacaagggatttttattcatgagctagctcatgttatgcaataccaacgaggtattcatgtattactaaaaggtgcgttactgcaatccgcctactatctgagttttaagtattacaacccttataaatatacttaccatcctcagaaagcgtttagttcttacaatattgagcagcaaggagaaattgctagagatatctgttcaggtaaactgccaaatatcatttgtttacctcagcttgatttgtaa

SEQ ID NO: 50192 - DNA, 1626 bp, Acinetobacter baumannii
atgaaaagttttaaagttgcccttgctcagttttctccgcatattggcaatattgactcaaacacccaaaagatgattgagcaagcaaatcaggcgaaaaaacaagacgctgacctgattatttttcctgagctttctgtgattggttatccagctgaagacttattgttacgtccaaatttaaataagcggatgcaaaaggcttttgctcaacttagtgaagttaaagatattgtgatggttttcggcttcgtaaaccagacagaagatggccaacgttataattcagctgctgtcatgaaagacggtcaggttttaggtgtcttcaataaacataacttgccaaactatggcgtttttgatgaaaaacgttatttccaaaaaggccatcagcacttggtgtttgagtatttaggccataagtttggtgtactcatttgtgaagatatctggtcaatcaatacagtaaaacaattaagccaattaaatgttgatactgtacttgtgcttaattcatcgccatatgaagtgggtaaaccacagcatcgtaaacagacattaagtgagcttgcaaagcagcttcatttaaatattgtttatgttaaccaagttggtggacaagatgatttaatttttgatggcacaagttttgtcagcaatcaaaatggtgaaattgctttacaagcacctagctttaaagaagatctctatattgctgaatttgaccgcgatacaaaattatataaagttgtcgagtctgctcctgcattagaaacttttgcagagatctatcaaggcctagtcatggcaacacgtgactatgtagaacgctcaggttttcctggagtaattttaggtctttctggcggtattgactctgcccttacgcttgctattgcagttgatgcaatcggtgctgagagagttcaagctgtgatgatgccatatacttacacatctcaaattagtgtagaagatgcagcggaacaagctcgccgtatgggcgtgactttcggtattgccgaaattcattcaatcgtaaatagcttcatgcaaactttgtatccgttctttggtaattcaccagccgatgcgactgaagaaaatttacaagcgcgtgctcgtggcacattacttatgggcttatctaacaagtttggtaatttagtcctttctacaggtaataaatctgaactttcagttggctattgcacactttacggtgacatggtgggtggctttgctgttctcaaagatgtttataaaacaatcgtgtttgaattagcaaaataccgtaatagcttaagtgaaactccggttattcctgagcgtgtaattactcgcccaccttcagcagaactacgtccagatcaaaaagaccaagactctttaccagcgtatgatgtattggatgctatcctttatgcatacattgaggaagatttaggtcaggcagacattattgccaaaggttttgataaagaagttgttgaaaaagtcatccgtttagttgatcgtaatgaatataaacgtcgtcaaggtgcgattggcccgagaattacttctcgtgcatttagtcgcgaacgacgttatccgattgtcaacggttggacagcgaatgactga

SEQ ID NO: 50193 - DNA, 957 bp, Acinetobacter baumannii
atggcgagtcattatgaaatgttcccagcggttgttactcgtgtggaacagctaacccctttaatcaaacggtttacgttcaaacgtcaagatgggcagaactttcctcgatttagtgggggaagccatattattgtcaaaatgaatgaacaactttctaatgcctactcattgatgagctgtacgcaagatttatcaacttaccaagtctgcgttcgtaaggatgtggaaggtaagggtggatcagttttcatgcatgatcagtgcaatgaaggctgtgaaatccagatttcagaaccaaaaaatttattcccgctagctgaaacaggcaataaacatatcttgatagctggtggtattggtattacaccattcttacctcaaatggatgagctggcagcacgtggagcagagtatgagctgcactatgcttaccgttcacctgaacacgcggctttacttgatgaattaaagcagaaacatgcagagcacgtatttagttatgtcgattcagaaggcagcatgcttaacttagatgaattaatttcatcgcaaccaaaaggcacacatgtatatgtatgtggacctaaacctatgattgatgcggtgattgattgttgtaacaagcatcgttaccgcgatgaatacattcattgggaacaatttgcctcaacagttcctgaagatggtgaagcatttacggtggtacttgccaaatctaatcaggaaattgaagtacaaagtaaccagactattttacaagccatcgagacattaaatattgatgtggaatgtctatgccgagaaggggtttgtggtacatgtgaaaccgctatcttagaaggtgaagcagaacacttcgatcaatacttaagtgatgccgaaaaagcttcacaaaagagcatgatgatttgtgtatcaagagcaaaaggcaaaaaattgatattagatctttaa

SEQ ID NO: 50194 - DNA, 1452 bp, Acinetobacter baumannii
atgtcgagtttacaaagtactgaactatttcagcaacaagcctatattaatgggcaatggttagctgcacagtcaaatgcgactgttccggtgagtaacccagctacaggcgaagaaattggcacaattcctaatatgggagcggcggaggcaacccaagcaattgaagctgcctatacggctttacaaagttggaaagctttaacggcccaaaaccgtgctgatatcttattggcttggcataaactggttctcgattataccgatgaacttgctttaatcatgaccattgagcaaggcaagcctttagcagaagcaaaaggcgaggttcgctatgctgcatcatttattcaatggtttgccgaagaaggcaagcgtatttatggtgatgtgattccaaccgtaaataaccagcagcgctttattatcagtaaagaacctgtgggtgtggtggctgcgattacgccgtggaatttcccgattgccatgattacccgtaaagcagcgccagctttagcagcgggttgtacggtcgtgattaagccagccaatgaaacaccttactgtgcattagcgattgcaaagcttgcagaaaaggcaggtataccagctggtgtgattaatgttgttactggtaaatctcaagaaattggctcggtatttacttcacatgaaaaagtgaagaagttgactttcactggttcaacgccagtgggacgcttactgatgcagcagtgttcaagcaccattaaaaaattggcgcttgagttgggcggaaatgctcctctgattgtgtttgatgatgccgatttagataaagctgtacaaggcgcgatttttgccaagtttcgtaatgcaggccaaacctgtgtttgtgctaaccgcatttatgtacatgacaatatttatcaagcttttgccgagaagtttgtacaagaagtacaaaagtttaaagtcggtaatggacttgaagatggcgtacaaattggcccattaattaatgaaaaagcagttttgaaagcacagcagttaattgatgatgcagtgagcaaaggcgctaagattgcctgtggtggtaagcagcatgctttaggacaaaccttttacgaaccatcagttttaactaacgttgaccgtacaatggaaattgtccaagaagaaatttttggtccagttgcgccgctcattcgctttacagatgaagcagatgtggttgctcaagcaaatgacacaatcttcggtttggcagcgtatgtttatagcgaaaatatttcacgtttatggcgagtgtcagaacagcttgaatatggaatggtcggtatgaatgccactgcaatttcaaatgaagttgtaccatttggcggtgtgaaacaatcaggtgttgggcgtgaaggctcaaaatatggtcttgaagaattcatgaccattaaatacatgtgtttagggctttaa

SEQ ID NO: 50195 - DNA, 1116 bp, Acinetobacter baumannii
atgagtgcagttgaaaaattacctgaagatttttgcgcaaacccagatgttgcatggactttccctaaagttttctatacttcatctcaagttttcgagcacgagaaagaggcaatctttgctaaaagctggatctgcgttgcacatggtagtgagttggctcagccaaatgactatattacccgtaaagtgattggtgaaaatattgtcatcattcgtggtaaagatagtgttctacgcgcattttataatgtgtgcccgcaccgtggtcatgaacttttaagcggtagtggtaaagcaaaaaatgtaattacctgcccatatcatgcatggacgtttaagctagacggtagcttggcattggcacgtaactgtgaccacgttgaatctttcgataaagaaaactcaagcatggtgcctttaaaagtcgaagaatatgcaggtttcgtatttattaatatggatgaaaatgcgacttgcgtagaagaccagctgccgggctttgctgaacgtttaaatcaagcatgtggtgtgattaaagatttaaaattggcagcacgctttgtgacagaaacaccagcaaactggaaagtgattgttgataactacatggaatgctaccactgtggacctgcacatccgggctttgctgactctgtacaagtcgataaatactggcatacaactcatcaaaactggacattgcaatatggctttgcacgttcatctgagaagtcattcaaacttgatccatcagtaacagatcctgagtttcatggtttctggacttggccttgcaccatgttcaacgtaccgccaggcagtaacttcatgacagttatttatgaattccctgttgatgcagaaacaactttgcagcattacgatatttacttcactaacgaagaactgactcaagatcaaaaagatttgattgagtggtatcgcaatgtattccgtccggaagatttgaacttggtagagagcgtacaacgtggtttgaaatcacgtggttatcgtggtcaaggccgtatcatgactgacaagcaacgttctggtatcagtgagcatggtattgcttacttccaacatcttgtggcgcagtaccatcaataa

SEQ ID NO: 50196 - DNA, 975 bp, Acinetobacter baumannii
atgacgacatatgaacaggctacttatgccttaagtgaagaaatgcaaagccttgtgtactggagcagcatttattcaccagcagatgcagatattgactcagtccgtgcggcatatgatgccatgtgccgacactacactttgccacgtgatgacaagttagatgtagaagatcgagtgattgcaaatgaagagcaccctgtgcctgttcgtgtgtatttaccaaaaacaaatcgacctgagtctggttggccatgtgtgttgtatctacatggtggtggttggatggtaggtggactcgattcacatgagtttattatcagttatttgtgtaaggacttaaatgcggttgttattagtgtggattaccgcttggcaccagagcatcgctttccagcagcctttgaagattgtttagcagtctatcactggcttaaacaacatggttcagcttggcaaatcgatagtgaaaatatcgttctagcaggcgatagcgcgggcggtaatttagcagctgcccttgcagtggaactacaacatagtggtttacaagctcaagggctggcattggtttatccatgtttaacgacagcatttgatactgcatccgcacaaaagcacgcccatgcgccgttgttaacgacagaagatatgcatttttatttaaaggaatatgctccggactcacaagattggcaggatttacgtctagcccctttattggcgacggacttttcagatatgcctacaagttttgtagccgttgctgaatatgaccctttaagtgatgacggttatttccttacccaaaaattggaacaagcaggtatccctaacgagttccatttaggcaaaggtttattacatggcagtttacgtctgatgcgtgactgtccggaagttcaacagttatatcaaaacatgctgagtgcgatacgccgcatgtttggcagtgtcgaaaagacatcaatttaa

SEQ ID NO: 50197 - DNA, 1113 bp, Acinetobacter baumannii; identical to SEQ ID NO: 45783

SEQ ID NO: 50198 - DNA, 981 bp, Acinetobacter baumannii
gtgaataatctacctaacctatcggatttaaaggttttttgcacagtcgccaaactaaaaagttttgtcgaatctgctgaggaactcgggacatcgccagcttttattagcaagcgaattaatattttagaaaacacgttgagctgcaaactttttcatcgcagtacacgtcacgttagcctgacagaagatggcaaactcattcttgagagagtttcaaatattcttgaagaatttgatgaagtttgtgaactggtcaataacccactcagtacgcctacgggtcgtatggatattattagtagctttggttttggcagaaaacatgtcgcaccaattttgtctaaattaatgatgctgtatccaaaactacagattcattttgataccatcgacaataccaaagacctgattcaacacagtattgatttagacattagaattggtaatgaaattgcacccaatatgattgcgaagaagctggcttctaattttcgtattttgtgcgcgtcaccgagttatttacttaaacacggcgtacctgacagtattgaagatttacaaacacatgactgtttaacaattagtgaacgcgaccaatcctcggttttatggaaatttaggcatgcttccgaagatgtctcagtgcatatcaaaccccgctttgtttcaaataacggcgaaattattcatcaacttgccatagaaggtcacggtattattttccgttcgatttgggatgtagcagatgaattgatcaccggccaacttcagcatattttgcctgaatactggcaagatgcagatgtctgggcggtttatccatcacgactcaaaagctcctccaaactgcaaacctgtattttgtttattcaaaatgaattgctcaatcgtttacagcatgtgcaaaacctaagccgtggacaactcatttcaccagccgtcaaacgagaaccaccgcctgaaaaagtctttctataa

SEQ ID NO: 50199 - DNA, 1185 bp, Acinetobacter baumannii
atgaaaaggtcattattatttttaggaattctaagtttaactgctggaacacaagtctctgcagctgatttgagttggggtgatccaactttagattcgggtcaatttaaagtgtctggtgcaatacgttctcgctatttacataaagattatgtggtcggggcgaatgaaggttcccaaaatgatgactggcgactcacagatattaaattagtgttgggttatgaaaatccaaactggattgcaggagcagatgctcgctgttatcaatatgatcgcttgtgtgatgcgatttttctaaaaaaagcttgggtagggtataagttatctgaccaacaaagagtcacggcaggtttgcagcctgttgattttggctttggtgaattttggggaagtagttattacgaaacgcttttaaataccgttggtttagaagatattgataatctggggattaaatataaatttgcagatgacaaatacaatttaaccttaggattctatccaactgatggaggaaattataaggggacatcaaaagactcaagccgatatagtggtaatttcgttgaagctgatgacttgacggtagggaccaatattgaagaaaaaaatatgtggattgcgcgggcctctagaaaatttgagcttgataaagctcaaaaattttcgaccgagttaggtggttcagtttggtattcagatttagaaaataaaagaacagatgaagatggacaccgcaaatcatggaatgtatttgctcaaacgcaatatcaagcatggcaatggatgttcttagcaggtaagcaagatgtcactaatggcgataatttattgccaaatagctcaaccattggagcatttgattatccgtatcaagttgctaacaaaggcaaatatctagtcaatgaaattaactatacctttgctcagccattccacaaaattgaaaatattaagccctatatctctcatagccgctttttcaaagatgaggatggatataaagactctgagcgtttaattgcaggcgtttattttaattacaaagccattggtattcagggtgaatatattatgagtaaaaatgatccaatggtaggtggtggggcgaatggccttgcacaaggtagcagtaatgattgggataaactgttttatctttcaattggatattatttctaa

SEQ ID NO: 50200 - DNA, 264 bp, Acinetobacter baumannii
gtgtcgttatatatcactgatgaatgcataaactgcgatgtttgtgaaccagtttgtcccaatgaagcgatctttatgggcgaagtgatttatgaaatcaatccggatttatgtacagagtgcgttggtcaccatgaccagccacagtgccaattattttgtccagtagactgtattccaaaagatccgcagcatgaggaaacggaagaacagttactcgacaaatataaaagattaattgctcaaaaaagcacaagcaattag

SEQ ID NO: 50201 - DNA, 492 bp, Acinetobacter baumannii
atgtctaaaacgcgtgtaatttatcctggaacatttgaccctatcacgaatgggcacgttgatttagttactagagcatcaagaatgtttgatgaagttgtagtagcgattgcaattggacatcataaaaaccctttgttcagcttagaagaaagagttgcactggcgcaatcatcattaggccatctatcaaatgttgagtttgtaggttttgatggtttgttggttaatttttttaaagaacaaaaggccacagcagtacttcgtggtttaagagcagtttctgactttgaatatgaatttcaactggccaatatgaaccgtcagcttgatccacatttcgaggcggtgtttttaacaccttctgaacagtattcttttatttcttcgacattaattcgagaaattgctcgtttaaaaggagatgtaaccaagtttgttccgcaagctgtggttgaagcctttgaacgtaaacatcaacaaggttggtaa

SEQ ID NO: 50202 - DNA, 477 bp, Acinetobacter baumannii
atggcgaaagcaacagtagtaaagaaacataatggcggaaccattgcacaaaacaaacgtgcccgtcatgattattttatcgaagaaaaatttgaagctggcatgtctttactaggctgggaagtaaaatctttacgtgccggtcgtatgagtttgacagaaagttatgtcatttttaaaaatggtgaagcattcttatttggtgctcagattcaaccactcctttctgcatctacacatattgtgccggaagctacacgtacacgaaaattattattatctcgtcgtgaacttgaaaagcttatgggtgcagtgaaccaaaaaggttattcgtgcgttccattagcatgttactggaaaggtcatctggttaagcttgaaattgcactcgtgaaaggtaaacaacttcacgataaacgagcaactgaaaaagaacgtgactggcaacgtgataaagcacgtatatttcataagtaa

SEQ ID NO: 50203 - DNA, 330 bp, Acinetobacter baumannii
atggatagtacatctaaacgttggaaaaatcgtttatggcaggggaagttagcagcgggttttgcaaattcgggcggtttaagtggtgataaactggcggttctgcaacaacttaatatttttgcgatgcagcacggcatgttgtggtcaggtttacctttaatgacaacaggccatactgaaaccgatttaaaccgtttatcgagctgtttagggttgatgactcaatcagataatgcacctgttgaaattacaccgccgcaaggtgatttagatacggctaaatggtttggtgaatatattgctgggcttttatatagattaaattag

SEQ ID NO: 50204 - DNA, 1380 bp, Acinetobacter baumannii
atgtctcaaacaatcacactgtatgttgatggtgcatgtcgtggcaatccgggtttaggcggttggggtgcatatgtcattaccgaacagggtgaacataaattatttggcggtgaacccgacacaacaaataaccgtatggaacttactgcggctattgaaggaatctctttttgccctcctgatgctcaattaattgtctggacagactcaaattatgtgaagcaaggtattacagaatggattcatggttggaaaaagaaaaactggaaagatgttaaaaatcctgacctatggcaaaaactcgatgccgtttgtgcgggtagaaatattgaatggaactggattaaaggccatgcaggacatgcaggtaatgaaatggctgaccaacttgcgaatttaggtgcagacaaaactgctcaagaacttaagcaaccacagtcagccactgtatcgcaagatataaaaaagcctgaacaagactggttactagacgatcctttcggattcgatctggttgaaacaaccgaagatgaaacggtcactttagagcagacacaagaagttgagatgattgttgtggatgaagaaatgaatgtagttgaggctgtagaacaagaagaacaacagcaaaataccaatattcatccacaaattgtgatgactgaagccaagcttaaattacaaggcccaagacaactcatactcgatacggaaacaactggtttctatttccaagatggtgaccgcattattgaagtcggtgccatcgaaatgattaaccgtaagcttacgggtagttcgattcacatttatattaatcctgaaaaaccagtgggtgactctgttcaagtccacggtattactgatgagtttttggtcgacaaaccaaaatatgcagaaattgcagataccttatttgaatacctaaaaggcgcagaaattattgcccataacgcaaccttcgatatgaacttcttagatatggagtttaagcgtgttgggttacctgctctttcagaagtttgtgaagttaccgatactttagctttagcgaaaaataagcatcctgggcagaaaaactcacttgatgccttagttagacgttatgaaattccagcgcgtgaccgtactttccacggcgcattactcgatgctgaaattctttctgatgtttacttggcaatgacaggtggtcaagtttcctttgatatggatgccctatcgcaaagtgaaagtgaccagcaaaaaacgaccaaagctagagttcaaattgaattacctgttatttacccttcagatgaagagctaaacatacatgagacttgggtcaaagaatttgagaaaaaacatggagaaccttgcctttttgcaaaataa

SEQ ID NO: 50205 - DNA, 744 bp, Acinetobacter baumannii
atgtctgagttatcacttgcttatatttttcatcatcaacaattattggttgaccaaaaccttcaattacccaaagtcgaaaagttagcaagtgatctgcttttcactcatgatgaacaggtcattgcacgtgacctgttgagtgaagaagccattccggaaggcctgcaactcgttccaattcgtcaacttatttccaactggtcaaaagaacaatttttacaggcaagtcgtgctgtacagttgctcgaatggcgacgtaatcacaagttttgtagtcactgtgggcatgctaccgaagtacaccctacagaatatgctatggtgtgcccttcttgtcgctaccaccaatatccgcgtgtaaacccatgtattatcaccatcattactaaaggcgatgatgaaattttattggcgaaatctattcacaataaaaccaatatgtatggcttgatcgcaggatttgtagaagttggggaaacgcttgaagaagctgttcagcgcgaagctttagaagaagtgggacttaaactcaaaaatatccaatatatgtcaagccaaccttggccttttccaagcaatctcatgattgcatttagagctgaatatgagtcaggtgaaatttctttgcaagaagatgaaattgccgatgcacaattctttaaatttgatcagttacctgaaattccatttaaaggcagtattgcacacgcaatgattacgcagattactcaagcgaagtaa

SEQ ID NO: 50206 - DNA, 543 bp, Acinetobacter baumannii; identical to SEQ ID NO: 49299

SEQ ID NO: 50207 - DNA, 1803 bp, Acinetobacter baumannii
atgcctttatacaaagctccattacgtgatatgcaatttgtactgcatgaaatgcttcaaacagaacaaaactatcaaggtttaagaaaatatcaggaaagcgtaaatcgagaattaattgatcaatatttagaagcagcagcagatttttgtgaaaatgagttggcgccgattaaccaaaatggtgatcaggaaggctgtcatttaaatcaaggtgtagtcacaaccccgaaagggtttaaagaagcctaccaaaaatatgccgagctaggttttacctcgctaacggccgatccagaatatggtgggcaaggcttgccgacattgctgcggattgcgatttctgaaatgttatgtggttctaattgggcttgggcaatgtatccgggattgtctcatggcgcaatgagaacaattgagcatcatgggaccgagcaacaaaaacaaaagtttttgactaaactcattagtggggcttggaccggaacgatgtgtttaaccgaatcccatgcaggctcggatcttggattaattagaactaaagccgaaccaaatccggacggtagttactcaattacaggcgaaaagatttttatctcggcgggtgagcatgatctttctgaaaatattattcatattgttttagcccgtttacctcaagcacctgcagggactaaaggtatttctctatttattgtgcctaaatttaatgtgagtgacgacggtcaggtgctggaccgtaataaagtcgtctgtagcgcgattgaacataaaatggggattcatggcaatgccacctgtgtacttaattttgatggcgcaaaaggttacttaattggtccggaaaatcgcgggcttaattgtatgtttacctttatgaataccgcacgtattggaacggcagtacaagggcttgctgcttctgaaatttcatttcaaggcgcattaagttatgccaaagagcgcctcgctatgcgttcgttatctggtcctaaatatcctgacaaaaatgccgatccaattattgtgcatcccgctgtacgttcaatgttaatgacacaaaaagctttttctgaaggtggtcgtgcgctggcttattttctggctcagcatgtcgatattgtcgaaagttcaaacgatcaggaacagcaaaaacactccgatgaattactggcttttttaacacccattgctaaggcctttttaacagagtcgggtaatgagtctgcaaagcatggcgttcaagtatttggcggccacggctttattgttgagcatggtatggagcaaattgtacgtgatgcacgtatctcgacattgtatgagggaacgaccgaaatccagtctctagatctgctggcacgtaaagtcctcaagtcggaaggtaaacttttaaagaacatgactgatttaattgatcagtttattagccagcaccaatccaatgaagtgctgaaaccttatctagaaaaattagctgagcttaagcagcaatggctgtcactgaccaaatcgattgcagagaaagccaagcacaaccctgaagaaataggagccgcttcagtagattatctttatttttcaagttacgttgtgttcgcgtatttgtgggctcgaatggcacaagttgcccatgaaaaattagaatcgggtacacaagaggaagatttttataaagcaaaattaacgacagctaagtttttctatcaaaagcttttgcatcgtacacagagccatgccgcttctattgagtctggagctgaatctgtgatggagctcgatcaagatgcttttgcattttag

SEQ ID NO: 50208 - DNA, 1218 bp, Acinetobacter baumannii
atggaaaaaatagttgagcccaatgcagaaaatatactgtcaaaaagctttatttttatcatggcaatgacatgtggaatttgtgcgggttcaaactattataaccagcccttaatctattcaattgcagatgcattaaaagttaatgccgatcaagtcgctttaactattgtgattagccaactgtcctacgcagttggcctttttatattggttcccttaggcgacttttttgaaaagcgcagttatatttgcttgctcatgtgctgtacggggcttgcacaagtagggctatccttaagtcaaaccttgccagctttatacggttttacctttttagccacattcttttcgattgcgactcaagttttagttcctttcgccgcaggtttagccagcccgaaaaaaagccctcaagttgtaggtactctcatgagtggtttgtttttgggaatattattggcgcgctctattgcaggcttactttctacagtttggtcttggcatgcggtttatttaattagtggaatcgtcattttggtgtttgcatgggtaatgtgggtgaagttaccagttgcgcgcaaatcccaccaactcaatattctacagatttatggttcattattttcattagcagctcaccagccgcatttattacgccgtggtttggcagggggaattggctttggtattttggctcttatttttactaccatgacttttattttggcgaatgagccttatcactttaacgatttccaaattggtttatttggaattgtgggcttggctggcgtatttgcgactccttgggcaggtaagaaaattgcagcaggtcttgaaaataaaattgcagtgatttgcatggggttattaatgagtgcatggatacccctattttttgctcagcagtctctggttgcctacgctgttggtgtgattatggcgtacttcggtttgtcagcatttcatgtgcttaaccaaaatttggtctatcgaatttcggccgaggcacgttcccgtattaattcaatttatatgaccttatattttggcggagccgccttaggttcttttattgcggtgtatgcttggaaacactggggatgggaagcatgtgcaatcttagggctagggttagcaatgttaagtttcttgattgatcgcttagatttttatgaaatgaacaaaattgcaaagcaagaaaaagctccataa

SEQ ID NO: 50209 - DNA, 1107 bp, Acinetobacter baumannii
atggcttcaaaagaagataaatcattgattgaagtacttacccaacatcaggcgtacttatatcgggtgtcttctcaatctgttaatgagctactaaaaatctttaatgatgagtcaatattaatgttggcaaagcttcgggatttgcttgatgaattaaatgattctgaaaagatggctctagcaagtggacagtacactacaactaatcttaaagaaattcgtgatctgattgctcagtggtttataggactaaatactgcattacctgaagctttcgcagtttctgctactgccttggcagtatatgaagccaattatacggcgaagctatatggcggcaagatcaaaaagccaaatggtgaaaagctttatgcagcagctaaaaaagtaccgttggtgggaggagcactggttgatgagctgctttctaagattgctgaaactgcacgccaaaaagttgagtatgccattcgggatggtatcaactcaggtaaaacaaatcaggaaatagttcagcgcattcgcggcaccaagcggcttaattatgaggatgggcttctaagtagcagtaagactgatatcgaccgtacggtgagaacagttcgtagtcatgtagccaatcaagcttatctcaatagctttaaccagattggctttgaatacgtaagactggtagcaactttagacggaagaacttcaaaactttgcgcaactcttgatggttccgtatgggagattaacgatccggcaaagcgcgtaccgccgttgcatcctaattgccgaagtattctggtacctgtagagaaagacgggaaattagttggtgaacggccatttgttatggacgaacgtcgagttaaagacatcccgaaagaagagcgtagccagttaatagggcagctagatgccaatactacgtttagagagttcttcaagaagacagatgatttctttcaaagagaatggttggggccgaaacgttacaagctctataaggaaggaaaatttgattttgataagttcttcgatccagaggggcggttatatacattggaccaacttcgaaagttggatgagcaaacctttaaggagttgggcttatga

SEQ ID NO: 50210 - DNA, 303 bp, Acinetobacter baumannii
atgtgcaaacgccctttatccagcactttcatggccgttttaaaaccgacaccttctacgccaccaatcagtgcagaagcaggtacacggcaattttcaaaaatgacatcacaggtatgtgaacccttttgccccattttttggtcaattttgcctaatgtaatgcccggtgtattggcctcgactaaaaaagctgaaatgccacccgaccctttaatttcaggattcgtccgagccattacggtaaaagttgcagcatggggtgcattggtaataaaacgtttggtgccgtttaatacataa

SEQ ID NO: 50211 - DNA, 789 bp, Acinetobacter baumannii
atgagtgtgtcaacagggaataatttcgtagaagtcgacttttctattcaaaaaatagcggttgttaaaattaaccgcccagaagcaaaaaatgctttaaacggtgaagttcgcaaacaactcgcacaagcttttaccgagttaagttttaacgatgagatcaatgcggttgtgctcacgggtggtgaagaagtctttgctgcaggtgcagatctaaaagaaatggcaaccgcaacttccacagaaatgttattgcgtcatacagaacgttattggaacgcgattgcccagtgccctaaacccgtgattgctgccgtaaatggttatgcattagggggtggctgcgaacttgcaatgcacgctgacattattattgcaggtaaaggtgcaacctttggccagccggaaattaaagttggtttaatgcctggtgctggcggtacacaacgtttattccgtgctgtaggtaaattccatgccatgcgcatgattatgacaggcgccatggtcaaagccgaagaagcttataccatcggtcttgtttcacaagtcacagaagatgaccaaacgattccaactgccatccaaatggcacaaagcctcgcaaaaatgccgccgattgccctgcaacaaattaaagaagttgcgttgatgagcgaggatgttccattaaatgcaggcttaactctagaacgaaaagcattccagttgttgttttctacggaagataaaaatgaaggcgttcaagcttttatcgaaaagcgtaagccgtcgtatcaaggtaaataa

SEQ ID NO: 50212 - DNA, 762 bp, Acinetobacter baumannii
atggccaggaaagtattaattagtgcaggtggttcagggattggacgatgcattgccgaagtctttttaaacaatcaggatgaagtttttgtttgtgatattaatgctaaaagcctagaacaatttcaacaagattatccaaagctacatatatatacctgtgatttggctgatcatgagcaaattaaactgatgtttagtcaaaccattcagaaacttggcggtattgatattttagtcaataacacaggcatctccggcccaaccgttgcagcggatgagctaagttttgaagattggaacacggtgattaatttaaacctgaatagcacttttttaattacccagttagccattccctatttaaagcaagcacaggcaggcgtgattataaatatgtcatctattgccggacgcttaggctatccatatcgattggcctattccacttcaaaatggggactgattggttttaccaaaacgctttctatggaactcggtgcagataatattcgagttaacgctattcttccgggtgcagtcgatggtgatcgggttcaacgcgtattacaggcccgtgccgatgtagcgcagacctcacttgaagaggtgactcaaaatgcactgaaaaatcagtcgctcaaatattttgtcaatccaaagcatattgcagatttatgcctatttttagcgtcagacagtggtcgctcaatttcaggacaaatcttaccaattgatggtgataaacaatgcttaagctaa

SEQ ID NO: 50213 - DNA, 1524 bp, Acinetobacter baumannii
atgacttatgatattaaaagcatggctgtgattggtgtaggtgttatgggcagtggtattgctcaaattgctgcacagtcaggtcataccacttatttatatgatgccaaagcaggtgcagcagaacaggctaaagaaaaactggctgctacatttcaaaagttagtcgacaaaaataaaattacatctgagcaagcagcagcggcaaataaccatttaattgttgctcatcaaattgaagatttaaaaaattgcgacctcattgtagaagcaattgttgaacgtcttgatatcaaacaaagcttgatgcagcagcttgaagatattgtttcggataatactattttagcctcaaacacctcttctctttctattacagccattgctgcaaattgcaagaagcctgagcgtgttgtgggttatcacttttttaaccccgttccactcatgaaagtggtcgaagtcattcgtggtttaaaaacagacccacttattattgatgctttaaacgatctgtctcgtgcatttggtcatcgccctgttgtagcgaaggacacccctggatttattattaatcacgcgggccgagcttatggcaccgaagcactcaaaatcttaaatgagaatgtctgtgatatcagtgaaattgatcgaattttacgtgacggcgtaggatttagaatgggtccttttgaattactcgatttaactggtcttgatgtctcgcatccagttatggagtcgatttatcatcaatactatgaagaagctcgctacaaaccaaacccgctcaccaaacaaatgcttgatgccaagcaacttggacgtaaggttaatcaaggtttttataactacgaaaccggctcaaaaacaggtgaacaacctgcgaagtttgtagagcgtttagcaaaatatccaaaagtttggattgcggcagatttcttagacgataaaaaacagctcgaagattatttaactcagcaaaatattaccctagacaccaattctgaaccacaaacagatagcttatgtttacttgcttgttacggtgaagatacaactcaagcggctactcgccttggggttaatccagaacaagccgttgctatagacatgctttatggcattgcaaagcaccgcaccttgatgccttcactcattaccaaacctgaataccgacaagccgctcactctattttcaatctagatggaaatctggtcagcatgattaatgaaagtattggctttgttgctcagcgtgttttagcgatggtcattaatttaggttgcgatattgcccagcaaaatattgcaacggtagatgacattaatgctgcagtacgtcttggcttaggctatccatttggtccaattgaatggggcgatcaagtcggcagtgaaaaaatcttacttattctgaaccgtataacagcacttacgcatgacccgcgttaccgccctagcccatggttacagcgtcgtgtcgcacttcatttaccacttacttttactcacgagtcttga

SEQ ID NO: 50214 - DNA, 354 bp, Acinetobacter baumannii; identical to SEQ ID NO: 48622

SEQ ID NO: 50215 - DNA, 315 bp, Acinetobacter baumannii
atgatcaaagaagtaacagagcaagagttagctgaaaagtctgtggcaccccgagtaactaaagcgcaaattgattcattgatggagcgtgttacatatacggttgagcaacgccccggtggcacgacatctacttttgtccatgcatttttagatggaaagtttttcctagcaacgggttttagtgcatgtgtgaatgctgaaaactttgatgctgaaattggtgagcgtatggctcgtggaaatgcagaaaagtcagctgaaaataaactttgggagctagaaggctaccgtttatttgcaacaaattactaa

SEQ ID NO: 50216 - DNA, 666 bp, Acinetobacter baumannii
atgaagattatctatacacgcattgcagcagcggctgcattagagacaggcattattgctaaccctgactattatgaaaacccaaatttgaaagcaaaagaggtaattatttacggtaattatccaaagattcaagaggattatgaatctttggaagttccagttgaagttcgtaagttggaagagccacaaaaaacgactttggccacagtaaatgtcgcagtgggaattacccctgaacttcaagctgtgatggatgatgcaaaagctgaatgtgaaaaggtagttgaagaaaatactcagcttaagcagaaaattgaaatcttagaacaggccaaaggtaatagttcggaattactttctgaaaattcacgtttaaaagatgcggtggtactggcagacaaagcggccaaaacagctgaagtacaattggtaagcatccaatctgaatttgaagcttttaaaaacgatattcctgcaatgcaggcacgtattgctgaattggaagctggaaaagcggaagaaaatccagctacagaaacggcagctaatgattttgaaaattggtcaaatgatcaattaaaagagtatttggctagtgagaacattggctacaagccatctgcaacaaaagcagaactccttaaattgatcccaaaggaataa

SEQ ID NO: 50217 - DNA, 1461 bp, Acinetobacter baumannii
atgcaggcggtagtttaccatagccaagatatccaggcatgggagcaacgttggtttgctgcgcaaaactcctcattaggcctaatgcaacaagcagcttggtcaatcactcaacaactcattgtactttttcaaaaacaaaattttaagaatattgctgtttggtgcggacagggtaataacgctggtgatggctattttatagcaagctatctcaaacaagctgggtttcaggttggaatatttgcggctgagttgggcgagtcagctgatttacaccacgctgtccattttgcgaaagaaaatcatgttcaaatacaccaaggttttgagatcaacgggacatttgattgtcatattgatgcattgtttgggattggtttaaaccgtgaattaaacggttattggcaacatgctattcaacaatttaatgggcaagcagggctaaaaatttcgattgatataccaagtggtttacatgcaaatactggctctactttaccttgtgcaatacgggctgatcatacatttactgttttagggcttaaagcaggactgtttacaggccaaggtaaagaatatgcaggacaaattcatttaattaatttaataccaatagaccaagagctgaaacctcttgcttacttgacgccaacacatatcaactttcctaaacgtttggcttttggacataaaggaagttatgggcatgttttggtgataggtggacatgagcaaatgggcggggccgtcattatggctgctgaagctgcttttcatgcaggggcaggcaaggttacggtagtttgtcatcgcaaccatcatcaggctattttgtcgcgagctcctaatattatgctgcgtgatattaatgatttcgatgaaaacggtattaaagaaattttatctcaggttgatgcagtatgtttcggaatgggattaggccgtgatgagtgggcactccaaatctatcaacagtggtttaattatttaaatcagacttcacatttagaagttgtattagatgcagatgccctatggtttctcgcaaagcagcctgaaaaattgagtttacatatttatgcaacacctcatccgggggaggccgctacattacttagttgttctacttggcaaattgaaaatgacagaattgctgcgatttatgcgttgcagcaaaaatatgcaggccagtgggtgcttaaaggagcaggcagcttaattttagaagataacttgtatatttgtacgcaaggtaatgcaggtatgggaactggtggaatgggagatgtgttggcgggcatgattgcaagcttaaaagcccagttccacaaagcagttaccctacatgagatcgtaactctccatgctcaggcaggtgaccaacttgccaaacaaggcatgcgcggtttacaagcttatgagatgaatcaagcaattactcaagtagtaaatcaataa

SEQ ID NO: 50218 - DNA, 1590 bp, Acinetobacter baumannii
atgcatttgacccaagaaaataacttaaatgtagatgctaaattgctaaatatagaaaacctttcaatctctacgcaagatcagcctttattagaaggtctcaatttacacttacaagccagagatacgcttgcaattgtaggtgagagtggttcaggtaaaacaataagctgtttggcgatgatgggattattaccagaaaaattaaaaacatctggtcgtattattattgattcaaaaaatattttagaaatagacgaaaagacgcaaacacacatacgcggccgccaaattgccatgatttttcaggagccttctacaactttaaacccattacatcgagttgaaaaaattgtaggtgaaaattttattttacaaggtgggtcaaaagcgaaagctcaacagcaggtaattcaattattaaaagatgtaggaattgctaatccagagtacattttaaaacgttatccgcatgagctttcaggtggacaaaaacagcgggtgatgattgcggctgcgcttgcacttcaacctaaaattttaattgcagatgaaccaactaccgcgcttgatgtgattttacagacgcaaattttagaattattaaaatccttgcaaagcaaatatggtatggcactgattttgattagccatgatttaaatttggtacgccgttatgctgatgaactgattgtattacataaaggacaagttgtagagcaaggtaagcttcaacagatttttgaacacccaacttcagtctatacccagcaattattagatcatgatcttggtttcgctgagcaacattcaaccagtcataaaattttatctgttcaacaactcaatgttaaatatccaatacgacgtggtttctttaaccgaattcagggttataccaatgcggttgaaaatgtaaattttgagcttaatcaaggcgaagcattaggcgttgtgggtgaaagtggatccggaaaatcttcattggctttggctctggttcgattaattaaaagtgagggacagattaactttctagggcaagatataaaccgcttagaacaaaaagctttacgcaagatcaggtcagacttacagattgttttccaagatccatttggtagtctaaacccacgtatgacggtagggcagattattgctgaagggttaaaagtcaaagcgatagctgataaagaaattaaacagcaagttgaatcagctttgataaaagttgagttggctgaaggctttcaacatcgctatccgcacgagctttcgggtggacaacgtcaacgcgttgctctagcgcgagctttagtagttcgacctaaacttttaattttagatgaaccaacgtctgccttagaccgaaccacgcaaaaagcgatgattcaattattacgacgtttacaacaaacagagcacttgagctatattttcattagtcatgatttaaatgtggtcaaagcactgtgtcataaagtgatggtattacgacatgcaaaagttgtggaatatcagccaactgagcagttatttaataccccaaaaactgaatataccaagcaattaattgcagcaagttgttaa

SEQ ID NO: 50219 - DNA, 648 bp, Acinetobacter baumannii; identical to SEQ ID NO: 49913

SEQ ID NO: 50220 - DNA, 453 bp, Acinetobacter baumannii
atgggccgccatgttcgtgctcatgttcttcatgggcatgagcctcttcaccctcttcatgatcatgctcatgagcatcacaatgtaaatgtggtctacctgttaaatgagcgctacaggtttcatattcatggctatgccccggtaaaccatactggtctcgacggttactatacgaaatacccgtataaccgcgatcataaatccaagacaaccccacattcactgaatcaccttgtgcaaaggtattgtctacacggcgctctttttcaccttcatgaatatagtttggtgcaatatagttattcgcatcacgtgttaacccttcaacacgtaatgcaacttggcttcccaaccctacagttaccccagcactcgccagcttttcatcacttccagtgttgtaacgtaagccaacttgtccttcataaccattttcaggcatttgtgtag

SEQ ID NO: 50221 - DNA, 918 bp, Acinetobacter baumannii; identical to SEQ ID NO: 46092

SEQ ID NO: 50222 - DNA, 759 bp, Acinetobacter baumannii
atgaaaaaaggaatttgcaaactatgcgatctagaaaaagaattgaaacgttcgcatgtcattggcagagcagtttttaaaaaggccttaaaaggtgcaaatcatgctttaagatttgataaaaagcataataaagttgtcaaagatcaagatcagtgggcaacatatatgttatgtggtgaatgtgaacataaactaaataaaaaatatgaagactattcattaaatattttaagaaatagaattaaatctgtaaaacataaaaagagagataatcactatgaaattcaaggtgttgaccaaaataagcttatattatatttattgtctatcatgtggagaggaattgaatctaaccatgaagtttttaaaaaattaaaaatttttgatgaatctcctttagctaaaaattttttaaaggaaagtgttaagaacgagcgggtttttttaaccgaatgttatgatctcagaatttcaaaattagtaagtttgatagctccatttaatgaaatggaattagattttataactgatatttattgtaatattgataatatgcagcgaattcggtttttaactatttttgagggttactgttttgaattttttttcctaacagataaatcacagtctctttctggcttaggcgtacttaagaaaaataaaaggattcttaaaatgccatatattgatatattttccatccctgaatttcaaaaaagcctttcagaaatgattgagagtcaaaagcagaattaa

SEQ ID NO: 50223 - DNA, 357 bp, Acinetobacter baumannii; identical to SEQ ID NO: 49384

SEQ ID NO: 50224 - DNA, 2340 bp, Acinetobacter baumannii
gtggccacaaatggactttacacagtttcttcaggtggaaatcagggagctgtaaacgtcacgattgaagtagaagtaacgccggtaaatgaatcgggtgcagccattggtaatccaatgctaaagcagatcattctaaagggttcggcaaagtcacgtcagacagttggcgcaacgctggatatggtgacatttcaaggtcgctgtagtgtccgtgcacgtcgtttaacaccaacaccggcggttacaacggtagtagatgaagtaaagtggcaggcgctttatggtgcttatcctttgcaaagcacagtgtatgaacatgaaacggtttttcgtgcgcgcacttatgcaaccactggagctttatctgttaagtcccgcaagatcaattttgatcttcagcggatgttaccgacttttaaaaacggcgcaatgacgacagagctatttccaacatcaagctttgctgatgcattggtttcaatggcactggatgacaagataggccgccgtacgatcgacgaaatagatctggaaaatatctatcggacttataacgatgtagttgattattttggtacaccacttgcggctgagttctgtactacgattgatgatacaaacctgtcttttgaagagctggtcaccaatctatgtgatgcagttttttgtaccgcttatcgacaaaacaacaagctcaagctttattttgaacggccaactgataactcggtaatgctgtttaacttcaggaatatcattccagatagttacaagcatgatctaacctttggcgtgatggatgactacgatggactgatctatgaatacacggatccgaccgacgatagtcgtatcaatatctatttgccagacaaaggagcaaagaacccgaaagaagtgaaatccgttggggtacgaaacaagtggcaagctcattttaatgcgtaccggatctggaacaagcttcggtttcaacgtaaatccatcacctttgatgcggcgcctgagtctgaattgcttgtgctacgtgaccgtattgctgtagcagattatcgcaatggtattcatcaaagcggggaagtggtacagcaagagggtttaatcctcaccttaagccatgatgtagatttcattgcaggcaagagctatgtgatctatctgcaaatgggggatggtaccgtggacctaattcctattacaccgggttcagccaagaacaaagttgttttagggcgtttaccgaacggggccttaaagcttagtcccgatgactttgtgaatactatctacacggtagttaatgacgataccaaaggctcattaccttatctggttgcaaaaagagaaccagctgaccagttctctaatacaattactgcaattaattacgatgaacgttattacctcaatgacaaggacttcattgatgtaccggtagatgattcaccgatttatattcgatatgaccagcttgatattaatctggcacgtttgtatcagatgcaaagaggtgatttaccaacgactggcgaaatcagttttgtagttgaagcaggtgcattggtttcaagttcaagttcttatcgaccggaaaccagatttgtctataaattcgactacaactctagtcctccaaaacgagagtatatcgttccagctgcatcagaattacctgctattgatactggtgagtttccacctgatctggttgtgaatctgacgattaaaggtgctgtagttggacgtggtggagatggcgggttgccacatttggcatttggtgcatggtctaccgatccggattacaactttacaaaaacccgtcgtgatggttttcagggagcacccggtctattaaaccggcacagtaaactaaacctgattattgatggtggaactctggctcgaggcggatctggtggcggcgcaacaccaagtggtatttatactggattatcgtatggagttcagggtattcccggtggagctggagcaccttttggtcgggttatgaccggacaacctattactaacgattcacaagactggcgttggtactttaatggtgactttatggttgtcaaagtaaccgatgctgaagctactgtgcctggtaaaggttatcgaacccaaaatgaccgttatggatcgccattgtccggtgatggtggaagctggggtcaactaggtaccgagtccaccaatgatggaacatggaactggcaataccatggcacaactgaaggccagccggggccgggtggacctgcaattgttggggtggcaccacttacaactcaattgatcaatggagggaaaattctacaaacactttaa

SEQ ID NO: 50225 - DNA, 1452 bp, Acinetobacter baumannii
atgagtgatgtaacttttcaacatcctgaatatgttaaaaacttgccatactggcaaaaacttgatgatgtttgtgaaggtgaagatgcagttaaggctaaaggtgaaaaatatttgccgatgccaaatgcacatgataagtcacctgcaaataaaagcgcttatgaggcttatcttacccgtgcagtcttttatgaagtaacagggactacatcaaatagtttagttggagcagcttttgcaacagatccaagttttaaatttcctcccgagcttgctcatttagaacgtaatgcgaatggagcaggcattagtgcttatcaattggctcaaaatggaattcgccatttattgaagcattatcgttgtgctttatatgtagattatcctgatgtgccgccagctcgtaatctagcggaatttaaagcacaaaaagcctatccgatgattcatttactaaatgcccttgatgtagtgaattgggattcagtaatgatcgataaccagaaaaagctttgcttagtggttatacgtgaatttaagtctgagcgcggtgctgatggatttagtaaaaccgaacaagagcaatatcgtgtacttcgtttagagcaagagggtaatggggaatatatttattccgttcaggtgtatacaaagggtgaaaagggtaactgggttggcggagataagaagtttccaacagattacaacgggaatttctggacctatataccttttacatttgtaggtgcaattgataattcagaagagattaaaaagcctccattacttcctttggccaatctcaatttagcccattatcgtgacagtgcggactttcaagagtccgttttttatatggggcaacctcaatactttgcgaagggtgttacatgggaatggtacgaccaagccaagaaacgtggcatctacattggtgcgaaagtacttttgcctttacctgaaaatggtggtctaggtattgttcaagctgatcctaatacgcttgcccgggaagccatgaaagacaagtgggaaaaaatgaaagaaatgggtgctcgacttattgaaaaaggttccgcagctaaaaagactgctactgaatctaacagtgatgatgccgtgcagcattccgttctttcactttgtgttgtgaatatgaatgaagctttttctatggctttacgttgggctgctaaatttgtagtacccaatgttgatgttctgactaaagatgaactgatgttcgaaattagtcaggaatttaacaagcaaggttatttagctgagttagctagacagttatttgaagcagctctacaaggccgatcttcatttaaatcgtggtgggaatacaaccaaacaggtatgttccctaaacaaaaatatgaagaagagctacagaatgttgaagcagagcaagatgggactttaaatcaaaaggtagagtga

SEQ ID NO: 50226 - DNA, 798 bp, Acinetobacter baumannii; identical to SEQ ID NO: 49362

SEQ ID NO: 50227 - DNA, 1836 bp, Acinetobacter baumannii
atgcaaaagttatattctcaactgagcctgctagtcgggctcagtgttttttcgcaagttatattctctgctcagcaaaccacgccgtatatcgcaattcattctaagcctaaatatctggcaatggcttctatgccttatgccaacccgaatgcacctaaaggcggagtattgagtcaggctgcgcaagggacatttgataacttaaacagtatgaacggtaagggaaatgcgacagaaggggtaaattatctttttgatactttaatgacccagtcacttgatgaagtgggcgtgttatatccactcttggcagaaaaagtttcgtatgatcctataaaaacccagtcagttactttttatttaaacccaaaagctcgatttagtaatggactgcccgtaacagctgaagatgtgaaatttagctttgatacctatcaaaccaaatctaattttggtctacaaatgtatcttgcagacttagcgaaaacagaagtgataaacccacatcaagttaaattcacttttaagtccagccataatcctaaaatgccatttgttgtggcgagtttaccgatttactcaaaagtagattggcagaaacgcgattttacccgtattagcttgcaatcgattataggttcagggccttacgtggttgagaaaattgatgcaggtcggagtattagttataaacgtaatccaaattattgggcaaaagacttacctattaataaagggcgctataacttcgatcatttaaagtatgtttattaccgaaattgggatattgcattcgaaggttttaaatctgggcaatataccttgcatgaagaaactaatcctaaaaaatgggttactgactatcattttccggctgtaaaagcaggcttgataacgcaatataaatttagacatcataaccccattgcaaccgagagttatgtttttaacacacggcgcaaacctttcaatgacatccgctttagacaagctttaacttatgcctatgattttgaatggcaaaataaagctttgttttacggacaatatcaaagactacaaagttattttgaaaatagtgatttggcagcgacaggtcgtccttcaaacaatgaaatggccatattaaagcctcttttgccaaagctttctccaatcatgcaaaaagctgttttggctgattggaaatatccagcttcagatgccagtggttttaaccggcaaaacctattacttgctagacagttgctgattgaggcgggttataaaattaaagaagggcaattatatacgcccgaaggcaaacctgtacaaattgagtttctcattcagcaagatggcaaacaaagaacactgatgccatttgtaagaaatttaaaaaaattaggaattaatattaatttacggcaggttgatgcgccgcaatatttagaacgtacacgccgttatgactttgacatgactacgatgaatttgccgcaatctttaaacccgggcaatgaacaggctcagttctggggaagtgcagcagcagttcaaaatggcaactataactacgctggtattcgtaatccggtaattgatgaggtgatttcaaaactggtcactgccaaagaccgtgaacagcaaatcacttatactcatgttcttgaccgattgcttcgtgcaggatattaccagatcccgacttatggaaaaggggattattggtatgcgtactggaatatgtatcagcagcctaaagtgaaacctgtgctctctgccggtatagagtattggtggagtaatgcaaaccaagctaagaaagttgctcaatatttacatcaacaataa

SEQ ID NO: 50228 - DNA, 132 bp, Acinetobacter baumannii
atgaaaaattcaattgataaattaaatatgttgaaaatatttttaggcaagtggttgtatatcttattaattttattggttgtagtcactattctaatgtgcatcaaaatgaatattgtaggcgatatctag

SEQ ID NO: 50229 - DNA, 759 bp, Acinetobacter baumannii; identical to SEQ ID NO: 49302

SEQ ID NO: 50230 - DNA, 198 bp, Acinetobacter baumannii; identical to SEQ ID NO: 49354

SEQ ID NO: 50231 - DNA, 408 bp, Acinetobacter baumannii
atgaagttaactaaacagcaacgtgctgagctaaaacaaaagtttggtggccattgtgcctactgcggggaattactgggtgaaaagtggcatgcagaccatatcgaagcggtgaaacgagatttaatacatgttggtggcgggaagttaattacgggtgaaatgactagaccgcaaaacgataccatagaaaatatgaatcctgcttgtatcccttgtaatacaaataaatcgtcaatgccgctggaagggtggcgaaaaatgcttacacattaccgtgatgtgcagttactacgcgatagcacgcatgctcgtcatttacttcgatttggactgattgaaattaaatccgagcctgtaaagttcttctttgagacctacgctaattgcaaagtggaggatgtgtga

SEQ ID NO: 50232 - DNA, 315 bp, Acinetobacter baumannii; identical to SEQ ID NO: 49352

SEQ ID NO: 50233 - DNA, 1173 bp, Acinetobacter baumannii
atgtccaagataataagtgtagttggcttaggttatgtagggctatctaatgctatacttttagctcagcataataaagtatttgctatagataataatgtggagcgtgtaaaacaaattaataatagaaaatcgcccatacatgacagagaaattatagactatcttaaaacaaaaaaactaaatattgaagcaactagtgattggaaagaagcttatttatattctgagataattattattgctactccaactgattatgatgaggataagaattattttaatacttcatctgtggagtcggtcattaaggatgttttgtctataaatactaaagcattaatagtcattaaatctactattccagtcggttttgttgataatattagggaaaaatataactccaaaaatattatattttctcctgaattcttaagagaagggaaagctcttcatgataatttatatccctctcgtattattgtaggggagcaatctgatcgagcacaagagtttgcagaactcttatcgcatggggctattaagaaagatatatcaattttattaactaactctactgaagctgaggctataaagttatttgctaatacttatttagctatgagagtagctttctttaatgagttagatacttatgctgagctaaaaaacttgaatactaaacaaattattgaaggagtatgtttagatcctaggattggcaattattataataatccatcttttgggtatggaggttattgtttaccaaaagatactaaacaactattagctaattatattgatgttcctaatgatattattggagctattgtaaaagctaatactactagaaaagattttatagtaaaaaatattatagctaaaggtgctaaagttgtaggtgtataccgtttaattatgaaacatggctctgataattttcgttcttctgccgtgcaaaatattatagataaattgattgaaaataatatagatgttatagtttatgaacctagtttaaatctggataagtttaataattgtcttgtagaaaataatattaatatttttaaggagcaatgcgatattattatatcaaatcgcttggaagatgatctcttagatgttttagataaggtttatacacgagatatttttaataataattaa

SEQ ID NO: 50234 - DNA, 486 bp, Acinetobacter baumannii
atgaaaaacgcttatatcatcgatgccatccgtactccattcggccgttatgccggtggtcttgcacctgtccgtgccgatgaccttggcgctgtgccgattaaagccctcatgcagcgtaaccctagggtagattgggaacaggtcgatgatgtgatctatggttgtgctaaccaagccggtgaagacaaccgtaatgtcggccgtatgtcagcactgcttgcgggtttaccttatcaggtgccggcaaccactattaaccgtttatgcggttcatcactcgatgccattgccattgctgcccgtgccattaaagcaggtgaagcgaacttggtgattgcaggtggtgtggaaagcatgagccgtgcaccctatgtgatgggtaagtctgacaatgcttttggccgtagccagaagattgaagacaccaccatgggttggcgcttcattaacccaaaacttaaagaatggggctgtagtagataa

SEQ ID NO: 50235 - DNA, 420 bp, Acinetobacter baumannii
atgcttgaaggcggcagctttttccaccatggagactcctttgccatgatgcgtggtggtcaccttgatattgcggtgcttggggcatttcaggtggcagccaatggtgacttggcgaactggcacacgggtgcaccggatgcgattcctgcggtaggtggtgcaatggatttggcagttggtgccaagaaagtatttatcactacagaccacatcaccaagcaaggtgagccgaagattgtcgctgagctcacttatccggtaacgggtaaacactgtgttgaccgtatttacactgacctgtgtgtgattgatgtgaccaaagacggtttaaaggtgattgagaaagtggaaggtcttagctttgatgagttacaggctttaaccggtgcaactttgattgatgcgactcaagggtaa

SEQ ID NO: 50236 - DNA, 420 bp, Acinetobacter baumannii; identical to SEQ ID NO: 50235

SEQ ID NO: 50237 - DNA, 1014 bp, Acinetobacter baumannii; identical to SEQ ID NO: 49376

SEQ ID NO: 50238 - DNA, 336 bp, Acinetobacter baumannii
atgattcgtattgatgagatctggttgtctacccagccgatggacatgcgtgcagggatggatacagccatggctcaggtgctgagagcctttggctacatcaaaccgcattgcgcttacctgttctgtaataagcgtggccatcgtatgaaagtgctggtgcatgatggactgggtatctggctgtgtgcccggcggctggaacaggggaaattccactgggctaaagttcaccagggtgaaagtatggcgatcagcccggagcagttacaggcactgatccagggtttgccctggcaaagaatcggactgcagcaagtggtaacaatgctctaa

SEQ ID NO: 50239 - DNA, 840 bp, Acinetobacter baumannii; identical to SEQ ID NO: 6027

SEQ ID NO: 50240 - DNA, 495 bp, Acinetobacter baumannii; identical to SEQ ID NO: 20174

SEQ ID NO: 50241 - DNA, 615 bp, Acinetobacter baumannii; identical to SEQ ID NO: 49382

SEQ ID NO: 50242 - DNA, 321 bp, Acinetobacter baumannii; identical to SEQ ID NO: 46215

SEQ ID NO: 50243 - DNA, 327 bp, Acinetobacter baumannii
atgagtgatgtaacttttcaacatgctgaatatgttaagaacttgccatactggcaaaaacttgatgatgtttgtgaaggtgaagatgcagttaaggctaaaggtgaaaaatatttgccgatgccaaatgcacatgataaatcacctgcaaataaaagcgcttatgaggcttatcttacccgtgcagtcttttatgaagtaacagggactacatcaaatagtttagttggtgcagcttttgcaaccgatccaagttttaaatttcctccggaacttgctcatttagaacgtaatgcaaatggtgctggtttaagtagggtctgttga

SEQ ID NO: 50244 - DNA, 735 bp, Acinetobacter baumannii
ttggctttaataggagtattaccatatatacttaaaaaagtctggtttaataaaagggaaattacattaaaaaatattagtttaaaagataagaaatatcaaaaatattatctaaaagttggtagtatattagtaatatcctctatttctgtagggctgtatactcaaattaataaccttttattaggtaaaatgatttcaacttatgaattgggtttatactcagtagcaacaactttaggggtgacttggacttttattaatcagtcaattattacttcatatatgacaaaaatatataaagaaaataatagattaaaagtgtataaaatgttgggttacttaaatattcttataatattaatctccttattttatttttctttattttatttttttggtgaaaaaattattaatatattgtatggagcagaatacttaaaatcctttaacgctcttttaattgtaattttttcttcaatgttatcctctttagggatcgtaattgctaaatttatgattaaagatgggggttatacttttctttcaaagaaaacagtattggtaacattattttctatccctctatcatgcggtcttatttattatcatggattaatcggtgcagcatggagtatgtttattattgaatttttatcattaacgctttttaattatttttataaaaaggggcttgtatttaaaattcagttttttattggagataaagtttaa

SEQ ID NO: 50245 - DNA, 852 bp, Acinetobacter baumannii
atggttgaagaaaaaattaataagaggaattataatttaattattttaggatttcacaatggatattatctttatgactatcttagacaaaaagataaaatctggttttgggtacatggggagatattagagagaagagcttttaaggatatttgggggcagttgcgtagttatttacgttacgaacgtcataaaatttattttaaacaattacttaaggggaaaagaattgttattgtcagtaagcatctcgaagaagcatataaaaagatcttagaatcatcagagtttgtaacaattccaaatggtattgaattaccagaaaacacaaaccgttttaattcaaaaaagtgggatgctttatttttagggcgtttagtgaatcttaagcaggttgatcatactattaaggcgttcaataaagcaaacgtgagcggaaaacttggaatattaggtgatggtcctgaaattttacctttaaaaaatttagtgaataaattaaatctacaaaatcgtgtagatttccttggttggtccagtagtccgcaagattttatatgtcaatctcggtgtgtggttatgagctcatcaagtgagggaagcccgatatctttattacaagctttgagtttggatgtaccaatagtaagttataactcaagtagtagcatcgcattactctttgataatccgattatgaaccgctatctaattccaaaaaatgacatagagaagttagccattgctttaaaagaatgtattaatcatccttatgacataccaaaagaagtcaaaagtattatagatatggaaacaatggctaagtctttcataaacttgattcaagattaa

SEQ ID NO: 50246 - DNA, 693 bp, Acinetobacter baumannii
atgaatggtataagacaatatgtagctcttttatttttacctataattgcttgtttaagttttgagaaaaaatatattaaatcattattactattaacacttagtacaatgtttcatttctctgtacttttacctgcatgccttatagtttttttaagttttatttataagaaaatatcgccaaaattgatttttctactttttgttattagcatattcttttactatatcgattggtctggcgcaatttttgattttttacaaagcaaagactatatgtatgcaaattatcaggagtctgattttaatgaatcaaagacctttttagatttaatgttaaaatttattagcttgccttttgttttagttttttggtttctttatttaaaggataattataataaaaataaactgttttataaaaattataatgaagaagctttttttaaatatatgtttctaatttggggattgactcattttatgtttttgatggctcttaacttaggtatggctaatagaatatatttgtattttgtattatttatagtttttccttatatttatatatataaattatcaaagaaaactttttatttaatgctcttaatgtattttattttttactttcttaaagtaactttcttcgcaaagaatgagtatctatattattttaatggtgcttggttatga

SEQ ID NO: 50247 - DNA, 192 bp, Acinetobacter baumannii; identical to SEQ ID NO: 45978

SEQ ID NO: 50248 - DNA, 480 bp, Acinetobacter baumannii; identical to SEQ ID NO: 49914

SEQ ID NO: 50249 - DNA, 387 bp, Acinetobacter baumannii
atgaaagtttcttctattgaaattatatttaatagagaagctattcttagtaaaaatattagatttgatgaaagatttggtttaggaagtctatttaaatctggtgaagaaaatatttttttagcagattgtttaaaaaatggtttaaatatttatgctgttaatgaaaatttagttttccatccttttgagagctctgggaaaattataaatgataatttcttttatgatagaggagctgtattttttaggatctatggtttttttatagctaatttattatatttttatttttcttttaaaaaatctaaaagtaagaggcaagctttatcaaatttaattcttatgtataaaggtctatttagatatttaaaggtgagtaaatga

SEQ ID NO: 50250 - DNA, 303 bp, Acinetobacter baumannii
gtgaccactgtatttgctgcatctgccggaacgtttttcaatacgcctgtaacagtaacgttgcctgacgcttctgatgcattaatcacattgtcagctgttactgaatcaaccgtgaagttaacaccatctgtatttgggccaactgcatcgacaatagctgtgcctggtaatgatgggttacctgctggatctgtagcaattgctgtaactttatcgccatcaaccaggttacctgggtttggtactgaccagctaccatctgtgcctgctaccactgttgcagttctgccgtcaggataa

SEQ ID NO: 50251 - DNA, 558 bp, Acinetobacter baumannii
atggcacatgcacgtcgtaaattccatgaactacatgtgaccaagaaaagtcaggtcgctgaacaggcattagtgctgattcagaaattatatgcgatagaagcagaattaagaaaaaagacggatggtacagcggaagaccgctgcgaataccgacaacagcatagtcaaccggtcatgcaacaactatatgaatggctcaaccaacatcagctgacggtgccatcgagttctccaaccgcccgggcgatcaattacagcctaaaacgttggactgctttaagccgctatctggatgatggcaatctacccattgacaataattggatagagaaccaaatgcgtccctgggccttggggcgtaagaactggctatttgcaggttcgctgcgcagtggtcaacgagctgccaatatcatgactttaatccagtcagcaaagctgaatggcttggatccgtatgcctatttaagtgatgtgctgaaaaggttgccaacacataaagtgccccaaatagaagaattactacctcaccgctggaaacctgaaccccgttaa

SEQ ID NO: 50252 - DNA, 375 bp, Acinetobacter baumannii
atgcgtgaattcatttctgaatacagcgagtttcaatacgatttcatctcacttgctcaacaaagatttgtttctgtacctgaaatcgacttgagaaccatgattcaaaatttcggtgactggtactttgcaaacgaatcaagttcgttgaatacaccaagcatctggttggttaagtggttctcttgggttcaaaacaacgagaaacaagttgctgcaaaccgcaagaaacaagagcaaatcacttcaaccggtcaaaaaccagaagagtcgggttacttcgctaatctttttgaagaacagagcgaatctcaaatcgtggatgtaaccccagcaaaaaagcttccaatgattgaggaggtaggtcatgcatga

SEQ ID NO: 50253 - DNA, 249 bp, Acinetobacter baumannii
gtggacctacctgtaccgggcagtcgacaagcggggcgacacgatcgatttctacctgtcgccgacccgcagcgccaaggcagcgaagcggttcctgggcaaggccctgcgaggcctgaagcactgggaaaagcctgccacgctcaataccgacaaagcgccgagctatggtgcagcgatcaccgaattgaagcgcgaaggaaagctggaccgggagacggcccaccggcaggtgaagtatctcaataa

SEQ ID NO: 50254 - DNA, 162 bp, Acinetobacter baumannii; identical to SEQ ID NO: 49400

SEQ ID NO: 50255 - DNA, 162 bp, Acinetobacter baumannii; identical to SEQ ID NO: 49400

SEQ ID NO: 50256 - DNA, 138 bp, Acinetobacter baumannii; identical to SEQ ID NO: 50167

SEQ ID NO: 50257 - DNA, 225 bp, Acinetobacter baumannii
atgagtgagtcaagacatttagtgctaaagcgtcaccctactttgaaaggttatctggttatttgtgatgaagaaactggacagccactagctggacaaagagcagtacagatgaattctgatgccttaaatggacccgcaacaattactgtaacttttgaagcatatggtgctcatggtgttcgcttagtgagtgatgaacaaaggccggctcaaacaaagtaa

SEQ ID NO: 50258 - DNA, 231 bp, Acinetobacter baumannii; identical to SEQ ID NO: 46050

SEQ ID NO: 50259 - DNA, 138 bp, Acinetobacter baumannii
gtgcatcaggccatcgcaatggtggaatctgatgacgttgcgccaggtaacgtactgggcattatgcagaagggttatacgctgaacggtcgtacaattcgtgcggcgatggtgactgtagcgaaggcaaaagcttaa

SEQ ID NO: 50260 - DNA, 267 bp, Acinetobacter baumannii
ttggacaaaatagaaaattttgcttgtcgagtatgtggtcttatacaagatgaagagccgtggggggaaagtggcgaagacccaaactttaatatttgtgattgttgtggtgttgaatttggatatgaggattatactaaagaatctgtaaaagcgtaccgcaataaatggttagaggtaggtgctaattggtggaaattaaaagagaaacccgaagattgggatattaaaaaacaattacaaaatatccctgtaaattttaaataa

SEQ ID NO: 50261 - DNA, 387 bp, Acinetobacter baumannii
atgaaaatcagccatcttgatcatcttgttttaactgtctcaaatattgaatctacctgtcatttctatcaaaccgtattggggtttgaagtcatcacgtttaaaggtgatagaaaggctctaaagtttggaaatcaaaagataaatttacaccagcaaggcaacgggtttgaaccgaaggcattacagccgactcccggatctgctgacttgtgttttatttcagacactcccatttcagaagtggttgcacaccttaatcaattaaatattcaaattgaagaaggtccgattgagcgtactggtgcaatgcatcctattctttcagtttatattcgcgatccagatcaaaatttgattgagatttcaaacaacataaggttataa

SEQ ID NO: 50262 - DNA, 1122 bp, Acinetobacter baumannii
atgatttatatcgaagtactggcagtagtggtgatttggttaagcttctggtcacttattcctcgtgatgagtggtggtttcgaggtgcagattttccaagattacaaattctgtttattggcttaattgctttaattggtatgttgttttggccgaccgaatgggatgtatggcgtgagcttttgcttgcggtactcatcgcagcgattgcctaccaacttaaaatggttttaccgtatacgctgttttggaaaaaacaggttaaaaaggtcaaacagcatcagctagatcctacaaaacagatttcactgatagtttctaatgtgctcaccccgaatgataaatatcatttattacttgagcatgtacggactttaaaacctgatttattgcttactttagagagcgatacaacttgggaaaatgctttaaaagagatcgagaaagattatccataccgtgtgcccgtacctttagataatttatacggaatgcatttatatagccggttaccgcttaaaaatactgaggttaaattcattttaagtaatgaaataccttctattcataccacggtaattttgcgatctggcatgcctgttcagctctactgtttacatcctaagccacctagcccaactgaagcaaaagattcaacactgcgtgacgctgagcttttaattgtcggagatcaaattaaagatcttgatgaaagttgtattgtgatgggggatttaaacgacgtagcgtggtcacgaacaacccgtttatttcaacgtattagtgggctactcgatccacgggtggggcggcattttattaatacttttcatgcggactatcctttattgcgctggtcacttgaccatatctttcatagtacagacttcggtttagtaaaaatgcagcgtttatctcatattggatcagaccattttcctgtctatgtcgttttacaaacaggtcgaatatttgaagaaattcacgaggaactagaacaaactcaagccgatgaagaagaagctcaagccgcgatacaagaaggtattgctaaagctgaaaaagaagaaaaaatcgtgactgatgaaattgcacagccttataaagagaaaaatatataa

SEQ ID NO: 50263 - DNA, 1008 bp, Acinetobacter baumannii
atgagaaatctccatattgatgccacaaaaggtgtcttaatttttctggttgtattgggtcattaccttgaaaggttaattggctggaacgaacctctaaatcaagcgattttagggagtatttactttgttcatatgcccgcttttatttttatatcgggaatattttttaaagaagagaaaatcctagaaaagttaatttactttttatcgttatatttaccgtttcagcttttatttcaattgcttgatgctttttataatggaagtctttggaatggaacatttcaattcttatggtttgctaaaccttattgggtgctttggtatttatttagcatgggaatttggacgcttttagcttttttcctaaaaaagacagcatatccagttctattttctattattttagctttacttattggattttcacctatcaataattatagttattcaataggtagaattttcgtatttttacctttttttatgactggggcgatctatggtaaaactatttttcagtatattccgcagttaccttatgaaaaattatttgctgttatcacattattaataattactattgtagccgctataagccattatagttattattggttatttgggagtctatcttatattcagttacatgtagatttatggcaaggagtgctgatccgcagtgtaattatgttgctatcggctatgggtgttttgagtttatttgtattcactcaaaattttaaacaaccttggattggtttaggtcaaaaaacactgccagtttatatattgcatgcttttgtaattattgttttgacccatcagttaagcattaaatattcggtagagattaatattttcattagtcttgttttggctgtcctaacttgcatggttttacagttacagatatttgaacgtttaattcgcttcatctctttatttgtatataagccttttatgaaattactagaaattctaaaaccaaaaaaagggctttaa

SEQ ID NO: 50264 - DNA, 3063 bp, Acinetobacter baumannii
atgtttaataatatttcccaagttttagagagtataggttttctctcacagcatcgttcggtgtatctccagttttcagatgcatccctgaatagtcaggtttttttacaacgtatagatgggcaacattatcttaatcagggcatgacagccgagctgatttgtttatcaaccaatgctcatattccactcaaaacatttattgggttgcaggttgcggttgatcaggtcacagatcaaggccaacagtttcgtactacagggattattactggagcatcacaaggacagagtgatggtgctctaaccttatataaactcacgatatctgatccaacttatctctggcataaacgcagaaatagccgtgtgtttatgaacaagagtgtgaaagaaattagtgaaattctgtttcaagaatggcaggggaaaagtccattatttgcatctagtctgactttagatttgagcggcttaaaacagacctacgatgtccgtccttttgttatgcagctcaatgaaagcgactatgactttttaactcgcttatggcgtagtgaaggtattagttggctcattgatgaagcagagcttaccgtggcgagcaatacggacaatattcagccacaaaaattacgccttattgatgacaatagccagtatcaggcactgactagaaggacaatccgttaccatcgtagcagtgcaactgaacagtttgacagtatgaccagtttgatcgctggacgtcatttgcagccgacttctgtttttgtgcagcgttggcagtcagatgtattacaacaaacagatggggcaggcagtgtacaaagtacacatcagcatagcgccagctatgacaatcaaagtttaagccttgaagatgcatggcatttcagtccggcatggatgcaggatttaaacggcgaagatggggcaacctcagcaagtaatcaacaactggaaaaatttaaccagaacttaagcgcttaccatgatgctcaatccaagcagtttgttgctcaaaccacagtacgggatacacaagttggttactggtttgaactgaatgaacaccctgaaattgatctgcatagtggggcagataaagagtttctgatcattggtaagcattactacaaccaaaataacttaccgaaagacttaaaccagcaaatacaaactttaattacacaaagccattggcaatctagtcatacaaaagagcgtcaaggcaatcaactgattttacaacgtcgccatattaagacagttcctgaatatcagcccttacaagatcgtcctcaagccgctgtacaacgtgcccgtgtagtcggacctgaaggtgaaagtatctatgtcgatcagtggggacgcattaaagttcgtttcttgtttacccgagctaatgaccatagccatgatggaggcgcggggagtaacgacaacgatactgattcggcttgggtcgatgttgtaaccccgtgggctggaaaagggtatggtgcacgcttcttgccacgtgttggtgagattgtggttatcgacttctttgacggcaatattgaccgtccgtttgtagtgggacgtattcatgaagccgaacgtcatccagcccagttcgaccagaaagggcagctacctgacactaaaaaactcagcggtattcgttcagaagaagttgatggcaaaggctttaaccagctacgttttgatgatacgactgggcaaattagtgcacagttacaaagtagccatgcggtcagtcagttaaacttaggcaacttaagccatccaaaagataaggccgagagtgatggtcgtggagagggctttgaactcagaactgaccagtggggcgcggttagagcaggtaaaggtttacttgttagtacccataaacaggaccaagctcaaggcacacatttagatgcagccgatgccaagcaacaaatcgaaggtggtcttaataatgctaaggcactgagtgaagttgctaaaaaccagcaaactgatccattggaaatgcttgagaacttaaaaacgttcatagagcaaattgaacagcaagataaagaaaaggctgctgcatttaagcaagccttgatgatcttaacagcaccaaacagtattgcagtcgccagtaatgaagacatacacctaagtgcagatggtcagttaagccaaactgctggggacagcattaatataagcactcagaagaatttgattgcacatgctcaaaataagttaagtctatttgctgcccaacagggtgcacgactttatgcgggcaaaggtaaagttgagatacaagcgcaaggcgatggagcagatttaattgcccgtaaaggtatccagattatttctacagaagacaaaatagaaattaatgcttctaaagaaattgtgattacctcgggtagttcccaaatcaagattaatagctcaggtattttcccagtcacgggcggcaaatttgaagtgaaggcggggcagcatgtgtttatggggggaggaagtgcttcgagtactttaccagctttgcctcagttgaatataccgcctaaagagcttgaacttaagtacgtgtatgacgacctaaagcccgttgcccaagcaccttacaaacttatatttcaggatggctcaatgcaagaaggtattctggatagtaatggttatgcaaaagtccaagtccctgctgataaagtccagccaaaggtttattacggttttagcaatatggaggctaaacctgatcagcccaaacagcagaatagctttaaagataaaaaagtgatgagtattgtggaagcagaacaattgatcgaacaatataacaagcaagaacttgaccacttattagatgaatatttccctgatgaaatacaagccatgatcgatgggcagggtgttgagtatgatgaccatatcaatgattatgtggaaaaagatttagaacaacaaaataatccggatgatgctattgcggatcaagcagaagaaatcccattgaataaacaatcaactccacattctggttttggggagggtatatga

SEQ ID NO: 50265 - DNA, 1446 bp, Acinetobacter baumannii
atgagtacagccgttgcaaaatcaccagccaaaaccattcgagtcacccaaaaaggagaacaatcggcagcagactggataaaaggtgtgctagacgggagtggatcaagcccggcacaaattattgtagctgtggtgattggttgtatcccttttgttgggcagggtgttgatgttggtaatgtaatcgtttcaattgtcaaaattgcagaaaacccgaataacaaagataactggtttgatctggtctttaacttaattgcgtttgttcctgttgccggagatgggcttaaaattgtatttaagcaattgcgctctggtaaagcgatgggggcaatattagatgcaatcccaagtaaaaccatgcgtggcaatgttgaaaaatggtttcgtaacttaaactggaatgcttacaccaaagagttgcagactaccagtaataaaataattgatggcttaattgatgtttttgatagctggatgactagagcggtcttgggacaagctcgattaaagactcttgtagtgcaactgagaaaaatgaaaactgttgcgaacaggcaaattgaaatggtgatgaaagacctgcaattagcgcataaaaaagctttggcaaccccttatcctaataccacagcgaaggctcccatccataaaacgggttcaaagccacttaatcgaacttcggcgcctcatacacagcaaaagggtcaggttcttaaaaataccagtggcaataccgccaagacaggaagcaagaatacatcaaccaaaagaacatcaaaaaagcgcagtaataaggaattaggttcgggtggtgaacacatcacggattattactttgtgaagcggaaaaagagtcgtaccaaaattaataataatggtgtgctgtatgaatatcacgatactggacatgatggtattgaccatgcttggtatagcaatagtattgggcataagtaccgaattacagatagtaaagcgacgaatttagccagtcatcgaaaaatcatgactccgaaagcagcaatggatgctttaagcatgggcttggatgtttatgtaaagtcttccaaagagaaaaaaactaaaggtgcattaggtaaaacagtcagtgatggtgcacaaatgtcacatctttggattgcgaataaaattggtagcgcaaagattacgtctagtcataaagttaaattacttgagcagattgaagcttggaagcgtgtcgaatttaagcctgcatctgaaagagtttttaaaaatgggaaaggacaaactgttgcagtgaagtgcccttatgaccgaagtttagtgacgataacgggaaatcaatttgaccaccatagtcaatgtaaaggtctggatgaaccgaaatgtacccgttcagtgacctcacatgcgattactttagagtttgtcttgccgaatgaaatgttacgggagtaa

SEQ ID NO: 50266 - DNA, 1074 bp, Acinetobacter baumannii
atgaaattggaatatcaagttaatgatcaagaaatagattggcagaaatggtttgatcaggaaaacaaagattcggatagttatagggatagttttctagaaacagaaatgtatcaaagaagatttaatacttttctaaatggcatttactcagtgactgatgggttccgaaaatataaaactagtgccaaagctggaaaaatgatgagcgcagggcatcaacgtttacaagatgtactgaatttaatgtcattgcagtattcagcgggtggggatattagctttattaaagagctttatccttacttactgcattggatggaagaatatgcagaaactcatgcagcttatcaccaaacagaagaagctggtggacgttacgtttggcatattagtttaggtacagaagactactggtatattgctttacgtttgatctgttttggtttgttaacgggctatgcagaccaaatggcacggattatgccgattattgattatgttgaggcaactcctgaaggccaagaaaaagatggtttaatcgagcgtctggttgctccatttgtagcagaccgtggcactccaccagatgaagccagaagacatttgccttatcgaaagttaatcaaggtgtttaatgctgcacctgaacaacgcccagctttaatgctgcaatatttagaaagttggtatgaggcgagccgtcgggaaccttattacaaccagcatccccaagcagatatagatgaaggctttttgtattatggctactggtcatgggaagcggcagcggtgacatggctgttagatatagatgatgctttataccgtgagcatgagttctacccaaaagacttagttgattttgcgcgtacacaatcaaatgtggttccaaatgaggaacagccagaacgtataaaagtaaaaggtggcgaagcttgtattaaaacaggtcattggattactccagctaaacctgatacacgattgtattttacgcaaggtacaatcttgccgatcctttcagaaacagactggggtgaagtgtattggtattgggatggtgagaattaa

SEQ ID NO: 50267 - DNA, 861 bp, Acinetobacter baumannii
atgaaccaagaagatattgattacttttatgagaaatatggtcagccaattgataaagttgaagtgacagaggacatcataaaaaaatatcggggtaaactgcctgaaagtattttagagcaatggcgtttatttggttttgctggttatttgaatggtttgtactggattactaacccagacgattacgctgaagtgatttatgactggttagaggagacaccattgcctgatgatgatgcctatcatgttttggcccgttctgcatttggtgagctgttaatttggggcgaacgtaattgtggtagatactacattaaaacaatggaaggtatcttacatgacaatggagaacagttagaaagtgctgagttttatggtagtgattttttctttttacctaaaaaaaattatctagattacacagacaaaaacggcaataaactatttgatcgagctgtaaaaaaattaggggttttaaaggcagatgaaatgtatgcctttgagcctgctttggcattaggtggggaagaatcattacagtacctaacaaaagttaatcttcctgttcacatgaagctactaaaacaggtaactccattaagattgagaacttttgaggatcttacggctgctctatatggtacatcgtatagtgtggacgatttaacaagtggacaagatgctgagtcacaatatcaagaatctgttcaagctggagaagtttgtcctagaacaggttactggacaacgcctgcacaacccaatacacgccattattgtaagaaaggtgaagttcttcctgaaattaaggaacaagattggggtgaagtgtattggtattgggatggtgagaactga

SEQ ID NO: 50268 - DNA, 1068 bp, Acinetobacter baumannii
atgtcaataacagtcaatgatcaagaaatagattggcaaaaatggctagacttggaaattactgatgagagcaattttagagataatcatttattaaaacaggattatcatgaaaactttgatgagcttgtaaatggattgtattcggttactgatggctttagtaattataagaatgaaaagaagtttggtggatacattgctgcgggtcatcagcgtttaagagatgctttagatttgatgtctttgcaatattcagcgggtggggatattggctttattaaagagctttatccttacttactgcattggactgaagaatatgcagaaaccagtcatttatataatttaagccctgatgctggtgggcgttatgtctggcatattagtttaggtacagaggactactggtatattgctttacgtttgatctgtttcggtttactgacaggctatgctgaccaaatgtaccggattatgccgattattgactatgttgaagctacacctgaagggcaagaaaaagatgggttagttgagcgtctggttgctccgtttgtagcagaccgaggcacaccaccagatgaagccagaagacatttaccttatcgaaagttaatcaaggtgtttaatgctgcacctgagcaacgtccagcgttaatgctgcaatatttagaaagctggtatgaagcaagccgtcgagagccttatcatgatcaacatccacaaactgatcttagatcgggcgttagctattatggttattggtcatgggaagcagcagcggtgacatggttgttaggtatagatgatactttataccgtgatcatgagttctacccaaaagacttagttgattttgcgcgatcacaatcaaatgtggttccaaatgaggaacagtccgagcgtataaaagtaaaaggtggtgaagtttgtattaaaacaggttattggattactcctgctagacctgatacacgactttattttacgcaaggtacgatattgccaatactttcagaaacagactggggggaagtatattggtattgggatggtgagaattaa

SEQ ID NO: 50269 - DNA, 981 bp, Acinetobacter baumannii
atgactaagtatgcatcagatgctttacttgcagccacacatttatcatgcagcattcaacttacttatgcttacgatctaattggctctgagaagtcagcaaaagcgcttgggaaatcaaaaaccacgagcatgtttgcaaagcaacagtctcaaaatagtaatgaagcattatctctcagtaaacctgttgaattgattaggtccatgtatccattagtgacaggctcccctgtcactaatgggaggttacccgttcgtctaagatctgagaatgagctgtttattcaatttattaaacagataggacctatggttaatgttggaatttactgtaacgatcaatatttttcgaatcaaatcatgggctatcaatatacgctcaatactagacaggttaatgaggagtcatcggcttgggatgcagaacaagctcgtactgaagagttatttgattcaacgatgaagactataaccaaggactattctggcttcgagacacatgagctatatctgccaatgctatttacgctttcagcgaatacaacaacgtattccaaacagcaatatttagatcagcagaaaaaagacatgatcgccgctttccttaatgagtgtgggagtaatgagatctttgctgtattttccaaatgggaacttacaccccaaggacaattagcactcagactggtgttcttacttgaacgtcagtttatagatgatcctgttggtttgtctaatgaaaatgctttcattgccctacaaggtaatctggaaggcctgtttaattgcaaagcatatcctgtacctaggccattaaacggttttatgccaactaatcgctttttcaaaggtgatccaaagtacaaagaccttattaagttgcttaaaacgtatctagttggtaccgatacaatccttcgaatctgggatacgcagcctacttttgatgttttgtattctaaatttaaaactagttag

SEQ ID NO: 50270 - DNA, 1107 bp, Acinetobacter baumannii
atggcaactactgctaaaaaaaatgctaatactgaaaaagaaacttcttctaatgacaacctccaagaacttactggcttaattgaccaacttgaggaacatattattagaagatataaatttccttatggttctccatcagcctactccgaatactacaaagcttatctacccaagcaaatggaacctgtcagtgaagaaataacggagaatgaccgaaagtggttttatgaacagcttgaccaaggtctattaaatgaatcgcctgaaaaacaaaaacaacgtgaacagatatggaaattacctctattaaaaggtgcaagcgatcaagaaatcttgattctagaagaagatctatatccccgtcactatagtgaagtagctactcaaattcgaaattttaaaaccgtactatctacagaaaacgatcaaaatcagtataaaaaggcaaaaaaatactttaatctagcatttcgtctttattcaaaacattacgactgctcattctattggcacaccctcccagaagatgttcaaaagcagatccataactctaaacaagcaaaaagaaagcataaagaccttcaaaaattaaaacgtatatatttcgctctagtaaactgcttaatcaatggcagggtcttaaatacatacacccatatggacttcttaatcatagatttaaacgaaaggcttataccctacattttagaatatttaatccatagaaattggtatgagaagataatatatagaataaaattcgatgaagttgcagattttttgtcaagacttaaggacccaaccgtcaaaaagaacaaacatagtcctatcatttattcttctttcgcgggctattctcaacaaaccctaaaaaaaacaagagagctatatcgggaaagaagaaggaaagccaatatagattttaaaaagtacgtccatttataccatctttatttagagacatatgctaataaaaagggaacagctactaggattagtccagaaactgaagaagctttaaatatagtagctaattctgaggtatggctcaaaagagacagacccgatttataccaatatcttaagagtctaattaaacaataa

SEQ ID NO: 50271 - DNA, 147 bp, Acinetobacter baumannii
atgaaacatccattttttaccttttatttcacgattgtgattggctactggctgtattgcatttgggaatatccgggacaatctggggcttatttacttggcggtgctttggtctggcctgctgcacttatacgctggttcttctag

SEQ ID NO: 50272 - DNA, 1065 bp, Acinetobacter baumannii
atgagaatagatgagctgatccagcagagccagtggacgcctttattaaggagtagcgacaatatttattttgcccccgtcattcccaataaaaagttacaaggtgctatgagctatctacctcatggtgtaaatcctagtgaagtattgatgctgattgacgatacagtatttggtagtgctaaggtcgggatgtgtctaacagcaaaggggatattttataaagccagttttgaagatgaaaaagcctatctgtttgaacacatccagcagatagaggctgatattggaatgatcaccagttcgatcttgatcaatggtcaggatgagctgagctttagccaactcgataaaggtgcgattcgtgctttggtcgcattcttaaatgaactttgtcagggtatacaagcaaccaagcaaacgattgtaaacattgatgccgagatgcagatcatgattgatctgtttgcttacttcattacttttagtgcagggcaatggaataaccgatcaaaagaagctgtatccgatcattttactaaactgaatgataaggcagtgcatcagtatgttgagaaactactgaatgtacagatgcgcttcgattatgaagacttgttgcatcgtctggcagatatgaaggacaagcttgcctataacttccgtagggaaatgattgagcaactggtctatgccatggcactgggtcaagttgagcagaatcaggctgaccttttcatgacccatctgtgccgtgtatccaacgtctctagggctgtctttccagacctcgtcaaaattatctatcagtgtctggcaggggaaatgaatcagaaaaaagtttctgatttgactcaggaacaattacaggcatgtcaacttcttgagattcagcccgaactattgaatgagcaaacccttcaagctgcctaccgaaaaaagatggccgacttccacccagataaataccagagcttacccgaatcagtacagcagcttattgaacaacaggcccagcaactcaatcaggccagagctgtattaaaagcctatttgggagtgtag

SEQ ID NO: 50273 - DNA, 249 bp, Acinetobacter baumannii
atgaagatcaatactgagcggctcaaacggcgctggagatggtatgtcgcttatatcgtaatttttatcctgtcctttgcattgttttatgcctatgaccatgctcaggatgaacaaaccgaacagatgcttgaagcggctcgcagtcattcagtcagtcctgataatacagtagtgacaagcattaatgccggagatgaagcccctgcttttgatcaagctgacctcaatctagaaaaccataaataa

SEQ ID NO: 50274 - DNA, 720 bp, Acinetobacter baumannii
atgatgacatcacaacctaagaatacccatacccagacttttattatcggcgttttatctgcactggtagtcgtacttgcaggatgggtcggctatgacaagttacttaaaactaaatcagaagtgaaagttcccacacaaattgttgagaaagccacaatatctgaacctgtgaatgaagtgagtgaatctgaatttgtggcagaaccagaaaccaaaagtgagccgattaaagtcaaacatgtttctagtcagctcaatggaaatattctgcaaggtagtggaactggagaagtctatcctgaactgggttttcctgactttacagccccagggtataagaaactcaataatgctcaacttcttgcacaaattgatgctgagtatcatgaaggcttggagatgacagatgatcctactgcctatggtttacagcgagttgatcaagcacctgcaactgtcaagaaaatgtctgcttttatacaagccaatctgcctacctttgccaatgaagtttttgctcgaccaaatgtatcggatgttgtggttgctatggaagggtggatggatctcggcagcgatggatacttatatcgtgcggttgttacctcggcacgatatcaatgtagttggtatcaggttgtaattaataagaaaacaggtaaggaaatctatgaagaatttatcccttgctatcaaccaaatcaaaaagaaatttaa

SEQ ID NO: 50275 - DNA, 342 bp, Acinetobacter baumannii
atgaaatctctattccgtcgtggtttaactactcttctatgtgttgggactttagttgctggaactcaatcttgggcagcagatgctaaacaggcaaatagtgcaagtacagaagtcaaggtaaatccaaaagcgcaagaaaactgcaaaaagccttgtgacatgaagagtgaagagaaaaatcaacaagatcatagtcaacatgatcacggtaagatgacagatatgtcccaaatggatcactctaaaatgatgaatatggatcactctaatatgagtgacatggatcattctaaaatgatgaacatggaccattctaaaatgaacatgtcaaataaataa

SEQ ID NO: 50276 - DNA, 441 bp, Acinetobacter baumannii
atgaaaattagagatattgatatgtctttaaaaattggtgaattagcaaaaaaagtatcgtgctctgttttaactatccgttactatgaaaaagaaggattgattccatctcccgaaagaactcaagggaactatcggctgtataatgaggattatatagatcgcctaaaattcattctaaactgccgtacacttaatatgaatttaagtgagataaaacaattactatcgtataaagacacaccgaatcagaattgttcaagcatcaatcatcttgttgactctcatataaaaattattaaagaaaatataaattctcaacaaaaattaattcagcaactcttagatattagacgaacatgtgatggattatgtacagtagataaatgtggtgttctaaaagaaattggagattatgaaactaaattagctataacttga

SEQ ID NO: 50277 - DNA, 1296 bp, Acinetobacter baumannii
atgagtggttgcggttgtaataaaggaagttcttgtgacgacactaagcaaaatcaacctgaatcagaaatagattcttgtaagggtaaagattcagctactgaagaaaataaaagttcttgttgtggtaataaggtagaaaaagtacctaattatgatgaaaaagattcttatggtagtgatcagccgtgttctggggaattgaattcgtgctgcggtccagattctttaaagtcacctgaattagttaatggggataaacctatagcgactttcatcagtgactataacattccgaaaatggattgttccgcagaagaacaaatggttcggatgactttatcttctttagtggatgttaagagattggtttttgatttgccaaaccggaacttaaaagttctgcataatggtgaaagtaaagaaatcactgcaaaactcgaagctcttggatttggagcgaagttaaataaaactgaattttatgaaaataaagagcatgcgcaagaagccagtacttttttaattccgaagatggattgttcggcagaagagcaaatggtaagaatggccctttctcccttgcatgaagttaaaggtttatcttttgatttagcacaaaggaagttagttgttttccatacaaatgggattaatgaaattactacaaaacttgaagccctcggttttggtgcaaaaattgttgaaacggtaaaagctacaggagaattgcccgagacacttgacccaaataatcaagcgaaagttctaaaattattattagcaatcaatggtgttctttttcttattgaattcataagtggaattattgcagcatcaacggggcttattgcggactctcttgatatgtttgcggatgctgccgtttacggtatagcactttacgcagtagggaaagcctctaaatatcaattaaaagcagctcattttgcaggatggattcaacttttattagctttgatcgttattgttgatgttgtcagacgctttatgtttggtagtgaacctgagtcagatttgatgatccttattggcttcttagcacttattgctaacgtatcgtgcctgtatctcatttctggacataaagatggtggagctcatatgaaagcgagttggatcttttccgctaatgacgtgatcgtaaatatgggagttattttagcaggtgtgcttgttgcatggactggttcagcttacccagatttgattattggcatccttgtttctctgtttgtgcttaatggcgctcgaaaaattttggcgttgagataa

SEQ ID NO: 50278 - DNA, 258 bp, Acinetobacter baumannii
atgaatttatttcaagtaaagcaaaatcagaccgtaaaaatcattgatcttaaaaaaggctctcagtttcaagataaaagtgatcctgttcttgaacgtctagaactgcttggctttcgagtcggtgaatccttacaagtacttgcgaaagggcttttcggtggtgacccagtactggtccaaatcgaaacttcacgttttgcattaagaaaaaatgaagcagaacgaatttttgtagagattatcaatgaacactaa

SEQ ID NO: 50279 - DNA, 408 bp, Acinetobacter baumannii
atgcagtggttaaagacatgcctatcgctgtttttatcgtttgctatcctctttgtaggatcggcagcagctgctgcatctgtgcataaaaaatgtttaatgtcttcagaaaagatgcaatctatgcaaatgatgcaatcacctgaaaataatcaggtaaatgctgcgcatatggattgtatgaaggcggactcaaaaatcaaaaaaataacggttcatgattcttcttgtatgtctgaaccagattgtattgcttcatttgcaaaaattgcttttcccaaagactctttagtccctttgccggaaatagcaggacctttattagatcaatctaattttacctctcctaatcaacaacttcccccatccattctttatagtttatggcgacccccacaagccacctaa

SEQ ID NO: 50280 - DNA, 1302 bp, Acinetobacter baumannii
atgtctcactatagaaaattgccgtccaaagtatgggtaaggcaatcgttaagcattgtgtgtctattatttttgtatggtcatgcaaatgcagaaatactgactttagagaacgccttaaagcgtgctgaggaaaatgcacctactttaaaagcaaattatgctcagattgaaggtgcagagaacaatgtactcgcttcaggcattttacctaatcccaaactatttgttggattagataattatccagtatctggagattctgcttggtcagtcacccaagagggtatgactatgcagaagataggcgttatgcaggattttccaaataaggccaaaagaaaggccgaagttgaacttgctcaagctgaactcggagttgcaaatagtcaaacacaaattcttcgaattgatctacggcaacaagtcgctacagcatggtttaagcgcttttatcttgagcaaaagctagcgctgatagataagttacttgcagaaaacgggctgcttggaaaactgactcaaacacaaataatttcaggtcaatcgttgatcgctgatgcaatggcacctaaacaagaatatacggtattacttgatcaaaaggatgatttatcgcgagatctgacaaaagcaaagctggagttgcatcgtttagtcagtgcaaatcctttggaaaactcctctcagatagagaccttaccaactcaggcccccaacctgcgagttgataccgcgcaactatatcaccacctacatcaacaccctgaactgaaggcatttcaagcacaaaagcaagtcactgaatcaaagctgaaacaagcacaagctttacagaagccagattggggaatagaggtggcttaccagcatagagctccagagtttggagacatgattggagttcagttgacgacagaaataccagtattctcaagaaaacgaagtggtcccctcattcaagccgcgttagcagagcaaaatcgagtcactgcggatcaagaagcaaaatatcgtgagcatttaagcatgttggatgatggacttgcagatattgaagctcttaatcagcaaattaagcgggctactcaaatgagtattccttatgcaatgcaaaaagagcggttacagctcgcgagttatcaggcaggaaaagccaaattaactgatgtaatagcaacacgtcaggcactacttgaacaacgaatgcgtcttattgatcttcaacaacaacaatcaatgataacggctcaactgtactttaattttgttgaacccactcaaaaccataccgaggagtaa

SEQ ID NO: 50281 - DNA, 1527 bp, Acinetobacter baumannii
atgttaagaaataagttggcatttgcaatggcgggacttgtcggtgtgagtttggcagttggtggtggtgccggttattggtttgcccataaaagtgaaaaaacacaatcggacagtacgcagaagacagctaaggttttgtattggtacgatcccatgaaacctgagcagcattttgataagccaggtaaatcaccttttatggacatgcagctggttcctaaatatgctgatgaaggtgatgcaggcgctactgaaagtacagtagtaaagattgatccctctattcagcaaaatctagctatacgttatgccatggttgaacaagcaatggtaggaagtaacttgctgaccaatggcatattgcaggcgaatgagcgtcaagttgctattttacaaacaagagcaaatggatttgttcagcgtgtctatggccatgccgttggagatattgtgtctcaaggtagtccgattgctgaggtttctatacccgagtggacgggtgaacaaacagaatttctggctgtgcttagaatgggtgatcgttctttaattcaggcaagcagacaacggttacagcttttgggaataccgcaagatgtgatccagcgtgttgagaggacacgtaaagttcagtccactatgactttgagcgctcctgtgagtggatttattgattcactagaggtgcgtagcggaatggccttaagtatgggacaaacgcttgccacaattaaaggctttaacccgatttggctagaagctgcggttcccgaagctcaaattgcaaccataaaacaaggaagtaaggccgaagtaacattggctgcctatacaaaaacagttacaggtaaagttattgatattctaccaacactcgataccacaagcagaaccataaaagttcgtattgaattacccaattcagatggtcatttaaaaccgggtatgtttgctagcgtaaaattccttaataatccccaagcaaatctagtgattccagagcaagcggtaattcgaactggtacgcggaatgtcgtcattgtggcacatgagcaaggacgtttcgaacctgttgtcgtgcagttggggcaaagcgacggtcataaagtagccatcttacaagggctaaaagttgggcaaaaggttgtgatttcaggacaattcctgattgattctgaagcaaatttacaaggtgtactcgataagcttaatacaggaaaagctatttccacctctcaaactcaaaatcctaaaccatccctatatcaaggtattggtagagtcgaaaaagttacacttcaggaaattacaatctctcatcaagcgattgcaggacttggttggggggctatgacaatgagctttaaacaacctgcaaagccttttactcaaattcggtcaggtgatcaggttagttttagctttaaacaagttagtgatgcttatgtcatttctaatatttccaagatatctaacaatatgtccatggcatctatgccgagtgaaaagggagatccatcatga

SEQ ID NO: 50282 - DNA, 363 bp, Acinetobacter baumannii
atgttgaaaattatcaaagttatggcatttgttgcgactgttactgcactcagcgcttgtagtaaaaatgaagcaccaaagcaagaaaaaagcgaagcaccgatggaacagatgagtaaagacacagctaaggctacttctgcccaagccgtcggcgtcattactgcaattgatactaaggaaaacttactgaccttcaaccatgaggctattcctgcaattaaatggcctgccatgacaatgggatttaaagttgctgatccggcattgttaaatggtttaactgtaggacagcatgtagagtttgagttaaaagctgaaggcgaaacttacacagtagtagctgttaagataaaaaaatag

SEQ ID NO: 50283 - DNA, 321 bp, Acinetobacter baumannii
atggatcaagttaatttttttaaatgtttatcagatgaaacccgactcaatattgtgactttagtagctgtgaataaagaactctgcgtttgtgatctaaccgaaaagttgcaattgagtcagccaaaaatttctagacatttagcattattgcgttcttctggtctattacaagacagaagacaaagccaatgggtgtattacagcattaatccgcagttaccaacttggtgccatgatgtcttaaatttcttggttaatagtcaaaccctaacaaatcaagattcccaaactatccaaataaatagttattgtgagtaa

SEQ ID NO: 50284 - DNA, 1149 bp, Acinetobacter baumannii
atgttcaatatgggtcgtttcgatctcgctcgtcaacgtcgtggtttgactaagagagatttggctcatcgattagacgtaaccgatagaactgtctcaaactggtacaacaatcaagaaattgatgagagaattttagaaaaagccgctgagattctcgattttcctcttagtttcttttatggaagcgacgtagaaaaaattcatgctgaatctgtcagttttagggctcttacgaaaatgacagctaaaaaaagagatatggcaattagccaaactattttagctgaaatgatcagtgattggattgatcagaactttgagttgcccccccctaatgttcctgatctacatgaattaagaagtgatttctcaaatgctattactaatgaatcaatagatgaggctactgacaatgaagttaattattatcttgaatactcataccctgaagcatgtgcggatactgtaagaaaagcatggggattaggggagcagcctatacccaacttaattgcacttttagaatctaaaggtatcagagttttctctcttactgatgaagcacaagatgtagatgcctgctgtagatggaccagtggtcgcccttttatttttctaaatacttctagaactgctgaaaggtgtagatttgacttagcacatgagttaggtcatttagttatgcataagcatggaataattgaaggtatccatatagaacaagaagcaaatgcttttgcttcagcatttctaatgcctcgtagaagcttgttagctgatcctttaaaaatcccctctttaagaagtattttgtccaaaaaagaaatatggcaagtttctgctgctgcattaacttatcgctataataaattagggattattactgattggaatgcaactagcatctataaacaattagctcaaagagggcgaaataatgaacctaatccaattgcccatgaatcatcacttttgctagataaagtcttcaaagttttagctcaagaaaactttgatctatctaaactgacaaatgacgtatgtctaactctagaagagattagtaatcttacctttaatctggtttctaaatatcaaaatttagaggcactacgacgccgaagtcagttgacagttttagaataa

SEQ ID NO: 50285 - DNA, 756 bp, Acinetobacter baumannii
atgttcttttctattttttcaaccgaaaactatgtatgctgtatggatgaaaaacttaatagatctaattttatgcaaccattatatttaaccattgatgatccaaatcatgcccaaaaccgaataaaagaagtttttggttttgactcaaaagttctacttggagtcatagaagatggatttactgcccgcaatgaaacaacaaataatcacccaaaaatttatggcggttatagacattttgctgaaggaactgcttttttaagagagcggctattaactaagggttattcaaaatacactcaagggaactcagaatgggttcgtaatgaaaaattaggtattttaattagcttcatgacgggaaatgcttgcgttggattaaaaggacaagttccatccaacacggaaagcttaaaagtcgatcaaattgctcgtaataaaaatccaaaaggaagtatgttttcgagaattgccaatcctcaattactcggtgatatgttaaccacacattcagatatagatacttggtgttgggttctaatgtactatattgattataaaaataaagttattaggagtgaactatcatgcccgtcaaaacttacggacaatggtaaattttttgcagaatatcatgagcgaattattttaaaagaaattagtttcgaccccgaggctgaatttgataatattcgttcccctgcaccaacccctccgtcgattgatttcgaaatcagacgcaagaatgcttaa

SEQ ID NO: 50286 - DNA, 927 bp, Acinetobacter baumannii
atgaaaatttctttatcttcgtttcaaattgggtctttttttgcgctctgctctgcttttctattcagcacaaaagcgatttttattaaacaaacttatgccctttctccattagtagacggtacagtcctgatggctttacggatgttaagcgctttaccgttttttctattaatttgctggttcaataggcatcataatcagggcataaaaaagaaggattggctaattttaatttttgctggtctattaggctactactttgccagctggctcgatttcatgggcctcatgtttattagcgcttctttagagcgaatcatcctatttttatatcccacacttaccgtgatcgcttcaagtctgctctacaaacaaaaattagatgtaaaaagtttattcgccatttttcttagttatggtggaaccgtgttagtgatgctgcaagagcacaacaatgcaccaattcagggcaacttttggctcggaacaagttttgtatttgctagcgctgtagcttttgccggttatttactgctgactccgccattaattaaaaaatttggttcttggaatttcacaggcttagctttaacagttgcctgtataggtacattaacccattacactttaagtacccctcacccgattcaacttctattacaacttccctcaagtgtaatttggtacgggattggcttaggttttttagtcactgtcttacctaccgttatgcttatgcaaagcattgagcgactcggagcatctcaatctgcaatgattgcttcgatcggaccagttttaacgattttgcttgccgttgcttttttaaatgaacacctaaatatatggcaatgggtcggttgtttcctcaatatagtcggtgtaatgatgattactttaagaaagaaaagactaaaacactaa

SEQ ID NO: 50287 - DNA, 261 bp, Acinetobacter baumannii
atgttattcaaaaaattcgctgttgctgctgctgttgctgctactttagctttcgttggttgttctaagaaagaagaagctccagctgctgctgctgcttctgaagcagtagctgctgcttctgaagctactgaagctgcatctgaagctgcatctgaagctgctgtagctgttgacgctgctgctgctgaaactgctgctgctgcttctgacgttgctgctgctgcttctgacgttgctgctgcttctgctgcacaataa

SEQ ID NO: 50288 - DNA, 1086 bp, Acinetobacter baumannii
atgacaatagaaattctaaatgcagttattcatggtgtaaaaaaacaaactaatagtagtattgcagagcctaaatataagcctggatgttttaacacaagtgatccattattggtaaaatttacgaatgatttattaaaagcatattcagaagaagctaatacttgggcggatattgcgagtgcagatattaatatttttcatcagaaccttataaaatgttttaaagaagatgagaaaactattgatttttataatttttcaaaaaaagttgtcgaccagatagttggtgaaataaaaagaaaatataaagctacaggtggttatgtattactgattaattacaaatataatattactaattacttattagttgtaatgcttaaattagagacaagatttggcattgacgaaaaagatttatctttctttgaaactgaatcttttaccatgaagaactttcatgaagctgtacgtatgaatcttgatacatggctagcaagatcagtaggagaagggatcgatgaagatggattacctgagagatgttttgcttttgtcaagaaaaggggggtagatgaagatattacacaatattttagattagctctaggttgtgaaaactttgcagaatcaacagcaaatacttcagctttaattagagcattagatgcttatgtagaaagtaaaagttttctaaatgaagatagcaaaatggagtttcgagaacaaaaaagagatattctccataactatttatctactaaaattaaagagaaacagcctgttagtttgcgtgacatcacagcattaatttcacctactgatgagaagataaaggaaaatgaatttttagaatttattaaatctaatgataaatttaagattgatgaaacttttaatcctcacaaaggtaaagtcaaagatcttgagcgtgtatcaggaaaaatcaaaggagggtcggtaagttttcctatcacagaaattggtgaaagtatcttttatgatcaagatattagagagttaaaaattcaaaaagtacctgatgaattacatcagaggattttaaatgcaaaaggttcataa

SEQ ID NO: 50289 - DNA, 1254 bp, Acinetobacter baumannii
atgagtgagtatgaagaaaaaaagctatttattgagaaaatagctcaggcatgtgatttgttatacgatttgtctatggaaggcagtcgtataactggacgtgcgaaaaataatgatgacttaataaaagttacaaatttacttcgcgatgcagaaaaaatagaagaggaattatcgtttagtagtaatggtttaattattactttttataaagttttaaatatatttaaaaattttgataaattacttaatgattctaattatagaagggatgtaccagcacaatttttttatttaattgaaagtaaaaaagcattttattttgatagagttgactcttattttgagaattaccttaatataataaaaatatataaattttttgaagaaaaatcagatcataaaagtagtgagcatggaaatcaaaatttaatatttcttggaaataaaaaacttgtagttacagatgagtatcattctcaagatttgatagaaatacctgatgctattaagttcatgtctaagtttttaactgaagatttaagtaatggtataactaataaagaaaaagatcaaatattaaagaaaacattagttaatttttttaaagattgtgaaactattaaattctcacaaataattaatgattttaagaaattaaaccattgtgttgatagtgaattagacatatatatgtctaaattttcatatgaagatataaaaaaagaagttgaaaaagaaaaagtagattttatagtaagattaaataaagttttttcagatatacaaactcaattaattggagtgcctgtatctgtaatattagctgcagataagcttaagcttggaaagcttgcattagaagatccaaataaattttatgggataagtttaacaaatttattagttatattggctataggattttatgcaattattttagctatgctcattaggaatcaaagtaatactttggcagctttaaaagatgaaattgatcatcatgaaagcctttttaagaataaacataaaggcatagctcaaaagtttattaactcatttgttcaagttaaaaacagatatgaacatcaaaagaaaatgttgctatgggtggatgttctagtttgtatagcatttgggataatatttcttatggcttatgtaagtatgttttcgcatttagaaatattattgccatttatgggtggattgttgcttataggtatttttatattttatagaagttatgaataa

SEQ ID NO: 50290 - DNA, 633 bp, Acinetobacter baumannii
atgaataaaatgaatatttttgaaatgcttttgaaatcaattccttttactccaatattttattggtttttctccgaagcttttagattggcaaaaaaaagaaagttctatgatatgcaaatagatattttaaatgactatatccaaaattactttaataatacatcgatagaattttctttaaaagatttaaaggcacgtcaagttacttgtaattataaggtaggagcagatattttagattttttaattaaaaataaatgtagggatatttttaaagctattcaagattttgatcaatctttattttatgtaaaggtaattaattcagatacagaggattgtaaactcgtttctaatttttataaaaatagaattatattgctaagaagactttgttgggggatttattttgttacaggaggttttttattttttaattattttattttatcaatgtctgagtttttaaataaaccgccattatttagtaatgtagagaatagtccttctttatttttatttttaattattttgctaataatttcatccttaggtatattaacttttggtaggtggatagatgcttgtatctcactctcaaaaaaggtgcctgtaatctttaaaacttaa

SEQ ID NO: 50291 - DNA, 951 bp, Acinetobacter baumannii
atgaacaacttaataacaagatatttaaataatctggggcagtggcatgaaacagcactcacaacgactaaagccattattgctataggtgtattatgcttagtcgcatatttagtgacgattagctatatcccttcggaaattagctttggtgatacgctcatttttttactgatttttgcagcatgttctattatttatgcggggctaagcacgatattgtttttctttggtatttccttagttccagtaacatatatcatctttagtgtagttgataagtttttaccacctcatatcagaattggacaaaaactgccatttccaaagattagtattaccacattggctgcatccctttatctgttatatgttattcatagtttgtttttactacattggaaaatcaatctttacataggcattaccgtattttttattgcctttacttattatcctttttacatcaaccgacagaagattaaagaatttcgtataaagtttgagaatttgcaagatattattgatgacccagaagcaagtgatcatcttaaaacatttgcgataaagaaattcaaaagattagaaacgcatattaatgatagcttacaagtagccattattttgattttgataccacttgcacctatgttttttattgaagaagttggtaacacatttctaaactacgccatgcaaaaaattggtgtaagaatagaaaaggcaaccttatatattaaagaaccttatgcaaatttaattgaattaccaaaaacaactactaaagaactgagccagtatcaaacctttatttttaaagaagttaaagtgttatttcaaggcattggtaaaagcactttagtttcttacaaagtgaaagatatagaaaagcagttagttattcccaatgactatattactgtagagcgagctcagaaggccgataagtaa

SEQ ID NO: 50292 - DNA, 528 bp, Acinetobacter baumannii
gtgaaatctaaactttgtattattttattgtctcttttaacggtagcatgtagccaagtccgccctcaaaaacatggaattactgaagctgatataacccaagcaaatgaagcatcactctatgtccagtttaatcagctttattacacaaaatccttatataaagcagcatacaatgaagttaacaaggtaactgaaactaatgatcagttgctaagttatgccacttttttaatgtatgcagtcaatacaacttacgattctttagacataaagcttaatgatgatctagatttaatggcttctggcaaaaaaagtaagatgtcaattgatgctttagattcattatgtgtaagtaataaatacattgaaaaatatataaaactcaaagaaaaaagcggaagtgagatatcagctaaagcgaaagaactttcaaaagaggctttgatacttcaaccgaaaattgaaaaaatcattatgaaaactgattcaccgttaaatgatattgaatgtaaaaaattaatctaa

SEQ ID NO: 50293 - DNA, 489 bp, Acinetobacter baumannii
atgaagaaaacgatattaatatttttagcaccgcttcttttggttggcttcaatggatgtaaagcatctgaaaaagaggatatagatacatttattcaaaaggactttaagaattacgttactgataatagaaagttgattttggaagccaataaagatgtaaaacaagagccagctctaaaagagattattttcaaaaatacttttgtaaaagtaagaactgcacaaagtctacttaacgaagagtatggtaattggttaactggcttagataaaaataagtttgattataccgacctcaacgatgtctgttggctgaccgtctacatgcaaaactatataaataatatggatgagcgatatagagccaatatcaccgaagacaccaagaaaagtgttaagcaactatacgaagcaagaaatgaaattatcaagctaagagatagcaaagacaaatctctagcaacttttcagcaagtttgtaaatag

SEQ ID NO: 50294 - DNA, 609 bp, Acinetobacter baumannii
atggcacaagatagagttttctcaccaacattaattccatctttagataatgaagttaaagtttgtcatgcagatgaattattagacccattgttatgcaatagtattgttaaaattcttaattatcatactacagtgccttacacctttatgatgaatcaaggtcaatgggatggtgttaaaaacagaataccttttgaacatgatttagcaattcgttttgggcttgagtatgatttacgtcagtttagtgaatcagttttagaaagatattcttttcatacaatgatgtatcttaagttcacgatgtatgctcaaaagcattccttaaatgaaggctcaacttttatcagggagcttgccaaagattcttttacagcacgcatggcaattgctaagaaaaattttggtgaagttattgatcttgctctttccaatgcaaacaagcctgttttagcgggaaatgctattgccatccatgagaataatggaccatatctaattaatgagaatatgtataagaaagtatttggccgtccttatgatagtgctaccgtatcgcagtttatacgacaatatcaatatacaccgccacttagtagtttctag

SEQ ID NO: 50295 - DNA, 1482 bp, Acinetobacter baumannii
gtgattacgggcgagattaaaagtaaaattgaccaaatttggaatgctttctggagtggtggaatttctaaccctttagaagtcatggagcaaatgacatatttactgtttattcgccgtcttgatgaaattcaaactacaaaagaaaaaaaggcgaatcgtctcaaaattgctgttgaacaaccaatttttgaaccagaacaagatcacttacgttggtctaaactcattcatttaggtgatccagctaagttatataaaacggttgcagaggaagtctttccttttattaaaaacttaggccgtgatgatgacactacttatagtcatcatatgaaagatgcccgttttactattcctaatcctgcattattaactaaagtgattgaccttttggcagatgtgccaatggatgataaagacactaaaggtgatgtttacgagtatatgctcggtaagatcgcttcagcgggtcagaatgggcagttccggacacctcgtcatattattaaaatgattgtagagcttatgcagcctaagcctaccgataccatttgtgacccagcttgtggtacggctggttttcttgtggcagcaagtgaataccttagccaacattatagtactgagatttttgctaactctgaagttgcaaaacgctttagtgaagaaactttctttggttacgattttgacagcaccatgcttcgaattggttcaatgaacatgatgctacacggggtcgaaaacccaagtattgaaaaccgtgattcattaagcgaagcacattcacatattgaaagtaagtacagcctaattcttgctaaccctccatttgcgggtagtttggactacgaaagttgtgccaagaatattcaggcgattgttaaaaccaaaaagactgaattgctgtttttagctttgttcttacgtttgcttaaaacaggtgggcgcgctgcggtgattgtgcctgatggtgtgttatttggttcatctaaagcgcataaagatttgcgccaaaaaattgtagaagagcaaaagctcgaagcgattatttcgatgccgtccggtgtgtttaaaccgtatgcaggtgtttccactgcaattatgattttcactaaaactgaatctggtggtacagataaagtttggttctatgacatgcgggcagatggttattcactagatgataagcgtaatgaactagatgcgtctaagcatgaaaataacaatattcctgacatcattgcccgttttaaaaatttagatgctgaaatagaccgtaaagcgactgaacaaagtttcttggtagataaagccgatatcgctgccaatggttatgatttatcaattaaccgttataaagaagtggtgtatgagcaagtgcaatacgaatcaccaagtaaaattttggcggatttagaacttcttgagcaggatattctaaaaggaatgaatgagcttaaggagttgctgaaatga

SEQ ID NO: 50296 - DNA, 1161 bp, Acinetobacter baumannii
atgagttaccctttagtttgtttaggtgatattgctgattttattaatggcgttgcttttaagcctgaagattggggaacagaaggtaaaccaattattcgtattcagaacttaaatgacccttcaaaagaatataactatacagaacgtgaagttaaagatgctaacatcgcgcgtaaaggtgatttattagtttcatggtcagctagtttaggtgtttatgagtggcacggacaagatgcttgtattaatcagcatattttcaaagttgtacccaacaatgaaaaaattgataaaacttatttaaaacgtgctcttgaactgtctatagttgaaatggagagccaagttcatggtgccacgatgaaacatattactcgtggaaagtttctagcaaataaaatcccactcccaccactagcagaacaacgccgaatagcctctattttagatcaagcggatgaactacgccaaaaacgtcagcaagcgattaaaaagctagaccagcttttacaagccacgtttattgatatgtttggtgatcctgtgagtaatccaaaggggtggcgttcagacaaaaatttaggtgatgttgctgatatcgtttcaggtatcaccaaagggcgaaaaatcacaggaaaatcgctaagagaaattccttatttagcagtatctaatgttcaggataaatacttaaatctttctataattaaaacaattgaagcttcggatgatgagattaagcgttataaactcagacaaggagatttacttctaacggaaggtggtgatcctgataaattaggacgaggaactttatggaataatgaagtcgatgaatgcattcatcaaaatcatgtctttagagttagattaacatcaaaagaatttacacctaattatttgaattggattattggaagtgaatatgggaaaagatatttcttaaaatctgccaagcaaacaacaggaattgcatcgattaatatgggacaattaaaaaaattacctttattaatacctcctattaatttgcaaattcaatttgatgaaagatgtattaaaattcatcagattaagaataaacttgtggactcatgtaaagatatcaataatctattttcatcattacaaaaccaagcatttagcggaactttataa

SEQ ID NO: 50297 - DNA, 3444 bp, Acinetobacter baumannii
atgagtaacttctcgtttttagaacctgactttagcagtttggcagctactgctaaagaagctgaaaagctcgtgtatatttcgcctcaagcttctttgatgtttgcccgaaactctttagaaaacttggtgttttggttatatcaatatgataaaaaattaaaccagccttacgatgcttctatttataatttactaaatgacgttaagtttaaagatcttatcccaccctatatttgggataaaatggacaatatccgcatggtcggcaacagtgctgtgcatgggaaaaagtttaaacaactaacaaccgaagaagctgtaaaacacatcagccatttatttttaatttatgtctggttcgaacgtaattatggttcaccttcaaaagatcgttcacagcagattttatttaacccaaaattaattccaaatactgacagcactcagcaaattgcagctaataaagagcaattacaaaaagaagctgaagcgaaagaaaaggagtttgctgaaagacacaaggcattacgtgaacgtgaacaaaaactctttgagcaatctgcaagtttagaagaacgtgaaaaattacttgcttatattgatgctgaccttgctcagaaacgagctgaagttgaacaagccaaaattgcgaatagtcagattctagacaacaccgactataaagaaaacgaaacccgtaaacttaaaattgacttacttcttgaagaggctggttgggaaattggcaacaccgtacgcgaagaagtaccagttaccggtatgccaaactcatcaggtaaaggctcagttgattatgtgctttatgatgctgatggcttacccttagcgcttgttgaagcaaaacgtacatctgccaatcctgatattggacagcaacaagcaaagctttatgcggactgtttagaacaacaaacagggcaacggcctgtaattttctacaccaatggctacaaaactcgaatttggaacgatgtgcagggtggcccgccccgattagtccacggattttatactcaggcagagcttaaacggcttattgagcgacgtaagaataatcctgacttaagcagcttccccatcaatacagaaattgtagaacgctactatcagactcgtgcaattaaagccatgctggcagcattccaacgtaaagaacgtgctggtttgctcatcatggcaacaggtacaggaaaaactcgtacatcgattgccttagttgatgtattgatgaaagctaatgtagtgcaaaaagtactgttccttgccgacagaacatcattagtcaatcaagcgaccaatgcttttaaagccaatttacccgatgctgcaccagtaaacttagtcgatagtaagaaccaaaacggacgagtttatctttctacctatcacacaatgatgggcctgattgatgaaatgaatgcagatggaacccgtaaatacggtacaggtatgtttgacctgattattgttgatgaagcacaccgtagtgtttatcaaaaatttggtgagatttttaactactttgacagtttattagttggtttaactgcaacaccgcgagatgaagtagatcgtgatacttatgcattgtttggtttagaaagtggtgtcccaaccgattactacgatctcgatcaagctattgctgatggttatctagtaccaccaaaagcctattcagttcctcttaaattcatgcgtgaaggcgtgaaatatgatgaactttcagaagaagaaaaacagcattggattgaattggactgggaagggggagatgcaccggaagaagtttctgcatccaaacttaataaagaactctttaatacgggtacagtcgataagatgcttcaacacttaatggaaaatggcattaaggtagaaggtggtgatcggttaggaaaaacaattattttcgccgtaaatcaaaatcatgctaatttcattgccgagcgcttcgacaaaaactatccgcaatatgatggtaaatttgcacgtgtaattactcacgcgactaagtacgcgcaaagtttaatcgatggttttagtaaaaaagacctaccagacccacaaatagctatatctgtggatatgcttgatacaggcattgatgtacctgaagtggttaatctggtgttctttaaggcggtacgttctaaagtcaaatttatgcaaatgattgggcgaggtacacgactgtgtaaagagctatttgcaccagaacaagataaaaaagaattttatattttcgattattgctcaaactttgaatattttaatgaaaaccctgaaggtgctccagtctctacgactgaaccgttgggacagcgattatttaaagctcgattaaatattttaagtttattgaataccaaagattttgagactgaagaactaaaagcagtacagcaagatattcgtcaaagcttacagacagaagtgagatcgatgaacaatgagaatttcattgtgaggtctgaactcgaatatgttgaacatttcaaaaatgatgatgcttggaataatttagatgacctagctatgggcatattacgcgagcatatttcaaaattaccaaatgagcttgaggctgaaaccttagaagcaaagttatttgatatgttgtgctataaccttgaacttgcagtattagcaaagaacaataaagcaattcaaacgtatgctaataaagtgattgaagttgcatctaagctagagactaaagaaaatattcctgttgttgctgcacaaatcactttaattcaagaaattcaaactgctgaatattggaaagatattacacttccaatgcttgaatcgatgcgtaaacgtattcgtggcctagtaaaactgattgagaaatccacctctaccattgtttattccatgctagatgatgaaattggtaatgcagtagaagttgatattcctgtcgtctctagtggtgtcaatcttgcacaatatcgtaagcgcgttgaaaatttcattaaggcgaatgaaaaccatattactatcgcaaaattaaaacgtggcctagcattaaccccgactgacttaattgagttagagcgttttgtctttgaagcgcaagaagtcgagagtaaagaaaaatttgaaaagtgttttggcacagaaaagtctttaactctttttatccgttctctagtgggtttagatcggcaggcagtacaagaggcattttcaaattatttacatggcactacatataacgaaaaacaaatccgttttgtagagatgattattgaccatttaactatgcgcggaactttagaagcgtctcaactttatgaaccaccgttcaatcaaattcactatgaaggtattgatggcgtgtttgctgatagggatgctgacaagatatttggcgttgttgaagcatttaatcaaagtgcggtagcgtaa

SEQ ID NO: 50298 - DNA, 2031 bp, Acinetobacter baumannii
atgacaagttacgccaatttattaaaaccattacatttgggcttcacaaccattaaaaaccgtgtggtcatgggatctatgcatacggggcttgaagaccgcttttttaactacccaaaactggcagcttattttgaagagcgtgccaaaggtggagttggtttgattgtgactggcggtatttctccgaaccgtcaaggatggttggctccggctggcggaaccatgaatagcttatttgatattccgcagcaccgtttggtgactcatgccgtccataagcatggttcaaaaattctgatgcaaatattgcatgcgggacgctatggttaccagccatttgtagtatcttcgagtgcaataaaatcaccgatttcaccatttaagccacgtcaactttctgaaaaaaatattctcagcacaatagaagattacgcacagtgcgctgacattgctaaaaaagcaggttatgacggcgtcgaaattatggggtcagaaggatatctgattaaccagtttttaagtcgccatgtaaaccagcgtacagaccgttggggtggtgaaattgaaaaccgtatgcgttttccagttgaaattgtcaaagcgatccgcgcaaaagttggcgaaaaatttattatctgtttccgtttatcgttgctcgaccttgtgcatgacggtaacaccatgcaagaagtggttacggttgcgaaagctttagaaaaagcgggtgtcactttattaaatacgggtattggttggcatgaagcacgtgtgccgactattgtcacttctgtgcctcgtgccgcgtttgtcgattatacggctcatgtaaaacaacatatttcaattccaatcattgcttctaaccgtattaatatgcctgaaactgctgaagagattttggcaactggcaaagcagatatgattcaaatggctcgccctttattagcggatgctttttgggtaaataaaactgcgaccaatcgtgtagatgaaattaatacgtgtattgcctgtaaccaagcatgtttagatcatgcatttaaaaataagcgtgtatcttgtttagtaaacccacgtgcaggccatgaaactgaattggtttatttaaaaaccaaacaaccaaagcgtatcgccgttgtaggtggtggtgtagccggtatgtctgctgcaactgttgctgcacgtcgcggtcatgcagtgaccctgtttgaagccaatgcagatgtaggtggtcagtttaactttgcaaaggttgtgccgggtaaagaagaatttcacgaaacgattcgctactttaaagtacaacttcaaaaaactggggtagatgttcgtttaaatactcgtgttaatcgtgaacaacttgaacgtgaaggttttgatgaggtgattgtggcgactggagtcgtgccgcgcgcattaaagattgaaggaagtaattcacctcaagtcctttcttatgctcaagttttacagggtgctgaagttggacgaaaggttgcagtgattggggcaggtggtattggtttcgatgtctcagaatttttacttaaaccaccacatcaaccacagcctcaacctttagccgagtggcaacgtgagtggggggtagacccagatccaaattatgtttcggaaggtggtatgcaaccaccagtagttgagccagcaataagagaaatttatttactgcaacgtaaaacaaccccactcggtattggtcttggcaagacttcggggtgggtacatcgtgctcagcttaaaaagcacggtgtacgcatgcttcgtggcgtgcaatataaagcagttaccgatgaagggctttggattgagcataatggtcaggaccagcttttacgtgtagataccgttgtagtgtgtgcggggcaagagtcggtaaaagacttgatgccaaaagaaggggagtcgactatagcgaactaccatattattggtggtgcaaagctcgcagcagagctagatgcgaagcgtgcgattaaagaaggagcagaattggctgcccaactgtaa

SEQ ID NO: 50299 - DNA, 564 bp, Acinetobacter baumannii
atgccaaatttagttctcccaacacgtgccttatacgttgtaaataaagcaattgatctgtttcatcaccgtgggttccaccttattggggtcgacagaatagtgaaagaatcagagattactaaagcgactttttataattattttcactctaaagaacgactcattgaaatttgcctgatggtgcaaaaagaaaagctccaggaacaagtagtcgcaatggtcgaatatgacttaaacactcttgtaatagataaactcaaaaagctttactttctacataccgatttagaagggccgtattacttattatttaaagccgtttttgaaattaaaaatagctatcccaacgcttatcaatccgcagtgcgctatagaacatggctaaaaaatgaaatttatagccagcttagaaccctaaaaaccgatgtctcttttaccgatgccaaactatttttatatatggtggaaggcacaatcattcagcttttaagttctggcagggtaagcgagagggagagtgtgtttgaatattttttacgaggactaacttcatgcaaataa

SEQ ID NO: 50300 - DNA, 1740 bp, Acinetobacter baumannii
atggttagaaaaaaactgacaatcgcatcattatttataccaacgatgctatgtgcagctttggctaatgcgaccgatactgttaggaaacctaatgtattagtgattgttgcagatgatttgggtttttctgatacagagccttttgggagtgaaatacgaactcctaatattaataagctcgctaaagaaggcgctattctaactaattttcatgcaggtccaacatgttcagtaactcgttccatgcttttgacgggcaatgatagccatcaagccggatttggaaccatggctgagtatttgcagcctgaacaaaaaggtaaacctggttatgaaggtcgcttaaataaaagagtaattactttagctgaaattttaaaaactcaaggatatgcttcatttgtagcaggtaaatggcatttaggctccactgaagacagtaatgcaaaagctcgaggttttgatcgctcatttacactaatgccaggtggtgctgcacatatggatgcaagccaaatgttccctggtaattataaagcccgctatcttgaagatggtaaagatataaatttacctaaagatttttattcaagtgatttttttacaactaaaatgatttcctatatggaaaatgatcgaaaaaaaggacaacctttttttggatatttggctttcaccgcaccacattggccgttacaagcacctgatcagtatttgaaaaaatatgaagggcattataaagaagggtatgaaaaaattcgccaagctcgtttagagcgtatgattaagcttggaattatgccaaagggaacaaaaattaataatccattaatggatgttttccctgcatgggagcagttaacagaaagccaaaaacaagatcaaataaaaacaatgcaaatttatgcagcaatgatcgataatcttgatcacaatattgggcgtgtaattgattacttaaagcgtagtggagagttagataatacgcttattttatttatgtctgacaatggcgctgagtctgctactcctgaatcgttggggacaactgaggataagaatggtatccgagagtgggtaaatgctacatttgataacagccctaaaaacatgggacgtaagggttcgtatgtaacattaggacctcaatgggcacaagttgcttcaacaccgcttccatattttaaaagcttcttggcgaatgggggaattcatgtcccagccataattcgttatccagctaaagttaaagctgggcagattaatagtgaaacactgcatgttatggatttcgtaccttcagttttagatcttacaaatactaaacgcccagaaaattttgaaggaaatccaattttaaagttagaaggtcgttcattcttacctatttttagcgggaaaaaattaccagaaagaacgttaggatgggaatttaacacacgccgtgctctttataagggagattgggctattcagtatcaggctcctccttacggtacaggacaatgggagttatataaccgtaaaactgatccttcttaccgtattaatttggcacttaaaaaaccagaaaaagtaaaggaactagcagcagattgggatgtatatgccaaacgtgtaggtgtaactgaagctcctgtacgttataaatatggtcaaatgaattgtttttatgataaatgcattcaacctgaatttttaaaacaagtagctaatcagtcaactactgctcactaa

SEQ ID NO: 50301 - DNA, 981 bp, Acinetobacter baumannii
atgagaactattcaatgtgtagtggtttttgcctgtattttgggagtcacaggatgtagtaagccttccaaaaagcaaattcggggacctaagttacaacaattaggaagtttaaataaatgtaaagagtattcaggtctacctgttaactggcaaaaagatgcctatgctgggatggtaaaaatacctagtgggacttttaagattggaaacaataatagttatcctgaagaaaaagcactctataaaagtgatcgtacaattaaagaattctggattgatgcgactgaggtgacaaatgcacaatttcaaagttttgtaaaagctacagggtatttaacggaagcggagtcacaaggagaagctgccgtatttactcctccaaaagaacaagttgctgaactggcttggtggtctttgatgaaaggggcaaattggcgacatccttggggaccagatgctacacggcagattcttcctaatgagcctgtccgcatgattacattgaaagatgcaatggcctatgccgattggttaggaagagacttacctactgaagaacaatgggaatatgcagctaaaggcttcagtaaagagcgggatattagtgcaaatcttgagcatatagatgcaaatgtttgggaagggcaattcccttatcaaaatgaaaataaagatggatttgaggatgtcgcaccagtaggttgttttccatcaaatggatttggtctatatgacatgatcggtaatgtatgggagtacacaagtagtccatttacagggactcatgatgaccatatgggagagcaacaattacacacgggtcatcctcaagtttttaacagttatacgataaagggtggctcatttttatgtgcctctaattattgtatgcgctatcgagcatcagcgcgccattcacaagaggcagatttaggaatcagtcatgtaggattcaggactgtaaaaaatattaaataa

SEQ ID NO: 50302 - DNA, 1209 bp, Acinetobacter baumannii
atgaataaacttatttatattgtgccatgtcttttggtcatggcggcaaaggttaatgtcgtctttgcaaaagacataaacgtagatttaacatttaaaaatctttatgcagatcgggattataacgatgacagtaagccttcgattggaagctggagtcagggagtaattgctcgagcaagtactaagcagaacttaactcaagatacaaatttattaataacaggatccttgcagtatgcacagcgtttaagtagtgataatcatttaaatgatttaatcttgcctttcgataaagactctcaaaagcaagcttcaagttataacaaaattgcaggatcaattggctttcagcataaacaacataagttaagttggggagagcaatgggttgatacgcctcttgctactacggattatagtcgccaactaataacgatctatcaaggagttttatactcagggcagattaataaagatttaagtatagatattggtcatttaaatagatattcagtaagaaatgaggaaaaatttaaaaaattatctgtaaaaaatcatgcatcagatggtttaacatatatcgatctaaaacataaatcttttcaaggaaaacttgatacacagttatttgtgagcgagctagaagatttatatgatcagtattcattggggctaaatttaaaagaagattttgatcaatttagattaaaaactaaattccgttattactatacagaagagaccggacgtcaattattaggaaaaattgataatcaatattttggtttgatgcaagagattgggtatggaccaaatactttcggtataggggttcaaaaaattggagggaatactgattttcctatgttagatggggctgttcctgttcttagttatattaattggacgcaaggcactttcaataaagctaatgagctttcataccacttcacttttaatcatgatgctggctggttaatgcctggtttgagctttttacttcgttacgttgatgggaaaaattatctaattaataatgaaaaaggatttgatgaaagtgaatttgatttcattatgaattacaaaataaaagaaggaaaattcaaagggcttggcctgcaatggcttaacttaaattataaaaatgatattggaggggactatatggaaaaccggattattacctcatacacgcttaacttttaa

SEQ ID NO: 50303 - DNA, 951 bp, Acinetobacter baumannii
atggataaattacaatgtatggaagcctttgtgagagtcgcacaaagtggaagttttattcaggccgcagaatctcttggtgttacacgctcagtgataagtacacgtattcagcagcttgaaaaatttgtagatgcaccattatttcatcgtagtacacgatcagtaagattatcagctattggtgaaaagtattatcctgaatgtgtagagctaattagtcgtttcgagcaactagccgatgagatgtcacatgcaaaaaatgagttacatggtcgcttacgtatttatatggcaccaggttttgctttaagctatttcagtaaacttttatctcaattcactacacaatacagagatattgaattagatattgttgtatatgataaagtcattgatccaatttcttctggatttgatatcgcttttcagatgtttcccccaaaaggtgaaagtctaattgagagaaaaatttttaatataaaccgtgtaatgtgtgcttcaccagaatttatcgaaaaacatggtcaaccccaaagcccacagcagcttcagcaatttgaattaggctattattcgggataccctgaaagaaataagatcaaatttatgatcaataatagattccatgaattctctattcacgcaagggtttcatcaagctcaattcatttattacatgattttgcattaacaggaggaggaatcgtttgcttaccaacaattgtggctcgagagagccttttagataaaaaactgactcctgtacttatagactacccactgcctaattatggattaagagcagtattcccttcaaactctagaaatttaaccaagattcgttgcatgattgattttctagttgaaaaacttgatctagtacctgagtgggatcaacagctcatcgaaaagggatatttatcacctatggttaagctgtttcaataa

SEQ ID NO: 50304 - DNA, 1269 bp, Acinetobacter baumannii
atgaatctacaaaaatgggatacttcctatgaatggaaaattgtacttcttctcactcttggttttggacttgtaggattagatagatggattattgcaccattactaccttcaattatgagagacctctctttaagctatcaggacgttggtctgatatttggagcattaggtatcacatggggtgtttttgcaatttttgctggtagtctctcagataaaattggtcatcgtaaaatcttaatagtatcactacttgtcttttctttagcttctggtttttctggttcagcaatgggacttacgagcttaatattgatccgagcattgatgggaatttcagaaggagcattttgtccgactagttttgcagcaacagctgtagcagcaaaaccttcacgccgtggagcattacaaggattgcagcaaagtggttttgccttatttggtctaggcctaggaccacttatcgcaactcaactacttttaatcgtaccatcttggcgcgaggtattttgggtagttgcaattcctggattcattttagctgcttgtcttttctttgtattaagagaacctcaaaatactcaagggggacaattattaattgctcagaaaaatactgaagctcatgtaaaagttaattggatggaattattaaagacacgtaatattttgctaagcatgatcggtctcttttgtacaatgtcctgtgttttcgtgattagtgcaatggtccctctatatcttgaaaactttttaaaaatgaatccacaagatatggggataattgtttctgcaattggatttggtggtttcttgggtcaatttcttgttcctgcgctttctgactggattggtcgccgtatggcttctattttaggatttctaggttcagctattttcatttatttatttgcgaatgcttcagcatccttatctgttctatttggattactgtttgtagtctcattttttagcttaggtctaattgctttactttcaggtccattagctgctgaatctgcccctgtaggcttagttgcatctgcaattggccttgttgttggcgctggtgaaatatttggtggaggtgttgctccagtaatttcaggaataattgctgaaaactatggtattcaaaatattttctatctaagtttaataggagcaattataggtatgtttattagtttctttattcttgaaacagctccgcgtaaagtacaaaatatccaagcatttgaaattgagccaactcaagaatag

SEQ ID NO: 50305 - DNA, 495 bp, Acinetobacter baumannii
atgagtgcttatacaacaaagctcggtagtttggaaaactacgaaaaaggttcaatccagattattcagggtgaagctactaattatgccttttcaaatatttttgaagtggcagcaatgagtaaaccttatgaaaaaacagttgttgggatgaacctcaagtttgtcattgaatctgttctggcagaaggacaatctgcttggtataccgcatcacatgatgaatttgttattgtaatggatggcgaagttcgtgtcgattatttgaaattaaaagacccaatagtcttacaggatcaagagggtactcatcttgcgggagagagaccagatggaataccaatgggatatgttgtcttgaaaaaaggtcatcaagcaattttaccagtcggatcagcctatcgttttgatgcatcaaaaaaatcagtgatgttaatccaaacaattaaaggtccactttctgtcgaaaaatggaatgacatttgtattaagtaa

SEQ ID NO: 50306 - DNA, 1008 bp, Acinetobacter baumannii
atgaatgcgatgcaaaataaatttgttgaagatgatggtgtaacgattactggatatgatgaaatttcaggttattcaactttccagttaggtaattttaagtttagccgtgatgaatactttgccaaagtaacatgggaagcaaaaggtcaagagcattctcatttaatgtctgttgatgcttttttacgggctttgatgagagatgttgcttggggttttttctatggttgggttaacttcgatcatgttattggtactcaaaaccactatggcaatgtcgacttatatgctggcacttttaatggagtattaaaagcagcaggggtagattatgttgagaactttgaaactccactaatcatggcgacttttaaagctattttacatgattgggtaagtgaaggatttgatccatttgctgccccagaagaaacgggttctgcttttggtcgtaagcatggtgataattcagaagcgattgaccgttatcgaattgccaccaaacgtatgcctgggttacctgatgattcgcctttacgtgatgatttaccagttaaccgtcagtttgaagatgtggctcaagatgatccacttatatattgtgaacctggttttgaaggtcaacttagtggttttaacttgtttaaatatctgtcgcgttcagatgtgacatggaatccttctgtaacttctgtttgtaaacagagcttattctgccctactacagaagaatatattttaccaatttttcatggcaatgatcgcgtagagtggttcttgcaattatcagatgaaatcacttgggatattggcgataaagtagatggtagtcctattgcccgcgtcattatgaaagcgggggatatcgcagcaatgccagccaatattcgtcatcaaggatactcaactaaacgctcaatgttacttgtttgggaaaatgcgacaccaaatctacctgaacgttatgagtcaggcgaattatctccttatccaatccaattctaa

SEQ ID NO: 50307 - DNA, 1467 bp, Acinetobacter baumannii
atgaatactcaattatttattgatggccaattcgtgcctgcaaaaaatggtggcaccattgatgtactcaatccatctaatggcgagttaattaccaaaattgcggcggctgaagcagaagatgtcaatattgctgtagctgcagcaaagcgtgcttttccggcatgggcagcaacgccagcggctgaacgtggcagattattattaaaacttgctgatctgattgaggaaaatctggaagaattggctcagcttgagtcactcgataccggacatccgattcgtgattcacgccgtttagatgtaccacgtaccgcggcatgtttccgctattttggtggtatggctgacaaaattgaaggttcggttattccggttgagcaaggttttttaaactacgtggttcgtgaaccaattggtgtggttgggcagattgtgccgtggaatttcccgcttatgtttaccagctggaaacttggccctgcgcttgcggcaggtaataccgtggtgatgaaaccttcagaattgacacctttatcgacgctcaaaattgctgaattagtgaaaaaagccggttttccagatggtgtagttaacgtggtaacaggttatggtcataccgcagggcaacgcctggcagagcatgaagatgtcggcaaaattgcctttactggttcaactttaacaggtcagaacattgtccgctcatctgtaggtaacttaaaacgcgtacagcttgagctgggtggtaaaggtgccaacattgtgtttgaagatgccaacattgatgcagcagtaaacggtgcagcttgggcgattttccacaatcagggacaagcatgtattgctggatcacgcttggtgctgcatgaggctattgccgatgagttcctggaaaaatttatcaaactggcagaatccatccgtttaggtgacccgctagatccaaacaccgaaatgggaccattgacctcggaagctcaccgcaacaaggtattgtcttatgtggaaattgccaaagaacagggtggacacgtcctgtcaggtggtaaggcaccagaagattccagccttcaaaatggctactacgttttaccaacggtggttgaagccaaaccgatggaccgtgtagcacaagaagaagtgtttgggcctttcgtaacggtattgcgctttaaaactgatgatgaagcattggatattgccaactgtactgaatatggtttgggcagtggtttatggacacaaaacttacaacgtgcgcaccagtttgccaaaaagattaatgccggaatgtgctggattaacagctataaacgtgtcaatccgggcagtccgtttggtggtgtaggcaaatcgggttatggtcgtgaaatgggttttgaagccatccatgactatacggaagccaaatcgatttgggtcaatgttgatgcaaatattccaccgcattttcagcgaggataa

SEQ ID NO: 50308 - DNA, 1068 bp, Acinetobacter baumannii
atgaatgcattccattataagtcattgccattggacgtgtattttgacaatggcaaatctaaagaaatcaaagagattttgacacagcatggctatcagaaagttttggtactaacgacccctgagcaggaagacgcaggccaaaagctggcagaacaacttgcaaatattgccgtgggcgtatatccacatgcagtaatgcatgttccggttgatgtggcgaatcaagccgtcgagtatgtgcaagccaacaatattgattgttgtttggcattgggtggtggttcgaccattggtctggctaaagcgattgctttaaaaattcataccccgattgtggctattccaaccacctatgccggtagtgaaatgactacggtatatggtctgaccgaaaataatctgaaaactactggtaaagacattcatgtgttacccaaagtggtgatttatgacccagaattgagcataactctacccgcagaaatttcggcttgttccggcatgaatgcgatggcacatgcagtggaagccctatatgcacaggacaaaaatccgattattagcttgatggcaacggattcgattcaggcgttaaaagccgcattaccagcgattgttaaagatacacatgaccttgaagcacgtcaaaaagcgacttatggtgcatggctggcgggtatttgtttaggctctgttggcatggcaattcaccataaaatctgccataccttgggtggaacctttaacctgccgcatgcacaggcacatgccattactttggcttactcggtacattacaaccgtaatgctgatgttgaagccatggatcgattggcaggggcattaggcgtagcaagtcgtgaagacgttggtatggcaatttatcgattaaaccagtctttaaatattccattggcactaaaagatattggcctgccggaacaagggcctgctgaagtggcgcgaattatttgtgacagtccgtactacaacccacgtggctatgattacgacgagttacttgatttgctcaccaaagcttatcaagggctgccaccggtttaa

SEQ ID NO: 50309 - DNA, 852 bp, Acinetobacter baumannii
atgagcgtaacaacccaagctgttcaaagcttccaacgtatagaagatgttcgtcaccggactttaatcacagcactcgtacaaaagttgcatgactatatcaacgaagttcaactgaccgaagctgagtggatgcaagctatccagtttttaacccaaactgggcaactttgccatgagcaacgacaagagtatattttgctctctgatgtactcggtatttctatgttggttgatcaaattaaccatcaaaaaaatgaagttcaaacgccgtctactgttttcgggccattctttattgccgatatgccagttcgcaactttgcagatagcattgtgatcgaaaatgctgagcaatgccgccctttactgattaaaggcaatattcgtaatacacaaggcgaagcaatagctaatgcttatattgatgtctggcaaacagccgccaatggcatgtattctggtcaagatcctgaacagcaaattgataacctgcgtggagtgtttgtgagtcaagctgatggtgcgtatgcgattaaatctattctacccgtcagttatgaaattccttcggatggtacggtgggacaactgctgaattatgccaaacgaaccttttggcgacctgcacatattcatttcaaaatcgttgccgaaggttatcaacctcttgtcacgcatatctttttagagaatgaggaatacttacaaaatgacgctgtatttggcgtaaaagatcggttaattgtctgccatgaatcgaaacaagcagatcctcaaagccaagctgtatacggtttagacggtgattatgatctgatggaatacgattttattctttcggaggcttga

SEQ ID NO: 50310 - DNA, 336 bp, Acinetobacter baumannii
atggttaacttaattaagctttgtgagcagaccgattttcaggagaagatctgctttcgggtgcttcatccagaggatgagaaaaaaagtattgtggtgatcaaagggcagaatggtttttatgcctatgaaaatgtttgtccacatttttcagtacaactggattataaggatggggtgtttagtacttacaagaataagttgatcatgtgtgcccatcattctgccatgtttgacattaccactggagaatgtgtggatgggccctgtaaaggtcattaccttaaggctgtacctatcgatgtaacagatggtgttgtatttttaaaacgttag

SEQ ID NO: 50311 - DNA, 366 bp, Acinetobacter baumannii
atggaagagcaagtccgtgaaatggaaaaacagcgcttcaacagtctaattaataaacaatatgatcattttgctgcaatgtgtgaccaacatttacgttatgtacacactagtggcacagtcgatgatttgtctgcttttatgaacaaattacaggcgggttattatgattatcaacacattgattacgatattattaacgtggttgatatgcaagattgtgtgattgttactgccaattttcatgcaaagttactggtcggcaagcaaccacgcaccttacaaaatcgggcattgtcgatttggaaaaagcagcaggatcagttgaagttgatgatgtatcaggcaactccttttagtgcttaa

SEQ ID NO: 50312 - DNA, 858 bp, Acinetobacter baumannii
atgtcaaaattagaagtaaaggccgaaaaccataaaatttttgttttcaaaaagatatttgagtttgagtccgctaagcaacaagctgaaaagaaaaaggtcaacgcttttggaatgttggcaaaatttaattttctaaaacgtcctactgaagaaactgtaaatttaaaaaatcatattctacgttatgaaccgttttggtttgtttcaagtgaacgcaatttaaactatgattgtgttgttacttattctattcctgtacataatcctcatgcgaagcagattcaggtttatacagatcctgaacaaaaaaattatcctgttacacgccaacaagataaaggcaaaatagaattacaaatgaaggaagtgtgtagccggaaaatagagttttcaaattattttgatggcttgcagcgtgaacttaaatcatctcatttagcagaatatattagaaaatttgaacttaccgaagtagagaaagtcgaagttgagaatgtacttcaaccattactttctcttgattcagttactagtatagttaggtcagaactacaaaatcaaaaagttcatgcaactaatatcattgaagattcagaagaaataactcaactttacctttattttcgccccgtttatgcgtttgaatatatttggtctaatgcagataaaattggtgttattgaagttgatggacttaccggcgaggttattgaacaaggaaattggttcagaaatacttttgatcaagcttttactaaagaaaatttagtagagctttcagcagaattggcgagtacagttgttccaggtggaggtactttggtaaaagtcgcatcaaaagctattcctctttaa

SEQ ID NO: 50313 - DNA, 639 bp, Acinetobacter baumannii
gtggaattcaaaaaaatagaacatatgctatccctccaagatcaagtaaactcgctgatttcaacacattggagacaaaatcaaaatccttggtaccgagcaatttggcttgagagtgctgagctattggaacatctttcttggaaatggtggagccataataaaaataatattgaacaagctcaattagagttgatagatatttggcattttggtcttagtgatttattacagaaatatggtacatctgaagaggttattaattttctaaaagaaactcacaatgaagatgaaccaaaaatagaaaatgtaacggatatccaccttttaattgaaaggtttgctttatcaacattaaaaaataaatcattcgatatatctttattctttaatttatgtgaaattttaaatttagaattcaatgaattatataaaatttatttaggaaagaacgtactaaatgagtttagacaaaaaaatggctataaaacaggtaactataagaaaatctggaacaagcatgaagataattactatttatttaaaattattaatgaacttgatgtcgataaaagtgaattttgccatcttgtatatgaaaaattagataatcagtatcaagagtcttttaaatcatga

SEQ ID NO: 50314 - DNA, 948 bp, Acinetobacter baumannii
atgatagatgaagatgaaattgagcggcatctacgtatctctaaagatatgtggtctgatcttgttatgctccaaagttggccgcagcaacgatattttaatcctcgaggatgggttcaaaattttaggaaaagtgaaataccatatgctcttcgattaattgacaacatgacatactattcagatgaaatgagtaaagctctttttaagagtgcttttcacagattatgtaaaatcattctacaaaatgaaacatgtgtacattacaatcaagcttctataaattggcaaacttttaagaattcagcatatataatcccaataagtggtgaaaccccaaaccccagtgatagtggttttagatatgccagatatgctagagatttatgtaagattgaagaagcaaatatactttcattagagcaagcgattagaacgattcaaaatggacgccctgcaaaattaatttttgttgatgattttctaggctctggagaacaatttctaaaaacatggtctaaaaaatttgatattggaggatcttataaatcattagctaattcagtgtgtagtaatagtagaattgaaatatatatttgtacaattattagtactcaatatgccattgaaaacattcaccaagttttaccaaatgctgttatatcccctgctcacatatttaccccttatcatagtgttcttagtgaacattcttatatttggcgtgatgatatgaaaactgaggggccacagtttatacaagaaataagtagtagacttgggattccagacttaaatggagaactaggtgaaaatgatgaaatatgttggcgtggtttcaagaaattaggcttgtgcgtcgcttttcaggattctatacctgatgcctcaattccattactgaattttagttcagaagaatggcaaccattgattaggattggctga

SEQ ID NO: 50315 - DNA, 1878 bp, Acinetobacter baumannii
atgaatttaacatatcaagaacttaaagatggaaatgaaaaattaggtctttataaagcagaatggttaagtgataaaatttttgattactttagcgaaccaggttattttcatcagcttgttaatagtcgaccgtgtattattgtaggtggccgaggcactggtaaaactaccgttttaaaaagtctatcatatgaaggacaaagtagattaaataaggaatcctcaccatctgaatggaatttttatggtttatactggaaagtaaatctaaatcgtataactagttttgtgaagagaggcctttcagataacgaatggcagccgtactttatacactatttaaatttaattttatgtcataaattatgtcaatttgcagtttggtatgaaaaaacgcaagatcaaaaattaaatcttgatgaaagactattacgtaaagctgtaacgactctaaatataccaatagaatacgtacaaaatatcgaagacttagaggatgaaattgatattttaattgcagagctagaatctaagttaaatacaatttcaagcgatgataaaattttcttgactatgttaggggccccaatagatagagtatctgaacttctactacagactacagagttaaatggaaaacaatttgtatttttaatcgatgagtttgaaaactttgaagattatcaacaatgtattgttaatacattaatgaagcaaattaatcatttatatacttttaaaatcggtgtcagagagttgggttggagaaaacgttcaactttaagagaaaatgaaattctaaactctccagcagactattttaaaattgatatgagaactgtttttcaggaaaatagtttttcagtttttgcaaaacaagttgtagaaagtcgtttaccagagttaaaaaaaattggaggtattgaaaaacttttaccatcattagtagaagaagaagaagctaatattctaattggtgcagagcaagaagcacaaattagaaaaaatttagcctcatcattaccaaaaaaatatttaaagcttttagatcaaaaatctataggtcatattcaatttattgactatatgtctagatcacgtgaagagccatttatagaaaacttaattaactggttagaaaatgagggtgaatggaaagacaagtttaataactattttcatgcttaccttttcagtataagaaaaggtaaatcaggaataagaaaatattatacaggttgggacacttttatattgttagccaataataatattcgttatcttattgaacttgtaaataaatccatacaaatatacttagataaccagagtatagcccaaattcaatatattgattttgattctcagactaaggcaacacaaataattgcaaagaaaaattttactgaattagagggtattagtattaatggagcaacattaactaaacttttattaggcttaggacgtctatttgaagttctagcttccaattcagaaggccatgcaccagaagtaaatcaattttatttaaataaaacaagcgaagaaaatcaaaatgtagaagctatacttactcatgctgttatgcatttagctcttatacgtatcccaggtacaaaaataggtgatataacaagtacgagagactttgattatatgatccaccctatttttgctcccttttttgtattttctcacagaaaaaagagaaaactagcgcttgaagctacagatataattacactcattgatgatcccaaaaaagctttaaaacatcttattcaaaaaaataagcgaccagctgaggtattacaatcttcattacccgatcaattggacttatttggggagtacttaaatgtatctaattga

SEQ ID NO: 50316 - DNA, 993 bp, Acinetobacter baumannii
atgtatctaattgatagacctatcattactaaaacttacaataacttagaaagtattgaaattgaaaatgacagtgtatatttatatggacagagtctagaggacagagcagatatctcgactcttattcaaacagcctctaaaaacataaaatatataaaattaaatattaataatgaggaaactactctttcagttcatctaaaagagattcttacagttaatttaaatgatgagaatagtattaataattttttctctcattttcaagaaaaaaatttttatttagatattacaggattaactcattcagcttgggctccattaataaaatttttttcaaaacataatgaactttctattaaagttatctatatcgaaccaagtagttattcccgaaaattagctccattagataatgagttttacaatctgagctcacatattaaaggagtagcccctgtaaatggtttccatactttaattgattcagatgaatttaccttcgtgcctttactgggattcgaaggagcaagatttaatttaatcaataatactgtagaacctaaaagtaaagactctattattcctttagtaggtctaccaggttttgaaccttggtatgtttttgaaactattcgtggtaatcgacaaattttaaaaattactgaatcttatcaatggatagactacatacctagtgattgtacatttagctgctactacaagttagaagaaattttaaatattaaaaaaaacttaaaagtcgctccaatcggcacaaaaccacatgctttagccgcatttattttggcgttaaattatccaaataatgttgaaattgtatatgatcaccctatacgaacatcgaaaagaactgacggagcttccaaagttcatgtttatgatataaaacatctgtttaggtatcccccttctatcaacctcaaccttgctgatagaaggagagaaagacgagaaagacgaacttaa

SEQ ID NO: 50317 - DNA, 1017 bp, Acinetobacter baumannii
gtgatagaccaaatttttactccagatgctctggctaatgaactagtacaattctattcattatcaagcccccctctcctagtcgcagatttcgcggtaggagaaggaagtctcattcaggctgctcataaatactggcctgaggcaaaatatatagtaaatgatattgatcagaatattcttaataagattaaattaaaaaatgcagaaattgattattataatgaagattttttagtatctaattttacgaaattgtttgaaaaaattgacctaatattattaaaccctcccttttcacatgggaatagaaaaatgtatgtatgggatgaaaataacatttcaagtggaatagctcttttttttatttataaatctttaaattacttgactaaaaatggtcaacttttagccatactacctaatggatgtttttcaactgagcgagacgctttaggtttaaaatatattcaagatttttatcattttgaaaaatttgaaataaaaaataatccggctttctataaagctcgtcctaacacaagtatagtacgaattacaaaacaaaaagataaattaaaaagcttaaataatattagccattctatacattctcagttcttaaataattttaaagtatttagaggaaatattcagctacacaaagaagtaactagaggaccgataccacttctacatacaacttcatttaaaaataataatgtagaacctatcaattttatttttagcactctccctactgttaaaggaaggatgttaattattccaagggttggcaactttaataaaaatcatattataatttattatgcaaaaaataatattcatctttctgattgtttattttctataaaatgtaaaaatctaaaagaagcaactctattaaaaaaatatatttttaataactgggaatccttcattaatctttacaatggttctggtgccaaatttattacaaaaagaaaattagaaaattttttacaaaattttaaatag

SEQ ID NO: 50318 - DNA, 1014 bp, Acinetobacter baumannii
atggctaaaaatgaaaaagcagttgcaagtgtacttgcatttgaaaagaaacttgttccatctgatggttatttttatggtacgtcatggggaaatcggaaagaacaaacggctttaaaactgattcagaaatccgttcgggggactatttctaatcgactaaaaccagccgttgccggtgacccaatgaaattgaatgccgaagttgaaaaagccaatttacaaactgtagatgcttgtgctttaggtgagcatcaagatactttaaaagttggattcactttgaaagtattaggtggcatagaaaacccatctgcttgtaataatgaaatatttctaaaatcttatcagtcagttgctaataactatattcagcaatatggttttacagagttagcaaaacgttatgctttaaatatcgccaatgctcgtttcttatggcgtaaccgtgtgggggcgaagaaagtagaagttgttgtaacgattaatgatcaaccagcagtaacatttaatgcgttggaatatccattgcatgactttgatcatattgatgaaaaggttcaaaacttagcaaaccaaattgcacaggctttaaaaggtgaaacaccatacttattaattaaagttgaagcttatgcattggtaggaaaagcacaagaagtctatccaagcgaagaattagtattagataaaggaaaaggtgataagagtaaaattctttatcaagtgaaggatgttgctgcaatgcactctcagaaaattggaaatgcattacgtacaatagatacttggtatcctgaatttgatgagaaaaaagctgcaattgcgattgagccatacggtgcggtaacgaatcttggaaaagcctatcgtactcctaaggataaaaaagacttttttagtttatttgataaatatgcattaggggaatcgcttgagaatcctgaacaagaacattacgtgatggctgttttagtacgtggtggagtgtttggtcaaagtggtaaggagtaa

SEQ ID NO: 50319 - DNA, 1029 bp, Acinetobacter baumannii
atgaaattgagtcgtattgcacttgctactatgcttgttgctgctccattagctgctgctaatgctggcgtaacagttactccattattgcttggttatacttggcaagacagcgagcacaacaacaataaattaactgatcatgctgaattgcaagatgatttatttgttggtgctggtctgggtgttgagttaacaccttggttaggttttgaagctgaatataatcaagtaaaaggtgatcttgatggtactggcgttcaaggcgctgagtacaaacagaagactattgctggtaacttctatgcaacttctgatttaatcactaaaaactatgacagcaaatttaagccatacgtattgttaggtgcgggtcaaactaaaactgagtttgatggtatctatgaagacaagaaagatactatcggtaatgccggtgtaggtgctttctatcgcttgaacgatgctttgtctcttcgtacagaagctcgcggtacgtatgattttgatgaaaaatactggcgctacactgctcttgctggcttaaacgtagttctaggtggtcacttgaagcctgctgctcctgtagtagaagttgctccagttgaaccaactccagttgctccacaaccacaagagttaactgaagaccttaacatggaacttcgtgtgttctttgatactaacaaatcaaacatcaaagaccagtacaagccagaaatcgctaaagttgctgaaaaattatctgaataccctaacgctactgcacgtatcgaaggtcacacagataacactggtccacgtaagttaaacgaacgtttatctttagctcgtgctaactctgttaaatcagctcttgtaaacgaatacaacgttgacgcttctcgtttgtctactcaaggtttcgcttgggatcaaccgattgctgacaacaaaactaaagaaggtcgtgctatgaaccgtcgtgtattcgcgacaatcactggtagccgtactgtagtagttcaacctggtcaacaagctcaataa

SEQ ID NO: 50320 - DNA, 831 bp, Acinetobacter baumannii
atgaacacagttaaagaaaaaatcgttctcatcacaggcgcatcatctggtatgggaaaagcatttaccaaagcattactcaaagaaggcgcaactgtttatgccgttgcccgtcgcgttgatgctatgcaagaactaaaaacactcggtgctcatacattaaaaatggatattaccaatcaggatgatatcgaccaagttgtgaaaactattgaaaaagaaacccatggtgttgatattttagttaactgcgcaggctttggtatgtatggcgctatggaagatacgacacttgccgatgcacgctatcaatttgaagtgaatctatttggtatggcctatttaacccaaaaggttctgcctagtatgcgtaaaaaaatgcagggtcgaattatcaatatttcatcaatgggtgggaaaatttatacaccacttggtagctggtatcatgcgagtaaacatgctgttgaaggttggtctgactgtctacgtttagagttaaaatcatttaatattgatgttgttgtcattgaacccggtgctatcgcaactgaatttgcagatgtaatgatccaacctatgctggaacgttcagggcaaagtgcgtatagccatatggcagccgcagttgctaactcaacaaaaactacagtagaaaaaggtgaactttcagacgtgcaagttgtcgtcgatatgctgatgaaagctgttcatgcatcctcacctaaaacacgctatgtgggtggcaaatatgccaaactgatgatatttgtacgtaaatggtttggtgaccgtgtatttgatcgtatggtgatgtcagttattaaataa

SEQ ID NO: 50321 - DNA, 993 bp, Acinetobacter baumannii
atgaaatatgcttcaaattttgccctaaataccaactggaagttattactgaatgacctaggcataaatcttgaagatgcattacgtttggcatctctaccgcttgatttgttcaaccgtaaagatgcaagccttacgcccgttcaatatttcaatttttggcacgcaattgaacaacttgcaggaataaatgacttacctttaaaaatcggtcaaatgattacagttgagctttttgacccagcgatttttgcctgtatttgtagtcccaacttcaatattgcgatacagcgtctatctgaatttaaaagactgattgggccaatgcagttacaagtagcaattgataacgacacaacaacgctagaactcaaattttataatgtatctacgccaacgccgcaaagtcttgccatgtcagaactggtcttctttgctcaattagcaagaatatgtacaagacatcaggttatacctttgaaagttacactgcccgatttacctaataatctggcggagtacaaaacattttttggcgtacttccacaaaaaagtgaacacatttcaattgtcttttcacgccaagatgctgaacgtccttttttaacagccaacccgaccatgtggtcttttttcgagccaaacttgcaacgtagtcttatacagcttgatgaagatgcaacagttagcgaaaaagttaaagctatacttttagaaaacctacctgctggactatgtacaatagaagatgttgctcaacgactcgcgatgagcaaacgtacgctacaacggctacttttagaagagcaaactaattttaaaacgcttttggatacaacacgtcaatctcttgcccaacattacttagaaaagtcatcaatgagtacaggtgaaatttcatttctattgggctttcaagagcacaattcttttagcagagcatttaaaaactggacgggtaatactccacaagaatatagacttatgcattaa

SEQ ID NO: 50322 - DNA, 1317 bp, Acinetobacter baumannii
atgagtttaacgcaaagcatggaattatcggctgaagcaattgccgaaaagcaattaataaaaaaagtagcatggaaaatcatgccattaattatggtgtgttacttatttgctttttttgatcgtatcaatattagttttgccaagtttcagttacaagctgatttatctctaagcaatacagcttatggccttggtgccagtttgtttgtaattgggtatgtaatatttgaagtacctagtaatttattgctacataaatttggtgcgagaaaatggattgcgcgcatcatgatttcttggggtgttgcaacggccttaatggtatttgtgaccacagagtggcaattttatgtattacgtttcttgattggtgcaatggaggctggctttgctccgggtgtgctgtattacatgacgctttggtttcctcaaagctatcgtggtcgaattatttcattatttttccttgcttctgctttttcaggcatctttggaggaccaatttcaggggtgttattgtcatcacttgatggtgtgatgaacatgcgtggatggcattggttatttttagtcggtggcgtgccttgcgttttactgggtctttgtgttcttacttatttaaaagatcgtattgatgatgcgcaatggctatcatcctcagaaaaagttcacttaaaacgtttggttgaacctaaacaaccagaaaaggcctctcattcattatgggctgccattaaaaccccgggattattaattttaggtgctatctattttctgattcagattgcatcttatggtttaaatttctgggggccacagttaataaaaagctcaggtattgatgatacgcaaatgattggttttcttagtgccattccatacctcatgggagcaattacaatggtaattgttggacgtttagcagataaatctggggagcgtttaaaatttactgctggtttactctctttaggtgctattggtttctttaccgccggtttctttgatgcgaaccccgttgttgtggtcatttcgcttgctttattaggggcaggtattgttgctgcaattccttctttctggaatttaccacctaaagtcttggtcggagctggggcgggggctgcgggtggtacagcgctcattaatacattagggcaagtagggggaattgttagtcctattatggttggtcatattaaagacataacagggagtacaacgcctgcgctgtatattattgcaagcttatgtgttgtgtgtattgcactactaatatgggctacgccaaaacggttaaaagaaaaaggttaa

SEQ ID NO: 50323 - DNA, 939 bp, Acinetobacter baumannii
atgacagcattttccgacttacttgttgtacaagaagtctctccacgagatggtttgcaaattgagccgacttgggtacccaccgataagaaaattgatttaattaatcagttgtcgacaatgggtttctctcgaattgaagcaggctcttttgtctcgccaaaagcgattccaaatttgagagatggtgaggaggtttttactggaattacacgccataaagatattatttatgttgggctaattccaaatttaaaaggcgcgcttcgggcagtggaagccaatgcaaatgagttgaatcttgtcctctctgctagccaaacccacaaccttgccaatatgcgtatgactaaagctcaatcgtttgcaggatttaccgaaattgtggagcagctacagggtaaaacacagtttaatggaactgttgcgacaacgtttggctgtccatttgaaggtaagattagtgaaaaagaagtgttcaacctagttgagcactatctaaaactgggtattcataacattacactggcagataccactggcatggcgaacccagtgcaagtgaaaagaattgtctctcatgttttatcgttaatttcgcctgagcagttgaccctacattttcataatacacgtggactgggattaactaatgttcttgcagcttatgaggttggagcaagacggtttgatgctgcattgggtggtttaggcgggtgcccatttgcaccaggggcttctggaaatatctgtactgaagatttggtcaatatgtgtgaggaaattggaatacccaccacgattgatttagatgctcttattcaactttccagaaccttaccagctcttttagggcatgacacgccaagccagcttgccaaggcggggagaaatacagacttgcatcctataccggattatatcaaatcacttaattaa

SEQ ID NO: 50324 - DNA, 1194 bp, Acinetobacter baumannii
atgagtctagcccttgaaaaaataaaagtcctagaaataggaacgctgattgcagctccttttgcaacacgtattcttgctgagttcggtgctgaagtcataaaaattgaacctattggcaaaggcgatccacttcgtaaatggcgtaagttacatcacggaacatctttgtggtggtatttacagtcacgtaataagaaatctttagcacttaatcttaagtcaccagaagcaattgctttaatcaaaaagatgattgtcgataccgacattctggtcgaaaacatgcgtcccggtgcgcttgaaaagctggggttagattgggaaaccctaaaatcaattaatcctaaactgacttttgttcgcatatctggttatggtcaatctggcccttataaagacaagccgggctttggtgcaattggtgaggcaatgggtggaattcgttatacaacgggttctcaagattctgcgcctgcacgagttggcgtgagtttgggtgactcacttgcttcattacatgcggtgattggcgctttaatgtcgattgtgaatatcaaaaccaataacggtaacggacagattgttgacgtgtcacttgcagagagtgtcttcaatattatggaaagtgttgtcccggaatacgacttgcatggttttattcgggagcgttctggaggttcattaccgggtattgcaccttcaaatacctatcgaaccaaagacaatgcttttgtggtgattgcaggaaatagtgacccaatttttaagcgcttaatgcatgtgattggccgtgaagatttggcaaatcgacctgagtttgaacacaacgatgggcgtgcgcaacagagtgatttactcgatgctgcaattgaatcatggagtcgacagcattcaattgatgaggtcttgcagcagcttgaacaggctgaggttccatctgggcgtatttattctgtagccgatatggtcaatgatccgcactttaatgcacgtgatatgttgctttcaaccgagttgcctgatggtcaggtagtaaaaatgccgggtattgttccgaagctttccgaaacaccggggcaggtcaaatggcgtggtcctgagctgggtgagcatactgaatctgttttaaaacaatacggttatcaagctgaagaaattgaaagcctgcgtgtatcgggagtagtgcaatga

SEQ ID NO: 50325 - DNA, 927 bp, Acinetobacter baumannii
gtgcatatagaaaatattattcgtaaattggatttggtcaccttaacgattttccagtctgtttgtgatgaaaaatctctgagcaaggccgctgaaaaaaatatgattgcgctgtctgctgcaagtaagcgtttgactgatttggagcatttgattggaaccaaactgtttattcgtgatggtaagggcatgcaaattacgcctgctggtgaaagcctgctttatcattgcagaaccatcttagactcggtttataaagcttcggttgagttagaagaatacaaaataggcattaaaggttttgtacgattacaggcaaatttatcaaccatcattcagtttttacccgaaagtctacatccttttattgttgaaaaccctcaaattaaaattgaacttgaagaacgccctagtatagaaattattcaaaatgtaagtaataaaattgccgacttaggcatctgcattgccgagaatttatcagaagatctggattattatcattatcgtagcgatcggctggtcgcggtcatacaaaaccagcaatatttaagtgaacagaaaatcatttcctttgaagatgcattagattacgactttattggtttacatactcaaagtgcgattaaccggattttgcagcaaaaatctgaagcgttaggaaaacagctcaaactcagaatattggtgacaagttttgatgctgtttgccgtatggtacaggcgggtatggggattggaattttgccacataaggtttttgaaatctttggtaaaccattagggctggcaagtgtagagttaaccgatgattgggcaaaaagagacttatatcttgtgtccaagcgtgatgagtttttaaatccagtaactttgcttttaaaacaatattttatgcatccacataaagaaattatacctaaatga

SEQ ID NO: 50326 - DNA, 603 bp, Acinetobacter baumannii
atgccaaatttagttctcccaacacgtaccttatatgttgtaaataaagcaattgatctgtttcaccaccgtgggtttcaccttattggggtcgatagaatagtgaaagagtcagaaattacgaaagcgactttttataattactttcactcaaaagagcggcttattgaaatctgccttgtggtgcaaaaagaaaaactccaagagcaagtagtcgcaatggtcgagtacgacttaagtacccctgcaatagataaacttaaaaagctgtattatttacataccgatttagaagggccgtattacttattatttaaagccatatttgagattaaaaatagttatcccaacgcttatcaatccgcaatgcgctatagaacatggctcaaaaatgaaatttatagtcagcttagaatgctaaacgcggatgcttcttttaccgatgccaagctatttgtatatatggtggagggcacaatcattcagcttttaagctcagatggggcaatcgagcgggaaaagatgttggattttttttttaactcttttgttagaaattttagtccatgtatgtttactcatgtcgatgctagcaagtgttag

SEQ ID NO: 50327 - DNA, 780 bp, Acinetobacter baumannii
atgcatataaagtatttaataatttttagcgttataagtttgtgtaccttaaatattataggctgctcaaaatcactttcaccacaaaataataaccaaagtgagtcaagtaaactatatgaacaaggtagtaaatacttcttaggaaaaaatgttccacaagattatcaaaaagctttttcttatttccaaatggcggctgaacaaggcttacctattgcacaaaatgatttagcaggaatgtactccaaaggaattggtacgtcgaaaaatgaagaaaaagcttactattggtatgaaaaagctgctaaaaataattttccagaagctcaatacaatatggggcttatgtatgataatggctattatgtaaacaaaaatagatctaaagccttagagttttataaactatctgctaatcaaggttatgctaaagctcaatataatctagcaaatgcttatctttcaggagatggtgtacaaaaagatattaatttagctttagaattatatgaaaaagctgcaatacaaaatctttctgaagctcaatataacttagcaaatatttattcagatggtaacttagttaaacaagataatgaaaaagctttagagctatatatacaactagctgagaaaggtgtacctgaagctcaaaacaatctagcctatatgtatgctaatgtttactcagattatgaaaaagcaaaattttggttcaaaaaagctgccgataatggatataaacccgcgaaagaggctttagaacagtttcagtaa

SEQ ID NO: 50328 - DNA, 1230 bp, Acinetobacter baumannii
atgggtgcattacaaggaattcgggttttagatttaagtcgtgtgcttgcagggccttggtgcggacagatcttggcagaccttggcgcggaagtcattaaaattgaacgtcctcgagtcggtgatgacacccgtatgtggggaccaccatggatgcccgatcaagatggaaacatgacccgtgaatctggctattttcagtgtaccaaccgaaataaatattcggttgcggtagacattaccacacccgaaggacaggctttaatttatgaaattgccaagactgcagatgtcgtgattgaaaattataagacagggtctttggctaaatatggtttggactacgcgtcattaagtgagttaaacccaaatattgtttattgctcgattaccggttttgggcaagatggcccacgtgcagaagagcccggctatgattttattattcagggtatgtcaggcttaatgagcattaccggtgagcctgatgatgtggcaggtggtggtgcacaaaaagttggagtggctgtggtagatattcaaactggattgtattccaccattgccattcaagcggcactgattgcacgctcacacacaggacgcggtcagtatattgatatgtcactccttgatgtgcaggtcgcggcactggcaaatcagggaatgaattatttagcttcaggtaaagcgccacaacgcatgggtaatcaacacccaagtattgtgccgtatcaaacttttaaggctaaagataaagaatttattattgcttgtggcaacgacaaacagtttaaagatttgtgtattgcgattagttatccagagttgctcgaaaatgataagtttgtgcgcaaccaagaccgcgtaaaatatcgaaatgaactgattcctttattgtcggaacactttttgcagaaaactgctaaagagtgggtcgagaggattcatgcacttaaagtacccgtaggtgttatcaattctattgaagatgctttggctgaaccacaaatcgtgcatcgtaatttggtggtcaatattcctcatcgtttaaatgaaaacttccaaaccattggctcacccatcaaactgtctgatactcccgttgaatatcatcatgcacctccagagcttggtgaacatactgctcaaatcttatcgagatttaaaacagcagaagagctagctgcgttaaaagagaaaggcattattgatgggaaaattgcttaa

SEQ ID NO: 50329 - DNA, 996 bp, Acinetobacter baumannii
atgattactaaaacgcttccacttacagatatacaccgccaccttgatggcaacatccgcattcaaaccattttagaattggggcaacaatacaatttagatttgcctgcttacgacattgaatctttacggccacacgtacaagtgatggataaccaaccagacttattaagttttttatctaagctcgattggggcgtaaaagtattagccagtttagaagcctgcaaacgtattgcttttgaaaacatgcaggatgcagcacagcaagacctagactatgtagagctacgtttttcaccgggctatatgggaatgacacatcaactcccccttgagggcgttgtggaagctgtgattgctggagtaaaagaaggtagtcaggcgtacggcgtaaaagcgaacctaattggcattatgagtcgtacttttggccaagaagcctgtgaaaaagagttaaatgctctactcgcccataaaaatgatattaaagcgctggatctcgctggagatgagcttggttttccgggcaatttatttattgatcactttaaaaaagcacgtgatgcaggttggcacattaccgtacatgcaggcgaagctgccggcccagaaagtatttggcaagccattgaagaattaggtgccgaacggattggacatggtgttaaagcagttcaagatttaaaacttttagattatttggcaaaacatcagattggtattgaatcttgtcttacttcaaatattcaaaccaacacagtgccttctttagcagagcatccattaaagacttttttagaacatggtgtacttgccactattaatacagatgaccctgctgtagaaggcattgaaatacaacatgaatatttaactgctgccccattggcaggtttaagtcctgagcaaatttatacagctcaagaaaatggacttaaaatcgcatttttatcacatcaagaaaaagatgagttaagacagaaatatcaataa

SEQ ID NO: 50330 - DNA, 1251 bp, Acinetobacter baumannii
atggtaaaacaatataaatggatgtttcgacctaaatttgctatttcggctttatgtattgcgatagcaagtatttctgtatcttatgcagatggtttctatacaatcattggtccagatgggcggcctatgattgtaccaagtaaaagaattgatcagaaaaaacaacctatccctaaaatagaggaaagaaaaccacaaactcagcagaatcaaccaatagtagatgctgtacaaaaaacatctaaagaaaaagagcaaattaaaaatttaccgaaaaaactggaacaacatgtccaagacaaattaaatactgcaccgactgcaccgactgcaccgactgcaccgactgcaccgactgcaccgactgcacctaagcattccttaactcatattaagcctaatcagggagaaattaaggaacaaacgaatattgctagagtactaaagagtcaaagtagtccttctagaataatgagtgaagaagtaaagaaagttgatagctcttctttatctatgccaactaccacacaggctggcgcaaattcggattcttcagtggataaatctaaatttataactattgatggcgtagagtatgtaaataatgaatatcttgaggatcaagaatttaatctggaaggtaagaaacgcttttatattatgccgaatggtttaggacgaacggagtctattgaacgtcagaagggtgtgagtaaatctacgttagaacaactctttcataaacaatctcaagatgatcgtgcagcaattattctagcaccaacttatatccggctatctcaaaaagaattagaaacgacttttgagcaagataagtgttttgtgcaaggctacaagaagtcaattaagattcttggatcaaaaaaagaagtgaatttatggccacggaagccattaaaagaaaagtttgaatacgagttggtgaaactagatccctctgtacaacatttacagcttatgtcatttgcagcgagtagttcaacacctctctattattggcctttggctatattcttagatgaaaagggatgtatcttagagggagcaagtggttttaagagcaaatcttatccctctaccatactacaacatgcatcgattcaaggtactttaaaagtgccggctcatgcacgttatataatgttaactccattatcttcttctatagatgtagcagaacatgagttatcaaatcagggacagattcaaatttcggtattacgttaa

SEQ ID NO: 50331 - DNA, 1185 bp, Acinetobacter baumannii
atgaataatcgatggataaatatgagtgtgttggctttaagtatgagcgccattacagggacaatttatgccgaagatcaggtacaacaaacacaggtagaattatcgaatcagagcacggatgcaggagtcgaggtaaattctctagctgctgaagcaacaaattcttcttctgttggtacagatgcgggaacacaagcttctgaaacaccttctacagagaatgtatctgaaaataatagtggggcaaatcaagctgctaacgccctacagaagaaagaaggtgatgcaactcaagagacaaatttacaagaggtatttacttcaaatgaacgtcaatactctttgattaagaagggcgtaatttcttcttattatgatctcgattatacctattatcgcgatactcgaattgatttggctttagcagataattcatctcagcttaatcgtttacgtgttgaagaagatgcaaaccatacattaacgaatagttttacttttcaatatggggtattggataacttaactttatccgcaactcttccttttgtagcaaagtctgaaattattcgagatacaacaactgcaggattgggtgatatttcacttggtgcgcgttgggaaccatttcctttaaaacaaggccgtttacccttggttctttttggtagtgtctctacaaaaacaggggatagcccttatgagattggtttagatgagctatcaacgggtaaaggttattactcggttggtgtaggggccagtacccgtaaatatattgatccagtcgttctcttcgcttctgcctctgccaattacggttttaaagaaagtggtcttaatcaagcccgaggttctcgtacattaacctcatttgatccaggagttagtggtggtttctcatttggctttgcttactcatttaactatgacgtgtctttaaccatgtcatatcagcagagctttaatatggatgctgaattccagtttgaaaatggagaaagctataaatcacctgatcaaagtagtgcaatgttatctttcgcattgggtgttcgtgtttcgcctgaaacgatcgttaacggtacggttggtattggtttaactgaagatgcaccagatatttcacttggtctgtcattcccgttagatattttaggttttaataaaaaacaaaaataa

SEQ ID NO: 50332 - DNA, 1389 bp, Acinetobacter baumannii
atgccacctcttccaaactctcacatgtttaaaatgtctcatttaaagaaaaaaatctctttagaaagctattactccgctgccgatattttaaaaaaattagaagagttaactggacttgtatatcttcaagatgataacaatcctgttattggttttttgccaaaaaattatttaatcactcaaaataaccaaaactttttattcactaaaactgctttaaataaatataagttttcatcttatatagaaaatcttttagattttacacaattccaatctcaagaactaaaaaatagcaatagagaaaaaataagttttaagggtgggtacattggttttattagttatgacttttctgcacatcaatttataaataatcaatcacataaacaaccgtctttatttataggttcctattattcttttattaaaaaaataaataatgactggtatttttttagcgatgaaaataatgcttttgaaatttttaactatctttcagctctactcaataaaccttctagcaaactacaaaaaaacaattttaaactagaacaaaatattcatccccgctggtctaaaaatacatacttaactgcttttcataaaatacaagaatatattaaagcaggagactgttatcaaattaaccttactcaagaattcaaagcaaattttactggttcattattaaataaagcagatgagctatggaatttaaccaatgcaccatattctggttatttaaaatcaacagaatttgagttgttaagttgctctcctgaattatttattgaatttaatgtagataagcaaattaaaaccagacccattaaaggtacaatgcctcgttatgagaataaagagcaggatttactttcaaaacaaactttaaaaaattctaaaaaagatcaagcggaaaatgtgatgatcgtagatctattacgtaatgatttgagcatttatgccaatacaggttcggtaaaaacaacaaaactattcgaaattgagagcttcaatcaagttcatcatatggtgagtgagattacggctacacttaaaaatgatattaatcctatgcagatgttgctcactgctttaccaggaggctcaattacaggagctcctaaaattcgggcaatgcaaattattgaagagctagaaggcgcacctcggggagcatattgcggcactttaggatattttaatttcgatggtactggacgctggaatattttaattcgtagttttcaacaatatcaaaaccagctctctatttgggcaggcggcggtattactattgcttcagaggctgaggctgaatatcaggaaagccttgataaaatctctgctatgctgaacttgatgaacagcacagcagaataa

SEQ ID NO: 50333 - DNA, 1122 bp, Acinetobacter baumannii
atgaaaaaaatttcaaatttaacagcctctcttttatttattatattaactggttgtggaggaagtagttcaagcactaataatacagagaatctatcatcccaaactaaagaacaatctccacaagaaaccaatactctaaagtgtaatcgagggattctactcaactctacactttcaacaaatacaatttttgatgagcccttatattcccttacatacaattataagcaaatacctacaggcaatagcttcactactataagacaattgtatgcagatgaatttcaaagaaatgggcagatgatatattcatcaccaaaagcaatttataatgtaaccgctgacgaaattgaaagtagtttagctgaagatgttgtacaaacttatgaccttaactcttttggccttttcactaaaaagacttatcaaaagcaaaataatggttggcctgagggctatattgttgcctcacaaggttcacaaattacgactgctcaatttaatgatagttgtagcttaaattcagataatgttagtttcgattatgagaaaattaatgtttctggtaaaaaagtagctgatattttccctcctaatatcataaattcaataccaaaacattcagactatatttatattagtgatcaattttctcgtattcttaaagataatcaaacagcctttgcaaatttagtaaatagtaatgcaactttcccaagtggctcttttgtttatgtcccaaagtctgttatttataacaatacagaattttatttatttgatagctcactcactgatttcaaaactctagctgaatggcaacaaaaactttatccgaattttaattataaatttgatactgttgctggctataaagtgacttattttgtagatagtgcaggtaacccaatttttgacaatggtaaagatccagccattgaaatgaatggtaaaatttacgatggggaatggcaagttaaaggcaatgttatctctgaaacatatggagcaccaccaactacatggaatactaactaccaatcaaaaagtgaatttgctttatacaataaagcaagttatgactttcttgttgcccaaatccaaacttactataagtaa

SEQ ID NO: 50334 - DNA, 285 bp, Acinetobacter baumannii
ttgttgactattaatgttaactctactgttgatgcctatatatcaagtttgatttcatatctttttgagaaaagttatccagatatatataaacaaattgttgaacaaattatttttatgcgttttgatgagttaagtaaacaagattttcattttattattgatcagattaataggttatcaagtagtttggattatttaccagatgatgtaaaaaatggtatatattggtggaataaattaataaaaccccttgtagatagggattataggattgttttatga

SEQ ID NO: 50335 - DNA, 144 bp, Acinetobacter baumannii
atgacgaatagttttttagatcatttaatagtcttattaggaaagtctaataaagacaaaattttaattgatttttttgtatctaataattttataaaaagccttccttcttatcaaagagaaaagattttaatagtgagatag

SEQ ID NO: 50336 - DNA, 276 bp, Acinetobacter baumannii
ttggcgaatgcgtttactgcatcggcgcatttgacaagtacagatgttgtagagaaattaacaaatccacaatatgagagtgaagtccctgaagctgaacgagatacttatgagtccttatcaaatgaattaagtaatagtaagcagggagcagagtatttaattaatgcagcagcaggaattgttgttggaggtattagtaaagggactgttaagaacaataattttgatattgatatttctaagccaggattggagatcaaaagtcgagactaa

SEQ ID NO: 50337 - DNA, 195 bp, Acinetobacter baumannii
atgattttagaattttcttatactttacgtgaagaatatgaaggtgatgaaggaactcttgttccacaattatttagattagataatctggatgaaaatagagggtttgaaaattttttagaaggtaatgatgattatttatactttatcagtaatgttgatacaagtaaaaaagttgaaagtatacttatttaa

SEQ ID NO: 50338 - DNA, 471 bp, Acinetobacter baumannii
atgttatttggtgatcctagtatttttgccttaaagtgtattgatgctaatagtaagcaaagaaaagtcatgattaacttagtgcttgttataaatggaattgaagttggtacattagaggatggcacttatattcctacatttaaagcgagccttaatagaattgttaatccagaaaagcttgatataaagaaagtagaactaagcacagaaggaaaatttgattatttcttaaatcctaatacaactggaaaatatatggcaagtttaggtgactcctttgatgattttgatattttcttttatgaatatgaatcaaattttgttgaattcatttggaagcttcataatcaaacagtattttcatatcttgatttaagaagtgatattacttattcaggtaaggtgcctaaatcttatttattaaaaatcattaaagaatttttagaatgggtagatgcagtagattag

SEQ ID NO: 50339 - DNA, 501 bp, Acinetobacter baumannii
atgcaaaatacagatatagaaaaactcaatcatattttagaagggatatgtataacagcaaatgctttagatccagaatttcaaccacaatttgactgttatatagaactattaaatttcaatgaaaatataccaatttatgagaacttcaagcaattctttactattaactccgtttggagaagtatgaagaaaatgtgtgatgacccacaatttgtagactggcaatttcaaatgaaaagtataggaacacctactgaaacaataaattattttttccgtaaaaatctatttcctacgttaagtgataagcaatttacagtaattgcagtttatttaaaatcatatattgaaggtctaatcggagaattaaaagactcccaacaaggctatataagaccaccaaataaataccttccaaagtatctccaacattggcagcacctttacctccaaggtaaagatgcagaaattctggttacttttgaagccaacacttaa

SEQ ID NO: 50340 - DNA, 249 bp, Acinetobacter baumannii
atgataactaatcgacaaaatatgcaaaataatactaatacatcacctcatccaattacccaaaatacacttattgatcggtttagtcctatttactggagaatagacggcccacaaaccacgtcttttgccattacaaattatggaaatggatttgaagcatcttttagatcacgtatgacaaatgacttggtagggattagccgtttctcagatcccaactcaagatttaggttatccggcaaataa

SEQ ID NO: 50341 - DNA, 1077 bp, Acinetobacter baumannii
atgaagacctttttagataatgattataaagtaattactttgcctgataatggtgttcctgtaaaaccaataagagcaaaagcaattatcttttcagatcagaactcccgtaaattattaaatcaagttgaaacgattgctccaagctctgctagtgtcatcattcaaggagagtctgggacaggtaaagagttaattgcacgcgaaattcatttgaaaagtgatcgtaaaaataagccttttcttgcggtcaattgtggtgctttggtcgagactcttgccgagtctgaactgtttggctatgaagctggtgcttttacgggtgcaaacaaaactcgagctggtatttttgaaacagccgatgggggtactttatttttagatgaagtaggtgagttgcctctatccttacaagttaagctgttaagggtgttgcaagaaaaagaagtcgtacgcgtgggtggtcgaaaaccaattccaattaatgtccgtattctatcggggacacacgttgacctacgtaaagcggtagcagaaaataagtttcgtctcgatttatattatcgcttgaacgtggttgtgcttaatattttgccactgcgtgaacgtaaaggagatattttacctctggttgatttcttcttaagttcatactctcagaagctcattacgactaagccaaatatcagtgatagagcaagaaatgcgctgctgaactatagctggccaggcaacattcgtgagctagaaaacaatattcactatgctttgctggtgagtggcggtaaaacaattgatcttgagcatttaagattttctgaggaaacgggttctgccgtgttaccagacaatgatcttattcaagagtttgaaagtattttgaagcgtctttttcaagaatatgatggggaagcatggcatattattgaagataaaatagtaaatactgcattttcaagttgctggaacaatcaggtcaagacagcaaaaatgttaggcctatcgcgtaatgttttacgtaatcttttatcaagatataacttactacctaataagaatgaaaatgaaattgcttaa

SEQ ID NO: 50342 - DNA, 747 bp, Acinetobacter baumannii
atgacggaacatattgtcagtgaaagtctcactgaaatgaaatatagcgaacatttaaaagaattaagaaaacggctgatctatagcattggtattgttttagcgatttttttattattacttccgcttgctcagaagaactaccattttcttgctcatcctttaatttcattacttcctagcaattccaccatgattgcaacagatgtgatgagtacatttttagcaccatttaaactcaatatttattttgcgattttattaagcattccctttattctttatcaattttggcaatttgtagctccagctctttatcaaaaagaaaaaaggttcggtatagcacttatgctttcgagtaaccttctattttatttaggaattgtgtttgcctatactttaattttgcctctcgctttaaagtttttcgtcttggcatcgcctgataatgtgttacctatgacggatatcaatagctatctagatttttgtttaaagctttttcttgcttttggtctggcatttcaaattccagttttaacttatattcttatttttattggtcttatttctattcaacagctagaagcacatcgtaagcacatcattgtattcttcttttttattgcaatgtttattacccctcctgatgtttttagcatgcttgctcttgcagtcccaatgtggttgttatttgaattgggtttatggatcacaaaattcacaacgcaaaaaaacatccattaa

SEQ ID NO: 50343 - DNA, 417 bp, Acinetobacter baumannii
atgtttaatatcagctttggagagttattagcttttgcaattattgcgcttattattttaggacctgaaaagcttcctcacacgttaagatcagtcctcctcaaatacagagcagttaaaaaccaaattagtaaaattcaaaatgatattgaaaacgaacttgacctgatcgaacttaagagagtcatgcaagaagagctgcaaaaaataaaacaaaatgaagagcagctcaaacaacaactcgctcttatgcaacaagaaattgaaaatgtacaaacatctgtttttacggaacaaaaaaccaaagcacggcgcatcaatgactatatctatacccgctcacaagatgagttaaaaacaccatttttagctcattttaaaacagccaataaattcagtgaggatcaagccgcatga

SEQ ID NO: 50344 - DNA, 216 bp, Acinetobacter baumannii
atgggtttatctatttggcatattttactgtttgcagtgattgttattttattatttggaacttcaaagttaaaaaatctaggtaaagacttaggtggtgcaattaaagattttaaagattcagttaattctgacgatcaaaaattattgcaaaaccagcaatacaaagatattagtccagttgaatcacataataaaaaacaaaataaaatatga

SEQ ID NO: 50345 - DNA, 756 bp, Acinetobacter baumannii
atgtcgttctcactactttctattaaaaaactcaataaatcttttcaacgtgatcaaaatactttgaccgttttagatgaggttaacctcaacattgagcaaggcgaatttatctcgattgttggcagtagtggctgtggaaaatcaacactattacgtcttattgctggattagatcaagactatgacggtgaaattttattgaatcaaacccaaataaaaggtaccgatttaaaacgtggtcttatctttcaagaacaccgattacttccatggcttactgtttttgaaaatatccatttagcacttgaagagactccactcactcgtgaagagaaaaatttacgggtaaatgaacatattgaaattgtcgggctgaaaggttttgaaaaggcttatccacatgagctttcgggtggcatggcgcaacgtgttgcaattgcccgtggactcgtcaataaacccgatatattacttttggatgagccttttggtgctttagatgccatcacacggagtcacttacaagctgagcttcagcgtatctggcaacacgaaaaaatcaccatgattttagttacccatgatattgaagaagctgtctatcttggagaccgtgtcattgtgatgtcagcccgaccaggaaaaattaaagaaattattcaagttccgttgacacatcctcgacataaagaaagtgaacttttatttggtttccgcaatcaggcacttaatatgctagatcacacagcataa

SEQ ID NO: 50346 - DNA, 789 bp, Acinetobacter baumannii
atgtctcagcgttcatttactttaaaacagacatggcaacggccaatcattttagtacaaggcttagtactaccattattgttattaggcttatggcaatacaactcaagcttaggtgccagtcatgcctatgcatttgttcctctacaaaacatttatttcgcatttatcaaattgcttgaaacaggtgaattgtggctaaacacgtggggaagtcttaaaaaagctggaattggatttatcttaggttcgataagcggattaattttaggtactttgcttgcctattcaaaagttttaaatgctttagtttctccactatttaacagtattcgacaagttccattactgggtttaacacctttaattgccttatggtttggtaatggagaagaagcaaaaatctttattatcgcgcttgcctcattttttccattagtcattaatacatttcagggccttagccacaatgatgcaaaatacgatgaaatcgcacgtatttatcaattttcattctggcgaaaatttaaaaaaatacgccttccccaagccctaccccatattttaactggtctaaatttagcggtgccctttacttggatcaccactacagcaagtgaattgctattcaatgcgggtgcgggactcggcaacttaatgatgaaagccgagattaatgccgaaatggatattctgttggtttgtgccattacggttaccctttgtggggcctttatgacggcaggtattcatcttatttcaaaacgcctgctgcaatggcgtacctaa

SEQ ID NO: 50347 - DNA, 840 bp, Acinetobacter baumannii
atgaaaatactagtaaagccacttattgagcaaaataacgttttatttaaaaccccactccgtaagaaattttcttctaaaaaggtgtatgggctgctctctgtgatttcacccttattagtattcctcatttggcatttgattagttctttacagattttcccaacccaaattttggtgccgcctaaaactgtctggaatactttcattgcgttgttacaaagtggtgagcttcaaatgcatctcaaagatagtctttctcgtctgtttttgggattttctatcgcagcaatcagtgcaattgcttttggtattgcctatggagcaaatactctctttcgtaattacacctatattttatttaacgttttttatcaaattccaatctttgtccttattcctatttttattttagtttttgggattggtgaactgtttaaaattttacttattatcaaagcctgttttttcccaattgctgtggcaacagcagatgcagtgaaaaatattcctaaacaatatattgaattaggacaaatttaccaacttaaaaaacgagcttggctcaggcttattattcttccatccatactcccgccgttaattggtgggctacgaattgcacttggtcgtgcatggttgattttagttgccgttgaactactggcagctggaacgggtattgggcaaatgatggaactaggacgtcaaatgttgcgcttagatgttgtgatggttggtgtgtttatcacaggcgtggtcgggtttattttagataaagttttacgtttagtggaacaacgctttatctcacctgcgcttagttcgggggagaaataa

SEQ ID NO: 50348 - DNA, 1074 bp, Acinetobacter baumannii
atgcgtatttttccacgtctagttttaggttttagttttttgggtcttgttgcttgtggcgcacaaaaaacagaagagaccaccccaaaacagtctgaacagcaacaactccgaattgctgttgttgctaatggcacttcgggtagtttggactttattggtgtgccacaactcatttcacaagatcaaatttttctaaaagcattaaagcaaaatcacattgaattgaaatgggaacctgtgaccactgctgctgtagcgactttggttaatgaaagttttctaaataataaaatcgattttgctttttatggaaatcttcctgctgtagtccttaacgcaacaggcgttaaaacacaaattgttgtaccgggaggtattggtaataacgtctaccttatcgttccagaaaattcacctattaaatctattgaggaattaaaaggtaaaaagattgcattacatcgtggccgcccgtgggaaattaactttggacaactcatacaaagtaaaggattaagcttaaaagactttcaaattgtgaatttaaacccgcaagctggggctgctgctttatctgccaaaagtatagatgccttttttaccttaagcgatgcacttactttacaagatcgccatttgggtaaaattatttggtcatcacaatctttgcccgcagattggaaaatgcgtgccgaactctgggggagcaaaagttatattgagcaacatccagataccacgcaattacttgctgatgcgacagtacgtgcaatggattggattgcgcaccatcaagatgagtttcagcaaagtcaaactaagtttggccaacctcttagtgtgattcaacgtgaaagccagaatacggcaagcacatggcaacaagactggtctccagactatcaagtcgactttttgaaacagcattattcaaaagtcattgatcacgcagtgaaaaatcagcttattcaaactccaatcaaagcagatgaactgttgaatccgaagtttacccgtcaagcgattcaaaatttacagacgaatcatgcttcaaataagcaaggaaactag

SEQ ID NO: 50349 - DNA, 1134 bp, Acinetobacter baumannii
atgtcagttgagtttttatggagaatccctgttcatggggatggtcgtcgagcacatcaattacacacacgcggtgaatggaatcaattaactccagcagttcaatctccacaacgtgttgcaccgcaacatgaagatcagttatttgcttactatgactatgtcgagcaagtggcgaaagcagccgatattgttggttttcacggagtactcattcctgctttcccacatactgaagagccatgggtgttagcgtctgcactggcaagagaaactaaaagacttcgtttgctcatcgcaattcagccttggtttattcatccagcctatgcaagccaaatggctgcaagtttacaacgcttaagtcagggacgagtcgagtggaatgtgatttcagggggaggcggtgcacaacaacgcgcatatggggactttattgaacatgatcaacgctatgcacggaccaacgaatttttagaatttgtgaaaggttattcgcaccatgcaccattcaattacgatggaaagtttttccatgttgaacagggcggcctgaaatacccaatgaatcaatatgacgttccacgtttatggttagcaggtgcaagcgatgcggctttacaagtcgcaggacgtcacgcagatatccacttaacttggggcgaacctgtagaccaacagaaaaaagtgatcgaacaggcacaaaatttctttgagcagaactcgccggaacgcaaagttaaatttggtatgcgtattgatattttagctcgaccaacccaagaacaagccttccaagagcttaaacaaatgtatgaaaccattgctgtcgatagtaatgcttttgaacgcaaagacactgaatctgtaggagcaaagcgccagcaagccttagcacaaggcaaccgttttgaagacctatttgtgagtccgaatgtgtgggcgggaatgtcaaatgtacgaggtggcccaaactgtattttagtggggagttatgagcaagtcgcagaacgtttgcaagaatatattgatattggggtgggacattttattttagcaagtaacccgcatttagaagaagcatatcgcgtggctgaagaagtcttacccttagtaggatataaattaaaataa

SEQ ID NO: 50350 - DNA, 828 bp, Acinetobacter baumannii
atgcgtgatcaaatctttaatccccataagcgggctttgctctttgagcaatttgcgacagtagcagccacaactgaaattgcagatccgtttgcacagcatgatcaagacgttattcaacctgctccagtgaagttgaataaagtcttaatcgcaattattgcggttgcttcagcacatcttggaatttggtatgttgcaaaacaattgccgacaccagctttagatattcataaaccagaacctgtggtgattgaaatcgtaaaaccggttgaaccacctaaagtgattgaacccaaaattccacccattactgaaaaaccaaaagttccacctgtggtggaaaaacccaagccaattcctaaacaagttgaacaacccaaacctgtccaaaaaagtgtggagcaacctaagccagttgcaaaagcggtggctgaaccaactccacaaaaagttgcagaacctgtggtcacaaaagaagtagtcacagaaccggttaaaaaagtggctgagcctgtaaaagcgtcagatgacaatttacctgtgactgaagccaaaggttatgccggatatctcagtaaccctgcacctgaatatcctgaacaagctttagaacgtggttgggaaggctcagtcattttacgggtcaaagtattagcaaatggcagtcctgatacggtcagtgtcaagcaaagtagtggcaaaaaaattctagacagtgctgccgtaagaacagtaaagcaatggaaattttcacctgcgctaaaagggaaaacccctgtagaaggctgggtcgatgttccaattcattatcaattaccgaaataa

SEQ ID NO: 50351 - DNA, 735 bp, Acinetobacter baumannii
atgtcagatattaattcattgatccatgacggcacgatctggttattagttgctttctcaattgtgacttgggtgttgattgtgattaaagtggtccagacgcagcgagcgacaaaacaaagtaaactttttgtagaagagttttggaaagcaaaaaacttatcagatgcagtaactaagtctgaattgggggaaggcccagcagcacgagtggctaacacaggttttcagactttaattgaagcagatgaaaagacgcaccaagacttacaaaacagttggagccgtcaggacttattagagcgccatttaagtaaacaagttctaactgagcgccgccaattagaaaaaggttcggctttactggcttctattggaaataacgccccatttattggtctattcggtacagtatttgggattattcatgcattacaagcgattgctcattcaggtaatgcaagcatggatgtcgtggctggaccaattggagaggcgctggtggcaacaggtattggtattgcagttgctgtacctgcggtgcttgcctataactactttgtgcgtaaagtaaaaactattggcgcagatcttgatgattttgcaacggacttcgtgagtctaaatcaaaaagcaggattccaactatcaactgctaaaaaaggtacgactggtaatacggcgcttaaagataattctgctaaagaagtgaaagagaaaggagtgtttgcataa

SEQ ID NO: 50352 - DNA, 405 bp, Acinetobacter baumannii
atggcaatttctacctctcaagaagacgatgtcgtcagtgaaattaatattacgccgctagtcgatgtcatgttggtcttacttattgtattcattgtgacagctcctttgttaacaaatacggtgaaagtaaacttaccaaaagcggctccaactcaatcgacagatcaaaacaaagctgtggtgattagtgtaaatccacaaggtgaaatattccttgataaagataaggttacacttgcgaactttgaacaagaaataaagtcacgcaaaagcagtaacccgaaattagcattaaacttaaatgctgatgagaccgtaccgtatggaacagttgcaaaattattggcaagtattgaacgtgtaggcgtagataaactttctgtgattacagtgcctaaataa

SEQ ID NO: 50353 - DNA, 1584 bp, Acinetobacter baumannii
atgacaaatcaaacatttcagttatcacgtcgaaaatttttaacgcaaagtcttacggcgctaggtggcgtctctttgttgggcagtttatcaggttgtggcccctctccagataatagtaacgaatcaaaaagtacttcttcagcaacgcctaagcatggaggagttatacgcttggggctgattggaggacaacaatcaggcagtctagatcctcatctttcagcatcgggaagtggtattacacgaggtttcgctatttataataagttatgggaatgggatgaaaatatgctgccccgacttgctttagcggagtttgccgagccgaatcacaatgcaagcgaatggaccatccgtttacgcaaaggcttagaatttcatcatggtaaaactattaccgcagatgatgtaatcttttcagtgaaacgcctaacagaccctaaactcgcttcaccatttcgcaatctggtgcagtggattgaccgagatcgtattcaaaaactagatgaatataccgttcgtattccttttattagtacgattcccggctttgttgcattgcccgaaacttgggtaaactttggaggaattgtaccgactgacttcgaccctattcataatccagtcggagctggtccatataaagtcaaagagtttattccggggcagcgttctgtttttatccgttttaataattactttaaagcagacaaaccttatgcagatagttttgaagtgattgattttaaagatcaggtctctcgattaaatgctttattggctggacaaattgatgtcgcaaatgcgatttcacccgaatatattaaaattttggagcaggcaaaacacattcaaaccatacgctctgcgactaatacgcataatagttttgactttaacactcaacaagcgccgtttaatgaccctagagtgcgtcaggcatttcgtttgattgcaaaccgagaggagttggtacagcgaggcttaaatgggcaaggtcgaatcgccaacgatctttattcgccgcaagaccctgcctttctcaatttgccgcaacgtcagcaaaatattgccgaggcaaaaaatctattaacgcaagcaggttttaaagatggtttgagtgtagagcttgttaccccagtgagtagcgctcaacctgcattaatttttgccgagcaagcaaaacaagccaatgtgaatattcgagttaaacaagtggattttgcaacgtttaatggccctgaccgcagtaagtggcagttatcgagtaatgcgaccaatgtcggcacgccatatttatcgacggccgttgttaacgatgctccaatttccaccaccaaccgtgtgaactttaaagaccctgaatatagtgagttattttttaaagcactggcagagcctgatttagccaaacgcaaaatccatttagcgcaagcacaaaaaattcaacatgaacgtggtggaatgctcatttggggatttagccatacgattgacgcagcagctaaaaatattggtggtttagcgcctgagcatacaatttttccgacatggcgctttgaaaaactctggaaagcttaa

SEQ ID NO: 50354 - DNA, 2613 bp, Acinetobacter baumannii
atgagacagccttttcaattaaaacctttagttattgcgcttagcgtattaggggcgactttaccgttatatgtttttgccgaagaaacgccacagcaagcaggtgattctgaaagtgatgtaattactttgtccgatgtagtcgttactggagcagccaagaaaactactgtagttcctaaacgcaaagttacctcaatttatggaacggatagctctgtattggatactccgcgtgtagtatcccaagtatcagaacaacaatttagagaagatgttattcgcagtgcggatgatctcgtcaaatatgcaccgagtattacgcgaggcgggggacaaaatgctaactttgctccacaaattcgtggacagaactcggaagtttttcaagatagtcaacgcatttacagtactcgccatccaaccaatctcaatgcttatgaagaagccgatattgtggcaggaccaacaggtgtaatttttgcgccgacttcaggttctggcggatatattaactacctcaccaaaaagcctaattttaataaagccgagaccaatatctctgggactgtaggttccatttactcaggtaaaggcgcaaagcctaatttctctgtcagtattgatcatacggcacccatttcaaaagaattagcatttcgcgtgagtgcaacagcacaaaagacagatgactattatgacaatgtgaaaaataactttaatgcattttatggggcacttgcttggcgtccaaatgatcgtttaagggtagattggaatatcagttacgatgactattatgattttaacgtgacgcatggctggaatagagcatcgcagcaatcggttgataatggtctttattacaaaggtagagctacgcctattattcaaaatggttcgactttttggtctcctgtatttgaatctggtgcggcaaattctaaagtcattggttggcaaactcgtcagaagaacgataaaaaccaatatgttgctgttggtggagttcagaccacgcctttaccgaactcaactgcggatcaagcaggaaccattaaaggttgggtctatgatccatcaattcctggtaatgaattggtcaagctagatgataatgtttcaggacgtagtgaagataaaaatagtgccaagcgatttagcactcaattaaaagtcattaaagatttaaatgaccattggtctattgcaaacagtacgctctatcaaaataacaaagatttaggcgactctgttggaagcttttttacagatttagatcatgagttaattgataaccgactagaatttttaggtgactatgattttgaaatagctggcgtaaaaattaataataaaagcagtaccggaggaacatatcgtcatgagaagtttacctctttagctgcaaataatagttttaatattaatccttatgatttaaccaatgatccatcgcagaagaatcctggtgatttactggggttaattaacaatagcggttcaacaggaggttggattggacaagccggagtgcctcaatattctcaatattttggttatttaaatttaccgcgcatgtacccaattggaaagggtttatatgcagaaaaaggtggctttccaccgaatggaggaggtgctgtctatacgggttctggtttctgggatacgttgagtgtattcactcaacaaaactttacctttaacgatgtattcggtattaatttaggtattaaccatagttctgtaagagcaaaacttgaaaacccacttgttttaaccccaacagatgtccgttcttcgagtgacaaatatagtctattgagctatcaactgagtacgtttattaagcctactgcgaaaagcacactctattttacttatgacaaaagcactgcattaaatacgggagtatttgggcctttcttgatttggggcgctggaaatcaacttaatcctttagcttttgacagtcaaagtgagctaaaagaagtaggatttaaatatgaacctattactgaccagttatttttaaccctaagtggatttgaacaaaaacgagatttatcgcccgatacgaacggaaatatggctcgctttgaaataaaaggtattgagtcatcattaagatggcaacttcaaaaaaatatagcgattgggggcaatttcacttatttagatgctgaatacagctctattatacctgctggtttttcaccatttggctttcatgcggacaatgctacggtttggggagacaataatgctttaaaccaacgtaaagccggacgttatgatgcagcaggaattcctaagtactctgcaagtgcttatgtagattaccagcatgagtctggttttggggtcaacctttcgggatggtggacaagctactggtacacaaacttaagtcaaaccgtgaaagtaccgaataactataatctggacttaggtctttattatcgccagccacagtggacggtgggtcttaacattcttaacctaaccaatgaacgaaattttgtgaatggtttggcagggtcgaatagcgagtttttacaaccaatgcgacctctgactgtacaaggccaatttagttataaattttaa

SEQ ID NO: 50355 - DNA, 2331 bp, Acinetobacter baumannii
atgtttaaggttacaaaaattaggcagagtattttaactgctatgtggggagtaacggcgagtgtttcgacattagctttagcgaacgatgatgctgatgcaatttctgctgagcaacaggctcaagtggtaaatgctaaagatgtaaaaaaactaggcgatgtcatcgttactgcacaatatcgtgcacaaaacattcaaaaagttccgactgcaattacagcggtttcaggcaaagatttggccgcgaaaggctcaacatttattggcgatgttttaacttatacgcccaatgcagcagctgaaaacccagatggcgatagccgaccacgttggtatattcgtggtttaggaactggcgatgttgcagcctctacagtttttccagtcggtatttatgcagatggggtttatttaaatgcgcctgttgctggtgctggagatttattcgatttagaacgtattgaggttctacgtggtccacaaggcacgctttacggtaaaaacaccacggctggtgcggtgaattacatttcacgaaaacctgtttttacagataaaccgactggttatggaacaataggaataggtgaccataatcttcgtacttttgaaggcgccgtgaatggggctatatcagataacgttgccgtgcgaggagcattctattcagaagaccgcgatggctatgcaaaaaatttagccaatggtgaaaactacggggatgtagataaaaaatcatttcgcttccagatattaggaaaaattaatgatgattggaatgctttagtcaatctacatagccaaacttataatggtcttggcaataatggctctttaagtattggaaaatactggggtgtttatgaaagaccacaaggccgagatacaaatttagatttacctgaaagtaataaaatccaacatgatggcgcttcactcaccttaacaggagatttaggcggcggtcatacttttacatccattacagcgtttgataaaaccactcaaaaatctatttctgatggtgactatacgccttacgatgtagcaagaagctatagcgataatgagtggcgccaatatagccaagagtttcgtgtttcttctgatgctgaaaaaagactcagttggatcgcaggtttccacttctttaatgaagacttagattcaacaggtgtaagtgcgcgagtaaataaaacattacctaatggcgctccagctcagactgcgggaacaccagcttttagagatattacctataatcagacgacacaaagttttgccttgtttggtaacagtacctataaatttaccgataaatttaaagtaacaggtggtctacgttggacaagtgaagaaaaagatattgatctagatcttgttcaaattacctcaggcgattacaccaaaggcagttggtggcaaaaggatgggtacagtaatgcggtttataacccagcgcctaatgcaaatggttcaacaagtcgtaaaaagagatggaatgagctgacctacgatattacgccagaatatgaaatcactcctgatatcaacacatacttccgttttgctcgaggtttccgttcaggcggttttaacactggactttctagtagcctgacgcaactagcagatgttaaccctgaatatttaaatagctacgaactaggcttgaagtctagcttgttacaaggcaatttaacggccaatgccaatattttctattacgactacaaagatattcaaacaaatttattggttgcgacagaaggacaaggtggaggagtaacctcagttctggcaaatggtcctaaagcagaagtaaaaggtgccgaattagaattagattatttagcgactgataacttacgcctacgttttgcaggcgcttatttagacagtgaatacaccgactttgttgataaaaacccagtaaccaatgtcgtaaatgctgacaatacaggtaacagcttggttcgttctccaaagtacaccatcggtttagggggtgaatatacctttaatcttgatagtggagcacgagttattgtgggcacagatgcaaaatatcgtgaccgtgagtttttcttagtaaatcgacaagattattctgttgacccaatcttgagtcaaaaagggtacaccttatggaacgcgaacgttggatatatcagcgcaaataataaataccaagttaatgcttacgttaaaaacttgctagacgaagaatatcaagttcatgggcgaccaaatggtcctgctggacaatatgtcttaacctatggaaacccacgtcaagttggtgtttctctcactgcaaaattctaa

SEQ ID NO: 50356 - DNA, 1197 bp, Acinetobacter baumannii
atgggaattgaattttttacacgtttaccgcttcatggcgaaacagaatttttacccggtgacccacgtaatcgtggtgattgggccaatattgaaaatgttgaaaatactggagcggtttcgaactatgaagtaggtgacgattttacctatattgattacttaagtcaggtagcgcgggcagcagaaattaatggttttgctggtgcactcatggtgaacgcaccaacgggtgaagagccttggacagtatgttcattgctagcaagagaaaccaaaaaacttaactttgtgactgcatttcaggcttatcattttagtccatataatgctgtacaaactgcggcaacttatcagcgtgcaacgggtaatcgactggtttggaatattattaatggcggctcggaagtaatccaacgtcaagtaggcgatgacttacctcacgatgaacgttatgcacgtgctactgagttcctagatgttgtaaaaggatattggaataatccttcatttcactataaagggaagtactattcggcagaaggcggtggtctaaaatatccactgaataaagcaagtcttccaattatttgcacagcaggttcttcggaagctgctcgcgagtttggagcaaaacatgccgactattatttaatgcgagctgaaaaaccagaagaaattgcagcattgattgcagacgtacgtactcgtgcaaaaaaatatggtcgtgaaaatataaaatttggtctatcaatcgataccattgctcgccgtactgaacaagaagcattggcagaggcacagcgctttctcgatgaagccgctgaaaagcaacgtttacacgcggcagcagcccatgcgggtttacgctcagcgcgcgtattaagcttcgaaaaagagtatgccgaaaaagatggcagtaaaaatgttagcgactttttcatccatccaaatgtttggtctggatttggatatattggtgtgccacctggtgttgctttggtagggagctatcaacagattattgagcgtattgaagaatacaatagcattggcatagagttattctttcttgcaggctatccacatcttgaagagtcataccgtcttggtgaacacgttcttccacactttaaaaagcaacgtgctcgattacagcctacagtagctagcccagagtttgatattgcgctttaa

SEQ ID NO: 50357 - DNA, 210 bp, Acinetobacter baumannii
atgcatttttttgatcacagccttatggggatggccgaatgttatttttattctttaactcagtggttacagatgatgactaaccctaagaatcaaaaaggtaaattccaaagctcaaactttatggatttcgccatgtcacagatatatttaaaatttaacagtgataattcatgtgaggtaatgagcatagaaagagtagataagtaa

SEQ ID NO: 50358 - DNA, 4308 bp, Acinetobacter baumannii
atgaccgataaccacgttgctagtatacgtcgatttgctccctattcctcaaatgaacttaaaaattccaattctctatctgttgggtggaagaaggaaagtggaataaattgggaaaatattaataactgtcaatgtgtggttatattgggcgaggggaaatgtggtaaaacttttgagtttcagcgacaacatcaattattgaagagtaaaaaaaagttttcattttttatacctttagagctacttcaggatcatgaactttttgatgttattactgttgaagaagaggaagaatttgaattctggaaagaaggttcaatgactgatactgctactttctttctagatgctgtagatgaattaaaattacgccaaggcacacttcgcaaagcattgagaaaaattaaacaggctattggaaatgcactttcacgttctagattttatatatcctgtcgaccaaatgactggaatgaggagttggactatagagccctttctacgttagtggttcaagaaaattatcatagacatgagggtgagtttgtagatggtgagaaagtatttaatactattatttctcatgaaaaatctgataagttcgagagggaaaataaattattaaatgaacctattcaagtcctagcattacttccatttaatcgacatgaaacagtagaatttgctaaatcatatgctcctgatcatgcgggaatatttgaacattatttagaagaaaaagaattatggcacctttatcgtttaccgtatgaaattatttcggcactagcccaactatctactgaagaaaaattgggaaatcttgaagaacaacttcaatttggaattaaacaaaaagttcgggcagtatctgctaagaaaagaaacttgttaagtgaagaaaaggcacttgaaggtgttgagcgcttagccttagctctttttatgatgaagcgaagatcaattcattcagaaatttctacttatactgtagatatgattaacattagtgaaatactcaccgattggacttatgaagagcgatgtgagctacttggaaccccactttttgatccgaccggtgtaaatgcctttcgattccatcatcgctctactcaggaatatttagctgcaaagcgtctaaaaaaaattagagagcaaggacttagtacaagagacttatttagacagctatttgtgaatgtcaaagaagaaaaaattgtcatacctagtatggaacctcttgtagcatggatggctctgtggtatccggacatttattctgaggtgaaaattcgagcaccatcattgatgtttcggcaaggtttaccagcattattgtcaattgaatatcgagaagagctcatttgtaaatatgttgaaaaatttgctagtaatagcaaatggtgtggtgtgggtattagtcatactgaattaaagcgtattgcaacgcctgagttagctactgtagtccgaaatttatggccacaagcctatacgggatatgatacccgtgaacttcttctagaactcatttacttaactcctatgaatgattgtatagatttggcctggaatgctttatttgatgacaatcttccctcccaacatagactatatgcagcatggagtgtgctcgagtttggagatctagaacaaaagcaaaaaattggaaaggcaatagtacatggaggatggcctgaacaattagttcgaaatatcttacccaaccttatgcctcatgctgttacagaagttgagtttttcaaccttgtcaaaacactagatgaagtgccaaataatgtccatgggttaggctatcaactttttcaagctgtaaaatcagagtcgctaacaaatgaacagaggatctatttaagagataactttgctgaaacaatatggattcatcgtaataaagattgtgaagtgtatgacgcccattcaaaatacgatcattttgttgatgccgtaatttactcatgtttaaaaacactcccttctggccccgaagatattcgacaatgggcatggtgccttaccatcgcttttcattttggtgagcatcgaagaagtattgtggctcggacagaaattgaagagttgcaagatttattgtctaaagacatcctattaagagaagcttactactgggcatgtttgagacttgtagaggaattggcagaagagatcaaatctcttaacaatacttacttacttgattatgacgacgtattacatccttttactgataatgatataccatggttaatgaatgcctttattagtaatgattcaactaataaaaaaaatatagcatttcaaaaattacttcaatttataggaagtgaaaaaaatcctcagttagcgcaaaaaatgatggaactaacattcggcaaagaagaatattgtattcagctcgaaagaatacttaacccacttccaacgttgcctagtgaactcgaaattaaatatcaaaagctggcgttagagaataaagaaaaagaagaagaacgaattaagggatggaaaatatggagagaaaaagttttaagtagtgataccttttttttacatgaggaggagttagaaaatactctctacaatgtgtttaaaattttaagacaagtaaagcatcttgatgaatggggaccatgggactctaagcttattgagacggtattctcgctagaatttcttgaggctttaaggtctaaaatgtcaattttctggaaaaatgctgaagttgcattatatagtgaacgaagtaaggcgtctaagaatactttttcttatgaaagtttaatgagccttacagcagtgaagtgttgttcggaaaaatcgaattgggcagagagcttatctcatgatgaagctgttaaagcagttagaatttctacaattgagctaaatggctttgctgattttctgtctaaattagaaatagtgcacccttcagctattgaagaggtctttactagtgaaatccacgcacaaattgaagattttctagagttagagaaattaccaatatttcaagacattttatattcaaagtttcagctagttaaagaagttgctctttctactcttatgagtaaacttgatgcaatcgctggattaataatgaaaggctatcttagtgagttacaccatatttttgaacttgttgcatcatatggttctactcaatgtaaagaagcttttataaatttaataaataattatttggatacttcacaaatcacaactgatgagagaaattcaggcgtggtgatcttagcttcacttgatttagataaagcttgcaatagggttatacaatttagtgaggatagaagtgaaagtgctgctgcgttgtttactatagtatttggtgatcgttataggggcaaacaactatcatttgaagaaatagagcctatccgtagactgaatatcttgaaagaattagtgattcgttcgtatcagattgtaaaagaaatggaacataatcaaaatgaagaagagtcatatcaacctaatatacgagatgatgctaagctagcaggtggatatctactagaatgtctttcaaaaactcaagtggtaggcacaatatccgttctatatgatttatcatctcttcctgaatttagtcacttaagtagtcgattgaaacaaatggctattgaacttgcatctagaatttcagaacctcaagctatgagtgcgtcaacttttaataaattcgatagagaattaaattattcaccctatgacgatgcttcactttttacagtgatgaataatcgtttagatgattttgaataccacttattgaatgatgagcaaagtattattgatactcttcgaaaagttgaaggcgaaactgagctgcgtcgctttatttcatattggcttcaacaaaatagtcgaggtgtctataccgtaacgcaagaagctgtagtaattacagaaaagagaactgatattagattactacccactgctatggataagtatgcagcaattgaattaaagcttgatgataatcgaaacaaatggactggagcagatttaaaagtagcattggttgaccaactcgttggtcgatatttgaatcatgaacgatgttacgttggttgtcttcttattggtatgagaaagactcgcaaatgggaaaatccagaaacaaaagagaagatgaaccttaatgaaactgtgaattggcttcaaggaattgcatacaaaataatggatgagcgcccagagctttatatttctgtcaaaggaatagactactctatagttgctaatgagtaa

SEQ ID NO: 50359 - DNA, 1548 bp, Acinetobacter baumannii
atgaataagcatgttgaagctgagtggaggtttcccgcaaaaactgcatgggcaatttttgctgccatgatttttggcaacttcatggcgattcttgatattcagattgtggcgagttctctaaacgaagtacaagctggcatgagcgcaagtcgttatgaagtcacttgggtacaaacggtttatttaattgccgagattattgcgattccaatgtcgagtattgtctcgcgagtgctttcaacacgggtgtattacaccatgtgtgcaatcggctttacggtgagttctttactttgtgctttgtcatggaacttggaaagtttactggtgttccgtggcattcaaggctttatgggcggcggtatgattccgacttccatgacggccttgtacttactttttccagaagcaaaacgctctttgcctttggtcatgtttggcatgatcagtactttaggtccagccattggcccaaccattggcggatggcttaccaataacttttcgtggcattggatgttcctgatcaatattattccgggcattatcattgctacggtcatctactcaggtccaaatatcgaccgtgccaactattcactcatcaaaagtatggactggtttagtctcattggtatggcgatgtttttgggtgggcttgaatattttcttgatgaaggcgcacggcatgactggcttgcagacacaggcgttcggattgcttttatggtctgtgttgtaggtggcatgattttcttctctcgaagttttactcagcctaaacctttgctcgatttgtccgtatttaaaaataaaaactttaccttaagtgccattacaacgtttgtgattggcatggcgctatatggcttgggttacatgattcctgtctttcttgggcaagtccgtgaaatgaacagtagccaaattggtcacgtcatgatggtgacaggtattgttatgttctgctttgcgccatttcttgcgtggctcattcccaattttgatacccgcaaaaccgtatttgtcggaatgattctggcgggctttggtgtctggcttaattcacatttgagcattcatagtgattatgactttatgttttggccgcaaatttaccgtggtattggcctcatgatttgcctgattgtggtgtcacatttggctatgagtacattaccactcagtaaagtagctgatgccagtggtatttataacctgatgcgtaatatcggcggcgctgtggggttagcacttatcaattcatccttagattggctgaccgccatgcatgtcacccagattaatcagtcgatgacaccgcaaaactggatatttacagaacggcttgaccggcttacggcgcaatatcaggaagtcggtgcaaatgcccagcaaatcgcgctcagcgtgatctatcgcgatattcactttcaagcactgacatcgagtttcaatgacttattacgcatgctcgcaatcattatgtttgtgaccgcctttttaaccatatttatggatcgggggaagaaaatgaatatgtag

SEQ ID NO: 50360 - DNA, 573 bp, Acinetobacter baumannii
atgtcaaatttagaaacatcttccaaaaaactaaacattattcatacagctatccgtttatttacaactcgtggttttcatacaacgggtgtaaaccttatagttaaagaatctaaaattccaaaagctacgctttacaactacttttactcaaaagaacgcttgattgaaatgtgtatcgcctttcaaacaagcctgcttaaagaagaagtgctatccattatttattcaaaccgttattacaacacaaccgataaactcaaagaaattattattttacacgtcaattttaatagcctgtaccacttactacttaaagctttctttgaaactaaaggagtttatcctcaagcttaccgtatggcgatagaatatagaaaatggttgcttcgagaaatttttgatctaatttttagtttagaaacccgtgcattaaaacccgatgctgacatggttttaaacctaatagatggtttgatgtcccaatttttaagttcaaatagtttggacgaacgagatatggttgtagagatgttttttagacctacctctttaagattaaagaacctttag

SEQ ID NO: 50361 - DNA, 4761 bp, Acinetobacter baumannii
atgaataagatatatcggttaatttggaatgatgttctaggtatttgggttactgcttcagaactctctaaggccagagggaagcgtagttcaggtaataatattaaaaataaaaatattggtaattcatctagtaaagttaaatataatcaatatattaacatttgggtgggtggtatctttttaagtgctttaatatcaactggtgtgtttgcagcaggtagcgcagatataggaacaccaatagtaactgcggctattggaccgagcaataattgtgtgagtcaagcggcaaccaatcttactagtgtcgttccatggacatgtcttggccaaacagcaactggcggttttactctcattaacggcgtgcaagccaacgcacaaaatgtaggtcaggctaatttagatgcaagagcttctggacaagaagcaattgcaattggttttattgatacaactgcttcgggtactaatagtgtggcaattggagaaactgctaatgcgttaggtaaaaactcagttgctattggtaaaaatattatcgcagataactctaatataaatgaagacctatctaataatgtagcgattggatctaacagtatagctagtacaaaaggtagtcaatatactgtaggttctggaggtgctgtagctattggttatggtgagcatgctaatggtgtcggggctgtagcgataggttcatcaaatacagctgaaggtgatggggcagttgcagtaggtcgaataaataatgcaattggagatggaactattgcgctaggagacagtagtattgcaaatggagatcgggcagtcgcagtaggttctgttgcccatgctattgggactgctgctgtggctgttggtgatagctctacggcagatggatggagtgcaatcagtattggtcgtgttgcaaatgccgatgccgatttctcaatagctatgggtgattttgctcaagcattatcttatagtgcgttagctttggggcgtaacagttatattgatgctaattctaatgaatcaattgctcaaggttatggaagttcagtgacaactgcacgaaatgctgtagcaattggaagtgatgcaaccgtaagtaatcgtaatagtggtattgctattggtgataatgcacaagtaattgtgggaagtcacattaatgatgtgaatggcctacctggttctatagcaataggtctaaatgctcgttcagtaggtggtagcgaagttattattggatcttatgccgctcagaatgcgcaacgctatgatgacggtgctaaaaatacctatggttcagatagtgttatgttaggcaatcaagctgggcgtaattctcaatatctatatgcgacatttattggtgatcaagcaggtcaaaatagcattggtcaacacaatagttatgtagggcaaaatgcagcaagataccgaactgggagctataataccgctctaggtagtaatgcattaacaggaattagtaatactacaaactctactggtaattctaatacggctatcggtacggcttcaggtgtctctctagaaggagatggcaatacattgacaggtgtatatacaggtcaacgcattattggaaataataattcggcattcggaaataatgctggtgcaaatataaaaggaaatgagaatattgctatagggtacctttctggggtttcttctcaaggcaacaacaatgttcttttaggctcaaattctaatataggtgtaaatactaataatgttgtaagtattggaacgaatactcgagctactaaagagaattcaattgctttaggtgcaaatgcaaatactgttactgatgcaacactagagtcagaggcaaatttaaatggtttgacctatggtaattttgcgggacaagttacaaatacagggatgcaattgtcagttggttcagcgggagcagaacgtcaaattaaaaatgtaggatctggttctatttccgagactagtacagatgctatcaatggtagtcagttatatgcaacgaataatatattaggtaatgttgctaatagcacaatagatattttaggaggtgatgctagtttaaatagtaatggcacactttcaatgagtaacattggtggtactggacaaaatacaattgattcagcaatagcagcatcaagaacgaaggttgcagcgggcaccaatgttgccgatgtagttaaaactacaggcagcaatggacaggatatttatacggtaaatgccaaaggtagcactgcgtcagcaggatcaagtgcagttacggtaacggcaggtacagctgatgccaacaatgttacggactatgcagttgatttgagtcaaagtaccaaagacagtctggttaaggcggatacagccttgcaaagtgtggtgacacagattgacggagttgatgttaagacagtcaataaagatgacaacaaggttaactttgtgacaggagacaatgttgagttaacagcgaatgcggatggcagtatcacggtgggtacggcagcagatgtgacattcaatacagtgaacacgacgaacctgactgcgacaggagaaaccaagctaggcgatagcttcacggtgaataatggaggcagttactatacaggtccaattaccgaaggcaatcacattaccaataaaacctatgtagaccaggcaacagcagcatcaagaacggaggttgcagcgggaacgaatgttgccgatgtagttaaaactacaggtagcaatggacagaatatttatacggtaaatgccaaaggtagcactgcgtcagcaggatcaagtgcaattacggtaacggcaggtagtcctgatgccaacaatgttacggactatgcagttgatttgagtcaaagtaccaaagacagtctggttaaggcggatacagccttgcaaagtgtggtgacgcagattgacggagttgatgttaagacagtcaataaagatgacaacaaggttaactttgtgacaggagacaatgttgagttaacagcgaatgcggatggcagtatcacggtgggtacggcagcagatgtgacattcaatacagtgaacacgacgaacctgactgcgacaggagaaaccaagctaggcgatagcttcacggtgaataatggaggcagctactacacaggcccaattaccgaaggaaaccatattaccaataaaacctatgtagaccaggcaacagcagcatcaagaacggaggttgaacaagggaaaaatattactgttacttcaagcactggtgtggatgggcaaaatatatacactgttgctacagcagatgaggttgattttaataaggtcacagttggcgataccacaattacaacagacggtattgttatcgctaatggcccaagcataacaaaagatggtattagtgcaggtgataaaaaagtaactgatgttgcagatggtcttattagtgcagattctaaagatgccatcaatggtagtcagctttttggcttaggtaataacttgactcaactgtttggtggtaatgctctttatactaataatcagattacttggagcaatattggtggcactgggcaaaacaccatcgatgatgcaattaaacatgtaaatgatcaggctgcaaatgcaaaccaaggttggaatgtaagtactgattcaggttcgaatgcgacaagcacagtaaaaccaggtcaaactgtaaatattaatggtgactctgataatggtgtactagtaacgaattctggtaatgacattaaagtgggcttagctgatcaaattaaaattggcgcaggagataatgcagtatcaattgatggtaattctggaacaattcaagctggagatgttttgattgatggatcaaaaggcaatatctctgctggaaaagttactgttaatggtgaggctggtacagttaatggattaacaaatacgacttggaatcctaacaatattttttcaggacaagctgctactgaagatcaactacaacaggttgctcaaaatgcaactgcggctgcgacagctgctaaaacaacagtatcggctggtgagaatattacggtttcaagtagtaaaaatgccgatggtagtacgaactatcaagtggcaaccagtaaagatgtgaagtttgatacagttacttctggttcgattactacagataaagtttctgtaggaaatatcacaattgatcaaacaggtataaatgctggtgcaagtaaagttacaaatgtagcggacggcacaattaactctacatcgaaagatgcgattaatggatctcagttacatgcgagcaacaccaatatttataactacttaggtggtggtgccaattatgaaaccaatacaggccctacttataatgtgggtggaggctcttacaataatgttggagatgcactgaattccttagatcaacaagtcactaatgtaagtaatcaattagaacaagcattctatacaacgaataaacgtatcgatgatttagaagatcatgccaatggaggtattgctcaagcaatggcaaccgcgggattaccacaagcttacattccaggtaaaagtatgatggcaatcagcggtggtacgtaccgaggtgaatctggttatgcaataggtatgtcatcgatttcagataatggaaaatgggtctttaaaatgtctggaagtggtaattcccgtggtgattttggaggaactgtaggtgccggtatccaatggtaa

SEQ ID NO: 50362 - DNA, 831 bp, Acinetobacter baumannii
atgaaaaatttatttatcatgtgtttagcagtgggaatttttagtgggtgttcaactggtacgttaattacaaaagagggtatgactgacaatcctaaatggcataaaactaatgatgttatttttaataaggagttaggaacatttccaaatttacaaagtttaagccaagttcgttcaggtatgacaaaagatcagttatatgaattaattggacgaccacaatatgatgatgggtggagaccaagagaatggaattatttatttcactttaatacacctggcaaaggtgaaaatggcataattacttgccaatataaggttttatttgatcaaaatatgattgcaagcagtttttattggaatccgattgatccggaaaatgctgcttgtcctccatcattcaatccaccaaagaaagaagagcctaaacagcaagtatcaatcaaacgttatacactaggcgcagatgcattatttgcttttgataaaagtgatctgaatcatataaatctaaaaggaagggaggatttagatcgtttggttgcagaacttcataaatttaaagaaattagaacaattcggattttgggatatacagattacttaggacgggaggtttataacttaacgttatctcaaaaaagagcagaaacgataaaacaatattttttgaataatcaaatcaacgcccaagttcttattgcacaaggtctaggcgagcaggatcctgtaaaacactgtgcagatggtctttcaaaaaatctattagtgaaatgcctagaacccaataggcgcgtagtaatagatgttgatggtatcattgagtaa

SEQ ID NO: 50363 - DNA, 825 bp, Acinetobacter baumannii
atgggtaaagagacatcggctttggtaacttctaaagacatgatgttgtctcatgacactgaaacgacattagaacatgctatcagtattatgcctgagttggttcgttggcttattaaaactggtattggttacaatgagttttcaaccgccctaaagtcggtattttataatgaagccattaaagagctagactctattaaacaaaaaaaaacagactctgctgttagcttattatctggtttagggcgacgtgatgtcagaagtttttgtcagacctatggtgagtatagattaattaatcagtttaatcagcaattacctattagtgtacctgctcgtgtaataggtttatggataggacaaaaactgccaacccaaattccttttaatggggaggaaccaagttttgagggcttggttaagcagatatcttctgaaaagcatccaaaatcaatattactcgaacttaaacgattggggttggtcatagaagaaaataatcaaattattttgcagaattccagttttactccagatccacaaatggatgaaagtaagcaactatttactcaaaatatttcagatcatcttgcagccgggattagtaatctaacacaaaaaaccaattttttagaacaagctatttttgcagacgagttaagtcctgaatctgtagaaaagcttaaaaaattaagtcttgatatgtggaatttgatgtctaaggctatcctttcttcggcaatagaatattgtaaaaacgatgaaagatcccctgacgcgaataaacagtttcgtctgggtattttccaatatgataaataa

SEQ ID NO: 50364 - DNA, 357 bp, Acinetobacter baumannii
atgcgtgcgtattctttagactttcgccagaatgtaatggctgcttacaaacaaacgcaacataagtcaaaagtctgtaaacagtttaagattgccagatcaacactggatgaatggattgctcttgaagaaacaacacaagatttaaaaccactaccacttactcgtactggcagacccttttctatttatgacttaaaaagctttgaagattttgtaaaatctacacccttctctaaaatcagagaattaatagacccttttgaacatagatttggttataaagtctcatattctattctatggagaggcttaaaaaaaattgggtggaaaaataaatttaaaagtcgagagtga

SEQ ID NO: 50365 - DNA, 819 bp, Acinetobacter baumannii
atgcctcattcgcgtcttacactaccattagtatctgtaggtttatttatgctctcgggttgtactggagaggatggcggatttaatgttggagtgactttagggggaactggtacgggcgaaatgacagttggtactgaaaaccctgttactaatcctcgaccaaatccaggttctaatcaaatggaagatgatggtgagtatgctgttgcttatccaaatcctgtaacacaatattgtggcggtgtagagcgaacaattcaatttgttagacactatgctccatttatccctatgaaaatgggggatcggatggatcttttaggaataaatagtggattaaaggtaaggtataaattacaagttattgtgaaaaatacgacatcagaaccgatctatgagtacatcaacagttgtaaagctgctatacaattaacgggttctaaaacagaaaaagaaacagaaacgaattattgtttaaatgatgaaactgttaatacttatcaacccaatgaagaaaaaacatattactatacttttaatttacctaatatcttgcagaattggactgcaagttatacttcacaatattctaaacaattatatccaacaatgtacgatgatgataatgagagcctaagaactcattgtgctgcgctaagtacaatattattaatggatgattatccatcaagtaaagatggagctcctccacaaacatctgaacaagaaaatggttctaactcgtcggaaggaaactcaaataatgatgatagtacgacagaagagcccccaatcttcggtgggtttgatttataa

SEQ ID NO: 50366 - DNA, 846 bp, Acinetobacter baumannii
atgtataaattgcgattgttagtaatagctgtgtcaattggactgtctgcctgtgcagccaacaattattcccagcctacaggtttacggtttcaagaagggggcaacgataaggctcaagtaataaacgtaaaacgagatgataaattatgtgcagaagatgctccggaaaagcaaaactgtcctattaatttctatatagacaacattcaatcgggtagcttctatattaataatgcagcgcagtaccgtttgaagcctgaaatttacaatttcaaagttaaaaattgtacttctcaagagtgtcaatcatgtgatgtagaccttcaaaccaatcagttatccgacaataatttgaccctttccatagataagaatggcaaaccttatattttaaataatggaaaagaacttgtttgctcaaaaaaagaagcaactccaactattgaacacacttcagtaatccaattatcagcagatactttattcaaatttgatggttctacacttaatgacttgctgccaaaagggcgccaagaagtaacggatttagcttctaaaatttcgcagggatacgtctcggtaagtgcaattaaattgactggtcatacagaccgattaggcaatcacaattataaccaaaagctggcgcaaagccgggcggatacagtacggaatcttctaatccaaaatggggtggctgatagcgttatcagtacagcaagcatgggagaaactcaacctgtaactgatgggtgtcctaacgctaaatcacaagaagccttaaaaacctgcttgcaaccagatcgtcgtgtaactgtcgaaattactgggatttctaagtaa

SEQ ID NO: 50367 - DNA, 531 bp, Acinetobacter baumannii
atgaaaaaatattttactattattatgtttttcatatcatctctaatattatattctcagaatttatttgcaaaggatcaatgtaagattgaccaacaagtaaaattaaatatatttaagaaaaatgattataaattttataattatatatgtgagtcttcagaagattcatatcttaaaggttattttggagatcaagagaagaaaatatttgttggtgattactctgattttgcagctaaagaaagtcctaaacttttagctgtcggtatctataaatcaactaaaaggaaacctccaatattgattactattaattcagcatattactgttgtactccacaaatagaagggaaggtttatcaagttaagctatatcaaattagtgaaaataagatattaaatctgaaaaatataacaaatatattaggtagtaatgcagagggttttgaaggaattgcagaagggaaagtctattataaatataaaactatatctgaaattaaaaaatggttagataaaaattattga

SEQ ID NO: 50368 - DNA, 417 bp, Acinetobacter baumannii
gtggaatataaagaaatttcaaagaaaaccatcgggcatttatattcagctcattcatctattagatcttcagatttagacccaaaactgattgctttagccgagttgtatgtatctcaaatcaatggttgcgcgtattgttgtgcttttcattccaaggaattaagagactttggcatagctcaagaagttatcgaccaaataccgggttataaacattcaaaagccttttctgaaaaacaaaaagtcgttttggagtttgcatccgcaattacttctttaaatgacccgaaacaaattgaagcgaccagagaaagtttggctcagcattttagtgaaaaagagattgtagatttaacggcgagtatttctttaatgggggcattaaacagattaagaattaccttaggcgattaa

SEQ ID NO: 50369 - DNA, 663 bp, Acinetobacter baumannii
atgacctttattcttgctattcaacttgaggatagtattgcgattgcagcagacacacgtagtactatatcgtatcaggataatggctcatatttatatcaagacggtgttcaaaagttctttccatgggaaaacggtattattacaggaactggcgaattaaaccttatccaaaatgttatgctttctttcaataattttacgaaacagaatattcatgagctaccaaatttattgaagacatctaaattaatacgtgaacaagaaatttcacattcacagttagaaatcacaaaattattatattcgacttatagtaaaaatggggcacaaatttactcaattcaacctaataaactagaagaatatgaagtaattagatgtgagaaaaatgaaattttgctatggacatttaatccagatattcggcctattattaatgcactgacagaattatattccagcttaaaaccattaaaagtatttaataatatggctgactgtatttattattatttaaaccaaatatctcctatttttcgtaagcaagctcaacatgactctatgatgagcaaagaatttaacttcttttttcaaaccaaagatgaatatttttttggagaatttttaaataatagctctaatacactgaatagaaaataa

SEQ ID NO: 50370 - DNA, 363 bp, Acinetobacter baumannii
atggccggcggttctcagattattatcaataaaaatggtattacattaattactccagcaaagtttgaggtaaaggctggacagcacctatttaaaggtggggctgaagtcggggtaaatattcaaggattacccgcttatgaggcatataacgagaaattccaaatgttattaccttcgggtgaacccatgaaaaaagtagattataaaatttctaccgatggaaatgagtacatctctcaagcagatgacaagggtagatctaagcgtattcatacttcaaaggaagaaaatttaaagttggatttaaattggataagtttcgaggctgattctgctgacaataatggtgatgctaaatga

SEQ ID NO: 50371 - DNA, 1152 bp, Acinetobacter baumannii
atgagtggaagtcttgattgggacagtaataccaatactacggaaaatagctgtaaaaccgttcaatgtgattgcttaactttctgggaaatttatcagcaagaggccataaaaagagtttctaaccttaaaagtgcgaatcattacaaacttgaacctgggtatgaggccagagcaaggcgtattgcttctgtttatgccagaatttatttagaacaagaaatctcaggtactaaactatttaaggggcgttactattggatggggcttggggcatttgcctctaaaacagtagctgctatttttaaacatggattgactgcatggggatacaagtgggcacctgtgatttctggtgccctaggcggtgttttaacagctcctgttattaattctatgattcgggatcctgtacactcttttgctaagggcaatttatggttatttatggatattgccccatggcattatgcatggagtgcttcatcaacctcctttaaaacttgtatgaaagcccgaaaagtatctggttttaaacatattaaaaaacaagtcgagaatttaccttggtctaactccttatcagttattaaacaattaggatggactgaccaaatagaagaaggttttgggtatttacctgatattgagaacacttttaagcgagtagggaaaactcgaaatgataattttaaaacagcctctaaaaatctttttgatcatctaatggcgattgcagttcaagaacaatataatattttacaagaacttgtttggaaggagtggaaagtccagaaacaggcttctttacaacgatttactggtttaccagatagtactcttgttttaactagcgattatggggtcgatgcagttaaacctaataaacaaggacagtataaagggcgtcatgcaggggttctatcccaattgcctgaaacggtttatagcgaaccattagagggtacacaagttgaagtttatgatagtcgtatgaaatggattaaagttgcagcagctaagtatcatcgattaatgcaaagtgataaaggaagagactttttagaaaaagaattagaaactattgcaggatggggaaatagcaaagcagagtttaaagtagggaaagatagtaatgatggcaaaatttaa

SEQ ID NO: 50372 - DNA, 507 bp, Acinetobacter baumannii
atgttcagttcagatttaacagattatgtcattcgacaattaggtcggactaaaaataaacgttatgaagcatatgtagttagtcgaattattcatttacttaacgacattactttaaaatttgtcactcaacagtttgttagattatcaaataagaaaattgctttaactgatttatattttcctcaacttggtattcatattgaagttgatgaagggcatcactttttaagaaatagtaaaatggagtattcactcaaccaaatagatgagcctctttatagtatctctcaaacagaaagtgacgctatgagagaagaagatattattagtattactgaacataaaatttttcgggtaaatgtttataaaaatcaggaaggtcaacctcaaaatttagagagtattcatcaacaaattgataaaattatagaagaaataaagactgcaaagaataagctggtagaagagtttaagtttaaagaatggaatatagaaacagaataa

SEQ ID NO: 50373 - DNA, 534 bp, Acinetobacter baumannii
atggataccaacactttgcataaaccgccgattcattttaaagacatgtcttggttcaaccgctgcatcgttttctgtggggttggttttggatctggtcttgctcctaaagcacctggtacttttggctctgctttcgccttactttttgttcccatctggttatctctcgggtttactttaagtttaatcgctattctcatcatgtcagtggtgggtatttatatttgcggtcaaactgcaaaagtaatcaacgtacacgatgatggtcgaattgtttgggatgaatttgcaggacaatcaattactcttctgcctttaatattttttaatataatgtcgttacaatgggcactaattggtttttgcttattccgcctgtttgatgtttggaaaccttggccaatccgtgttgctgaccagaaagttgctggtggcttcggaattatgctagacgacatcattgcagggctttgggcggcactctgtatcatcatatttattactttctggggcgtaacgccatttaagtag

SEQ ID NO: 50374 - DNA, 2241 bp, Acinetobacter baumannii
atgaataaaaaatcattagttacaatacaaattttagatttatttggcagcccaatttcaaaagcacaatatgtagtaaaaaatcagagaactggaaaagttattgctgcggggccaacaaactcatctggatgtattgttgaaatcagccaagataaaggaactactttagatgtatatattaaaagtatgtttaagggttcaatggttaaagtacaaagttttgtaatgtctaaagaccgaatggtcgtaaaaattacaagtcctaaagtccttttggatttaaaaacattaacaaatcaaggtaataatgggcaatataaaagaaaaacgcatattgttaaaaagggtgatacgctttttgaaatagcacaaaaaaatcatacgactgttcgagcactggaacgtttaaataaaatagacgatcccaataagatcagtgttggtcaagtcattaaattaccagttcatattcctgcttctggaaatcattcacaccaagacaaacctaagcacaagcactcagctcaatctacaaataaacctactgctagtagtgcaaaaactaccccagctccagcagcaaaaaggccagctaatcctgcttctcaaacaaaacaagaaaatgggcttccagaaaaagcacatcaactttatgaagatactaaaaaagcattgaatgaagctgcaagttcagtttctaaaattttgactgttgatgatcgtagtcaagatggaggtactcctaaagcaaatactacaaatatttgtaaaaccaatcctcaatgtatttccagtggtaaaagtgagttaatcagagaagttaatattcgcttagcaggttttggtggagcattaccaacagatgaatttacagaactaactgcaacatgtattaaacaattccaacgggattatatgggagttccagacactggaaagatttgtggttctgttttagctgccttagatagattcagagatgaatatggaatagcttcttactttgaatcaatgaaatgcccttgtggggaatgttcgggttttggtcgtagcagaagtggtaatttcagatttgagatgtataacaaaactacgagacaatacgttgaggtctatcgagatgcgaaagaatataatggcatgcatagaagtttgatctgggcacttaaagcaatgctattttattttaaaaaaatgcctaactcagcaggatataaaattgtaaaaatttcttcaggatatcgttgtatcgataataattggaaaaatagacgtccaacgactaatcatatggggtgtgctttagatattgtagttcataataagaataatcaagtggttagtatgagcgaacttgagaatcaagtaagaataaaatggtttggtaagtatttaaatactagtctaggatggtcaccagataaatttggtttagaacgtatctcagacggtgcaaaaacatgggttcatttagatgttcgtgaatttaataaaaaatataaaattgacaagttatttagcactagtaaagatgggttaaatggagattatctaataaatttatttaaagctgatgagaaagctaataaaatattaggatgttccggaatagttgtttccccaaataaaaatcctaatctaaatgatagttctttagaggatctgattaggcagttggggagtgttatctctcatggtgaaggtaattatgaatcttataatactggaacaaaaaatgttaaaggtgataaagttggctattcatttaaaaaccctggaaaaggcaccgtaacaagcaaaagaattcagcaaattattgataatgcagaagcaaaagatggtaatgataaaaatcgtctatttgcaacaggtaaatatcagacgacctactatactcttcaggaagggattaaacagggatattttactggaagtgaagtatatgatgcaaatatgcaagaacaggtatttcgagaatttctaattagtaaacgaacaaaactttctcaatttgtgagaaagggtatcggtagtttaagagatgcccaatatgatgctgctcaagaatgggcatcagtagcagtaccaaaaggccttcctttaaaaaatgggaagatatccgatggaaataaatcttattatgaaaaacctggacaaaattcttcttctccagagtcgactaaaatggttttagaaattttagagaaaattcatagatttcataaagatggtaaatag

SEQ ID NO: 50375 - DNA, 477 bp, Acinetobacter baumannii
atggcggctctaaaaaaagaggtaaaactctttatagttcgctcacttgccgtatttaatacacccacagaaactgctgagctcgtcaaccaagaatacgggataaaagttactaaacagcagtgtgagaaatacgacccgaccaaacgggcaggcgagaacctgagcgaagaattaagaaaagattttgaaaagactcgcgaaatgtttttgggtaagcctgaggcaatccctattgcaaatttagcggtgcgtttacagcgctacgaaagccaatatcaaaagcacagtagaaaccgtgtagcagctctaagcattcttaagcaagctgctgaggacataggcggcaagtacacgaataagactgaaattacaggcgctggtggtggtccattacaaagcgaaaatattacctatgtgactgctaccgatgagcaggtaaggcaggcgatagatgaactcgagaacgaatattga

SEQ ID NO: 50376 - DNA, 1335 bp, Acinetobacter baumannii
atggctgaaactaaaaagctcgatgcaattggcgatgcaggggcatatacaaactttgtctcaaatattggtaccgaccgtgacaaagcttcacatggttcattcgttaagaaagttattcctgatgagcaattagaagcggtgtatcaacactggttggctaagcgaatcgtcaaccgcccagcaagtgacatgttacgagctggatggttctatgaagggattcaggataacgatttattaaagctcaaagaggcgtgtaagacttttaacttagatggggtgctcttatctagcttggtcctttctcgcttgtatggcgtttgctatgtgcttctaggaactgtggacggcggcaacttagatcaaccgtttgatttaaacaagttaggcgtggggcgtttagagtttttcacggtgcttaagaaaaagcacattgaagctgataccagtaaatacttatcgcctaaggaggcaggtggacttttaaagcagcctgaattttataagttaaagctggacgggaaatcaactcaaagaatccaccatacccgcttatataagtttggccatgccgatgtagttaatgaagagccggtaagtgtcttacaggaagtttatgaggatctacttgatcatgctgccgtaaagaaagccactgctagtctggtccatgaatcaaaaattgacgtgattagaacacctaacttggtcgataagatcaaagaggatatgaaatccgtagctgaacgttttcttagtgtcggattgcttaagggcttgaacggtatgatcgttttggataaggatgaggagtacgactctaaatcttatagctttggtggtttgcctgatcttatgcgtgaattctcaattcaagctgctggcgctgccgatatgccatatacaattttatttgggcaatcacctgcaggtatgaacgcgactggtgagcatgacactcggaactattacgacagtattgctaccaagcaaatatggtccttaaagcctttcatgatgaagcttttaagagtgattgttcaaactacatttggacgtcagattccaagtttggacgtagtatttaacccgttatggcaattagacgctaaggtccgctctgaagttgagaaagctaacgcagaacgggatgctaaatatttagagatgggcattattacagagccacagatagcaaaacagcttgttattgatggtgtttattcagtgattgatgaaaaacatatcaaagagcttgagacaatggtgaagcttaatgacaacgataattcagatcctgaaaccccacctccagcaggcgaagaaacgtaa

SEQ ID NO: 50377 - DNA, 813 bp, Acinetobacter baumannii
atgacaacgataattcagatcctgaaaccccacctccagcaggcgaagaaacgtaaaaaaggtcgtaaagcttccaagccgagagccgtgcacgtaaaccgccgtgtagagctttattacacacgacaactactggctatttcaaaatactgtcaggaacaaacaaaagaattggttattcctacagtcggccagaatatcggtgatgcttggttctcagacatgatgacggcgtttagggaaaagctcacaaagtatgttgttgaggtttcgcgaccgttggccacaaaagttgtgactgacacccaaaaggaagtggacaagcaaattgcagagcacactaaaacgattattggtgtggatctaacgccgttctatcgagctgctgatattcaggatgaggtagatctaaacattacggctaatgtcagtttgattaagtccattccacagcaatatgccgataagcttgaagtattaattactaatgctttgcagactggacaaacaaatgaagagttggccaaagctattaagcaattagggttatctactgattatcgtgcgcgccttattgctagtgatcagatgggcaagattaacggccaaatcaaccaagcccgacagctttcgatgggtgttgagacatacacatggcaaacggccaaagacgagcgagtgcggccagatcatcaacataagcaaggcaagacattcagatgggattcaccgccagatggaggacatcccggtcagcctatccgatgtcgttgcacggcattgcctaactatgaggatatcttaattgactga

SEQ ID NO: 50378 - DNA, 303 bp, Acinetobacter baumannii
atgatcgaatctaatttccaaagcagaatggggattgaaattaaaagaactgacaagaaaacctttttcaaagtgagttctcggatctggttcatttgctcaggggttacgttacttacttcatcccattttattggaggggtagaaacagttggtggtggaggcttaggttttttagagctttctactccatctactttaactaatgggggtgtacaaacaatcggcggagtgggtcttcttggaccgtggtccttcccacacttccagcatttctcgctagcgttagaatcagtcaattaa

SEQ ID NO: 50379 - DNA, 300 bp, Acinetobacter baumannii
atgaaacgcaaaaagtttagtaaaaaacggttttatcgccgtttacaagcacagaaatttgctaaaggcgggtttgtaactggtggcgacttcactccactgtggttaatgtcttgctgtgacgggtttcctaacttggctaaggcggcgggtaaggctgctgaaaagtttcaagaggtggtgggaagtttaaaaggattgcagccgccgaatatcaaacccattaaaactaatatttttattgatggtgtagatttcggttctgctaaagacttttctgttacctattcaagaacgtaa

SEQ ID NO: 50380 - DNA, 1200 bp, Acinetobacter baumannii
atgaaaaccatttaccaactcaaaattggtgactttgcgccaagcgaatcgacacgctcatttaccaaagaggggtatctgaaatgcgtcaatgttcgcttagctaaagcgccacaagtacgacagtactatgcgtatgagtttccatctctggaaggttataccgctgatcaagtcatcaatgtctacacgcctgcagaagagcttttcaaacctgaggctattcaaagcttcaatggtgtagacgctactgactatcacccgcctaaaaatgaaattaacgcttctaactggaaggattatcacattggctattgtgagaacgtccggcaggaaggcgattatctggtgggtgatttgctcattaaagacaagatcagtattgatctgatccaaagcaacgagcggctagaaatgtcgcttggctatggagccttattaatcgttgagcagggtacggcgccagatggcacgccgtatcaagccaaatttatcaattttataggcaatcacgtagcgctcgttaaatatggccgttgtggtggtgattgccgcatcggtgacaaacaacaaactccacataaggggaatatatcaatggaagttattgtaaatggtgtgcgctataacattggcgataacacgcctttagcggatgcattaaaaatccagcaagagcagcttgacaatctaaaggcggcaaagctcaaagttggtgataagcaattttctataggtgatgaattgaacgcagttcaagcggttgtagatcagttacatgccgaaaaaacagcactggagcaaaaagtaggtgatctggaaaagaaccagatgacgcctgaaaagcttgagcaagctgctgcagagcgtgctgctgtgattgccgatgctaaagcattggtgccaacagttaaaaccgaaggttgctcatgtgagcaaatcaagcgtgatgttattgctgcaaaagctggtgatgctttagtaactgctttgatgggtaacgtatcagtaggtgatgcaaagcctgagcagatcgacacaactttccgtgcactctgtgctgtgaagggtactcaaccttctaatcctgtaggtgatgcacttcaccagcaacaaagtgttaaagctggcgatggtgacccagcaggcggtggggaagaaaagacctacagtaaagaaaacgcatacaaaacaatctaa

SEQ ID NO: 50381 - DNA, 471 bp, Acinetobacter baumannii
atggttaagcaatacgatgctgtacccggtatgaagtttcacctcattggcccagaggatattttatccctgcctgtggctggtaccggtttggtaaacgatggtgacgtggttgtacgaagtactgacggaaaaacagtttcagcggtaactggtgcaactaataccaagtttggaattatcgtacgtcacggcgtaggtaagtcaggcaaaacggctgatggcaaagaagcctataaggctactgatgtagcaccggttatgacgataggctcgatttacgtgaaggtcaccgcaccagttaccgatatcaacgcaaaggtttatgttaaaacagctaacggtaccacagcagcgccgttaggttctttatccccaacagcaacagacggtacagagttaccgaacgcatcttgggaaacaatttcaaatgagcagggcttagctgctgttcgcttacgtggggcataa

SEQ ID NO: 50382 - DNA, 975 bp, Acinetobacter baumannii
atgagtaaattggcagcaatgaagctacgtctaacaccagtagctcaaatggttcaggcaaatattggggatgcatttaatattgatgcattagcccagttattcgttaaattggaagaatttaacgaaatgggtcctcagcttcagcaagtgatggattacgctaaatacattcctgttaaacctgtcaatgccgtatatggtggaggagagatcctaagccgtaagaagggtgtgggtatgggtaaagatcattcaggaactggtaatgatattcccgtggctgaagttgaatatgatactgttcaattgccagtgaaggtcggcacgatcagttatatgtattcagtatttgagttacaagcagcccaaaaattaaatttagcacttgaagcagataaagtagaggccgctcgcctagctgcagaaaaacacttaagtaacattgcttggtatggcaatgctcttaccggagttaagggcttcttaaatcagacgggtgtaaccatagttacagcccaacataactgggccaccgcaaccattgaagaagtactaagtgacttcaatgcaagcttggcagatgctgaagatcttgttgatggggatgtatccgtacagccagatacttatttgatggcatcaaatcagtacttacatctttctacccgtgtagttgctgattctggcggaaagactttcttaaaattcattgaagaaaataacatcttcgcatcacaaggtaagccgttaaccattcgtggtttaggtcgttcaaatggtaaaggtacggcaggtgctgaccgttctattatttaccgccgtgatccgtcatgcattcaaatgaaatgtgatgacgtcactttcttggcagctcaaccagttggtgtggatattaaagtgcctggtcactataaatatcaaggcgtatggttgaagcgcgttgattctctccgttacttggatcacgtgtaa

SEQ ID NO: 50383 - DNA, 384 bp, Acinetobacter baumannii
atgaaatattcttatatctatagcggcttacaggccgcttttgttttttctggtattgctgttttgcctacaggcacaccaactcttgtggatgaagaagcgcacaagaagctcactaaaaataagtttgctaaacatcttattaatatcggtgaacttgaagttcaggaaatcccagatgatgagccaaaagcaacaggtaaaactggtggccgtggtggtaaaggtggtaaacaaaacgatgcagcaggtgagcagcaaaagccaactgatgaagacgctttggccgccgtgaaggctgaattaacagcgcttgaagtaacgttcagtgatgatgaaacacttgagcagttacaagctaagttagctcaggctaaagaataa

SEQ ID NO: 50384 - DNA, 384 bp, Acinetobacter baumannii
atggacgtacaaacgtttcgtgaaaagttctcgactgattcgagtttaatgtctttgccagatgcaaaaattcaggatgctttagaagaagcggatctgattgtttctcaaattgagttcggggcattaaaggaacgtgctgtaggtctatatgcagcacatattcttaaagttggtactgtaagtggcaatggtgctgcttttggtaccgcctcaagcatgacaattgcgggccaaagtgtgagttattcacgatcatcgaaagaagctttctatgatctcagcatgtatggccaacgttaccttgcgttaaaaaattccattccaattgatgatgaaggcactaaccctaaccgtttgggtgttggtgcttttgttgtatag

SEQ ID NO: 50385 - DNA, 192 bp, Acinetobacter baumannii
atgccttttaagtatcaggcaccagaaggttacaagccaaccaaactcgttattgctgggcaaaacctagatatcaaaaacggcgttttggaatcggataatgacattatccatattttaaagcccttaggttttgagcgttatgttgaagtggttgagccaaagaaatctgcagcatctgctaaagagtaa

SEQ ID NO: 50386 - DNA, 483 bp, Acinetobacter baumannii
atgagcgattatcgtgttgatactcaggtcaattttgatgagatgaataatcgcgttaggtttgaaataagacgcacggttaacgctcttactttgcgcttacagcggattgttcaggaagacatgttaagtggccaacgactcaaagttcagtctggccgtttgcgtggatccgtttcatcaaaggtggatgaggataaggattccattgagggaaccgtgggagctggcggtgctttggtgccttatgcacctgcacatgagtttggtctaaatggtgctttgggtgttaaagcacacctaaggacaattaaacaggcttttggccgacctatatcaccggttcaggtcaatattaaggcccattcaaggaatgttcggtttagagaattgcggttcatgcgtgattcactggatatcgtggccaagattgtgccgaaaaatattgatgcagcaattgagcgaggtatagcaggtggatag

SEQ ID NO: 50387 - DNA, 444 bp, Acinetobacter baumannii
gtggatagcgaagcaatctatcaggcgttgtttgaaaggttaagcacaagggtagaaggattgattacggtaagtcgccgtttacgtcactttaaccatgtaacaccagaacagcgcccagccatgtttattacacaaggcaatcagcaagaagtcccggtacatggtttagattcaaaagttgaactagctgctgaggtttatctctatattcatgaatcggacactacaaagccgccatcatcgcagatgaatatattcatcgatcgtgtacgtgaagctattcagccagatcatccagattttaatgaatgtcagaccttgggaggtttggttgagcattgctggattgaaggcacaatagaagtgtatgaagcagtagaaaacatgctagatgatcaggcgattgccattatccctatccggatcctcacaaccaattaa

SEQ ID NO: 50388 - DNA, 768 bp, Acinetobacter baumannii
atggctcagtatttatttggtgccggcaagatttttgctacaccgattcaagatgtatacgggcaaccgattagtaatcccacaccagttgaagtgggggtgatgcaatccgttggtgtagatattagctatgacttaaaagagcttttcggtcgtggtcaattcgctgtagatgctgcgcgtggtaaaggtaccattaaatgtaaagcttctttcgggcgtattaacggtactttgttaaattccatttttttcggtggcgttgtagctgagggtggaatcgaaaccgtttcccaaactattaatggtgaagttattccggctggtggttcagttactccggttgtccctaacagtggtacgttcgtaaaggatctaggcgtaacagatgcgaaagcaatcccacttaaacgtgtagcttcggcaccagcaacaggacaatacagtgtagatgcggcaactggtgcttatacatttgctgctgcagatgcagggaaaacggtatttattaacttccgttattcagcaatggtagcgggtgctaaatcaatcactgtatcaaacctagacatgggctatacgccagagtttgccgttgatctgcaacgtgactacaaaggcaagttcatgcatatgaatttcttccgttgtacaagtaacaagcttggatttagttcaaaacaggacgattacgatattcctgagtttgaattccagcctatggctgatgaccttaaccgtgttttcaaaatcgatttatcggagtaa

SEQ ID NO: 50389 - DNA, 321 bp, Acinetobacter baumannii
atgcaatttaagcaagttgataacccgcgtggtaatagtaaagagattgctggtcggtcttggatttttgctccagctccattgggtacgcttgagcgatttgaagaacaattgaaatcaaataatgttcccgtttcagtaattattgatatggcccatgtttgtcttaagcgaaattacccggatattacccgtgaatttgtttcggatgagctattagatatgggtaacatggaagaagtcttatcactcgtgactaaaacctcaggcttggaatataccggtacaggtaaaccggcaggtgaatcttcgggggaataa

SEQ ID NO: 50390 - DNA, 228 bp, Acinetobacter baumannii
atgggtaaagattacgactatgtacgtaatgaaatggatctaccccgattaagagcgttaagtgcgtatcagcaaagtaaccctcccgcacatgttgggatacaacggctttgccgtattttggaagcatttatgggtattgaagagacagacccagctatcaccttatcagatgatgatgaggacgatatgctggaagttttgtcgaattttccgcagggtggttaa

SEQ ID NO: 50391 - DNA, 585 bp, Acinetobacter baumannii
atgaaaaagtttttcaagtggatactgattctatttatagggttctttcttttgggtgttgtacttaatgctttaggtgtaaaaggtagtaataccgaaaataaaacagaaaatagcactaaagaaacaaaagattcaaaatggcaatatcaagaagatatttccaaaatgacagataaaaaaaatatctatgtaactttgaaatcagattcaatatggatgaaaaatggggatccatcccaagcaattattcctgacctaaccttcagatgccaagatgattcggttgatgtaattttatctactcaaacgcctttaagtcctgagtatggaaatgctttgggcaaaactattaaagcaagattagataaccaaaaagccttcaatatttcattcagcaatggacagggttcatatacaaccttttttgccgaaaagccaaaacaattaattgagaaattaaaagggcataagaaattgttgcttgaggttaatgttcaccgtcaaggtccatttgtcattgagtttaatcttgatgaatttgaaaagaatttagaacccgtaaagaaatcttgtaaattttag

SEQ ID NO: 50392 - DNA, 2772 bp, Acinetobacter baumannii
atggcaaataacaaccgcgtagaagtacatgtgggtgcgaaaacatccgagcttaaaaaaggtatggatgatgctgaaaagattgtttctgattccgctaagcaaattgagaataccactaaaggggtgagatttaagtttgatctctcgagtgtcaagcgacagtttgatgacgtttctaaatccatttcagaaggttttaagaaccaaattagtgatgcacttggtggatcaaaaatagggtcagcatttgatggtattacttccaagttaggagctctgcgtggtggtgcattagttgcggctggagcagttgcaggactggcagtgggtgggaccatagcagctactgcaggcttagcaacattggcaattgaagtggctaataacaatgttgaacttgcgaaattctcagccttagcaaatacctcgatacagtcatttcagggtttgtcaggtgcagctcaaactttgggtttttctcaagaaaaactctcagacatgatgaaagacttcaacgaaaagatcggtgagtttgcatcagtaggttctggtggtgctaaagatttttttgagcaaatcgccgttaaaacggagtctagtgctgagggggcaaaaaagctcgccgaagaaatgtccaagatggatggggtagaagccttacaaacctatgtagataagctggaagaagctggagtcaaccagcaacaaatgtcgttctaccttgaaagtatgggctctgatctcactggtttaattccaatattgcaagatggcggtaagctttggaaagaatatcagtctgctatggaagaagcagggattattactggtgaagaggcaattcaaaaatctattgaattaaaggctcaaactgaagtacttcaaatgcagtacaccggcttaaaaaatcaattggctcaagcagtgatgccagctttaagcggtgttattagtcattttatgaatggcaccacaaaaggtggagcatttaccggagttattcagacattaggctcggttgccaagggcgtggcagtcgttattgttgggcttggagctggattacaaaatcttgtgcgattaatgtctggtgttatgagtaacctaaggactattggaagtactgccgtaaactttgtaaatgcggatgggatcttggctaaaggtaaggctctggctggtggcgttaaggcaatctggactgaaaccaaagatactgtggttgatattgctggtaccaccaaagccgcaattaattcagcttctaatatctttagtggaacaccttcttttgatcgtttaactcaggcaaagattgacatacagaatgcacaattaggtgctagaggtggcagtaaaggggttacttctggtatcggacaaaataaggcactcaatcctgatggtggtaaatcagagaaggcaaagcagggtaagtccgatgctgtacgacaagcagagcaggcagctaaagcacttgcggatattcggtataaatatgcatccgaagaaaagaaggtcgctttagatctgcaaaaggcactagatgaaattgaaaaatccaagatgactgcagatgaaaaagccgctgcaaaagtcaaagctgaaaaggatgcttcagacaagattattgctatccgtttaaaagagtttgaggaatacaaaaaagctcgtgaagaacagatagacaattatcaacagcaagcacagcgcctttatgaaattgaagctgcacggatccaagccgagtttgatgccaagaaaatttcaaatgtccgtaaagtccagttggaaaaacaactagaagatcagttacgtgaaattaaacggcaaagtcttttagagcgtttagcacttgagaacgagcaaaccggtattacgggtaagcagggcaatcaaaaccaaatcacaaacaacatttctgatttagagacagatcagaaagttgctgacactaagtctatgggcttaatcagtgatgcggaaatgaaagactttgaagctaagtttggtggctttacttctcgactttctaacctttgggatcagggcattcagtctcttatgaatggtaccctcacttggagtaacgcaactaaagcagtgcttgctgacatggggcaatttgccttgcaaacagctactaaagagttgcaaggatggctaagaatccaagccattaagttggctcgtaaacttggtttcgttggtgccgaaacagcggccgaggcttccggccaagcggctcaaacgggagcaacgatcgcaggtgaggcaacacgtaccagtgttacagctgcgggtggtttagctcgattgggattaaaagcagctgaagctatcaaaggcatcatgatgtccgcttgggaagcaatggccggagcttttaaagcgatggtcgcaattccgtatgtcggtccaattttagccgttggtgctggtgcggctgcttttggtttggttgctggtcttgcgggcaagatcaaatctgctcgaggcggttacgacattccatctggtgtaaaccctatgacgcaattgcacgaagaagaaatggtattgccgaaacagcatgccaataccattcgtgccttaggtaaatctatggccaatgctgggtttgctgatcctgcttctgcatctggtggtgattcgtatcactttaatcttggatttgtagacaccaaaggtgctgatcgatggctgaagaaaaacggtaaagctgtagcaaacagcttgaaaggctataaccgcaattttggtaaataa

SEQ ID NO: 50393 - DNA, 642 bp, Acinetobacter baumannii
atgtcagacgtattgtttcctgaactgccgggtttagagtgggatctaactaaaacccccatgtttaataccaagatcatgcaatcagtaaatggtcgagaactaagggctagttatcaggcagtacctaaatatcagatcagcatgtcctttgcattccttcgggagagcaaggggcgtaatgaattacagcaacttgaaggtttctttctagagcgccgtggctcatttgattcatttcttttcaagatgcctgaggacaatgaatttcagtgcacgtttgtaggcgatggggttcaaacgtcattccagctttataagcagatcaataccactcagatccctttacaacatacccaagcggaacagagtgaagatccgttgatgtggagtgagaatgcatcaaaaccgatgtggtcagatcctgaaagtcaaatgtggttacttcaatttgttattacaaataatggtatgttgcagctatcgattccactattagaaggagaatctattactgtaactggtaccttttactatcgatgtcgttttgcagatgatgaacagcagtacaccaattttatgagcaaactctggaaagctggaaaagttgaaatggtaggctcactggggaataaagtatga

SEQ ID NO: 50394 - DNA, 858 bp, Acinetobacter baumannii
atgagagcagcttcggaaaaactgatcgcgttacttgatgcaaatcagttcgtgatggcggatctatatacgatcacgacgatccagaatgatatctatagatacaccaattatgactttgatctcattgttgcgggtgaactttatcattctgatggtcccatcattagtcgggatggcatcacattatcattgggtgtagaagtggataatttatctataacaattgatgtgacagataaacaaacttttgaaagtttgcgtattgtccaagcctttcacaatggtcagatggacggttcacgtttcaagcttgaacgtattttcatggatgccaatacacctaccgataccagcgcgggaaccattaagctgtttgaaggccggattattgaacctgagtttgatcgcaatacgatacaggccagtgtcgcatcagatctggatgaactgaatgtgcagatgccacgtaatttataccaaccgagctgcagcaatacactgtttgatcacgcctgtggtttgaatcgtgaaaattatgcgcttgaaactacgattgctgctggcagtactgcatcgcggatcctgtgtgatatcaaccagccgcagggctggttcacgcaaggggtgattgagtttttagaaggtggaaacaaagggcttaaacgcacgattcgtttgcatgagcttgatgtgctgcttcttacattgccattacttgaaaatcctgaggtggggcagagaatcaaggtgtatccgggttgcgacaagcgtcaggaaacatgccagaaccgcttcaataacttttcccgtttccgcggcgcgccttttataccaatccctgaaacatccgtttaa

SEQ ID NO: 50395 - DNA, 1824 bp, Acinetobacter baumannii
atgactgtaccgagcgattacgattttatcgggaacactatcaccgaatcacagtttaaaaatgcattaaccgttttgctcaatcatattcgtcaaatgtcacttgatttagtcgaggcgcaaggtggcaactatagctatgcaacaatggccttatttgatgcagataaaataaatgtacctgctaattctaccgtacgtattgctcggggagacgatgcagggctttatgtttgggatggcgcaaatttaacaaaagtagaaacctcgaataatccttatacaatttcctcaaccccagatgacttattcatcatttcagatgctttggataatgttttattctcaattggaagagatggaacggtaagaggttcatttgatctttcaaatattgatttgaatatcgaatctacaagtgaggttggtggagacacggttcttgcagtttccgataatacaggaaacatgcttgcctctttgaattctaaaggtgagtggtatttcacaaaaatcatagcagatgaagtagttactcctttcggtagcagctcggaatcatcagacgaagtgatcgagcaaaccgaaatcgccatccctgaattgagtttttacaggatcgatttcactatggtgggccagccgcctaccgatttaggcgagacaactgtatcgggtgtgtgttcgtttagtgacccatctaactctcagacatttttcaaatcaaacatggaagtaacggtccaaggtcaagggtcagcatacgactataagaaaaactacacattggatctttttaattcagatatggaatcgctcaaggtcaaagtaggtagcatgatcgccactgactcttttcacttaaagggattctacagggaccctacccatttccgcgaccaaggtggctacagattttggaatagccttgtaagaaaactggattatccttactgcaaagtaaataatattatttatcaagcaaatactgataggaaagcagatgcagaatacacagctgatgcaaagtactatcctcacggaataccttgtgttgtctatttaaataatcagttttatggtctatataccttaagattaaagaaaactagacaaaattacgcacttaacaatgctgatttgaaccatatctttttagatagtgcaacatatgatgcacacttgagtcaaagttttgatccacatgactgggaaataaagtctcctaaaatgtcaggatatgaagaccaagggcctgtacccagtaaatttgctgcggtacaaacctcgatcgaaagacttttcaactttactaaggacttagatagtaattatcaaaaccacgcttctgttttggttttacctcactggttgatattttacatctttgctgaattagttgggcattgggatatcaatggcaataactacaatatcatgacatgggacaatatccattggtctattctgccttacgatttggactggactttaaactggtttactggcgaaaacgcgggagccactcaaacaggtttcattgtcagtggtgatatctggcctagatttagacaagtatatctgcctcaaatccgtgagctttacacaaagttaagaaaaagcggagacatatctacatatgcggtagttaagcattatgtggaagtagcccgaaatatccccagagacatctattcgaaagataaagccaaatggggggtaacaccgattttcggcaatagtaattatccagatctagagcaggcatataggtatatcgatgccagaatcaactacctagatacggtatggttaatcaattaa

SEQ ID NO: 50396 - DNA, 1476 bp, Acinetobacter baumannii
atgtcaaatactcttttacttaaaacagacggatctatcaatactagatctaaagtattccctaaattaggcaagtgcaatattgcgatttatcgcagaactaacggagccgacgaggttgaactctggacatggggcctttcacatgctgaaaaccctatcaccataaacggaggcaaattcgtcgcatgggccgcaaatgttccagatagactggtagttccagagaaccctatcgcgattgatactactgagttaactttacctagccaaatagtatgttattttaaaataaaaatcgatgatggtctgaaaagttgtcagttgatgttcaacaattatcttaccgatacatctctctgtggcggaaacaaaccagatcagatgaagatcgattactctagaagaccgtatactattaacggtatggctaagatgttttggaaccaatttgtggcatatgatttatcagactgggacatgtctgacgtagtatatgccgtaagtatgtttcataattcccctaatttcaatcaggatttgagcttgtgggatgttaggaaaataactgagttttcttctatgtttcaagggactccattcaatcagcccctaaattcatgggtaacggaatcagccgttgcatttgcagggatgttcgcgaattgtgttgatttcaaccagcctttggataaatggaatacctctaaggtatctgatttttcatctatgttcggctgggccaagtcttttaatcagcctattggcaactgggacacgtcttctgccacaaatatatcgtatatgttcgaaaacgcccatgcgtttaatcagaacctgaacgactggaatgttcaaaatgtcgaatacatggatggcttattcaagtacgctaagtcgtttaatcagccactaagtaactgggatacaagatctgttgtgacggctagtcaaatgttcatgggggctgaatccttcaatcagaccatcgagaacctcaacttctctaaatgcacagcattaaggatgttcatgcaccaagccaagtcgttcaataagccagtggcagctttggatgtatctgtgtgtacggatcttgcgcagttctttgaagaagctttgtcatttaatcagcctgtggaatcatggaacgtgtctgcgtgtttggacatgtggagaatgtttgcatatgcaacggcgtttgatcagccactagcagcatggtgtcctaagttcaacgtagaggtatctttggattctttcatggagggtaaggcatatagaacatcctattatgatgatttcttgaacgctttatggctagatgtaaatacgacaagaagaaaccagtgggcatcaagaattaaacctagattattgggcatgggtttatcaaaatattcttctgtatcttcgagtgctagagcaaatttagtaagtgcaggttggacaattacagatggaggacaagtataa

SEQ ID NO: 50397 - DNA, 195 bp, Acinetobacter baumannii
atgactgattatacaattacagatgggcagttctacaaagttttagataaagacactggtgctgtcatcacaatgggtgagctatctgacacaaatacactttcgacaattcacaacgtcgagttcatttcagaagagcagtacgaagctgagcgcccgaagcctgaagcgttgtctgaaaccaagatgatataa

SEQ ID NO: 50398 - DNA, 429 bp, Acinetobacter baumannii
atgcagaaaaaccagctcgctgttcaagaagctctgacttggctcggcaccccatatcaccaccaaggccgtgtcaaaggcgtgggtgtggattgcggtacgctgatctgtgaggtctatgaaaaagttgggctcatggaccatttagatccgcgtccgtatccgccagactggcatatgcatcagatgggtgagcgctatcttgagcatatcaggagtgtctgctttgaagtggacgggccaccagagccgggggatattgtgctttataaaattggcaaatgtgtcagccatggcgcaattgtcgttgaatggccaacaatcattcattcatatatccatctgggagtcattcttcaagatggtaccaaaggaagtttagcccggcgaatcgccgggttttttcgtatgaagaggctgaaaaaataa

SEQ ID NO: 50399 - DNA, 2490 bp, Acinetobacter baumannii
atgggtggaatctttggtagtacaacaatcagtacatcagacaaccgcatcaactctatgcgtgttcagcaatctgcatatggactatgtcagccactggtctacggcaaaaaccggttggctgcgaatatgttctggtatggcgatttctcatcgactgcgcatactacgacaaccaagtcgggaggtaagggcggtaaaacgaaaacaagcaatacaacgtatacatacagcgcatcgttaatgctgggtttatgcgaaaccaaaatacgcgatattggcaatatctggcgagataaggagcagattgttccaaaaactgaaggcggtgtgcagctcaagccaattgatcaactcggatttgaactcttcgacggtgatcataacccagtgtggggttatctggcgtcaatgcatcctgatcaggcagtacactatccatttctcggctatatcgcgtgtgcaaattatgacttaggtggtagtgcatcattatcgaatcataactttgaagtgattagcgacattacgttttcagatacgattcatgatgctaatccggccgacgttgttgaggatctaattagtcatccacgctatggtgctgcacctaatttgaatgtggcggatctctcagagtttcgccgttactgtacagccaccggcttatttatcagtcctgcactgaccgaacagcgtgcagcgcatgagatcattaatgaaattgttgagtcggtaaattgtgcaatcgtacccagcccggatggcttaaaaattagatcttatggtgacactgcggtatcgggaaatggagtcacgtttacaccggatctcacaccagcctatcatttaacagatgatgacttcattggtgatgatcagcccgttcgcgtgaagcgtagccgtgatacggatgcatttaatcactgtcagattgagtacgtgaatcgcttcaatcaatacaataccgagacggtcgaagcgaaagaccaagcaaacattgaaatgtttggactacgcactcaggatccagtgaagtacgactttttctgtgagccgaagattgcccgacatgctgtgcaattattgctacagcgcaaactttacgtgcgcaatgaatatgagtttgatctgggctggaagtactgccgactcgagccgatggatatcgtgacgctcacagatgagtctttgggtttagatcgcttcccagtgcgtatcacgcgcattgaagaagatgaggatggattgcttaccgtgactgcagaagagttagcggtgggttctcgatcagcagttgaatacgacttacaggcgtcaaatggttatcaagggggtaacgaggaacctggtaatgttaatgcaccggtaatctttgaaccgccgctcgatctaacggatggtaaaaatcaggtatgggtagcagcatcgggtggaagcaactggggcggctgtaatgtctgggcgagtctggacaatacaacgtatgaaatgattggaacaatttacggatctgcacgctatggccagttagttgctgcaattaattccagtgcaactgcaatgcaagtccagctaaatacatccagtcagatttttagtggaacgtctgaagatgctcaggtgaatactactctctgcagagtcggtgatgaatatgtcagctatgtcgatgcaactttaaatggatctggcttgtatacgcttggaggtgtgttacgtggacggtttgatgatgctttagcgcataatgccggtgaatcctttgtgcgaatagataaagccatctttcagcatgaattcaattcgaatctgattgataaaaccatctatctcaaattcaccagcttcaatggtctgcagcagaaagaacaaactttagatgaagtcacagcttatagccatacactcaacggtgggcgtccttcaggtgttaagggattatcgctacagtcgccatttgtgggtagttcatttaaggtgcaatggcagtttgctgctggcgcgcagggttatattgtgcaggtctcgtctggaagcaatctgcttagaacgattgaaacgaccagtgctgaatacacctattcgatggaagaagctagagtggatggagtgcagcgtaactatacaatccgtgttgcgagcaaatcagaaaacggtaccagtacatttacggacctgaatatcagcaatccagtccctccaatcttggccaatgtctatacatcggctacatcaaactcaatcacggtgacatggataccaagtgaggtgccagacttgaaagattaccaggtgtggatcagcaaaaatgccagctttgatccggaaacgctggccgcgagttggaccggtaccgagaatgcctgcacaattgaaaatctggattcaaccacgacttattacattcgggttgcagcacgtgatgtctggaagccaacatcatggaactactcggcgagagtgactcaagcgactttagaagcttga

SEQ ID NO: 50400 - DNA, 390 bp, Acinetobacter baumannii
atggaaccagtttctacaagcggttttacagcactattaaaattttatggggttgcaattgtggtggctttagcggtcggcttggttgcagcagttgtattaatgacacgtatgccacgttcaccacaagagtgggctgtaggtttgatctgtacggttgtatcaagccttgctggcggttcattcattatcgtgaagtgggggcttcatgaatgggttactgatatatgggggatgattgcacttggtggattcttctttgtgtgtggtttacccggttgggctttagttcgctggatctttaacttcattaacaaacaggaagggaaaacgatcgttgaagtgatcaaagagtttaagaaagccagaaaagacattgaaaacagttaa

SEQ ID NO: 50401 - DNA, 543 bp, Acinetobacter baumannii
atgaatattgatcaatatcttgaagatctgattaaacgagaaggcgggtatgtaaataacccagcagatcggggtggcgcaaccaaatacggtattactcaatctgtagcacgtgaaaatggctataagggcaatatgaaagatttgcctcttgatatggccaaagcaatttatcggaaacagtactggatagagccacgttttgatcaggttaatactcttagctctgcagtagctgaagaacttctagatactggagtgaactgcggtatcaactttgctaaaccacttttacagcgtgctttgaacttgcttaacaatcaaggtaaagctgggtatgcagatttaaaggttgatggggtttatggatctgaaactcttagagctctaaaaacttatctggccaaacgtgggaaagacggcgagaaagtgcttgtgcgagtacttaatattatgcagggccagcgttatatcgaaatatgtgaacgcaatcccacacaagagcaattcttttatggatggattgctaaccggatcggctaa

SEQ ID NO: 50402 - DNA, 591 bp, Acinetobacter baumannii
atgatagatcaaaaagaagaaatggcgcatttatttgccttagcatatatgagtcttattgatgaagaccgattaaatagatgggtcaaggcttcttttgcactaggaaaagtagagcctttttttatctccacattccaaagcttagggaggttggactcacgcttagtgtttttagataaaattattataaaaaaccttatgaaaggtgataagggtgatttagattttaatgcatatactattgaacatttgtcgcaagcaactctttggttatttggagcctatgaaatagttagggttctaaatgatagagattttaaaaaaaagccagaaatggctatttatgagcaatatcagcctgaaattaattctttaaaattaaagcttgcacgaataagaatgcctttagcaaagtttgcaccagcagataaacataagggagatgcacatgtacccacgccaagttttaatacaactcatggggtagcttggcaaattactgaaactgagtggattataagaaaagatctttcagatgaaatgcttgagttgctagaaaagatctttaaagagactagaactgaatag

SEQ ID NO: 50403 - DNA, 195 bp, Acinetobacter baumannii
gtgactagcgaattaattaagatttacaaccatgcggattctcgtgttgcagatctattagcagatctagataaaaacggagaggtcacaaaaatttatgaccttaacggcaatgaattgaaaattaacttcttgcgtgacgaggtctattataaaaaaacttggtggcaatttaccaagaaacaagatatttaa

SEQ ID NO: 50404 - DNA, 216 bp, Acinetobacter baumannii
atggctatcgaagatgcaattattttagttcgaagtttatctaatatatcttcaaagttagaagcaaaaattgccttacaaacttatgagaattctcgcaaggaatgtacggcaaaaatacagataggttcgagaggcaatcaatggatgaaaggccaagaaaatgctgactgggtttacagttatgatgcatggactacagaattaattacttga

SEQ ID NO: 50405 - DNA, 315 bp, Acinetobacter baumannii
atggaaagattaaattacgatacagttattggtgcagacggtatccattcgccagttcgtacagccctttttggtgcagagtcacctagatttacaggaattgtttcttttagatctgtagtatctacagaaaaagttaaacatatcccagaaatagaagcatttattaaatggtggggtgatactccacaaaaacaaattgtcactttcccattaaatcaacgtaaagaaacttttatatttgcaacaatcgggcaagaaagttggactgagaaatcttggactagtgcggggggatcttcaagaactccttaa

SEQ ID NO: 50406 - DNA, 447 bp, Acinetobacter baumannii
atgcagaaaattttagctcaatttctaagagatgatgtaatctcgtggtcatctcaagtcatttatagctggaagcaaaccttcaaagctaatagtttgactaaaattcaccatgaatataaacccttggtgggcggttcagttgctctctatccagatgaatataaccagcaattttgtatggataaacaatttaagcaaggcttaaaaaaagccagtgcagaaaattcgccgtttagtgctttgggctatattttgacgacgggtgcaaattgggcaaagccgattgaaaattttaagctcactattgagcgagataaaaatgaattagtgtcattttgttgggatggaccagtcaaaaagattagcccaactcaatttcaaatgatcaaaaccaagtttgtgcctaaaaaagatttggatattatttttgtgagagtgaaatag

SEQ ID NO: 50407 - DNA, 1260 bp, Acinetobacter baumannii
atgagcaaaaaaactttaatcgcattattatgctgtgccagtttaggattgacggcatgtaacgatgataacgatcaagatcaaacttcgcctactgaaaacgttaccgaaccaactctaatttcttttgctaagttacctgtagaaacttatgctgctggaccagactcaggggcatatgtgaaaggtgcaaatggaatttatcctccgtttaaaggtcaacctgtacagggattttctgcagcattaaaaaatgaagatggcagttatatggcaatggccgataacggttttggcactcaagataattcatcagactttttacttcgtatttataaaataaagcctgatttcaaaaataaaactaaaggcaccggtcaagttactgtgcaaagttttatccaactgcgtgatccgaataaattaatttcatttaatatcatcaatggtaatacacctgagcgtttattaacgggtgctgattttgacccagagtcaatgcaacgtactagcgatggtacttattggattggggatgagtttggaccttatttacttcatttttcagcggatggtgtgttattagatgcaccgatcgctttaccaaatccattaaatccggctcaagaattacgttcaccacaaaatcagtttaataaagcgcaaattaattttgtagagcctttggttcaacaaagtggcggtttcgaaggaatggcgatttcaccagatggacaatatctctatccgcttatagaaaagccaattaaatcaattcgggaaacagaaagacagttgctgatttctcaatttgacctgaagaaaaaagcgtatacaggaaaatattattggttccagttagacagtaaagcaaccaatattggtgattttcaactctttaatgataaagaagggatcattattgaacgtgatgccacgcagaataatttaggtggctataaaaaattaattcgtattaaattaaatgagtcaggccagctggtcagccgcgaagacttagtcgatttaattaaaattgctaacccgaatatgttgtatggcacagctagagcaggggatattggtacgggacaggtttttgccttcccatttgaaaccattgaagatgtaattattgaaaatggtacaacactgacggttttcaatgataataacttccctgggtcgacgggacgtaatgcaaagttggccgatgataacgagattattcagattcgtttaccaaaagctctcttctaa

SEQ ID NO: 50408 - DNA, 387 bp, Acinetobacter baumannii
atgaaatattttagaaacacaaaaacgagtgaagtctttgctttagaagacgatttaattgaaatgacagctgaagaagttgatcgtcatttaaatccgcaaaattatctttctgatgaagaaaaagagcagctacgtcttgctgagtttaaaccacttacaaggcgccaatttaagcttgctcttcttcagtaccagcttttagaaaaagttgaacaggctatagctgacattgaagatcctgcgctaaaaacacgagtccagatcgaatataacgaatctgaaaagtttgaacgcacaaatgattcagtcaaatatatgcttccacttttgaacatttctaatgatgaaattgatgaaatgtggcgttatgcacaagcgttataa

SEQ ID NO: 50409 - DNA, 2250 bp, Acinetobacter baumannii
atggcagtagataaacttccagaatttgcccgaaacgggcaaaaaaatacagatggtttagatcaagaagatggctttccagttaatttaaaaccagcacgtcaatggtttaattttctttttaacaaacttagtttagctattaaccaaattattgatgaagattacattcgtcatgatgagctcatcgacaatttgaccagcagtgatgataaaaaaccattaactgcaaaacagggtaaagctttacaagacaataaactagataaaactgctacggcagtagctgccaagaaattagaaattgaaacaacgtcatttgagaatgatactgactttattaagtacttcgcagataaaccaaaaagtttttttgacaatcaaaccggcaagttctttgctcaatattctgttgggttagtctcatcgttaaagggaggtggaactttaataattggtaatgacgttgttaccggtaaaactaaaattattagttgtgtagttcgtgatgatggagctcttgattttttaaataaaaaagagcttgcatatacagattctagtattactggtaatgcagctactgcaacaaagctccaaacagctagaaagattaacagtattaattttgatggtactcaggatattaatattgaggctcctttgcgattaaacggaagtatctctaatggaacacagctagatgcagccataaatgatggcaaatatactgtagctgaggttgcaatagcaggtttatatggttacggagttcttgttgttttaagaagtggaggcacatgtcatcaaatatattatcctcatcaagctagtggggttaataacggcacaatggcaatgcgccagacatggaatatgaatggtacaacggcatcatggacagagtggcgtgtagttggaactcgggacgattcaaagttgccactttcgggcggaactgtcacaggggatttacgggttagtgggattacatatatcagtaaaatccgtagtaatagtgatatttggtttactgatgaagctgaacaatatggccaacgggtattaactggtggtttgttagtatcaagtacctttagtctaagtaatttagttccagtgaatgggatttattcgcaaggtgatattagaactgccggaaagcttgttgcagcccagttagaaggcaatgcagctacagcatcaaagcttgccaccgcgcgaaccgtgagcttttcaggtgcagcaacaggcgcgtttaattatgatggttctagcaattcaacatgtattttgacacttgcgaatagtggggtagttgctggaacgtatgcatcaacgattcagataccatcaattacagttaatgacaaaggccaaatcacaggcatatctcagcaaaatattcgagcagcatcaacaaatcaaagtggtgttgtacaacttgctgatgatttacaaactgatgatgcaaataaggctttaactgcaaaacaggggaaagctttacaagataataaacttgataaaagtgctacggcagtagctgctgataaacttgaaatagaatggacaggttttacatcagatcaagagtttattcatcactatagcaataaatctacggcattttttgacgatggtcagggtaaatttttccctcaatattctgtcgggttagtctcatctctatctactggtgggacttttattattgcaagtgatcccgtgtcaggtaaaacaagggtaatgacttgtgttgaacgcagtgatggaacaatcgaattattgaccaaaaaagagcttgcatatacagattctaatattactggtaatgcagctactgcgacaaagcttcagattgctagaaatattgcattaactggtgcaatttctggagcagctaactttgatggttctggaaatatttcgattaatactacttcaaataatgcgataggcattggtcagacttggcaagatgtaaaagctaatcgatcgttagaaacaacttatttaaattccacaggtcggcccatccagttatgtctcacttttccagacactaatagtgcaacaatggttattgaagcaattgtggatggagttagcatttttaaacacacgtatgatgcggcggggcccaactatggatctggcttctattcttttattgtccctgcgggtagcacatacaaaattagtgcaagtagtgcaatacagccgttatattggagtgaattacgatga

SEQ ID NO: 50410 - DNA, 594 bp, Acinetobacter baumannii
gtggatgataaaacgattggtgattataagaaattaatcaccagtcaacatcgttctaaaacaaagtttgttgcaatggttgaagcagtcaattccccgttagttgactgcttcaattttttgaataacttgcacaaacattacgatgttgactctgcagacgatccttatctggaaactttagcacgttggacgggtaccccgttaattatcccgggtgcagcgcagcttgaatactttggttttattgaccaagagaatgctctgacatttggtgaaacggatgatccagatgttggtggttatttccgtgagtcaggccaatctggcacaggtgggttaattcctaaagggcaatttttgcgaagtctgataaaggcaaaaattcttaagaacaccagcaccgggaacattgatcaaaccaaagaaatcttcaagcttgttctcaatcatgacaaattcaaagttattgataacaaagatatgtcggtaacttttaaatttctgacaagagagtcttattcagaccggattcttgttcaactcttttttccattgcctgcgggtgtttcacttattattgagagcgtgtaa

SEQ ID NO: 50411 - DNA, 1182 bp, Acinetobacter baumannii
atggcacttactacagttgcacccgttattgatgaaagcggaattacagcaccaacttatgaccaagttcttttatatctaaaagataaatacagaagcatttatggtaatgatgtttaccttgaaaatgatagtttagatggacaatttctaggcatcttatcgcttgtgatttctgatgtgaatgctgtgtgcgtaaaaacttataactcatttaatcctaaaactgcgaataccgatgcattaactcgcaatgttaaaatcaatggtattgcacgttcattagcgacctattctactgttgatgtaactattacaggattgtctggcacactgatccgggcgggcattgttgccgataaaaataataataaatggatattaccactcaatatcaccataccaccttcgggattcattacagtttctgcaactgctgaaaaagctggcgcaatattggcatcagcaaataccattaagactattttaacgccaactcgcggctggcaaggtgtgaataatcaaaattcatcatctattggccaagatgctgaaaccaatgcgaagcttagacagcgacaggcactatcagtggcgataccttctcagtcgatgccagagggattaaggggggctattcttgacctgccaaacgttactcgttgcaagtatttcgagaacaaagaaacagtctccgatggaaacggactgccgcctaaatcgttatgtgtgattgtttatggtggcgattctcaagctattggaaacttaatccaaaaatacaaatcaatgggttgtgcgctgcatggcaatacaaacgtgactgttgttaatgtttatggtgacgctgagacaatttcattttatcgaccagatgttgtcaatattacttttaaactgcaaatcacaacatatgaatcatacagtgctgatacagcggactcaatttgtaaactgcttgctgaatatgtcaatgctttggatattggcgacaagattactcaaaacaagttgtatggtgctgctaacttatatggcgcagagcagagccaaacttatgaagtgtcttccattaaaattgtggccaacggtgctgagcatctgggtgactatattttgcctttcggctgtgttgctttttgtgatcctgcgttgatagaaattgaggtgactagtggatga

SEQ ID NO: 50412 - DNA, 357 bp, Acinetobacter baumannii
atgcgttatagaaaacaagatgatatgggtgattacagctttggctctggacttaatgattttcatattgatagtgctgaagctattgctcaagcaattgacacacgtttaaagctatggattggcgagtggtttgctgatacatccgatgggacgggatggtcacaagcaatactaggcaaacaatccaagagtttatatgagctaactttgcgccaacgtgttttagaaacttatggcgttgtaagtattgagtcatttcaaagtttactagactcggatgtacgccgtttaaaggtatcaatgattgtgaatacggtttttggaaaaacaacattaacaggggcgtatgattaa

SEQ ID NO: 50413 - DNA, 711 bp, Acinetobacter baumannii
atggcacttagtcttaatgaactttcacctgatcagctctctattattcaagatgctattcgctctgaattggcaaacctatggacagctttgccctgtgaagtagatagctataatcctgatgaagtaaccgtcaatgtccagccgctcatcaaaattccaattcgcacagaatctggtgatattgaaactgtggaacttccagtcattcaagatgtgccggtaatgtttccatgtgccggtggttttactattactcatccaatcaataaaggtgatgaatgtctggtgtcatttgcagaccgtaatattgatttgtggtggcaatcgggtggtattcaaaacccttttgacatgcgtaaacacgatttgtctgatggttttgcatttttcaagcctcaatctcaagccaaaaagatcagcgatatctcttcggaaaatcttgaaatccgcaatgatgctaatacatgtaagattcaaatcacgccaggtggagaaatacattttattggcacaaagtcggtgtttcaccatcctgtcgagatgcaacagactttgcaagttgctggtgaatcaactatgcaaagtggtatgacggttttgggtaaatctgaattatcaggcggggcaaaaattgacggtattgagtttaaaactcataaacatggcgatgttcaaagtggtggatctgatactggaaatccaaaataa

SEQ ID NO: 50414 - DNA, 996 bp, Acinetobacter baumannii
atgacattacaatgggaacgcaaatgcaaattgacagttcaaattaacaatggtcagcctgatgcattggatttatctgactttaggattgtatttcatgttggtcaggcaacaacatcaacccctaaagccgctgagttctatatttataatatgagcgaatcaacaatgaatcgcttggctggtgtgaataacgagcgtatcgacaccactgtaatcttagagtgtggatatttacttgggccaatggaggtagtatttaaaggtcgagtatttcagtttcgccgcggacgtgataaccctactgatacatggttatgcattcttgcccaatcgggcgacaagctaaaaagcacagctttggtgaatcaatgtataccagcaggtactacaattaatgattctgggaaaatattgattacggaagctaataaacagggtgtggaaagtggtgatcttgttgaattgaggcaacaacaatacccgcgtggccgtgtgttttttggatcacttgagcagaatcttagacaattttatgaagaaaataacatgctgatagacttctcagatgacacattaagcatggtaccagtagcaagttacattcccgtaccagttcaaatactgactgctaaaacaggtatggttggtatgccgcaactcactagtgagggtttaaaagttacatgcttacttaatcctaaaatgaaatggggtgggcgagttcaggttgatatgactaatcttcaaacagagagttttgatatttcctatggagggcaaaaagttgaccaagctcaaaaagatccaagaatggccaccaatgcaggtggcctttttcttatacgctctgttgaacattacggagatacaagaggaaatgactggtacacctacctagtatgcattggcatagatactatggtacctaaatctggaatcacgattgaatcggtcgatgaaaattggcgaccagggggtatcaatggcacttag

SEQ ID NO: 50415 - DNA, 300 bp, Acinetobacter baumannii
atggctttatatgaaataccactaagtactggtaatcagaagtttagcgttcagctcaataagatcagttacaagctacaacttatttatcgtattgatacttggtttttggacattatggatagttctgaaaatgaaattatttcggggctagcaatgaattctggtattgatttacttgaacaacatcaatacttaatcaaaggttcaatgtttgtgatcaataacaataaagatgagttgcaaggattttatgatttgggttcaaaaatccaattgtattggagggatcctgaatga

SEQ ID NO: 50416 - DNA, 630 bp, Acinetobacter baumannii
atggcaatctcaacaattttaaatactgcgcttggaacattggcatcatcaccgctaactgaaaaggtcggatcattattgcttgctggccgtggtcgcacaattatggggttgtttgccgatgtaacaattgaggaaaagcataaagatgaattggtaattacagaccatccaactgaagtaggttcccctatgtctgatcatgcatataaagagcccccagaggtaactataaaagtgggttggtctgaaagtgcaggaaaactcaatggaatggttggtgattcgatcttgtctgaaactactggtcttgtcacaatttatgaaacattgcagcaactgcaagattcaaaagtcttattggtcatttcgactggtaaacgactttatacaaatatgctgatcaagtcactgggttgcacgacagatctacaaactgaaaatgttttaatgattgaaatgacgctaaaaaaagtctttatagtccagtcttctgaaaccattgtgcttttagataatcaggtaaaccctgcagcaaccgcaggtgtctcaaatggcggaacggttcaaccgaagcaagtgaatgaatctgttttaagcaaattagcgacagggatatttggtggatga

SEQ ID NO: 50417 - DNA, 339 bp, Acinetobacter baumannii
atgaaaaaactaatccttcttacatttttgattagcagtggggcttgggctgaattacctcaaccaaaatcctcatgtcaaattccagatctacaagcgagatatgctagattgtttgcagcagggagtttttgcggaaaaagcgaaaattcaacctatgcaaaaaatctaaataccctttatttgcgagatcaggacaagtgcaaagtaagtggagaagaaatagacccatcagaaaatcaagtaaatcaagcattcctagaaatagaaaatttaccagaaagaactaaaaaagacctttgcgcatcaattgactctcaaattaaatcgttaatctaa

SEQ ID NO: 50418 - DNA, 2613 bp, Acinetobacter baumannii
atggcacaagaaggtgtgattcgcaacttcatggttgcattgggttttaagactgacaatacaggtctgggacaaatgcaagatgccatgaaaggcattgaattaaaagctgtggcattaaaaggtgcattatttgccttggctactggtgcggttgttgcagtacgtcaaactgcaagtgagctggataaactttacttctcatctcagcgtattggtgctagtgcgaccaatattactgcttttggaaatgccataactcaaatgggtggtaatgctgaaagtgcaattggtacgcttgaatccttagctgagaaggtgcgtaattcccctggttatgagggaatgctcaatagcttaggtgtggataccaaacaggctaatggtgacatgcgtgaccgcgtagaagtcatgaaggacttaagcgttgtgcttgcacaaatgccagcatatcaagcgaatgcttacgctcaatcattgggtatagatcaaaatacattgcttgcaatgcgtgatggtaaatttctctcaaatatggagaaataccagaagattcaagagcaactcggcatgaatgacgacttgactaaatcaggtaatgaattcatgactgaatatcgtgatctgacaatgatgaccaaaacaggttttcaagtggtagtgatgcaggctggtaaagctcttattccaatactacggttactcaatcagttgctccaatcaggaattcaagcatttagccaactgaatcctgaaataaaaaacatgttgggaatcggtctaagattcaccttggttgctttagcctttagcggaatgatcagggtctttggcttgttggggaaatttcttcctactattaagaatctgatctggctgctaaaagctctacgtttagcatttctttcatcaccgttaggcatgatcctggctttaggaacagcattagcacttctctatgatgactacaagacgtggagagaaggcggtaagtctttaattgattggtctaagtggtctgaagatatagataaagggttggcaattcttggttctatatacgattgggtgtcatcacttgtcagcaaggtgattaatgaatttgggcggctagaccctgcaatacaagcaatcattggttcaatcagtggattggctatcattggtgttttaattgccaagcatggttttggtattaaatatttcaccatggccagaaaatcagctttgggtttggcaaaggtattacgcgctttatttaaagtatttgcactcacccctattggccgggccattgctttaattggtctactcactactgctatcggatggttgatcaaagactttaataagtggaaaagcggagctgattcatttttaccatgggctaagtggtcaaaaagtattgatcgtattatggataaaattcgcagtttccttaacttacttggtgatgttaaagacaaggtggtcaactttgttcaaaaaatcatttcagatccagttgaggccgtaaatgaagttgtagattcggcaaaagatactttaaaaacaaaagatagtggggagccaagtcagccagttaaaacgataaatgaagtcagtaaaaacattgttgatggtgttaataatattgttggtaaggttcttgatgttggcacaaccactgttaccgcactggctgagagtgttagagctattacccaaaaaggtgttgaagccgtggtgaatgttggtaagtcggttgatcagacagtgagggagagttttgctgttggtagacctcaaattggaaaagacaaaaatagcaacagacttgctgtttataatgcatttatcaatgcgggtttttccaaaaatcaagccttagccttgacagcagaggttgggcgagaaaatgagtacaatctaaatacaatgtttggcacgcatactgatttaggtaacgctaaaactaatcttggtttttttagctggcaaggtgcacgaaaaaaagaacttgttaaatttttgaaagacaaagggcagatagatagcaaaggtgaaattaagcgagagcaaaaatcattaaatgcgatggcggaatttgcaaagcatgaaattgaaaccaagaaaacctatagtaaaaccaaaaacaagtttttatccaataaaggcatagatcctgaaaaggcagcaccaatattgggtaaaaattatattgtttgggcttatggtcaggattatgtgaataagggcaagacaaagtttgattggagggcacatgatcagcgaagacgtaaaaatctgaatgctattaaaaaacaagtcggtaattatgatggtaaggtgcaaacaccaaaaacatcagatgctttggctaaatttgcgcaaaatgctaaagtgccaacaatcaataatgtaactccatcagttggcaatcctgataaatcacaagtcaataatgttaactctaaggcatcaaattctaatgtcacaattcatcaagaattcaaaacggatatgacgattaatggtgctagagatccagttgaatctgccaacgccgtcaagcgtcagcaggaaaattcaatggtaattatggctaggaatgctaaaggtttggtagcttag

SEQ ID NO: 50419 - DNA, 153 bp, Acinetobacter baumannii
atgcggccagtcattaaaggcatgtgtaagtttgaatctttgaaaaatggaaagatcgatcttgctgatattgcattgatgaatgatgctttagatgtcgttgctgataatgagtatctgatcaatgaagatcgagaacgcaaatcaaagtag

SEQ ID NO: 50420 - DNA, 486 bp, Acinetobacter baumannii
atgaatgagatcatcaatattggtgagcatgcatacacgatcggacgcttaaatgcgctcgatcagtttcatgtatcacgaaaaatcgccccaattatcccaaccctgatgccaatcataaccgaagttgctaaaggtgattttgcaaaggtaattgaatctatcgaagctgttgacggtaaagatgatgaagctgttgacggtaaagatttgaccgggctgcaaccccttgctgaagcattagaaccattcatggaagcatttgcaaagatgcctgaggatgatgtgaattacattattcacaagtgcctatcggttgttaagcgtggatctgcaattgtatgccgtgggcaatcaatcatgtttgatgatttggacatggcgcaaatcttaccgcttgtcatcgctgtgattcgagtcagtatggcaaattttattcaaggactgcttacgaaggcatcgagcattcagacacagtccacataa

SEQ ID NO: 50421 - DNA, 444 bp, Acinetobacter baumannii
atgtctacttatagctttatggacacccaatgttcctttactagtgatgatggtgtcattgatcttggttatggtgcaggtgtcgctgacgaaggtattactttcgctatggcaggcgataaaaacacaatgacaattggcgctgatggtgaggggatgcattcattgcatgctgacaactcaggtcaagtcactattcgtttgctaaagacatcaccatcaaatgccaaactcatgaacatttacaatgcccaaaaaggtaatacacgtaaatggggcaaaaataccatcactctaaaccacactggatctggtgataaccacacagcatccaaatgtgcatttaaaaaagttcctgactataccaatgccaaagatggttcgctagttgagtgggtatttgattcaatcaaactcgatatgaagcttggcacatacgaataa

SEQ ID NO: 50422 - DNA, 1122 bp, Acinetobacter baumannii
atgaccttacctgtttctaatgtcgtaaatgtcagcattagtcttgctgcattagcggcagggccacgttcgtttggctctctactgattttaggctcaactagtggtgtcattgataccattgaacgtatgcgagagttctctagcattgaagaggttggtaaaaattatggtgttgatgatccagaatataaagcagcattggcatattttggacaatcgccaaagccacgcactttatatattggttattggcacaaagatggtcaaacaccagaaacaattcaagaagcagttacagcgtgtttggattcgctcaaatggtatggattggtgatcgcatcagatttaaccgatgaacaagttttatcagttgcagcattaatcgaagcctctgatccagttcgcctttttggtcatacaactcagattgaagatgcaactaaatcaaccagtgcaactgatattgcttataagctctcaaatgcaaaataccgccgtacattatgcatattctcaagccataacgcttatgcagccgcatcagtatttggtcgtgcatttagcgtgaatttcaacggtacaaacaccacgatcacgttgaagtttaaacaattacccggcattacacctgaagatttaaaaatttcagaagctaatgcgctcactgcaaagcactgtaatgtttttgcttcatatgataatgacaccgctattttacaagaaggtgtgatgtgtgatggcacattcattgatgaaatccacggattggattggtttcaaaatcatttagaaaattcactttggaatctttattacaccagtaccaccaaaattccccagactccagcgggtgtaaatcgccagtgtggagtgcttgagcgtgcatgtgaacaaggtatgaacaatggcttgctcggggagggtcaatggaatggtgacagctttggagctttgagcactggcgactatctaccaaaaggcttttatgtctatgccaatagtttagatgatcaagctcaatcagagcgtgaagcacgtaaagcgccagtttttcaaattgcagctaaattagcaggtgcggtgcactttgctgatgttgttgtctcagtaaatcgctaa

SEQ ID NO: 50423 - DNA, 537 bp, Acinetobacter baumannii
atgggtgattctgcttcagggggatatatcccccctagtggcggatctgcttatgaccaagacctagaggacatctttcaagccttcattgtcggtattacttctttaccaggtgcaatggttcggccacgttttcagcgtgttccaccaccattccccgaaattggtgaggattggtgcgccttcgccgtacagtcaataatttctgatgatgggccttatttcgaccaaaaagacgaaacaatggattcaattcgacatgaagaattgacgctgtttttatcgttttatggcgaccacgggcaatcgattgcaaacgtccttaaggatggtctaggcattccgcaaaacatcgagcaacttaaagcgcaaaaaatcaaattcgttggatgtagtgagatcatcactgcccctgattttctaaacaaacaatatgtgcatcgttatgacttggttgcgtcatttagacgtaaaaccaaacggacgtatgcagtaaaaactttcaaaagttaccaaatcgatattcataataaatag

SEQ ID NO: 50424 - DNA, 258 bp, Acinetobacter baumannii
atgcaaaatgaacttaagtacaattattttttagtttctgcaattttcaaaggtatggctactggtgatgtaattcagcatgtcagtgttacgcatcgattgactaagaaaaacattaataaaagtttgatgaaggaattagagtcttcagtggaagaatttattaaatctcaagttcataacgttgaaatttctgatttgactattacttcgatttcatttttaggtgaaatgaccgaagctgaatataattcataa

SEQ ID NO: 50425 - DNA, 507 bp, Acinetobacter baumannii
atggcgaagcttaaaaaagccgagcaactctttatagttcggtctcttgcgcagttcatgacacctactgaagttgttaaggctatcaaggaaactttcaacatcactgtttcacctcagcaagttgaagcttatgacccgactaaggtggcagggcgcgacttaagaaaggagtacaaggaagtattcgagtctacaagagaggaatatctcaaacagccgattcacaacataagtggggcaaatgacattgttcagttaaaaatcttgagcgacttactttttgccaaaaaaaataacgtgaccatgacaattaagatcgtggaccaaatgcaaaagatcatgaaagggttttacgagaagcgactcgaaattactggagctggtggcggaccactcaaaacagaaaatactcagactccatcgcctccagctttaacacctgatgacttagctaaactcacaccgcaagaattatcgcgcttagtgattaatggaaagctatga

SEQ ID NO: 50426 - DNA, 642 bp, Acinetobacter baumannii
atggatcagatcagaccatttcctccaactgattttatggatcaggccgaagaagaggaagcactccgtttaatacctgcacctgatttaaaactatgggtagttgctaattttcttacgctgggtggacctttacataatccagatcacgaccatatcgctgagatgcttcatgacaatgagggtttcttggctttcgcatgggcttcttctgcttataccagagctaagcgtatggtgcttggccaatgtgaaaaagtcatgttcaatgttggtggctggaagaaagcccgacaagagcagcaaatgcgcgactggttcggattcgttccagtttacttaatcacaatcgatgcaagcttttgtgaaaaggcaaacgatagcgagttctgtgctttgcttgaacatgagctttatcacattggtgtagaacgagactcggacggtgagatcctttatagcgataatacggggctacctaaacattatttagctggtcatgacgttgaagagtttattggcgtagttaaacgttatggaccaagcaaaaatgttaagcgacttattgaagtggcgaagcaagcgccgtttgtatctgatgtaaatatttccaagtgctgtggaacttgcctaattaactga

SEQ ID NO: 50427 - DNA, 4005 bp, Acinetobacter baumannii
ttgctggacattgctaacggtacattgaccggccttgtagacaacggcgatggcagcttcagcggtacgctggtaccggctgcggactttgaaggcgatgtggttgtgaacgtaccggcaggtattgttacggacgtggcaggtaatgccaacctgactgcaacagagagccttacggtcgatacattggcgccgacacttgtaatcagcgcaactgatacgaatctatccttgggtgaatcgacaacaatcagctttacgtttagcgaggcggtcagtggctttgatattgatgacatcacgcccgtaggcggtacgctgagcaatctggtccaaagtacaaccaacccgaatgtctggacagctacgtttactcaagacggtactctaactgcaccaagcatcagtgttgcagatgatgcctacacggaccttgcaggtaacttgggtaaaggcgatgtattcgatggtacggacggctttgtggttaataccattgatgctattaatgataatgtaacgtttgatccaggtacgtttgtaagtactatttgggacgcaccaataatagctcaagatattaatgttcttgatacctctattattggtgatacttcaatgaatgttgagttttctgtccctagaaatagcgcagatattggtacaggtcatgaaggtgatgttgttattcaagtaagccaagacaatttgatagcagttgcttccgggtttagtgtattagtcgaatattttgatggggctaattgggtacaatacaccacggctacaactacaaatggaggtttaattgctgatgcgcttggtttaggggttttaggtattgtagatgatggcaaaacaatagctgtgcatctaacaggtgtaccagaaggtcaatatcgtgttgtagtgcagaacgatagtagtgctattggtgatttattagatgatttaacattagcacaactaggtgaccaaggtattttattaggagctgacaatcaggatgctgtattagatgcggtagaaactgccttaaatggtcaagtattaaatttaggaactctagtaagaaatgttttagaaccactgttaaatattgctaatgctgctggtgaaacattagctgtgactgatattgtcgcagcaattgtgaaaataccattagttggtagtcttttaggtggtgttgatactgttttagattatattgcagacgcattggttgataatttacttagtgtacttgagtttaccaatgtaaccatcaatggttcagaaacttattacactacaccacaagtatcaggtaatgtttttgatgacaatggatctggagcagatgatcgtggtaatagtgatgcagcacttgtgaccaaagtagatggagttgatgtccctactgatggtacagatgccgtgattaaaggtttgtatggtaccttgtatattaataaagatggtgtttatcgttatgtgctgaatggtagtgtagattctaatggtcaggtagatgattttacttacactttatcagacggtactcactcagatacagccgttttaactataagtgtggcagatgttattgcaccaaaagcaccaattgtttcttcattggatgaaaccaccgttactggtgttgctggagctgcggaagctaatagtgttattaatgtctatggtggtacagacagtgatggcgatggtattccggatacattacttggtacaactacagctaatcctgatggtagttatacagtcacgttgaaccctgcaatcgctttaggggacacagtggttgttacttcaaaagatgcggctggcaatatttctacaccaacaattgcaagtctgcataatattgtcgcgcttgatgatcctaaccaaactaactatgagttatctactacagcagatcgtccaaatattagtggtggtatttttactttagctaatgctggtgttcttggagatttaattgatttagatctgagtgctacatccgctcctggtgtgactgtcggtacaaatgaacaaatcactttaacattaacggcaagtgggtctactggtttagatataagtgcagttgggaatttaattgatgctattttaggtggaaatattggtggtagtcttgatttgattattgctaaacaaacatcaacaggtagctatgaagtttataatactattgctaatgcatatacgttaaacaataatgttttaacttttaccgcgtctggttcgcaatccatatctttggatgatgctggtgtctataaatttattcttgctccaaattcctcaacctcgagtgctttaagtaacttattatctctgaacttattaggtaatttaatattatcgtctaacgatgtagtagcaaccattaacaatacagatcttattactggtaatgttttatctaatgatactgctgcaccgataggtttagatttgtcaattgtttccattaaagaaactacagcaggtgtagatgaaactgtagtgtctggtactcctaaagtcattgaagggatgtatggtactttaactatagattcaactggtgcatatagttatcaaatgacggctaatgcaactgccttaggtaaggttgaagcatttacttataccgtacaagataatgatggtcattcaaaacaggcaactatttatattcgtttggactctaatttagttacattagattggacgggtaaaacaggactagaagaagctaataagttagtaacgcaactgaccgctgataataaggcttccgcaggtacagttactactttattcgatcaggtattaaatggttctggtgattcttcaaatagtattcaggtaactggaagtaacggtgtattacctacttcacctcctgagacaggtagtacggcaataccagatgattctgggcgttttaccctaggtgcagggcaaacagcatatatttctttcacatcaatattaccatcaaatgtgactcaagactttggcttcttaggaggaggaaaccaaaccagtgcttataatgtggttattgaattagagagagatggaggaacactagcattcgatactcaattggccacttggacatcaaccaccagtggtacgaagtattattataaagtgactaatacaggaaattcgtcggctaactatgatctaaatattggttatggtgatggttcaatagcgtataactggacgaatactactggtaagacatttggtattaataatattcaattagatattaaagatacaacatatacagcatcttctgtatcaggtgacctaatttctaatgatatattatattcaagtgtctttaaaattggtgttgcggctggatcgactacgcctagcaattatttggatgcaaattcaacaccaatagtaggagcgtatggaactttaactgttaatttagatggaacctatagttatcaagctaatggtaaaattgctgaccttggtaaagatgatgtctttacatataaaattgagacattggatggtactgtaaacacacaaactttaacaattaaagtagatgctgataatgttctgattggtacgccagatgctggtacaacagggaacgatatcgctgttagtcaatccgcaaatgaagtcttcacattaggtgatggcgctgatttgttaatttacaatgtacttaacggttcaagcccaacaggtgggaatggaactgatcagtggttagattttaatatgtctgaaggcgataaaatcgatgtttcatctttattatcaggcgctaccacagataatattaataattatcttagtgtgagtattagtgggaatcaggttactttattggttgaccgagatggtagtagtgggggtatttcaactcctaccgcattgttaactttaactaatgaagaccacgcaacaaatcctattactagtttagtagatttgttaaataataattcaattatctattaa

SEQ ID NO: 50428 - DNA, 579 bp, Acinetobacter baumannii
atgccaaatttagttctcccaacacgtgccttatacgttgtaaataaagcaattgatctgtttcatcaccgtggatttcaccttattggcgtcgacagaatagtgaaagaatcagagattacaaaagcgactttttataattattttcactctaaagaacgacttattgaaatttgcctgatggtgcaaaaagaaaagctccaagacaaagtggttgcaatggtggagtacgaccatgacacaagcacaatcgataaacttacgactctttatgaattacataccaacttagaagggcagtattacttattatttaaggccatttttgaaactaaaaacagctatccaaacgcctatcaaaccgcggtaaggtatagaacatggctgaccaatgaaatttatagccaacttagattactcaaagctgatgtctcttttactgatgccagactgtttttatatatgattgatggtgcaattcttcagcttttaatgtcagaacaggctgatgaaaatgagagattattaatgcgctttttaaggcagtttattgtgaatagtgtatttcaatattcttaa

SEQ ID NO: 50429 - DNA, 1254 bp, Acinetobacter baumannii
atggctggtttgaaagtttttgtttcttctacttgttatgatttatcattggtaagaactcaattgagaacttttatacaaaatctaggccatgacccaattatgagtgattataatgattttctttatgatcaccgaaatcatactcatacaagctgtatcaatgaagtacagggagtagatatggttattgtcttagtaggttcaagatatggaggagatgcagtaaaagaaacttttgacaatataaactttgaaaagttaatgagtgatagttttgagtttgatgacctcataaataaatgttcagttactcaagctgaagtttttaaggctagtgaattaaatattcctatattcgcttttattgatcaaaatgtatggcatgatcacgaactatattcaaaaaataagcaaaacgtcgctattattaatcagattcacttcccatctattgaaaagcaagaaaccgcaaaatatatatttgaatttatagattttttacgtaaaaaatcaaccaataatgcaatttttacttttacaaaaattcaagatattgaagaaacattgaaaaaacaatgggctagtcttttccaaaaattgcttaaagaagataaagaacgaagtgctcaagtgaaacgtattgatgatttaacagaaaaatttgaagaactacgaacctctcttgttaatacattaatgaatgatcaacaaagagccatggcagatgctattgttcgttataaagatctagttaattttatacaagcttttgcaaaaaaaaatgttgatgaattaatacaacctgatttacctaattggcctcaactattagagagcattggtatacaagaaactttaaaaattgaagggaagaaatcttataactattcacaagaagaattgaatatagttttacctatactagaagctgcaaataatcaaggcataaggccttcatcaataatttttttaaatgctaataaaaatggatttttcctacttttagaatctttggaatattatgaaaaagttatagataattatgaacaatttaaaactgaagatgaaaatttacgtaaaaaagtagtaaaagctattactgaaatagactttaataaaccagtagtaaaatttcagcctttaaagaataatattggctatacaactattgttcctcaagattcttcttcaaatatttctaaatcactcttgaatgacatactttctcatcatgatgataaagaagaataa

SEQ ID NO: 50430 - DNA, 1017 bp, Acinetobacter baumannii
atgtctaatatagaaaatctaaagaaagatataattcatttaacagaagaattacgcacgagaattagctttaatgaagtgaagaatcaatttactaaattaaatttcccaagtgctacaggttgggataaattaattttaaattttgaaagttttacagtcgataacatagaaaatatgttagaagatttaaaattaaatttaggtaagattttaagatcatatcttctatataaagataagtctgtttcaatttatacaaattatcaagaattagatactttgtatgcaaatttagataaaagttcgacggataacttagaagagcttaattttgaaagtcacaatataatgggagatttagaattttttatttataaaactacaagaactttttttgaaaaagtagctgttgatattaatctttttgatgatcaagatgaaagtatacaacaaatttatgctattaaaagtgtattgcgtgaatgttatgattctattatttttaataaaaagaaaggatatattattttatctttagatagagcagaaatatccaattcagcaattttaaataaagctcatgccaagttagttagaaaaataaataatagtgtaagagggatatcctctacagcccgccttaaagaaagtggtgataatcttttcccttcaattgaaagattttatcaagatcaatcaggagaggttacaagtatttcttttttaactttagcaggtacaagtcataatgaacgcttacataaaacatgcccagatgtaagaaaagctgtttatcatatagctggttcagctgctacacctatagaaccatatcgtataagtattcgttatgacttagataatcagcaaccagagattttcttattaggctcatttagggctatgaatagtagagctgctaggcagttatttgaggcacagattcaaggggctactaaccgtcagagttttgaattttgtatagataaaataattgggtttattaaaaggtaa

SEQ ID NO: 50431 - DNA, 429 bp, Acinetobacter baumannii
atgaataatgccatagataagtatgttaaaagaatttgtgaatatttacatgaatatccaaatgatatttctatggcttgtattaatattattagtaaaatttatgagcatgatgttaataatatttatcatttgagttttggtagattatatgagtggtccggtatagaaaatcatgagaaatttaatatagctttatatatccttgttgattcaagaatcaatattctagagcaacactttgaagcttttaatgagataaaaaatagatttgaaggggttgatgatgattttatacatgaagtcttaactacaaaagactatgtacatccatttacttttgaaacaatttctgaggtagaattcaataaattgattaatattttttttactcctactaaagaatttcgggagaatttaagtgagtga

SEQ ID NO: 50432 - DNA, 654 bp, Acinetobacter baumannii
gtgagtgatcaaggattgaaagttttagaagctttatggacattagatgatcccaagttaaaaaaattagtaaggattagtactgcgaacacctatgagaaatttgtggattgtatttatgatgagatagatgaatgttatagtttcttatgtagaaataaaaatttatataaagatttttctgaagatcagttaacaggaattattgttgatcgtttaaaagaatattttattgctcatcatgatgcaaatgtaaatggacatgtagacttctctgtagagaaaaataattttctgtggttgggggaagcaaaaatttataaagggccagcatatatgttagagggtttttatcaattaaatactcgatatgcaacaggtgaaagaaatgctagttatggaggagttctgttatacaaaaaaattaaaaaaaaggttactttgattatggatgaatggaaagatgtacttaagaaacaatcagagattgatccagagaatttaacaaatttagacttttctatatgtaataaaaataatctatgtctcttttcaacgcatgaacattcaagtgttggaactgtattcaaagtaagacatatgcctttagatttatatttggaacctcaagatggagataaagttccgaaatag

SEQ ID NO: 50433 - DNA, 486 bp, Acinetobacter baumannii
atgaatgcacaaaaaggttttacgttaattgaactcatgatcgtggttgccattatcggtatcttggcagcaattgcgattccgcaatatcaaaattatgtgggtcgctctaatgtagcagcagctgtccaaacacttacatcaaataaatctggtttagaaagttatgtaatggaatttggtgaattccctgacggtactacggctccagctgcaggagatccaacagcgaacccaccagtagctgctactcgaggtgagcgaccacaggatttaggtattgttaatacaacattaggaagtattgctttaggtgataaaaacaatggagctggcattatcactttaacatttgcgacaggcaatcctggtattaaaggcaaaaaggttcagttagctcgtgatgcaaatggaacttggacatgtgtaactgatgttgatgagaaatttgcagccaaagcttgtccagtaggaacaccacaataa

SEQ ID NO: 50434 - DNA, 1734 bp, Acinetobacter baumannii
atggaaactaaatatcttgagtttgatattgtggtgattggtggtggaactgcagggccaatggctgcgattaaagccaagcaagaaaacccgaatttaaaagtcttgctcattgaaaaagcgaatgtaaagcgcagtggggcgatttcaatgggaatggatgggctgaataatgctgtcattccgggctatgcaacacctgagcaatacaccaaagaaattaccattgctaatgatggggtagttaaccaaaccactgtatatgcatatgcaaagcatagttttacaaccattcaacaactcgatcaatggggtattaagtttgaaaaagatgagacaggcgaatttgcagtaaaaaaagtacatcacatgggtgcatatgttttaccaatgcccgaaggtcatgatgttaaaaaagttttatatcgtcagttaaagcgtgctcaagtcaaaattaataatcgcattgtcaccacaaagcttttaaaaaatgaacaaggtgcaatcaatggtgtactcggttttgattgtcgtagtggtgacttttatgtcattaaaacgaaagctgccattttatgttgtggtgccgcagggcgtttaggtttgccagcttccggctatttaatgggcacttatgaaaacccaaccaatgcaggtgacggctatgcaatggcataccatgcaggtgctgagcttgctaacttagaatgcttccagattaatccattgattaaagactataacggtccggcttgtgcctatgtgactggtcctttaggaggttataccgctaacagtaaaggtgaacgtttcattgaatgtgactactggagtggtcaaatgatgtgggagttttaccaagaactggaaagtggtaatggtcctgtttatttaaaagtagatcatctggccgaagaaaccattcaaaccatcgaagaaatcttgcataccaatgagcgcccaagccgtggacgttttcatgagggccgaggaaccaattaccgtcaagatatggtggaaatgcatatttcagaaattggtttctgtagcgggcacagcgcttctggcgtatgggtcaatgaaaaagctgagacttcagttaaaggattatacagtgctggcgatatggcggctgtacctcataactatatgcttggtgcatttacctacggatggtttgcgggtgtaaatgccgcgcaatatgtgaatgcaattgaagatagcgaattaaaccaaagtgaaatagaagcagaaaaagctcgaatatttgcgccactggattgctcagaaggtttacctccagaacaagtggaatataagctgcgccgttttgtaaatgactatttgcaaccgcctaaaactcgccaaaaaatggaaattgggctcaagcgctttgaagaaatcaaacaagatattaagagaatttcagcaagaaaccctcatgagctgatgcgtgccgctgaagtttcttttattcgagactgtgctgaaatggcagcaagagcttcattgtttagagaagaaagtcgctggggactgtaccactatagagctgatttccctcaaaaaaataactcggattggttctgtcacacgcatttgaaaaaagatgaatacgggaacatggtcagtttcaaaaagccaatcgagccttatgtggttccgattaatcaagatgaagctgtgtcgtatgaccgtttacgcattcaaaaagatgttgctctagcagactaa

SEQ ID NO: 50435 - DNA, 1071 bp, Acinetobacter baumannii
atgagacaaaataaattgatcaataaaaaactattactcagtagcttaattggtgccatggtactcggcactttggggtgcggcagtaaaacagaaactgtgcgtgtcgccattggtacacaagacacgaccattaactgtgcaacaggtgggttgctgattcgtgaattgaatttattaccaaaatatttacccaaagatggtgaatacaagaatgttaaatatgacattcaatggaaaaattttacctctggtgcaccacttaccagtgagatggtggctggacgtctagatttgggagcaatggcagactttcctgctgttaataatttagcagcatttaaaaaagctgggaaagaaagcatatttttagcccctttgtcaggcagtattaatggtagtgggaatgcgattgttgttccaattgactcaaaagtaacatcactcaaagaactaaaaggacaaaccatttccgtaccttttgcttcaactgctcatggacttttgctacgagcaattcaggcagaaggctggcaacttgataaagatattaaagtgattgctcaggcgccagaagtggcgggacctgcattaaaaagtcataagattgctgcacatgctgacttcgtaccattcggagagttatttgcttaccaaggttttgctaaaaaaatctatgatggttcacaagcaaaatcacctacatttcatggatcacttgcgagcaaggattatgcacagcagcatccagaagttataaaagcctatttacaagcaactattgaagcgaatcgtctaattcaggaacagccagaaaaatatagtgaacttattgctgaaaaaacaggtattcctgccgaagttgtttatctatttcatggccctttaggtctgcaaactcgtgacttaacgtggaaacctgaatatcgaaaagcgactcaaattgcgatagataccttaaaagttttaggaaaaaacgacggtacgcttgatgtaaataaatttattgatgaccaatatattaaggacgcatttcaagcatctggacttttacagccagcaattggctga

SEQ ID NO: 50436 - DNA, 795 bp, Acinetobacter baumannii
atgtcattactgcaactatgggaagatgtaaaacaaaatgaatggattgatatacctgcaggatggttacagggccgcaccgtttttggtggccttgttgctgggttattaatgcaaaaggcatgctcctatattcaagattcaaataaaagattattaagttgtagtgttacttttgtaggccctgtacaacaaggcgctgcccgattgactattgaagttttaagagaaggaaagtcagtcactacgcttgaagcgcgtttatggcaagatgatgcggtacaaacgattttggttgcaagttttggggcttctcgtgcatcgagtattgaggtaaagcaagagccagtcgtccctgcttatgtaccacctgaaaatttatctgtcattccttttgcgaaacatatgcctgaatgctttcagcattttgaagtctgttgggctgaggggaattatccggtaacgggaagtaaacaccccgactttggtggctggtcaaggttctcaccagagcagcatgcgaatcgtcaaatgacattatctgatttgattgttcttatggatatttggccaccgggtgttttgcctatgtttaagcaagttgcacctgcaagttctttatcatggcatattacttatgttcatccggttcggcaccagttgtgtgactggtttaaatataaagtaactactgaatatgcagctgaggggtactccacagaatatgcatatctttgggatcaaaatgatcatttaattgcaatcttgcggcaaactgttacggtatttacctaa

SEQ ID NO: 50437 - DNA, 1044 bp, Acinetobacter baumannii
atgaatacggtgatgaaacaagctttagtaataactacattcactgcagcagtgatattgactggatgtggtaaatctaagccagagccaaaatcaaaaacagaaaaagtcgaggcaatttcggattggagctgtacataccctgataatttaaatcagattcaaacctctttgaaaaaagaatatttgaaacaaatcgaacgtagtttaaggcaaagtcaatatcaggttgatacggatattcttaataaaattaatcaaggtttgaagtttgaaattaaaaatgttcgcactttaccgttagaagatgaaagccaaaaaaatacacaactcagctgtgaaagccaattggttgtttcatttcctaaaggtttacaaaaacgtgcggaaaaagcatatattgaagagttgcgtcattctgataaagaatcggatacgctcaatgactatttttcggataatgaatcctctttgacccttgaaaatgatcaattgaaaggtgactttttctataacattacaaaaacagataaagaaggtttggtgtttgacttgccaactcaaaatagtgtgattgaaggattggtttttgttgccactaaagctgtgcaatatgcagcttatgttaaagaaaatgagttgattgaagaaaatattgaagaaaatctgcaaatatctgagcaaaataatgaagagcagactgctctggctcaggaagccatggatgttcgtaaaaaagaattggatgctgacaaagcgaagcaagtggaacgcttaaatctgacttgggataaattgagtgccgataaaaaaactcaatttaaacaagatcaatcggattggtttaaaaaacgtgatgttgaatgtaaggtgctggcacaaaagactgtagatgaaattcctgaaaaagacttagaaacttaccaaaagcaatccgattattggaccgctgagatgcgtaagcaaaatcaggaaatgcaatatacacaatgctttattcaaaaaactgcagagcgaacagtttatttaaataatttaaactaa

SEQ ID NO: 50438 - DNA, 783 bp, Acinetobacter baumannii
atgagtcaatttgaaaaattaacaaagcagccgcttgttatggttttggcagaattccgtttttcaacaattctccaaattgggaattatgttccattatttcaagatttagtaagacaacactttcctcatttttcaactataaaccaacaggaaattgtggtggatccacaaggtttaaagatcaaccaaaatgatgcttggttatttcagtctgccgataaaaaaagtgcatatctcttagataaggacagaattacttttttaacagctgaatataaccgtttcccagattttttaagtcactgtcaaactgcaataaaatttgtagaggatgttattagacctgcacttattttaagaattggtttaagatattctgatgttatattgccaacttatcctgaggaaaagattgaaaattatgttcaggaggctatttgcaatacaagtattggaaaagtttttggtgatcagcttagacatgtgaatgagtctatacttagaactgaaaatgggatactggttgttagaactctttatggggaacttaatgcaactgtgtggcaggatcttatcgatgttccaatttctataaagaaagtgatgacaccgagtaagcgaattcttcttgattttgatcattattggtcaccagaagaaggagaatctcaatctttttatatcgacttcattataaataagataacgggcttacatgaaaattcgcgaaaagccttttgggaaattacaactaataatggtagggaggtttggaaatga

SEQ ID NO: 50439 - DNA, 546 bp, Acinetobacter baumannii
atgatggacataagctcttttgcattagctacagctataagcattaatacggcaagttattgttcaagttctgcaagttttatttctacttgtggtgaacctttcgataaatttgctactggtagttttggcggtatctctaaatggctgggtgaggaaactgctagcggtcaaaaaataaatatcattaataatcgtgaaaatattttggagaaaaatgttgaatttataaagaatattttttcattaaataatgatgaactagctgctgcgttaggagttacaagaaaaactttattaagctggagaaaagaagattcttcacctaagaaagctcaatctttaaaattatttaatttgtatgttttagctaagaactggaaagataataactattcaacgcacaaaagtgacttggatttaccagttcttaatggaaaaagtatcaaatcaatgattgctgaagatagtcttgatgtggataaaatattatttgctgggaatagactgtcccataatattttagtagaagacgatttattctag

SEQ ID NO: 50440 - DNA, 813 bp, Acinetobacter baumannii
gtgcgtcattggatggaagatttgggttggagacaagggggtatagttaatcagcaagatgtgcagactatactctcatgctctaatatttcttactcagaagaaatcattctaattgttgcatctggttcttgtgatgtggctaacctaaatgatccatgtatagaattttcaatagcaaaaaaaattgaaagttataatagtacttttggatttaataaaaatccaagaagattaaatttgaaattagaagttttattgtctgagaaggaaataatttttgaggcagttgaacttcttggtcatgaaaaaattcaaataaaaaagactgaaattcccgaaggaattgtaccagatccaactaggatactttcagcagaagaattaagatattatgtagattggttagctgggagatataaacgtccagcttttccaacaacttttgatcgtcgacttgatactgtttggttaaagaaaaaaagattaaaagctgctgataaggttaatgagctagttcttggtatttatgcaaaagtttatcctgaaacagaattacaagagcatgaaaattatgctgtaaacatgtttgtaatggttaagccagatctatctgcagaacagaaattaagtgttcaatctctcattaactcttataaagaagcttttaccgaagctaatatggatttagatgccaatattcctatgattactgaggataaaatttcggtccaacgtttcaaagagtatcaacgatttaatatggatgaactttcttataaaagcgatggtccataccccacagatatataa

SEQ ID NO: 50441 - DNA, 297 bp, Acinetobacter baumannii
atgggaaaatatatagtcgttgttgaagcagaaaaaccacctcagattttcattcatgaaataattcctaatgtagggaaagtcattgaaatgaaagctgaggaaataccgaaccgtgttactgcagcatggttaatggatcgctatagcctgtcccgtaaattgattattgatgagcttcgtccattcaataaaggaactgatggcaagcatctatacgatccaaatgaagttattcctatccttgaaaacttgaatattcaaaggcagcaacggcaatcgagacggaagaattaa

SEQ ID NO: 50442 - DNA, 330 bp, Acinetobacter baumannii
atgaatgctcaattcaaaccacatcctgatggcataaaagcctatatcggtcatgaccgcttaacaggtctctactctgtacgtatcggctggactgtttatgcagctaatgcaaacggtagtgtgctgtacacggtaaaaggtgaagtgaagactcccttaaatgtcgaagaatttaaggcaaagcgccctaaggtttatgcatccttaatgaatgagattaaatttcagcgctcaaagcaacttgctaaggatttagctggctcacacatcccttcatatgaccgcaaagcttataagaagaagcgcggctttacgggtttaaaataa

SEQ ID NO: 50443 - DNA, 189 bp, Acinetobacter baumannii
atgaaacaaaaccctattcctagtcaaaccacatcacgcctatatcaacacccaactgttgaagaacagcgcccttctcgtttcgcgaccattaaagcgaatgtcatcgacttccttatattcattgccctttcattcatcctttgggtaattgctgtagccgcagcatcttggatgatgggaggctaa

SEQ ID NO: 50444 - DNA, 555 bp, Acinetobacter baumannii
atgccaaatttagttctcccaacacgtgccttatacgttgtaaataaagcgattgatctgtttcatcaccgtgggttccaccttattgggatcgacagaatagtgaaagaatcagaaattacgaaagccactttttataattactttcactccaaagagcgacttattgaaatctgcctgatggtgcaaaaagaaaagctccaagaacaagtggtcgcaatggtcgagtatgacttaaacactgccgcaatagataaactcaaaaagctttattatttacataccgatttagaagggccgtattacttattatttaaagctatttttgagattaaaaatagttatcccaacgcctatcagaccgcaatgcgctatagaacatggctcaaaaatgaaatttacagtcagcttagaatgctaaatgcggatgcttcttttaatgatgccaagctatttgtatatatggtggagggcacaatcattcagcaactcggtaacaaccaagtggatgaaaaggataaactattagattattttatatcgaagttttcttag

SEQ ID NO: 50445 - DNA, 1611 bp, Acinetobacter baumannii
gtgaatcagactcaacatcacaccacggaagttgcaattttaggtgcaggcccagttgggttaacaattgcaaattatttaagtaaacaaggtgtacaagttactgttattgaacaactagaccaactcattgattatccaagagcgattggtattgatgatgaatcattacgtacaattcagtcagtagggttaatcaaacaagttttaccgcacaccacccctaatcatgctatgcggtttttaacacccaaaggtcgctgttttgcggatatccagcctatgactcgcgaatttggctggccacgtcgtaatgcatttatccaaccccaagttgaccgtgttttactggaaggtttagcagcctatccaaccacggaggtgcgtttttcacgtcaattaaatagcttcactcaagacaaagaccatgtaactttaaatttaacgactaaagatcaaaagcaggaaattgttcaagcgcagtatttaatcgcttgcgatggcgggaattcatttgtacgccgtacacttaacattaattttgagggtgaaactgctccaaaccaatggattgttattgaccttgccaacgatccactagcgacgcctcatgtatatttatgctgtgatccagtacgtccttatgtatcggctgctttaccacatggtattcgtcgttttgagtttatggtaatgccaggagaaactcaggaagaactaagtaaacccgaaaatattaatcgtttattgcgtaaagttttaccacataccgacaatattgaagtaattcgtcaacgtgtctatacgcacaatgcacgtattgcagaccgtttccgtgtagaccgtattttattagctggagatgcagcgcatattatgcctgtatggcaaggccaaggttacaatagtggcatgcgtgatgcttttaaccttgcttggaagatggctttagtcatcaaaaaagttgcaggcccagaaattctagatagttaccaattagaaagaagagatcatgctcaagccatgattaatttatctgttctggcaggccatgtacttgctccaccaaagaaatggcaaggtgttgtgcgtgatggtattgcatacgtattaaattacatacaaccaataaaacgttatttgttagaaatgcgttttaaacccatgccaaaatatcatcaaggcatcttggcaccctttccagaaaaaaatacgcctgtcggaaagatgttcatccagcctcatgttcagcttgaaaataaagacaaaattttactcgacgaagtgattggcaataactttgctattcttgcttggggagttaatcctacttggggtatatcaccaaatgtaatgaaaaaatgggataagttaggaatcaagtttattcaagtcgtaccagctgttcagttagatgcaccgaaccgttcttctcatgaacatgtaattactattggcgatgtagatactgaaattcgctcttggttcagtcaaacgaatcaatctatggtgattttaagacctgatcgttttatagcaggactcgctattcctcaaacagtaaacagtataagtgaagagttgttccaaaaaatgcatttggtcatctaa

SEQ ID NO: 50446 - DNA, 897 bp, Acinetobacter baumannii
atggaattacgtcacttacgttattttgttgcggttgctgaagagctgaattttacaaaagcggcattacgaatgcatacggtacagccttcgctcagccagcaaattaaagatttagaagatgaagttggtgttcaactttttatacgtagcaagcgaaaagtcgagcttacaaaagcaggggaagttttttttaaagaagctttgattatattagagcacacagagaaagctattagcttggctagacaaactgcaaaagttgaacaagaacaattaaatattggttttgttccagcagctgaaatgaaagttttcccttacatcatgccgaatattagagcacatttcccagagcttacaattgattttcaaagcttaaccgatgatgctcaactacaggcgcttaagaagggcgagatagatattgcttttacccgttacggggctaatacaaatgaattagtttctattcaaatctttcaagaaccgttgactttaattattcctaaaaactctccagatgctcaacaggaacgcatcagtataaaaagttttgagcaccataactttgtgatgtgtaatgaagaagcttcacctgaactttatcgaattattgatggattttttaaaaaatctaaacttaatatcaatgtcgtacagtactcaactaacattttactgaatgttaacttggttggaatggaaattggatggagtctcgttcctcagtatgtcatcccacttttaggagataaaattgtagtaaaaaaaaccgtagaacctttgcctatgataggtttatatgtttcttatagaaaagaccatgttaacaaagctatagatttaattttggatgtacttaaaaaacagtttcatctaaatttttccttttaa

SEQ ID NO: 50447 - DNA, 1191 bp, Acinetobacter baumannii
atgcacccaattgccaatgaaaagctttggaatcgttcatttatcctttgtgtattgaacaacctttttttattcatttattactatgctttactcaccatattacctctttatattttaaaagaattatctggttcaattagtcaggcaggtttggcactaactttattcttgatttcatcgattgccattcgtccttttgctggtttgatcattgaacgcttaggcgaaaaaactgcattgcgcggttcaggattactgtttgcatttttggcctttggttatttatttataaatcaactatgggtattactgttgatccgattcgtgcatggaatctggtttagtattttaactacagtaaccgtacctattgtgaatgaattcatcccagagcagaggaaaggcgaaggcatgggatattttgtcatgtctacgaattttgcagttgtatttgggccgatgattgcactagctactctgcgttacactagtttttataatctatttattcttctcactttaattgtgtgtctaggtttggttttttgctttcttatacctgtgtcttcgttaaaagatagacagtgggttcaagcaaagcaaaaaatttctttaaacggtattatcgaaaggagagtggtacctataggggtggttgcattatttgttgccatggcttattcaagcattatgagtttcattagtgtctatagcgaaacgaaacacttacttgctgaaacaagtattttttttattatctttgcaatatcaatgattatcgcgcgtccttgggttggctattcgtacgataaaagaggagctaactcagtggtttatccttcgtttattctttttgcggtaggattattcttggtgagtcaaatgcaaacccagtgggaatattggtttgctgcggttttaattggtgcagggtacggatcactttttcctgtttttcaaacgatggctatacaaacggttgagaaaaacagaattgggtatgcggtttcaaccttttttactttatttgatttagggctggcaattggttcggttctggtaggacttattattgctcaaataggctatgaaaaaacttaccagttgtgtgcatgggtaacgataatgactttatttttatatcgttggctatgtaatcgagatataaagacaaaaattgggatatga

SEQ ID NO: 50448 - DNA, 1206 bp, Acinetobacter baumannii
atgaaccgtgcaggaaataagcactctattattacgatcgctatttgttttctaattgctgtgattgagggaattgatatacaggcagccggtattgcggctgtaggtattcgagaatcctttggtttaaatagctctcaactaggtattttttttagtgcaggaatattgggtttactaccaggcgcgttaatgggtggacgttatgccgatcgtattggtcgtaaaatggtgttgatcggggctgtggctatttttgctgtatttacgctttttacagtctgggtaaatactttctatactttgctattagtacgctttcttgctggagcaggtttaggggctgcgatgccgaatttgattgctcttgtttcagaagctgtttctaacgaaaatcgtggtcgtgccgttggtctaatgtactgtggtatgccaataggagctatcttagtatctttattagcagcctacgatgtaagcggtcactggcaaacgattttctatgtagggggagttgttccactcttggtacttcctcttatgatcaaatttttacctgaatctcgagagtttttacaaacgagatttcaagataaatcgattacccacatacaaagctcttttaaaaatctttttcaaaataattatgcttcacagactttattactgtgggcaagctatttttttaccttgatggtggtttacatcatgttgagttggttaccgtctctatttatggagttgggattctctcgtcaacagggcagtttagctcaagtatttttccaaatgggagctgccattgggactgttgtactgggtattttgattgaccgctggaataaagcctatgtgattatccttatgtatataggtattttagctggtttatttagtttaaatggagctggaaatctaactgcaatgtatgcagccgcagccttaatggggacatttactattggtggacaaggcgttttatatgcttttggcagtatcgtatatccaacagagattcgggcaactggtgtaggcagtgccgcagcggttggacgtattggtgcaatgttaggtcccgcaattgctggtcaattactcgcaatgggaagcggtgctacaggtgttatttccgctgctattcctggaattgtcatttcagcattactgatgcttttggtaattcgtcgattacatcaggctaaatag

SEQ ID NO: 50449 - DNA, 1221 bp, Acinetobacter baumannii
atgaatattcaaactattgtcatcatcggtgctgggcaagcaggtgcaagtgcaattctggaactacgtaataacaattacgacggtaaaatcattttaataggtgatgaacctcatttaccttatgagcgtccgcctttgtctaaagatatgattctaagacctgaacagactaaaattgagattctgtctcaacagaagttagaagacttaggtgttgagtttattaagggaaatgctgttgtaaagattgtacctgaacaatatcaagtaattttggaaagtggtgaacatgtccattatgacaagttgttgttggcaacaggtggtgcacctcggcgtcttcctatttttgatatattaggaaaaaatgtttataccctacggaatttagaggactcgcaagcattattttctgtactacagccagaaaagcgtattgtattgatcggtggtggagtgattggtctagaattagcatctagcgctcgctttaagggttgtgatgtagttgtgctagaacaaagcccaatgattatggggcgttcgccagcaattattagtgagtttctattggatcaacaccgtagccgaggtgttgatgttcgattaaatgtgaaaattgttgaaactaaacttcgtggtgaagaaattgtcatgctattggacagtggtgaagagttaattgccgatgctgttatttatggcattgggattgtaccgaatgctcaattggccatagatgctggtttagatgtcgattttgctattaaagtgaatgaaaactgccaaacttcaaatcctgatatttatgctgctggtgatgtagcaactcagttgcgttcagatggtaattatgcccgtattgaaacttgggaaaatgccaataatcaagcaggtacttttgctcgtcatgtcatggggttagcacaacctcaagctaatccatcatggttctggacagatcaatatgattttaattttcaattcgttggagatatgtctgcaaaagaatggcatatacgaggcaatatgaatccgcaagaagaccaaaatgtaggatttaccttattcgggttagatcaaggcatcgttgttgcgggtattgcagtcaatcaggcgcgtgatgttagacacttaaaaaaattagtttctagttctagcgcctttgataaagaaaaattactagatatatcaattgaattgcgaaaattaatttaa

SEQ ID NO: 50450 - DNA, 957 bp, Acinetobacter baumannii
atgactgttaaacttatttgtgcttctcatagcccgctaatggaatttgcgtctccggcagaaaaacaacaagaacaaacggtgcgtcatacttttgaaaaattggctgccgaggtcaaagcatacgacccaactttaattattgcttttgggccagatcattttaacggcttcttttatgatctgatgccgagtttctgcgtgggtgtccgcgcaacagcagcaggtgattggaattatggacctggtgagcttaatgtgcctgaaagcacagcattaaacttaattcgaaaagtacttgatgaaggtgtggatgttgcatattcatatcgtatgcaagcggatcatggggtaacccaaccgctgcattttttatgtgatggtcaacttaatcgctatccaaccattccaatatttattaatggtgctgctgcgccaatgcctacgacaaaacgaactattgcattaggtcgtgcaattggcgcctttattaagtcaatcaatctggacaatgaacgtatattaattttaggtacaggcggtctttcacatgatcctccaacacctcagatgggttcggtaccactagaagttgaagaatttctcattgctggacgaaacccaactgttgaagctcgtaatacacgtcaggccaaaatcatttcagttggacaacgtctagcagcaggtgacaagagtgtgtctataccactcaatccagaatgggatgagcagttattggaaaaattcaaaaatgcaaactttgctgcgcttgaagcgatgaccgaagacgaaattcgacatgaaggtggacgtgggggacaagaagtccgaacttggatggctgcttttgcggcattacagacagtaggcgattatgaaatgaccttacattgctatgaaccaattagtgaatggattgcgggctttggcatagtctctgccgagctgaaataa

SEQ ID NO: 50451 - DNA, 816 bp, Acinetobacter baumannii
atgggctggctagagggtgaagttgcgctaattactggtggcggttcaggactagggcttgcgttggttgagcgctttttacaagagggagcacatgttggcgtgttgcaacgatctcaatcaaaagtagatgaattgattgcacgctatggtgacaaaatcgtagcagtgacaggagatgtggctaattttcaggataacgttcgtgctgtgcaggctaccgtagaacgttttggaaaacttgactgttttattggtaatgccggtatttgggatcattatgccgacatcgttaacatgagtggcgaacagttagataaagcctttgatgaaatcatgagtattaacacgaagggttatttgcttggtgcaaaagcagctttagatgagttactcaaaactgaaggctcaatgatttttaccttatctaactcagcgttttattcatctggtggtggtccaatttataccgcatcaaaacatgctgatgtaggtttagtgcgtgaactggcctatgagttggcaccgaaagtgcgtgtgaatgcagttgctccatcaggcatgaatgtcaatgtgaaaggtgctgcatcccttggacaggaaaatctaggattacttgatgcacgtgatccacaaagaattgggcaaggcatgccattgagattcttaccagaaccagaagacatgactggttcttatgtattgctcgcatctcgtcaaaataaccgtccattatctggcgtttttataaatgctgactgtggtttgggcattcgtggcttacgccaagcgaacgctggtttttttgatgcttaa

SEQ ID NO: 50452 - DNA, 327 bp, Acinetobacter baumannii
atgaataagatttttgtttgtcagattgatgagttggatgaaggcgaagcactgaaagtagattgtaatgtaggtgatattgccgcacttgctgtgttcaatttcaatggtgaattttttgccatgaatgataaatgcagtcatggtaatgcttctatgtcagaaggttacctagaggatgatggcacggtcgaatgtccacttcatgcatcacgtttttgtttgaaaactggcgtaccacaatgtgtaccagcgactgactcgattcagacattccctgtcgtgattgaagatggtgcactttatgtcgaaatggtaggagcgtaa

SEQ ID NO: 50453 - DNA, 561 bp, Acinetobacter baumannii
atgaaccagatcattgactcattaaaaccacagccagtatggcgttctattggattggaacttcaccacgacattagtcagtttctatatgcagaagcacaattgttagatgactggaaatttcgtgattggttggaaatcttaagcgaagatattttatatacgctcaaaacgacgacaaatgcgcaaacacgtgatcgtcgtaaatgtattgcaccaccatcaacatggatttatcacgacgacaaatttgtactagaacgccgtgtagcaaaattagaaacagggatgtcgtggtccgaagaaccgccatcacgtactcgtcacttgattactaatatacgggtcgaagcaactgcacaagcaaatgaatatcaagtttttagtaattatttgctttatcgctcgcaaaaagaaaaagacatactgacctatattggtaaacgagttgatctgattcgaaaagatgagagcagtagtttaggttggaaaattgctaaacgcgatatcaccctcgatcaagcgactttgatttctcacaatattacggtgtttttctaa

SEQ ID NO: 50454 - DNA, 1404 bp, Acinetobacter baumannii
atgaatggaaaaattgaagtgtgcgaaatcgatgctttagtcgatgcacaaaatggacgtatctcgccagctatctatacagatccgcaattatacgaactagagttagagcgtgtttttggacgttgttggttatttctttgtcacgaaagccaaattccaaaatcaggcgactttttcaatacgtatatgggcgaggacccaattattgttattcgccaaaaagacggttctattaaagcattattaaatcaatgtcgtcaccgttctatgcgggttagctatgctgactgtggtaatacgcgtgcatttacttgtccctatcatggttggtcctatgggattgacggttcacttaaagatattccattagaaggtgtcgccttcccacatggggcttgtaaagaagaatggggattgcaagaggttcctcgtgttgcaagctataaaggtttagtttttggttgttgggcagatgacacacccgaattacttgattatatgggagatattgcttggtatctggatgcaatgattgaccgccgtgaaggtggctcggaagtcattggtggcattcataaatgggaaattaactgtaactggaaatttgcagcagaacagtttgcttctgatcaataccacgcgccgtactcgcatgcctctgcagtacaagttttaggtggtaaaccaaatgatgatgcttctaaagcattaggtacagcacaaactgcacgtccagtgtgggaaacagcagaaagctgtgtgcaatatggtcaacgcggccatggctcaggtttctttctgaccgaaagaccagatgctaatttctgggtagatggtcaagtagcggattacttccgtgaaacctatgaagaaaccaaagagcgtttgggcgacacacgtgctttacgcttggctggacacaacaccatgttcccaactttgtcttggttgaatggtatgacgacgatgcgcatttggcatccacgtggaccagataaaactgaagtttgggcgttctgtatcacggacaaagcagctccgcagcacatcaaagaagcgatggagttgaatgcttgccgagcatttggcccagctggttttgctgaagcagacgatggtgaaaactggattgagatccagaaagtgttacgtggttataaagcgcgaaaaagtaaactcattatggaaatgggacttggcaatgaaaaataccgtgaagatggtatccccggtattactaaccatgttttttctgaaaccgccgcgcgtggcatgtatcgtcattgggcaaacctattgatgcatgaaaaatgggaagacgtgcaacgggcagatgaggcgtatgagcaagagcttttgaaaaaagcggctaaaaagggtgagaaggagcttgtgaaatga

SEQ ID NO: 50455 - DNA, 900 bp, Acinetobacter baumannii
atggaattacgtcatttacgctactttgtaatggtggctgaagaactcaactttagtaaagctgcacttcgcctttacacagctcaaccatcattaagtcaacaaattaaagaccttgaagatgaagttggcgttacattactacatcgtactaaacgtaaagttgagctcaccgaagaaggaagtatatttcttgagcaggcgcgtttaactttagctcaagcagataaagcgattgcaatggcccgccaagtttcgaaattaaaaaaacaacaactgacgattggttttgtccctgtcgtagaaatgaaagtttttccatctgttcttccaagtttaagggtacaaaacccaaacctgaagatcgaattacgtagtatgaataacaccgaacaaatggaagccctaaagaatgggattattgatattgcatttatgagagataatttaaataacgatgaaatacaaagccagttcgtattacgtgaaccattaatgctattaatccctcataaccattcacttgcccagttcaaacgtataccagtaaagcttttagataatattgactttattattccatcgcccgagcagtcttcaattttacatcatactattcttaattttgccgaaattcacaatattaaatttaatattgttcaaactgcccataatattctatttaatattaattcgataggaatgggattaggctgcggtattttgcctagttatatagagcccttaactttaaataatattgtcacccgaccactggatgtagatctaccctttttagatttatacgtcagctatagaaaagatgctgagtcttcaggagtcaaagaatttatagatttattgagtaaagttttttacttaaatattaataaagcttaa

SEQ ID NO: 50456 - DNA, 861 bp, Acinetobacter baumannii
atgggcacagtacaaatccccgaatataaaacagatccattttttggtttggaagacaaatggattgaaactgcagcaggcgagctcactcattatcatgagcttggagaaggtactccaattttatttttacatggttcgggtactggtgtttcagcagcagcaaactggtggttgaacttaccacaaattgctgagcaggcacgctgtattgctattgattcgattggttatggacaaactgttgttgcagaaggcacagcctacggtatccgggcatgggtagatcatgcggtccgtgtattagatgctttaggaattgaaaaaacctggttagtaggcaattctttaggtggttggttagcattccagtttatattggattacccagagcgtgtactgggtattgtatcaatgggaacgggtggtgctaaacagacggcagcacttaaagcacatgctaatcctgaattgacagaagctggtatccgtaaaactttagaaatgtttgtggtcgataagtctttagtcacagatgaattggttaaagttcgttttgactcagcaaaaaatgactacgcttcggatcgattgatggatgttgttggtgcacgagaccgtgaccgttttgagttcccgcttgattttgaaaagatgaaagagattcaagttcctgtattactcattcatggtgtgcaagatgtagttattcctgtatctcgtacttgggatattttgaatattgtacctcatgcagatgcacatatttttagtcaatgtggtcattggtcacaagttgaaaaagcacaagaatttaaccagattattaaacaatatttagcagtacatgatgttaaataa

SEQ ID NO: 50457 - DNA, 1311 bp, Acinetobacter baumannii
atgcgtcgtcaaacgttatggatcgcaatggcttgtttggtagcaacaataggaactacttgtacatatgctggttttgttgaagatagtcaggttcagctgaaatttaaaaacttctatttagatcgtcagtatgatgacacccctgcaaaaaactgggggagttggtcgcaagctgtgacactggatgcaaaatcgggctatgcagagtttggggcgttacaactcggtgttgatgtgttagcacagtatgctgtacgtctggatgggcgtgaccgtaacgcagattgggttctgccatacagtgggatttctgatacaggcacaggaaaacaagagcgccagtttggaaaaataggagcaactcttaaagcgaaaatcagccaaactgaattacgaattggtgaacttttacctgtaacaccagtaatccattttgatccatcacgtcaattattgaccacttataatggggtatggctagagtcaaaagatttcaaaaacaccaaattaacgttaggttatttggatagtatcaatgcccgttatgaaaatcagccaatggattttggtctatggcctaaagcattaaataatgatggtaaaactgatggaatgtatgttgcgggcatagattaccaattaaataaaaactggactgcaagttacttttatggtgatgtgacgaatatctatcgtcaaaattacttgggtgtgaactataagaacaattatgacaagttaaaagtcgattcacacatacgttttttcgacaatgcagagtcgggagatgccttgtatggtgatattgataatcaggcattgtctataggctcaaccttaacttatggctcacacagtataggtttatcttatcagcaaatgtttggtgaccatggtagtaacccgagtgcagcaactggcgcaccatatttcccatccctcgcaggttgggtaccccagccttatttagataactggtcagttgcgagctttatccgtaaagatgaaaaatcggtgggtgtggcttatagctatgattttagtgatcttggcattaaaggtttaaaaaccactgcaaaatattggcatggttggggcattgattcagcttatgaatcaagtgcattaacaggcaaaggcaaagaagatgaattcaactttattctgaattacgttgtgccagaagggaggttacaaggcttaggttttcagtggatgtatatcgatgtgaacttcgacaatattgcaggccaagcaagcgatttgcaggaacatcgtattgcaacgacatacacctataaattttaa

SEQ ID NO: 50458 - DNA, 1020 bp, Acinetobacter baumannii
atgtctaagattattgtgcatgatatgacgttacgtgatggtatgcatccacaacgtcatcaaactacagttgagcaaatgattgccatttcaacagcgttagacgaagcaggtgtccccttgattgaagtcactcatggtgatggtttgggagggagttcagttaactatggtttcgccgctgcaacagatgaggaatatttgtctgctgttgtaccacgcatgaaaaatgctaaggtttccgcacttttattaccgggtattgggacagttgatcatttgaaaatggcacatgagattggtgtttcaaccattcgtgttgcaacacactgtacggaagcagatgtatctgaacagcatattactgctgctcgaaaattgggaatggatacagtaggctttctaatgttggcacatatggcatcgccaaaacatttgctagaagaagcaaaaaaaatggtgtcttacggtgctaactgtatttatgtcactgactctgctgggtacatgttgccacaggatgtaaccgatcggattgggttacttcgtcaggagcttgatagcagtattgaattaggtttccatggtcaccataatttgagtatgggtgttgccaatactgttgctgcggttgaagctggtgcaattcgggtcgacttggcagcagctggtctaggagctggagcgggcaatacgccacttgagttatttattgcagttgcaaatcgtatgcaaatagaaacaggcgtagacttgtttaaagtacaggatattgcagaagatcttgtaattccaatgatgctaaatccaattcgtgccgatcgtgatgcagcaacgttaggttatgcaggtgtatattcatctttcttgttgtttgcaaaacgtgccgaagctaaatatggcgtctctgcacgtgaaattttattagagctaggtcgccgtggtacggttgggggacaggaggatatgattgaagatcttgccttgactatgtcaaaagcgaaagtaataagcgcataa

SEQ ID NO: 50459 - DNA, 906 bp, Acinetobacter baumannii
atgaaaaagattaaatgcgctttaatcggtccaggaaatattggaacggatttattatataaattacagcgtagtgaattattggaaccagtatggatggttggaattgatcctgcttccgaaggcttggctcgcgctgaaaaaataggtttaaaaactacggctgaaggcgttgatggtttattacctcatgtccttgaagatgatatcaaaattgcttttgatgcaacttcagcatatgtacatgcagagaacagtcgcaagctaaatgagcttggggtattgatgattgatttaactcctgcagcaattggtccattttgtgtaccgccagtgaatttagaagctttgttggatgcgggtgaagtccctaatgtgaatatggtgacttgtggtgggcaagcaactattcctatggtcgcagcgatttcacgggtacagactgttaactatgctgaaatcattgccactgtatcaacaaaatcggttggcccgggtactcgtaagaacattgatgaatttactcgcaccactgctggtgcaattgaaaaggttggcggagctaaacaaggtaaagccatcattattattaacccggctgaaccaccactaatgatgcgtgacacagttcactgtttagttgatggagaaccggaccaagttgcaattactgaatcagtaaatgccatgatcaaagaagtccaaaaatatgttccgggctacaagttagtaaatggccctgtatttgatggtaatcgtgtttcgatatttcttgaggtagaaggcctaggagattatttgccaaaatatgccggtaaccttgacattatgacagccgcagccgcacgtactgcagaaatgtttgcagagcgcgttttatctaacccaaaagctgaagttgtttaa

SEQ ID NO: 50460 - DNA, 798 bp, Acinetobacter baumannii
atgtcgaattctgctgttgttgattcagttgctttggccttaagacaagctgaactatcacaaactgcgattattcctattcgtgctgagcttggtggtgaacaggcaaatgtggatatcgcttatgcagtacaggaaatcaatactgtacgtgcactttcggaagggcgccgtttagtagggcgaaaaattggtctaacgtctaaagtagtacaagcccaacttggcgtagatcaacctgactttgggatgctatttgctgatatggcatacggtgatggtgaagaaattccaattagcaaactgattcagccaaaagttgaagctgaaattgcgctcgtactcaaaaaggatttaacccaaacccgacatacatatgcagacattattagtgcaacagactatgccttacccgctattgaaatagttgatagtcgtattgagaactggaaaatctctttgattgacacagttgctgacaatgcatcaagtgcagcttttgtgttgggttcacgtccagtacagcttaatcaacttgatttagtgaattgcaaaatgactatgactcgtagtgaagaagtcgtttcgcaaggtgttggtaaagcttgtttagctaatccattgaatgcagcaatttggttagctgatgaaatggtacgacgcggacgtccattacaagcaggagatattgtcctgacgggtgcattgggtccaatggtggtggctcatccgggggatgaatttaaagttgaaattgaaggcttcaattcagtcgttgcatgctttgctgctgaataa

SEQ ID NO: 50461 - DNA, 828 bp, Acinetobacter baumannii
atgaacatgaatgaatatgaatatgtcgatgggcaaagacattctagttttgctgatctgtttgtttattatgaaaaattaaatcaagaaatacttcaagaaaaggaatgggcactagatcagccctatggttttcaagaacgcgaattattcgatgtgtgttatgcaaaaactccagctaaggcaattattatttatttacatgcgggttactggcaatcgagagataaaagccagtttcgttttattgcacaggatataagctctcaagggtatcattttgttttagtcaattacccactttgtcctacagttaaaattggaggcattgtaagatctatacaatatgctatccattctataaaaaatttttttagatataaagaaatcgatctccctatcattttgtgtggtcattcagcaggtgctcacctagtaactgaactagctattcagaatagtaaatcagtacactcaaaactttttcatggcgtcatagcaattagtggtatttatgatctagctcctctaaaagatactagcctaaaccaagcattgcaattaacggaaagtgaaattcaatattattcaccagtttataaaaatagcttattgatagatttgccatttacttttctagtaggccaaaaagaaactaacgcttttattcaacaaaatcagaatatggcaaaacttttagctgctcgaggaatagttaagaaagaagaactattagagcatgatcacttcagtttattacaagagttctttaaaaaaggacgtatctttcaacatattgaaatgatgtatgactttatttcaatatga

SEQ ID NO: 50462 - DNA, 1416 bp, Acinetobacter baumannii
atgaaaagctctagtattgagctattagctccctctgagataatagataaaagcatacaaaaaaaagcttgggttattacgggcctattaattatttttcagatgattaattttgccgataaggctgttttgggattagtcgcagaacctgctatgcaagagttgtcactttcaggtagtcaatttggatttattggtagtgctttctttttcttatttgcaatttcggcaattttagtcggttttattgctatgagagtacaaacaagatggttaatcttttttatgggagttgcttgggctgttttaatgtttccaatgttatggggtggagctgccttattactgatctcaagaatattattaggtgcggctgaaggcccggcgacccctattacattacaacatgtacatggttggtatgaaccaaaagaaagaggcttacctagtagtctggtagccataggttctactctagggccaattattgctgctccgatactggcttggattattgctcatcctaattacggttggcgttgggcttttggttttcttggaattattggattaatttggacatctttatggttttttgttgcgaaagaagggccatatagccatattcgctctgaaaaggagctgagtcgtcctctaactaagcggttagatgcaaataataagcaaagtattgtcgacctatgtgatgatctaactcccataccaatggcaaagatatttttctctccaatgtttattgttgcatttcttgctggcgctggttgtttttgggcaatgggatttcttacaacttgggctccacgttatttatctgccgtagtaaatgtcactcctgaatcattaggggttttagtgaccctcccttggatttgtggagcacttgtactttttttagcaggagttttgtctagaaagttaatggcacaaggaaggtctgtacatgtatctttaggcgtcttattaggaataatcttaataacttcaggtgttctatttcagattcttccatttttaaacggtgaaacagccgtagccgttttaatctttgctgctggctttgctatgacttttcctctagttcctacggcagttgcatatagtgtttgttctaaacaaagagccgtggtcatggctacactaacagcacttgcttcttgtggtgggatggtatcacctataatggtcggaatcctgatggatacagccggatatattcaacctaagaaaagcgaacctctattacctgaaatgatgaaccatttattaacaggtatgaatattggtttccaatatattggattatatttattgatcataggtatagctgcggtaattttcctaaacccagataagacagctaagtctctacaaaatttaataaatattaaaagctaa

SEQ ID NO: 50463 - DNA, 1071 bp, Acinetobacter baumannii
atgtcgaataatgtagcaaaaggaatgaagatttacgcacttggaacaggaggtgggccaattgtttcaagtagccgagctggtatttcaacagctatttgtgttgacggagcagtttatgttgtagattgtggaatgggaagcattcgtaattatagaaatcatgcatcttgggggcagttacgtagtatttttataacccatcatcattctgaccatatttatgatctaggggcttatctctttacaggatggcaagttcctggtgagtctttcagccaacctataaaagtatttggaccagggaaaccacctaaaaatccagctttagctgagaaaaatcacgtgcatatccaaggatgttgtggaggcgatcatcctatggttggcacaaaggagatggtgggagcattaatgcgaggcgtatttgcttcagatattgcaattagaatggcagatgaggaaagaacaagtcctagcgaatggatagaagcacatgatattgaaattcccaaagaagccaaagcagatccgatatatgcacgacatcctgaaatggaacctttcattatttatgaagatgaaaatgttaaagtaagtacaattttagtcgatcatcgtttgtgttatccagcttttggatttcgtttcgactctaaatacggttcagtagtaatatcaggagatactacatattcagaaaactgtattcgattagcaagaaatgcagatgtgttattacatgaagtcattgatctagaggctatattacaaacttttcctgaaggtcctactagggatgggattgctgtacatcttgaagaatctcatacttcttataaacaagtcggcaaagttgcggccaatgcaaatgttaagcatctaattttacatcatattgttcctaatttaccaaatgcagcagatatagaaaaaatggtctcatacgcacagtcagaattcggtgggcttgtgagtgcagcagaagataatgatatttttgaaattaataacttaaaagtaattcaaaaagctgaagctgtattaagaaatcaggaggaattattatga

SEQ ID NO: 50464 - DNA, 492 bp, Acinetobacter baumannii
atgaatcaattaattttttcggaaatacaaagtaattttgaattcggagaaacaaggcatgatgatgaaagtgaaaaaataaaatggaatgttttgggacatgtttatgagccgatggtaggaggagatcaaaaatctagttttgcatggatctctaatgatcctcctggcacttttgtgcctcctcatatgcatcctattcaagatgagcacgcatttattattgaaggtgaatatgctttatatctcgatggggagtggagtattgccaaggctggcgactacttatactggccaagagggacaatacatggttataaaattgtttctgaaacacctgggaaaggaattttctgggtaagtccaggaaatgatttagctagtttgttctctgaattacacaatttaactgagccagaagaagttgtgcgtatttctgctttaagaaatattcgctttattgcacctgacaagctagaaaattatgaataa

SEQ ID NO: 50465 - DNA, 354 bp, Acinetobacter baumannii
atgattaatctttttataaagcaactacttctaaaagtgggtgaagaaccagatccacgttttacgcttgccaacgagcggacttttttagcctggacacgtacagctcttgctttactggcttcagcagtagcattgattacgatttcagaacattatcatcaacttcaaaaagctcaacaaatttttaatgtattagtcatagcgtctttaatcattagttcctctgccctccttcgctggtatcgagtagaaattgctctaagattaaagaagccgctaccctttcccttcatgactcctgtactaacgctactaagctttatcattttatttgttttttcttttaagtaa

SEQ ID NO: 50466 - DNA, 294 bp, Acinetobacter baumannii
atgctaaaagatgattcaggattacaaccccaaaggacttatttagctaatgaacgaactcttttttctattttagctaccagtttatttattagtaaaatttttaccaattttcctgttattagtcttttaattttaactattacttgtctctactttactagtcacttatttttagctttccatgttcaaataaagaatctggaagtaacagaacgaaaatatacttttttatcacacgcattaatgatttttttaataggttttatttgttttgttgcaaaaaatttgtga

SEQ ID NO: 50467 - DNA, 1002 bp, Acinetobacter baumannii
atgaccgaatcaattagacaaattggcccttttagaaataaatttagtgtgcatcacaccgaaattaccaggacaatccaatggatgggaaaaataaatggcccccatcaattagatgtcccatcaccaaaacacatggactttttccatgaaggtttcagcttgggggatattacttttggtcaagtttcttattcaacagaagtgcaaattaaactagatgatcttcaaaaaagctatatttttaatattcctattcatggccagcaaacgctaaaaattggtaatttaaatatagagtcaaactcagaggttgctactcttctctctccacagctcccacttattatgactgtaaatgagggatgtactaaacaagttatccggctttcgaaaagccttgtagaagaacatctagttaaattactaggttataaattacatcgaccattagtatttgatgttcatgctcctttgcagggtaaaataaaacaatggtttcaacttgcaatgcatttacaggaaatggtcagtgatgattattctttatgcgatgattctggagtttggcgtaattttgagtctaatctagttattatgcttttaaatgctcagccacataactattctcaagaactgaatttgcgtcaacaaggtcggcctaattatttattaaaagtagaacaaattttgataaattctctaaaccaacctttaaacttgaaagaactaggaaaagttttaggggtctctcgagaacggttatatagggacttccatttatattttggccaatcgcctattgcttattttcgtaatttacgttttgaagtagttcacaaacgccttcaagaaattcgaccttgggaaaatgtttccagtattgctttagactgtggttttcaacaattaggaaggttctcaagcgagtacaaaaaaaagtttggagaacttccttcagagactttatttaactctaaaacctcaatcttacttgaatag

SEQ ID NO: 50468 - DNA, 1191 bp, Acinetobacter baumannii
atgagttataaacagctgaattgggctagttcaaataaaaatgaacaattaagacaacctttacctaaagttagcgtatttatatgggttatctgttgtgggcttcttgctttattcatttgggcttggctatttacattagaagaagtctcgacaggaactggaaaggttatcccttcttcaaaagaacagattattcaatctttagaaggtgggattttgactaaactcaatgtcaacgaaggtgaaattgtggataaggggcagaaccttgcacaacttgaccctactcgatttgcatcaaatgttggtgagtccaaatcgttactgctttctgctaaagcaacagctgcacgtttaagtgctgaggtaaatgggacagctttagtatttccaaaagaagtattagaagagcagactcttgtgaaagaggaaacagctctttattactcgcgacgttcaaatttagaagaatccttggccggtttaaaaaaagctttagttttagtgcaacaagagttagcaatgacagagccgcttgtagccaagggggcagctagtaatgttgaagtcttacgtttgaaacgtcaggcgaccgatttaataaatcaaatgaatgatgttcaaaatcaatatttagttaaatcccgtgaagaattagcaaaagcaaatactgatatcgaaacccaatctcaagttgtaaggggaaaatcagatatgcttaaacgggcgatttttaaatcaccagttcgagggattattaaagaaataaatgttatgactattggaggtgttattcctcaaaatggaaaattaatgacaatcgttcctttagatgaaaaacttttaatcgaagcacgtatatctccaagagatattgcctttattaggccgggacaagaagctttggttaaaattactgcttatgactattctatttatggtggtttaaaaggaaaagttactattatttccccagatacattacgtgatgaagttaaacaagaccaattttattatagagtctatattcgcgcagaatctgataagctaataaataaagctggaaaatattttaatattacaccaggtatggtagctacagtagatattaaaacaggagaaaaaacagtattagattatttgattaagccttttaataaagcaagagaagctttaagggaaaggtaa

SEQ ID NO: 50469 - DNA, 2130 bp, Acinetobacter baumannii
atgagcaacaaaattagttatcagccatggcttcatgccattttagttattgctagacattatcttattgatccatcggaagagaagctcagacttcaatttgattggaatcagaaccaaacaatagatgaaattttaacattggcggcacgccaaattggaatgaattatcgtaaagccaagttagacttatgtgagattagtccatggcatttgccagtcatcattgaaatgaaagatggccaagtaggtgtattagacaaaattgatgcaaatcagaatctaagtgttcagttcagtggtgatcagggtttagcacaaacttttacgctcgataatcttaaagcatatgtaactaatatttatattttacggcccgaaaaatctgtgccagatgctcgtattgatgaatatataaaaccatatgaagctcactggttctgggcagttattttacgtgactggaaaagatatatagacattatgtttgcttctttggttgcaaatatattggcattagcaactatagttttttctatgaatgtatatgaccgagttattccagctcaatctgtaccaaccttgtgggtattagcaggaggggtattaatagcagcaatttttgaattttgcttacgtgtagcccgtatttatttatcagatattttaggaaagcgtgctgacttaactatttcagacttagtattcggtcatgctttaagaattaaaaataaagaacgctctaaatcaacaggtacttttatttcacaaattagggaattggaaggtgttagagagttagtaacctctaccacaatatccgcgattgctgatttaccgtttttcttcttatttcttattattttttggttgatcggtggaaacctattttgggtgatggtaattgtagtaccacttatgattattcctggcattttaatacaaaaaccattggcaaaattagcttctgaaggaatgcgagaaagtgctatacgcaatgcaatgttagttgaatctgtccagggaattgaagatataaagttattaagagcagaatcccgtttccaaaatcaatggaatcatatgaatgaagtatcagccgatatttcaatgcgacaccgtaaattagttggtgtcatgatggcatggactcaaaaaatacaaggtttgacttttgctattgtggtacttatcggctgttttgctgtcatgaaaggggaaatgacaactggtgctttagtggcttgttcaatcctttcatctaggatgctgggtcctattgcacaaatctcaggggtgctaggacgtttacaacaagctaaagttgcgaaaaatggcttagatgagcttatgaaaaagccagttgatcaacctcctcgtgcacatctcattcacaggcctgtattatttggaaactatgaattagatcaagtcgaatttagatatagtcaaaatgatggaaaaccaacattggtaattccaaagcttactattagaacaggagagaaaattgcaattttaggacgtaatggggctgggaaatccactttattacagttattagcaggtatgcaggaacctttacaaggtcatattaaattagatggtgttactttaggcttgatagatccattagatattcggcgtgatataggactcttaaaccaaaactcccacttattctatggatcaatccgagagaatttaaaattaggggcaccgttagcaacagatttagatattttagaagcattaaatctttcaggggttttagattttatacatgagaaaaaggaagggttagactatcaaattttagaaggtggagctggtctatctggtggacaaaaacaagccttattattggcacggttgttaatcagaaaacctaatgttttatttctagatgaacctacagctgctcttgatgatgtttctgaaaaacagtttattgagcaacttcagagttggttaggtaataaaacattaattgttgcgactcatcgacgggcaatattagagttagttgatcgtgtaattgttattaataatggaaaaattgtattagatggccctaaagagcaggttctgaaattatcacaaccaaagcaaaaaataggagccgaatga

SEQ ID NO: 50470 - DNA, 1515 bp, Acinetobacter baumannii
atggcactaatgaaatcaagattagggtggattttattttctcctatctttttgtttataactcaagctcaggcagatatattaaatactgcaaagaaagagatgaactatatattcaaaaaagaaacagaaaataattttcttaaagtaaatattcaaatgctgagcgattttagtttggatgagaggactatatcagattcgttacctttagtaacttattcaaaaaatcaagagaagaatttcttgactgaaattccagacgaaaatttgaaaaggaactcgaaatacctagattttactggcgcaatatatcaagcgttacaacgtcgcccagaaattactgaaagtattgcgatgattgctggacaaagcgcaagtattgatgtggctaaggctgcatattatcctcaaatatcgggtggaattactacagctgatttaacttcaggagagcgaggaagacaactttttacgatttcagcatctcaaatgttatatgactttggaaaagttaaaagatctgttgatattgaaaaagctaaattaattcaagaacaagccaatactttggtaaatattgatgacattgcttatcaaacagcaaatgcaattgttaacattaaacgctatcaagagattatacgtatagctgatcagcaaattaatggcatagcacgtattgctgagattgcgaatctacgtgcaaatgcaggtattagtagccaagccgatccagtacaagctcagtcaaatttagaagctgctgagtcgaataaaattgttcaagaaactcaactaaaacagtatcaacaaaaattacgtaatttattaggctacaacgtttcaaatttagaaataaatatacccgactatctagctgaaaattcaggtctttataatgaaacaaagtttacattaattccagaaatgatggttgcacaagcagcaatacaagttgctcaatatcaaaaggaacaaacgaaattaagtaattatccaactataaatattaaaggaagtttaagtcaggcaataaatggtagaaatccgaataacaataaagatgatgggttttataattctataatgcttgaaacaacgagtgatttttttcaaggaggggcgatacgttctaaggaacgggcagcaagttatgctgaggaagcagcgaaagcaaagttaaattccgtatatttagatatatcagatcaagttcagcgtattcgacaagagatagaaaataagcaaaaacaaattcagatccttagagagcgtcaaaagtctacgattcgtacaaaagagctatatcaagagcaatataaattaggcacgcggtccgttgttgatcttttaaatgctgaacaagccattcatagcgcagctcaggaaatagagactgctagatatgatatttattcgaatttagtacagtttattaaaataactggtcgttctcgagatttatatcatttaaatgatacttctattcaaggattcaaaattgagccatga

SEQ ID NO: 50471 - DNA, 1869 bp, Acinetobacter baumannii
gtgccggccggctttgctgatggcgaattgaccgttaaggcagaaacagtggatcgtaatggtactccggtcaatgcagaagacagcctgttgaagaccgatcatgacaatgatccatctacgccggatcaaggtggattggaccgcgttgacggatcaattacagtagatattaatgatactgatagcaccaaaattactggtgtgacagaagatgttgctccaaatagtaaagtcactctagaaattactagtattgatgaaaatggtgaaacattaacatttactgaagaagtatttacgaatgctgatggtgaatatagttacactttaactacagcacaaggaaatgctacggaggttgttgccaaagttgaagatcgtaatggtactgaacttcaagataatgattcgttggaagcaataattaaagcagatccaacgacagatgttaataatggtgataataatgtagtcggtacttcagggaatgatgtactcgcaggggatatcggaggtttacagaccaattttgttgctgggcaaaattataatgtctctgttgtattagatttgtctggcagtatgctatgggcaatgaatggtacaagtaacccaccagctggtgaatctcgcttagcaattgctattaaaggccttaaagcctttattcagcaaatggctgatcatgatggcgtgattaatctacaaatcgcttcattctcagcaaatggtagtgttggaaatggttataaccaagttttcctaaatgtaagtaaagataatattaatgaaatattcacttatcttgatagcttaaaagctggcggtggtacctatccagaacaaggatttaataaagctgtagattggtttgacgatatctctactgctgattttgaaaatcaaacttattaccttacagatggagaaccaaacagttctcaatcaactttggacaacgcatttgctccattagcggagcagagtaaagttttcgcagtaggtgtgagtagttcaattagtgatgctacggtctctcgttatgataataccgatgtcaatggaaataaacttcctggtgattggagtggtactaatcatggtgaagccaaagctattgcggatgctgataaactgatagcttatttaataggtggttctgaaaactttatacctgctaatgttggggatgatacagttaaaggaggagctggagatgatgttctgttcggtgatgctataaatacggatcatttaacatgggcaggatatgatcctcttcaatatcctaaatactcaggttattcaaaattaatcgcatatttaaaagctgaggttactaatggtgcagaaccaagccagcaagatatctatgactatataaaagagaatttccgcgattttgttgctgctgatgctgctgatccagaaactaaaggtgggaatgatacgatttatggtggtgctggaaatgatattattattgctggtgcaggtaatgatgttatttatggtggttcaggcaatgacattatttccactggtcgaggtgaggataccattatatatgatttattaaatgcaacagatgctactggagggaatggtacagacacttgggtagattacgaagctaatgacaaaattcaatttggatcagatttctttgaaggtttattaacagataaaagtaatttaggtgattatattactgtagttgatgatggtaatggtaatgccatagttcaggtagaccgtgatggtagtgctgggacacataatatgtctgatttattaattattgaaaatcaagcaggcttaagtttgcaagatttactcaacaataatcagattattattggttaa

SEQ ID NO: 50472 - DNA, 702 bp, Acinetobacter baumannii
atggagaataaaaatcagtgtcgccaatgcgccgtatgtagaaagagctttcctttaaaagatttagtatcgggtgaagtcatccgtaacgtgattagtgatgaaattttaaaagaccatccagattggagttactcaagctttatttgtcgggccgatctggcagattatcgaattaaatatgtgcagtccctattacgctcggaaaagggtgagttatctaacctagaaaatgaagtaattggcagtatgcaacggcatgaattaattagccgaaatacagagtcagattttgatcaaaactggacgtttggagaaaaactggcagataaaatcgcatcatttggtgggagttgggcttttctcatttgttttgctttatttttaacggggtggattgttttaaatacggttgtgatggtggtccgtcccgtcgacccttacccttttattttgctgaatttagtgttgtcatgtttagctgcaattcaggcacctattattatgatgagtcaaaaccgccaagaagcaaaagaccgtttgcgttcgcaacatgactatcaaattaatttaaaagccgagcttgaaattcgccatttacatgaaaaaatggaccatcttttatcacatcagtgggaaaggcttgcacatattcaagaaattcagctcgatcttttagctgaaatgaataaaaaacgataa

SEQ ID NO: 50473 - DNA, 504 bp, Acinetobacter baumannii
atgaataagccttatctttctgctttacctatcgatagtcaaatctcatctcaattgaacaatgcctacttccaggactcgtggagcattgtgcttggtcaacctgatctaagtgtatttgagcagcttattaagctatttcagcacactccgcagtggatagagtggagcatgaatatgcgtaataaaattacttcaaagattgggcttaaagatttaggaagttttaagcagattgatactcataaaaaagaaaatgagtatgtggcaggcgaccgaattggaatttttacttttttgcagcgtaccgaaaatgaattagtgattggagacgatgacaagcacttaaatgtgactttatctatttataaaaatgaagatacccaagtgcttaccgtaactacaatagtgcatattaaaaattggcttgggcgattgtatatgctacctgtaattcctgcccatcgaaaaatcgtaccagcgactttacagattttaggttag

SEQ ID NO: 50474 - DNA, 477 bp, Acinetobacter baumannii
atgaaaaagaatttattaattaccatactaattttacttttcatcatacagtccttaataaactattacttctggaaaagtacaaaagtaccagaaattcatgttttagaaaaacctttaaagatatattcgtttgaaggtaaatattcgaaaaatagcactttgccagaatattatattttgccagaaggtactgttttatatgatgatagtgactctttgaacagaagagttatggtttatttcaatttacaaggtgtagattttaaattcgaagaacaagacccagatatcttaaaacaacctagtgaagtcagtggtataaggtcgaaggacttgcctgatttactaaaagaaattcctctgactaaaaaagatatttatttaattattaaacatgatgaacgtataaaagactctgtgcgttcaattttattcaaagaatacaaaattgatacttcagagtatgaaaaataa

SEQ ID NO: 50475 - DNA, 423 bp, Acinetobacter baumannii
atgtctctaaatcagaaaaatttccaattgtatgggaagaaaaataatttgtttagaaatctaaaacttgacttgataactttaggtcttcccttgttacttatggcagggtgtggtcacgaatatacaattgagcctgaaagacttccagtagcctatgtaggtaaggcatataaccagcaattaaacatatcaggtggtagagtgataccatattcttttgaagttgaaactaatttccctagtgatatgaatatctctattagcccaatagatgaacatgaagcggatgcttataataatttaaaaatttctggagttccaaagtataagggaacttttacaattcatatatatgcgggtttttatgctactggggatgggaagttagataagacctatgaatttattgtaaatgaataa

SEQ ID NO: 50476 - DNA, 411 bp, Acinetobacter baumannii
atgaaaaaatttctttacctattagggctaatttttttaagtggatgtagtgaaaaaatttcaaatttcacaatagaacatactaggaaaagtaatgaaaaattaaactttgctacgaaaattgaagataaggaagttttaaataaaataaaagaatcttcatcaaaaaaaattgtttgcaaaaatactgctaataacaatcaaatgttggatgcttatatagataagattgaaaataacaaaattgatgtatctgtagaattttgctcaaattatgataatagaagctgcgagcctataaatatcagttcacttaaaaaaattaatttagaatgccaagcaattttctctgcaatgattggtaatgtctctaaatcagaaaaatttccaattgtatgggaagaaaaataa

SEQ ID NO: 50477 - DNA, 489 bp, Acinetobacter baumannii
atgaaatattttttattaacattgctttctataacattgtcagcatgtaatccttttataaataatgagaaagcatctaacaataatgcagagattaagagtttaacttactcacgtctggatggtatgagtggtgatatttttaaatttaatttagaaacaaatgatgatttaaataagatttatcaagagaataattataaatattcacattttaagtgcgataatattaaaaattactttgtgacaggagctatttcagtcgagggagagaagttaaaaaaaggaaaatatacttcatctgggtacttcaaagtctgcgaagatgaatccatgaatgtatgtatcgataagaatcaattggaaaaattgttaactagcaatatgtcttgtagagtagtttttgggggtttattacaaagtagtaaagttgtagcagataatattttaatatccaaagaagctataagaaaatccaatttccaatag

SEQ ID NO: 50478 - DNA, 831 bp, Acinetobacter baumannii
atggataatgtaatagatgccaataaagatataaaaaaacaagcgactgaattgttaaaaaaagcacatggaaaagtaagtaatgtgccgccagtaattccagttaagttaacaacttatactcatagtttaacaatcttcattggaggggcagctgataagtatgtatttacacccggagatgttcctgtcgggtggggggattttagacctattggcccaacatactttgttggaaactatgttaataattattttgcaactataaaaggtggcagtaaaaatgcatttgttaaatattatgggtatgaagaggcatatgtatctgatacaagagagttaacagtaaatacaaataaggataaaaaattaaatgctttcaatgatgtaaaaaattttttaaaaacctatcctcaaacacaagtaaatattgttggtcatagtttaggtggttggaatgcagctggattagctgaaatattgcataagaataatatttgtaaggttaacgtgctggtaactattgatccagtgggagaaatattatctaaaattggtttgggatctagaactagtatctattatagtagaccaaagccagtatttaatctttggattagtataagttgtgaccctaaaagttatgagtggaacaatgatttgattgcagatttaggtgggcaatggagtagttatccctctagtaatagttcctattactatgtaacaaggtatagccatgcagatttcagattaatgatgcaagagaaaattgttaataatttaagtgtgcaggatattttgtcaaaagagttgagtagaataaaatga

SEQ ID NO: 50479 - DNA, 723 bp, Acinetobacter baumannii
atgcttgagaacttaaaaacgttcatagagcaaattgaagagaaagatcaagacaaagctgctgcttttaagcaagctttgatgatattaactgcgcctaacagtattgctctagccagtaacgaagacattcacttaagtgcagatggtcagctcaaccaaactgccggagatagcatcaatctgtctactcaaaagaacttgattgcacatgcccaaaataagattagcctttttgcagcgcaacaaggggcaagactgtatgcaggcaaaggtaaagtcgaaatacaggcgcaaggcgatggagctgatttaattgcccgtaaagctgttcaggtgatttcgactgaagacaaaatcgaagcgaccgcagccaaagaaattgttctcaccgcaggcggctctcaagtcaaaattactggatcgggtatttttatgaccacgagcggcaagtttgaggtgaaggctggacagcatttgtttatggggggcgggagtgtgaatagttcattaccgtatctaccagaacaaggaaaacaaaaatatggtgtatggtttgatgtaatggataaacaaggaaataaactaaaacctggtacggaatatattatttttgatgaacatgataaagaaattgagcgcggtaagttagatcgaactggcttggttaagttagaaactgaagagccgaataagcaatataaaatacatgtggtaaattga

SEQ ID NO: 50480 - DNA, 612 bp, Acinetobacter baumannii
atgagattatttttttatcctcatgcctgttcaatggcgattcatattgctttaaaagaaactggacaagaatttgatacagaatttgttgacttatcaacaaaagtcactggatccggattggattatttaaagattaatcctaaaggggcagttccagcacttggacttgaaaatggtaaagtcataactgaagttacaacgatactgacttatttagctgacttggttcctgagaaaaatctaatacctaaatctagttcttttgaacgttatgaaatgatgagtttattgtcatttattagtatggatatacataaaaatttctctgcttttttctacaaagaaaagattgattcttggattgaagtatccaaacataagttatcaagaagttttgattttattgaaaataaacttcagtcaaatcagtatttaaacggcaatgaaatctcaatcgcagatttctatttctttgtaatgctacattggtgtgactatttttctatagacttagagaaatggcctaaaattctcaatttgaaatataacttgggaaaaagaagttccgttcaagaagttctaaagtttgaatcaagtatagtattataa

SEQ ID NO: 50481 - DNA, 420 bp, Acinetobacter baumannii
atgactagaattaataacgcaatcgaaaaaattatccaacatccaaaagtatatgccttttcatcacttctaatgcggctaatgatatctgtaattttcatcttatctggattaggaaagatatttcaatattcgagtaatgctgggtatatggagtctatgggagtgtcatctgcattactgccattagcaattctggttgaatttggaggtggtttccttgtattgattggccttcaaacacggcttgcagcatttctattgtttggtttctcgttagtggcagcagtgctatttcatagtggttctgatatgaacagccaaattatgtttatgaaaaacatttcaatggctggaggtctattggctcttgttatctttggcgcaggtggccttagtgtagataagaaacttaaataa

SEQ ID NO: 50482 - DNA, 573 bp, Acinetobacter baumannii
atgaaacttttacatttagactcaagtgctctcggtgaattctcggctactcgggagattgggcaagcagtagttcaagagttaaaaaaacatggtcctttagaggtaacctatcgagatttgcatgtagaaccacttccacatttttcaaaacactttgatagcttgagtgaagaagcacaagttgatgaacgtattcttcaacaatttgaagaaacggatatttttgtactaggtgcaccaatgtacaacctaagtattccaaccaccttgaaagcttggattgaccgaattttaattgcaggtcggactttcagatatacagagaatgggccacaaggcttagtttcagctaagaaagttattattgtaagtgctcgtggtagtgcctatggtgatcaattccctatggatcatcaagaatcatatttaaaagatatttttaatttcttaggcgtacaagaggtatttgtagtacgtgcagaaggaatggcttttccgactcgttctcaatcaattagtcaagcaattaatagtattccacaaatgtttgctatgcctgctcaaaactaa

SEQ ID NO: 50483 - DNA, 918 bp, Acinetobacter baumannii
atgaaagatttaaatgatttatatatttttgctttaattgtcgaacatggtggtctaagtaaagtagaacaaaaaacaggtatatctaaatcaaaattaagccgaagactctcaaatttagagaaaaatttaaacgttaaattattacaacgagactctagacaaattaagcttacggcaatcggcgagcagatttatcaatatgtacaatcaatgcttttagaagcgcaaactgtttatgacttaatagatcagttgcgcggcgagccgattggatcaattactgtaagcattcctatagatgttgcagaaagaattatgcccctcattcttcctgaatttatggatagataccccaaagtagaaattaaatttattgtcactaacaagagagttgatattcttaaagaatctgtcgatatcggaatccgtattcgacagaacttagatagcgatcataatttagtaatgagacatcttggttatacacaatcagtattagtcgccagtccacaatatctcaaccaatatggtacacctacgcatcccagcgatttaagtaagcataaattgttaagtaatatcgaaaatgaaaatcaaacttggttctttagcaatcaaactattaatgaaaacgtaagtttgcctataaaaccatttatcaaagctgcaagtttaactttgcttaattgtttagctaccgatggaaaaggtattgctttgctgcctttgttaaaatgcaaaagcctgatactagaaaagaaacttatcgtcgttttacctgaatgggaacttccaactggaaattttcatttaatctttccatctcgaagcggtgctttaccagcatcaaaggtttttcttgattttttaatcgaaaaaattcctcctctacttaaagaaatgcaggatatttaa

SEQ ID NO: 50484 - DNA, 1062 bp, Acinetobacter baumannii
atgaaaaagatctttttaaatacaacactactaggcttgatgtatttgaacataagtcatggtgctaatgctcaaattacgatagatattcccgaagctccctctactgtacatgcggtttatgttagccaatcaagtaaaaaagttttaaatccatcggaaaaaattgaccggctatataaccgaaatcttcagcaagagtatgtactgcaacgtatgacagaacatacttatttttttcaatcccaattttatggaacgatgttttatgtaggtgaaaaaggagtactcttatttgacccagttgaaaatgctggagaaaagattttaaaagctatcttagaagtaacaaaactacctgttacaacaattgtctattcgcatgcgcacgctgatcatatcagttcagctccagtaattgttgaagcttctaaaaaggcaggtgtcaaagtacgtattatttcatctgatgctacagcagagcttttaaaccgaattaaaagtaaattgccaaaacctacggaaacaattccttttaaaaatggtagttttaattttgaaggggtgaatgttcaagtacatggtttcaaatatgcagcacatactgccgatacaggtgtttggttaattccaaatgagaaagttgcacatattcccgatctaataaatgccgatcaattaccttattggggtttcgctggtgctgaagttcctctttattttgaagaaaatttaaaagaattaaaaagtttaaattgggtatttctgagtggtggccatggaaatgttggatctaaggctgatgtagatttctatttagagttcctaaaagatatgaaacaagcagtgggccaatcatatggcgtggtgcagtggggagtaggagctcctgatcctcagaaaacaaattcacatatggcccagctaccagcatatcttgatgcaataggtaatcaggcaactgaatatttgcgaccaaaatatggacaatattatgggtttgaaacttcagttccaaagaatggtgaaatcacagctttattaatgtatgcctatcaatag

SEQ ID NO: 50485 - DNA, 225 bp, Acinetobacter baumannii
atgaaatttttaggaatattgtctatcccttttattatctccgcctgcattactaatcagaatgtgcaaaaggaagaagccccagaatgtatgaattatcatgcaatgatgacagcacctatgccagaacaggcaattgaaagcttaaaaaaaaagcttgttatgaaactagaaaatagctttgagcatttatatttaaaaaagaatttattattacgagaatag

SEQ ID NO: 50486 - DNA, 1335 bp, Acinetobacter baumannii
atgattaaaatagatgtgaacgatatcgtagatagagaaaaactagctcccctccagtgggtagtctttgttttaggtttcttagtatttttctgtgatggacttgatactggaattataggttttatagcaccacctttgttagatgaatggcaaatttcaaaggccgaattagctcctgtatttggtgctgctttaatcggcatgagtattggcgccttaatatcaggtatttttgcagataagtttggccgaaagaaaattatgattagcagcatgctaatcttatctatatttacaataatctcggcttactcgaccaatacagcagaactcattatctatagatttatcacgggacttgggttaggtgcgacgatgcctaatgtaagtacaatcgtttcagaatatatgcctaaaaagcatcgagcatttctcacgggtttagctggttgtggatttctaatgggagtatcttctggaggattcctttcagcttatctattgaaaatttttagttggtctgaattactaattattattggtttgatacctgcattacttacccttgtactcatttttaccctcccggaatccacacaatttcttattattaataatcaaaagaaaaaagctcttttaattttagaaaaaatacatggtaaaaaaattgataaagagcttgtcttatctatagctgaaaaggaacttgtcgaacagaataatccacttaaagatatctttagcaaatacttatttggttcattaatgttatggctttgctcttttatgagtttattagtgttttatctttttacgagctggatgccgacaattttaaaaactgttggttttgatctacaacaattaagtcttatgtctactttattcccattcgggggcgtgattggagctatgatcatgtgtagattcatggatagattaaatccaaccaaagtgattacttcctcatatttctcagcattcttattattcattcttcttagctttacgcatacaaacattagcatcttttcaatactgatctttatgattggaggcctattagcaggtgcccaaacagcattatttccgttagctactcttttttatccagcgaactgtagaggctctggcgtttcatggatgcatggaataagccgtattggggcaattttaggttcatttttaggttctttcatttttactttaaagctagatatgagttcaattttcttaagtttagccatacctacttttattgcttttatttgtttagcacttaagtggtatggggagctaaatatagctaaacaaaaatttaaagttgtctga

SEQ ID NO: 50487 - DNA, 864 bp, Acinetobacter baumannii
atgacagacctattcttctcaaatcttcaagaaagagaaattcaatacaatgcaagaaattcagtggctgattttgatgcttgtatgaaggaatatgcacgacttgcgcagaaatccaaagatgccattacaggcttatataatctacattacggcttagctagaagagaaacattagatatttttccagcaaagaaacagccttcaccaatttttatctatatccatggaggctattggcgggcacaaagtaaagatgatgcttgctctatggctgaaaattttgtagcacatggaatagcggtgtctacaattgaatatagcctctgtcctcaagcatcactttttgaaattgtgagagaagtaagaacatcgattgcttggatttaccataatgctaaaaattatggcatagaccctgagcaaatatatataggcgggagttcagctggaggacatttggttgcaatgctgtggaatgattgttggcaggaagaatttaatttgccaaaaaatgtcattaagggcgttcttgggttaagtggcctttataatttattacctctgtgcgataccaacattaatgaatggcttaatctcagtccagaacaagcaaccaacctcagcccttatgaaaatttaccattgccagaaaatgctgcaccactcatactcagtgtaggagagctagagacagaaggtttccaaaatcaaaccaattttttctactcaatatgcaaagaaaaaggattaaacgtttcattaattaaagatgaaggacataatcattttgatattgtgaatacccttgccgacaaagatagtctgctatttaaaaaaatgtatgaaataatctctgactaa

SEQ ID NO: 50488 - DNA, 300 bp, Acinetobacter baumannii
atgaaaaaatatattttgtttatctatgtcattttatctgtactagccctaccagcttgtactaaaaatacattatattttacacctgaagtgactggttatatttatgatagtaaaactcataagccattaagtaatcaaagtggagatatggggtttaatggtcgaactgatagtgataatgctaaagttaatttgaagtcagatggtaattttaccattcctgcagttacagcaacgtattactttataaaacctgatgtaaagcaatacaccaacttccctccagaaattttttaa

SEQ ID NO: 50489 - DNA, 429 bp, Acinetobacter baumannii
atgaaaaaatatttaatattcttttttcttatactctcgtgttcaattgcttcgggctgtacaaaaaaaatattatatttaactcctgaagcaactggatatctttatgacagtaaaactaaagagcctctacacaatgtaaatggatatattggtttctatttacctgatgagaaatcaacaacaataaaagtaaataacgatggtagttttactattaaaccactaataaaagaatactttttcattgaacctagtttggaggattataaaaacctcccaccattaatttatattagctttaaaaattatcaaaataaaacattagattactcagaaaagtttaatgaacaagttccagaagaaaaagctaattttgaacattataaaaaaattgatctaggtaaagtttacttagatcctgagtaa

SEQ ID NO: 50490 - DNA, 297 bp, Acinetobacter baumannii
atggatctttctaatattcttataggtgacacaacgtggtcctttgttttagaaattttggtccgttgtaccatcatgtttatcattatcattagttttctaaggctatctggtaaacgtggtattcggcaactctccttatttgagcttgccattattttatgtttaggttctgctgctggcgatcctatgtttactaaagatttaccgattgcccatgcattgatagcttttatcgctattctttctctatatcgtctggtcacttggggtatggtaaaacataaaaaaaattga

SEQ ID NO: 50491 - DNA, 2196 bp, Acinetobacter baumannii
atgaaccaaaactctaaaactagcgaagatagcatcgatttaaaagagttattcttttcattgattgcacagtggaaaatcatagcatgctgcgtggtcttaagtttaatttgtgccttgctatacttacggataacgccagatacttattctgtagatgcaatggtacaagttgaggacagtaaaggcgctgcctctgctgctttgcttggtgacctttctaaagtcagtggaggtctatctcaaaaatcaccagctgatccagaaatagagattcttcgttctagaatggttttaggacaagtcatccagaaccttaatcttgatattaacgtcaaagataaccaatcaggattgatcgacaagttaatttcacaagataagagtagacttgagtatcgtcatgaatctgtactgtacagtaatcaaaataataatttgattatacgagaacttaaagtacctgaatattatttagataaacccttaaagttagagttcaaaggtgcaaatcaattcactttaacatacaaagatcaagttgtatttaatggtcaattaaacaaaaaaaatatactaaatacaaatagaggtctttggcaggtacaacttaatgctcaaggtaacctgaaagaacaaagctatactttaactaaactcgctctaccaacagccgttaaaaattttaatgatatctatagtgttgctgaaaaaggtaaagtgactggtgttattggtttaaattatctaggtcaagatcctgagcacattacacaagtactaaataatgttctaactgtttatcaccaacaaaacattgagcgaaagtctttagaatctaaacaaactttagcttttcttgagaaacaattaccagagcttcgaaagcagctagaagattctgagatcaagtttaaccaatttcgtgaaaagtataaaacagtcgatgtaaatgctgagtcggagctattacttaagcaaaatattgatttagaaaagcttaaaatcgagctacaacagaaacaagctgagctttctgctaaatataccaatgatcatccattaatccgtcaaatcgatgcacaaattacagagattaataaaaagattgctgatcttaataatcgtttaactcaacttcctgaaacacaacgtttatatttacaactatatcgtgatgtaaaagtaaacacagagctctatacgtcgttactaaacagttatcaacagcttaaaattgctaatgcaggtgagattggtaatgttcgcattattgatactgctgtagaacctgttaaacctattaaacctaagaaattaattgttctaatactttctatttttattggtggttttatcggtgtattaattgcattattacgtaatatgatgcgtagcggagttaatgattcaactcaaattgaaaatgaattagatttaccagtttatgcgactgtacctcgttctcctattcaagaaactcgtatgagtatattgaaaaagaaaaagagtattcctattctggcagttaaaagtaatgatgatattgcaattgagagcttacgtagtattcgtacggctatccatttcgccttaacctcagcaaaaaataatattattatgattgctggcccatcaccagaagtcggtaaatcatttatttcaactaacttagcgactatctttgcacaaagcaataaacgagtactattgatcgatgccgatatgcgccgtggttatatgcataaatacttcgatgttgacgtgaaacctggtctttctgaattactaagtggccaagctgacttgacacaagttttacataaaacgcaagttgcgaatctcgacgtgattacccgtggtaagagtccaaccaacccttcagaaatgttgagctctacccagttcaaagacttactagagaagttccaaactcaatatgaccatatcattattgatactccaccagtgcttgcagtaactgatggtattattatttctcagtacactggcgtgaacttaattgttgctcgttatgctaagtctcatatgaaagagcttgaattaacagttaaccgctttgaacaagctggtgttaaagtgaatggctttatccttaatgatattcaacgctctggcggcggtggttatggctataactatgcttatgcatataaagcacaaaaagaagattaa

SEQ ID NO: 50492 - DNA, 429 bp, Acinetobacter baumannii
atgcagttacaaaatatcttagtagtctgtgtaggtaatatttgccgcagtccaatggcagaatactttttaaagacccaacatcctacattaaatatctcatctgctggtatttcagccctagtaggtcatactgcagatgacaaagcgattcattgtatggatcagttgaatattgatatgagaccacacgtggctcgccagctcagtgctgaattgatcaaacaaaatgatttgattttagtaatgagcaataatcagcaaaagcatattgaacaaacttggccatttgctaagggtaaaatttttaggcttggccattggcaagggcaaaatatacctgacccctatcagcatgaccaagctttttttgatcagacttgccgcaacattcaaagctatgtgcaagattggcgcactcaattataa

SEQ ID NO: 50493 - DNA, 1143 bp, Acinetobacter baumannii
atgcaaagtatcattggattacaaacaataaagggtttgaatgtgaagcatcagagcacattattatttttagccatttcactttcgtttacaggatgtgcagtcacctcaggcttacaaacttacgacttacctgaacaaggtacttttaaaacagaacaaggcgcagaggtttctgttgttcaactcacccaaaacaatattccaaagattagttctgaggctttgcgtccacaaggaaatataagcgccttatttaatactcctttttatcaataccgcttaagtgctggggatgttttatctattcagctttgggcttatcctgaaattactcctcctattcaaggtgcctctactgatattaaagcatttggataccctattgattctgcaggaaatgtacagttaccacttgtaggccaagttcacattgcagggaaaacactggctgagaccaataaatatttacgaagtcaatttgctaagtatttaaaaacacctgatgttgtagttcgcgtgttgtcatatcaagctaaacgctattttgttaatggtcaggttatgaaaagtggacaatacactttagatgatcaaccaattagtatttatacagccttaagtatggctggaggtgtaaatcaagagtctggtgataatactgatattcaactcattcgtaatggcgaagtttataatttaaatgtcgttgcacttgagaaacaaggttattcactacacaaattattagtccaacccaatgatacaatttatgtaaatactaaacaaaatcaaaaactctatgttatgggtgagtctaataaaagttcagcaattccattacgagatcagggaatgaccctaagtgatgtattgggcgagagtgaaggtgttaatccatactcggcaagtgcagctcgtatttatgtcatgcgtacagatttacaaacaaaaagatcaacaatctatcagctcaatttgagtagcattggtaaccttgcattatctaatcaattccaaatgcaaaaaaatgatattgtttatattgatgcaactggtttaacacgctggcagcgtattatgaaccagattgtaccattctcaagtgcactttatacctttgatcaattgggtaaaaactag

SEQ ID NO: 50494 - DNA, 1278 bp, Acinetobacter baumannii
atgtttcaacttgagcaactaaaaatagcaattatcggcttagggtatgttggattacctttggcagttgaatttggtaaacataaacctacaatcggatttgatataaatgaaaatcggatattagagttaaaaaacggatatgaccatacattagaagtgacttctgatgagttaaaacacgtacagcatttgtcgtatacagcacatattcaagacttacagaatataaactttttcattgtcactgtgccaacacccattgacgattttaaacaacctgacttgacccctctcataaaagcatcccaaagcattgctaaagttctaaaaaaaggcgatatcgttgtttatgagtcaacggtttatcctggtgcgacagaagaggtttgtatacccgaattagaaaaacattccggtttaaattttaataaagatttctttgttggttatagtccagaacgtattaatcctggtgataaacaacgacgtgtcactaatattttaaaaattacctcaggttcgactccagaggtcactgactatgttgatcaagtatataatttaattattgaggcgggtacacataaggccccgagtatcaaagtcgctgaggctgctaaagtcattgaaaatacacaaagagatgtgaatatcgctttaatcaatgagttggctctgatttttaataaaatgggtatcgatacagaagatgtactcaaggcagcaggtacaaaatggaattttttaaactttagacctggtttagttggtggtcattgtattggtgttgatccgtattatttaacgcataaagcagagtcaattggtttacatccagaaattattttggcagctcgtcgcttaaatgatcgtatgggtgaatatgttgcaacccaattgatcaaagaaatggtaaagaaacgtatccaagttgttggtgctcgtatattaattttaggtttgagttttaaagagaactgcccagatatacgaaatactaagattgtagatatggttaaagcactaaaagaatacgatttagatcttgatatttacgatccttgggtggatagtgccgaagttgaagcagagtatgggttagctccaatcatggaattaaaacaaggtcggtatgacgctatcgtaattgcagttgcacatgatcagtttaaggtaatgagtactgaagactttcattctttaggtaaaaaaaagcatgtcctttatgatttaaagcatgttcttaataaagtagatgcagatttaagactataa

SEQ ID NO: 50495 - DNA, 492 bp, Acinetobacter baumannii
atgtttaatcggcagtttgatatgttcaaggcaaagattcgtttagtttatatcgccatgatgagtgcaggtatttttacattgcagggctgtgataatggtaatcaaggtgcagaaaaaaaagtagaaattaagccagcaccgaaactaaccaatgatgcaactgtttatgctcaaaaagcatggacattaattaacacggttgagcatttagtttatgaaaaacaactcagccaaattgatgacaaagttcgtaaacctttacgtcaattaagtacagactggcgcattaatgtaaaaatgacggattcggtgacagaagggaaatacgcactctgtcgtaaggctctgacaagtttagatatatgggcacgcgaaacgctagaaaacaatagttcagttgcccaaaaacaagcggactatgagcgagataaggctcaatgtaaggatgcgatcgatacgccaaatcttggaaatacttcgccaaaataa

SEQ ID NO: 50496 - DNA, 1152 bp, Acinetobacter baumannii
atgaccgatcaattaagagcaaaatttgaaaatttagagcttaatgctggtttaggaaaaattagtgcctttatctccatggtattaagtttactttgcttatttggtgctttatgttttttatttcccagtgtgttgacaactcctgagttacgtccactttatgcaaagcactatagtcttttttattatggcctgatcacaggcattattattagcgcaggttttggagcatttagtgcaatcatacgaaaaaatagatatggcttttatggtttatgctttgcactcatagcagtagtattaggctgtggtgtaattcatgctccagtcattccaagtgtaccattttatgcaggtattgattattttgtacttaccttagtcatcttggcttttattttcataccccttgaaggattttttggtaaaaaccctgaacaaaagatcttaagagtgggctgggtgactgatatgaaatatttcatggtcagtcatattggcattcaactatttagcttcttaacggttatgccaattcaatattggattacacatttgcctgataatccaattgtgccgtatgttcaagctcaaccaatttggctgcaattcattgaattgctcattgtggttgattttacagtgtattggttgcatcgagccatgcatgaagttaactttttatggcggtttcatgcgattcatcattcgaccgagtatatggattggttagcatcttcccgtttacatgttgttgaagtcttaatgactcgttttattgccactttaccgatttttcttttagggtttcatacttctgctgtttttgcttatttaatttttatttcgtttcatgcgatttttattcattcgaatgtacgttttcgctttccatatctacgttggtttatcgcaacaccagaatttcatcattggcatcattcttcagaaaaacctgcgattgataaaaattatgctgcttttattccactctatgatgtcatatttaaaaccgtatatatgccgaatcacttggcaagtgtatatggaacagtaggttataaaattccaaatagctttgtaaaacagtttacttggccatttaaaaaatacatgaaaagctttttaaagcattggcgtgatcagtaa

SEQ ID NO: 50497 - DNA, 891 bp, Acinetobacter baumannii
atggatttaggtttgattaaagtttttgtctgtatttacgagtctcggcatattagtaaagctgcggataaattgaatttgagccagccttctgtaacttataatttgaatcgtttacgccgtcagttaaatgacgagttgtttacccgaagccgaggcggtgtcgagccgacaaaagttgcacatgagctttatccaatttttcatcaagcaatttttaatattgaatcagcgattgctcaagcacaggaatttcatcctcaaaattcaaataaaactttccgaatcggactctctgacgcaggggagatatgtctcttgcctagtcttatggcttttttgcagaaaacagcaccctctattcaaattgagattgaagagattcagtcgtctaaggttgagcagtggcttattgatggctttttagatctagccgtatttaatagtacgcagaccataatgcctaaaatagaaacgcgtactttatttgaagaaagatatgtatgtattgctagagctgaccatccaaggctacaacagcaactgacgttagaacaatatttgcaagaagatcatgttgccatcaagtcatcgacagggcatatccaagttgagcaatatttaaaaacaatggatttgaagcgacgaattcgtttagaggttccacattttagtgttttacaaggtgttttgcagagttcagatatgttggtgaccttaccgtcgcgagcagctcggcattatttagctcatggtaatgtccaaatgtttgaattaccttttgctatggattcttttaaagtgagcttaaactggtttaatcgtagtgatgatattattgccagaaaatggctgattcaatctgtaggtcaaatatttgaagttttataa

SEQ ID NO: 50498 - DNA, 1356 bp, Acinetobacter baumannii
atggaaaaactaaatgcaaatcaattgattgatgaagcaagattaacgtccttacattggcgagtgatcttgctgagtgcactcataattatttttgatggctatgacttagtcatttatggcgttgcattacccaagcttatgcaacactggcagttagatagtatgactgctggattgctgggcagtgtcgcattatttggcatgatgtttggtgccatgattttcggtagcttagctgacaaattagagtcctatggctttagccgtaagcgtttaattatgctgtgtgtccttatttttagtggttttacggtgttatgtggttttgccaacagccccaaagagtttgccatttaccgttttattgccggcctgggtttgggcggagtaatgccgaacgttattgctttaatgaccgaattcgctccaaagaaattaagatcaactttggtatcgctcatgtttagcggctatgcgattggcgggatgagttcagcacttttaggcatgtggttggttcctaaatttggttggcaaatcatgtttattctggcgggtattccactcatttcattaccgattatttggaaatttttacctgaatcaattgattatctggttcgccaaaaaaaatggaatgaggtgcgtgacttacttcaacaattagcaccagaacaaagcataactgatcatacgagcatcgtattacaccaagaaaaccaacaaactgcggctcggcctttggttgctctatttaccgagaaccgtgctttagtcactgtatttttctggctaagtgtatttatggctttactcatggtgtatgcgctcggcaactggataccaaaactcatggtcgaggcaggatatgatttatcaaccagtctggtctttttactggcactaaacttgggcgggatgctgggcgcaatcggtggaggatactttgctgatcgttttcaccttggtaaggtcatttgttcactcttctttgcaggtgcagtgtcgctctacttgctaagctatgctttacccatggtcattttatatttctgtgttgccattgcaggtgcagcgtctatcggtgggcaaattttattgctcgcttatatggctcagttctatccttcaccaattcgcagcactggcattggtatggctttgggtgtaggtcggattggggcgattttaggtccgattttatgcgattggcttttaagtttgcatctacccattgaatataattttatcgcgatagccattccttgtgtgctagcagccttaagtgttattgccataagtatttgtaatcgaaccaaacgtgtaatgctaaattcaagtatatctccataa

SEQ ID NO: 50499 - DNA, 1278 bp, Acinetobacter baumannii
atgaatacatatattcgaattgccgtggtcggtggtggtattgctggtctggctttagcaagtaatttaagtaaacacgcccatttagacgtgcaaatgtttgaatctgcacctcagttttctgaaattggggcagggatttcttttggtgccaatgcagttaaagcgattgaactgttaggtttaactaacgaatatcatgcgattgcagataaagtatcggctccatttcaagaggtttggtttcaatggcgcaatggctataccgatgaatatttatctgcatctatcgcggcaggtgtagggcagtcatctgttcatcgtgctgattttctagatgcaattattcctcacatgcctacgcaaaatgtccatttttctaaacgtctagaggcgattgaagaacaagatgatcaggtgattttgcattttaatgatggtactcagcatgaatgtgactatttgataggggcggacggtatccgctctgtgacacgccaatatgttttagcttctcatcatttaccaccagttcatccacgtttttcaggaacttgggcatatcgtggcattatttctcacgcttcatttaaagaagctttgcagcaaataaatggcgatacagatttagcagatattccccaaatgttattgggcaaagataaacatattttaacgttcccaattcgtaaaggggagcaaattaatatcgttgctttctgctcaaaccgcgaagatacggtattaccagccgatacaccgtggactaagcctgtagataaagctcaaatgctttccgatttttcagactggagtgaaagctgtcaaacattactcggtttaattgaacagcctactatttgggccttacatgaaattgaagaactctcgacttatcaaagcgtctcgggacgtgtgattcttatgggtgacgctgcacatgccatgttacctcaccaaggtgcaggggcaggccaaggtcttgaagatgcattaatccttgcaactttattgtcgacaaagaacttacaagcagatcaattaaccgatgtgtctgccatctatgaaaatttgcgtttaaaacgcgcttgtcgtgttcaacaaacttctcgtgagtctggcgaaatttatgaatgttattcagctcaatacccaacatttgccgcaattggcgaacatcttgaacatcgttttgactggttatggcaacacgatctagaacaggatgttgcagaagcacagcaacaattacatcagctaggaatggcaactatttaa

SEQ ID NO: 50500 - DNA, 189 bp, Acinetobacter baumannii
atgaaattagttaaattatcttttgcgggtcttgctctttttgcatcagttcaaacttttgctgctgagcaaactacagctacaccaactacccaagcttctccatcaaaatttgttgaagtacctgtagctaatacagataaagcagcttcggaagtagctgcatctgaagctgctcctgcaaaataa

SEQ ID NO: 50501 - DNA, 660 bp, Acinetobacter baumannii
ttgtatggggtctttcttatatatttatttatgaatactgttaaaagaaatcgtagtccaagcatagaaaaaaccgaagctactaaaaattcaattttaaaggccgctttaaaaaaatttttagaagtcggctttgcaaataccaaaattagagatattgcggatttggctcaagtcggggtgggcactgtttattgttatttcaaaaccaaagaagatctctttgaaggggtcattaatattatgttgaatgaagaatttatggtggttaaagcggatactctaaagccagatcaaagcgtatatgaatttttatataaacattttgaacagattattgaatctatctattcatcaggacgtgatggtatttctaaattagtgattaaagaaggacaaaactttcctcagcttaaagaaatttattttaataagatggtgactccatatctacgtgagtttgaaaaattagctacgattgccaacgagcgtaaagaaatctctctaacctgtacacctgcagaatttgcactacttattgtggctcccatctggatgggtattttatataacggaatattacaagagagtgagtcaatatctattaatcatattttttactcaaatttatatgctttattccactcaaaagtttcatga

SEQ ID NO: 50502 - DNA, 720 bp, Acinetobacter baumannii
atgatagaaaaagataataacttagatgcaaattttttagaccatagggttgcaacttataaggctattgtaggtttagtacctggatttggttctatcctttcagaagttgtaggcgctattattcctgaccagcgaatggatagattagtacaatatataaaattattggatgaaaaagttcaaaaaattgatagtaatttattagaaaatgctaaacagaatgaattggctatagatctaattgaagagggatttgttcaggcatccagatcactgtctaacgaaagaagagaatatattgcaaacatagtagcaaatggtatatcagatgaagaaaaaaattatgcagatagtaagtatgttttaagattattaggcgagcttaatgatcaagaagtgatttggttgcgtttctttttagagccaacaattaatggcgatgaagaatttcgacaaaagcatcaaaacgttattgagccagttaaaacatatattggtgtcgatgataatattttagagaagagagatattcaggaaagctataaatcgcatttagaaaggctaggattgattaaatcgaaatatcgaattgatagaaaaacaggattgcctcaatttgatcaacaggggatgccaaagatttctcatagatttattactccccttggaaagttaatgctaaaaagaattggtcttataaattcagcgaatacataa

SEQ ID NO: 50503 - DNA, 624 bp, Acinetobacter baumannii
ttgcagcttaaagaattagttggaaaaaagctaactttagaagaggtaaattctatctatccaattccatttttattaggtgttgttggaaccacaaaatctggaaaaacaacttttttaaatcaagctttaagagcctccactcagacgaataggacaaatatcatttatggtgaagtcttatcagtccctagaaaatatgataattattttattgtaatagatggtgatggagctaaattaaaacagcaatttgaaattattaataaagttgattatttattggtttttttagaccataatatgagtcatacaaaaaagcaactaaatactcatagattacgtgagcatgaaaatttttttgaacatttaaagggatatttatcagagcataaaaaaataaaaaaaattcatttagttttaaataagcaagatttatgggatagtagtgcaaagaaaaaacagctttgtgattggcttgaaacaaaagttcaagattgtattgatagtttgaatattgaggtttcctactcatttcatagtaatttgaattcggcatccgttaatgaactaattaataatatttctcaagaggttgtgagtgcaaatgataggaagaaatga

SEQ ID NO: 50504 - DNA, 534 bp, Acinetobacter baumannii
atgataggaagaaatgatcagaatattttaattgtagagtcacctattgaatttgtgttaattggcactttccataacagaagagttgttttagcgaagtccagtagtgctcaaattgacttactatcggcaagaataaaggagcgctcaaaacaatcattctataatcaattttttaagtttaaaattgaaaaaaagcctttaatagttgagtcagtttatgttagaaaatcagggatggatcgttatgataatatagaatttgtatggaggggattagcaacaaaaaataatattgattttttaaatgaaattttaaataataatgtttcttatatatatactggtattaataattatcagaaagttgagttggattggattattgctgagttagtattttttgctaatgagtttaataataaaagatatcaagtactctctaatattaatatctttatgtatttttttgcatttttatatttttgtatttttatttatatttgggtttttaaatttagaatcggtttttaa

SEQ ID NO: 50505 - DNA, 1413 bp, Acinetobacter baumannii
atgattaaaaaaatattactctcattcatcgctatttttacagttgttagtggaattatcattttctactggcgtgatgttcaatataacccaaataaaatcgactttttcctttattttttattattgccagcaatcattactttggtgatcttatcaccttggttaatttatagtgtttataaaagctacaaagaaaagaaagagcaggctgcaaatcaaagtcaagatgatgatagtcaaaaatcatctgctgcaattgaacaacctctagaacagctagattttaatgtatattccgcttttgctatacatgccctaggcgagaatgaaactattattgaagaaatacaaaattttaaaagtccggagcttgatgagcaattgttgaattcgtatggattgcctcttttatcttatcgaattaaagatttagctgagacaaatgatgaggatattcaatacgctgcttcaccaagacaagttcgtatcatgtctttaatcaggcaacaactagaacaaaatatagagaatttgtatcgcttggctgaacatttaaagcgctcaattttattttatgaatctcatcagatccgtgaatatcatatgcattctgcatgggtcgatccaaatagcgaatatgaagatgcggaaacacccgtagttgaagtacaccgtttaaatcgactgaatttgcatatttttcttccagaagatttattacatgtttggaatgatgagcaaagtaatgatctgattttagagttttttaatgagattggcattatttctcaaaaagttcatatcgaatatcactttttgggtgagcgtgtagcttatcaagaatttattcatttattaaaacgcattcaaaagaaagaacatgaggtatttctcatgctggctgttgattcagagattgatcaagatcttattgatgaaaaatcatggatggtcaaagattatattccggctgaatttgctgcaagctgcctccttgcggacccatcattaaaaatcgaagaactcgaaccagctaaaaacttaaaaattgtggtgggccaagaaaaagcagccaaagttcttcatacgctgaacttaaatgaattacagcagtatgagggagatgagccatatgtacttattctttcagatcagacagatataaaagcagcgaagcaattacaacagcagtttgcacaaacatctgttgaaccacatcactatatttatgtgaaatcttcattggggcatacccagcatttagttgatatttatggctttatgctcagtatgcattttcctgaacatatcgttccttttgtctttggagaaaatacagtgtcagcacatacatttgtgcagagtgtcactgaaaattcagaagatgatgcgatggtgttgaatagctaa

SEQ ID NO: 50506 - DNA, 1812 bp, Acinetobacter baumannii
gtgatagaagagcttttaccgttttatgaaaaacaattacaagaatttggacaacaatctcgggaatttgcccaaaaatatccaaaaattgctcagcgcttatctttaaatcaagagcaaattgatgacccacatattgaacgtctgattcaggctttttcgctgattgctgctcgaatcgataaaaaactaacagacagttacgatgtttttactcgttctttatttgaggtgatgtttcctcaatacttacgacattttcctgcgtgttcagttgttagttttgaagatattaataagattaaacagcttacagaacctcatcttgtacctcatcatacggttttgaaatctcgtagtttcaaaggggtgcagtgtgagtttaatacaactcaagatgttaaattactgcctattcatttaagtggtttagattttaaaactacacctagtgcacatatgcacttaaatcaaaatgcgacgttgagccttaaatttgaaatttttaataacgctcatgcttgtttaactgatgagaagcttcctatttatttggatgctatctctaattttcctctacaggtccttgatagtattttcaaaaaaggaaccagttttgcggttaaatatggacaaacaattgtagaattgagcaagaatccattcgaattgattggttttgcagaacaagaaagtttattaccgcttgatcaacatacccatcatgcttatcgtttgttgatggaatacttttgtttcccggaaaagtttagttatcttaagctcgatttggattttttaaagcgaatacctcagcatgtatccgaatttgagcttttaattcatttcaaattaaacttaaatgatcaagccgttgttagaaactattctgagctaaatattgcaaactttaaattatttactaccccagtaattaatttatttgaaaaatatgctgaacctcagaagatagttcacaagcagttagaatatcctttagttacagatgcacatcatcctgagttttatcaggtatattcaatacttgagatgaatatggtgcgtgaaaaaacaaatcaggaagaaagctatgttcctgttttggctttttttgcgatgagccattaccacaatgatacagctcgctttttttactcagtaaactatcaaaagttacagtccaatttcgttgaaatgggctattcgattatttctaaaaatttaaatccattttcaacgcgctcagattttattagtaccaaattattatgttcaaaccgtgatttacctcatgaagcactgggtcagtctaataacgtattaaatttaaatgatagtagcttggcgagacgtgccattgttttaaaacgacctacaaagccttataagtttgaacaaggccaaagtgaacagtggcgtgtgatctcgcatctttcattaaatagcttagcacttatgaaaggggatgctgtttctcatgttaaagagctgctggctttatataacttaccgcagtcaaaagaaaactatttaattatagaatcaattaaaaaattagaattttctcttacccataaactcgtagatggcaaaccatttccaatgtttgtaagaggagtaaaagctgaattacaaattgattcatccgtatttagagggcatagcttatatatttttagtcagttattaagtcgtgtttttaatttaaaggttcaaattaatagttttgttgatttggtggttaaggattattcatctcagcaggagttataccaatgcagtcagaacgttggtggcaagactcttctgtaa

SEQ ID NO: 50507 - DNA, 681 bp, Acinetobacter baumannii
gtgttaaagcaaagtgttttgatactttttttaattggtaactatgttggtttggcttgtgcacaagctgcagaattagagcctataaaactaaagaaaagctgtgttaagaaaaatcctataattgaagggcaaactgatccagaattattaaatctttttaaacaagtatgtgatacagataattctactcaaaagaatgatttattagctaaagcagctatgcgtttttatcaaaccaaccaaccagttaaggcattaaatttagctaatcaattacagagtcaaaacgttcgtggttcattattaacagatgtattgtttttatcaggtgtaagtattgcaaataactctttgcaacaaatgcgtagtcaagaaatgcgatatttaacaaatgacgtaacatatccccctgcgaaacagttaattgaaaatattcatacagcaatgccagcacctgatccttcaagtttcaaaactagctcagaaggtagttcagctgataatgaaaaaagaagttatagaaaacaaaatgtagtgcgtaatcgggtttctactcctcgaacgacaactaagcgtacagtaactcccgtaaaaacatctgcggttaaaccaaaaacagcacctgttgcgagtgttagtaaatcaaaaagttcgccttttgaccctttaactaaataa

SEQ ID NO: 50508 - DNA, 1578 bp, Acinetobacter baumannii
atgaatatacgaccactcatcggtttggcaggtgccatttttgcagccatgactgtcgaatttaataaccgaattagcagcattaccttggtcgatattcgcggtgagatgggtattagtgtcgactctggttattgggtcagcagtatttatgccagtgccatgattattgggatgatcctgtccaccagttgggccgttattttttccatgcgtcgggttcttctttttgcgataggactttgcctcttctctagcgttttaattccttttagcccaaatatcgaaatattttatttattacggggcttacaaggactcgccaatggtttaaccattcctttattaatggcatgtgcacttagattcctaggacctgaaattcgtctatggggcttggcctgctatgcattgacagcaacttttttcccaaacttaagcgctgcgcttgctgccttttatttagatgtgattggttggaagatgatatttttccaaaccattcctttttgtgctttaagtgctgcgttagtatacttcggtattccgcaagatccgttaaattactcaagaataaaaacttacgattggactggcgcgattctagccattattggtttggcaacccttagtaccatgcttttgcatggcaatcatttggactggttccattcaaaattgatttgtgttttggctttaataagtgccattaccctacctttatttttaatacatgaatggcgctatccaacaccattaattaaaccgcaaatgctcgaaatacgaaattttggttatgctgttattgcgttgttctgctttgtggttattggtatgtcaaccagtacattaccccttaattacttaagcgccgtgcatggttataagcctactcaaaccatgtggattggcttacaaattgccgcattacaatttatctatatcccgattgttattaaagttttgaaccaagcttgggttgatagccgatatgtacatggctttggtttacttttggttatggttggctgcttaggggcaagtcaacttgatacgacttggaaccaagaccaattctatttttggcatgcaatctcatgtttaggtcaaacctgtgtagtgctttctctcctcatgatgggtacaaatagtgtccacccaactatggcaatctatgcttcgcctatgattaacaccccgcgtgctattagcggcgtactcggtgtatgccttttggactgggtcaatcgagtacgtggcgaataccattcaacacgactgattgaaaataccgcacaacatgtttttcaaaatattcaaggtcctgttattaatcctcttaccccgcctgtgctgagtgcagatggtaccgaacgtgtttccggtggtttatctgccttaaattctgcgattcaggcacagcaatcagtgttagtcattagtgatcaatatctgattttagcgggacttactgcaattttatttatcgttatgctgattttgccagttagaacttatccaccacgcattgctctcattaagttaatgaatagtcataactcaggaaaatctttatga

SEQ ID NO: 50509 - DNA, 747 bp, Acinetobacter baumannii
gtgatagatgcaacaataaaagccgctcaaattcaggcaaattacgctttaatctctgcatctataggtgcagtgggtattatcttagggatcttaatctcatggtacacagctttacatttgcaaaaggttgcacgattagctgagacaaggcgagatgtttatttagagttgattgaacattactcatttatggtgaatggtttttcaaaattccttctagactctcatagctggacttttttctttgaaaatataactaaattttgtattacggtagataaagcagcatttattagtactactgaaacaaaaaaagaactttatgagtttcttgaaagctttaatgataatctgaatagaagaattcaatcagttaatgagtttatggaagcagtcgaagaattagaacaactaaaaataaaaaggaaaaatctaacagaaatcttcaataaaaaaatggaacttttagatagtctgcaaattcaaaatcctagagatgaacggatacctaaaattctaaattttattgatgaaaatctgaaagaaagtgaaaaattagagaaattaatctcagatcaagaaatagatacttttactaagaaaaatgaatgtcatactcaacttagagaaatgttggatgaagttaatgatttaaccttaccaataacacatagtttgagaaaagaactaggagctaaaacagatatcaaattagactataaaatccatcaaaacaataaataa

SEQ ID NO: 50510 - DNA, 2400 bp, Acinetobacter baumannii
atgaaatctacatctattaatataagtaggttttttataaaaacctatgcgttaattcaaatagtatttgctcttattctgacctttggtggtgcttatttactgtatttaggaggctcaatttattatttatttacaggtattcttcttttaatttctggaatatatatctttagaattaaactatcaggaactaaaatctttgcagtgatttttgtttacacattaatttggacaatgtgggaagcgggcactagattttggggctggatacctcgtttagcaactatagctatatttgctttttttctaactttactacttccatattttgagcatgggataagaaaaaaaattgcttatagctttactggtttaattgttatttgtttctttacggctggagcattagcatggtatccatattttactacgcttgataatagtcaaattccccaaaatactacgaatacctatcattcagttagtgcccagccagacgatgattggcgttattatgggcgggatacgcaaggaacccgcttttcaccatccaaccaaattactcctgagaatattaatcaattaaaacaagtctgggtaactcgtacaggagatatgcctcctatagataaaaaaaataaatgggcagctcaaactacaccaatcaaagtcaatgatgctctttatttatgtactgctaccaataatatgctgaaattagatgcgcgaactggtaagaaaatttgggaatataagcataatttagcttacgagaaattaccgtcgacagcagtgtgtcgcggtgtcacattctatacttcaaaagtaattcctgagaatgaaatatgtcatgaaaaggtgatagaaggcacgctagatatgcaacttatagcggtagatgcaaaaacaggaaaggcttgtccccaatttggtacaaaaggacatgtaaacttgctagaaggaattggtcatacagttccaggattcatggctgttacgtcgccaccaccagtagtaaatggagtaattgtagttaatcataaagttcaagataaccaacgtcgtacagcaccatctggggtaatacgtgcgtacgatgttgatacaggctctcttaaatgggcttgggatgtaagacaaccaaatcgacatggattacctccaaaaggtgaaacctatagccgtggtacgccgaactcttggacagttatgactgttgatgaaaaattaaatacagtctatgttccaacaggaagttcagcgcccgactactatagcgctttacgtacagaagaagaaaatcaaatttctaccgcagttgttgcattggacgctctaacaggggtaaaaaaatggagctttcaaactgttcataaggatgcatgggattatgatttaggatcacaagcaactctacttgattataaagatcaatcaggaaatgttgttcctgcactcattatgccaacaaaaagaggtcaaacctttgtcttaaaccgaattacagggaagccgatttcaaacgttgtcgagcgccaagctcccaaatctattattccagatgatgtgcgttcgcctacacaaccatggtctgtagatattcctcgattagggttttcagatttaacagaatcaaaaatgtggggcatatcaccaattgatcaaatgctttgtcgtattaaatatagacaggcatattatgttggtgaatttacgcctcctacggttaataagccatggattcaatatcctggatttaatggtggtagtgattggggcagcatagcttataaccctaaaaatggcattttgatagctaactggagtaatacccctatgtacaaccagttgattgcaagagctaaagcagatcaagaaggcattttaccgatggatgatccgaaatttagtgctaagaaaaatggctcaattgcggcaatggctgaatctccttatgcagtaaatgttcaaccattctatgctccaattaccaatgtgctttgtaatgaaccgccttatggcatggttaccgctattaatatgaacaccaagaaagtgatttggcaaaaacctttgggaactgcagagcacaatggtccatttggattgccaacgtacttacctattaatattggtacacctaataatggtgggcctattattacagatggtggagttgtattcgttgctgctgcaactgataaccgtttgcatgcctttgatagtaaaactggtaagtcgatctggagtgccaaattgcctgcgggtggacaagcaacacctatgacttattctattgatggtgagcagtatgttgtcattgttgcaggtggccattactttatgcaaacaccgcccggtgactatgtagttgcttttaaactaatgaaaaaataa

SEQ ID NO: 50511 - DNA, 351 bp, Acinetobacter baumannii
atgaataaacttccgctaaatcatattgaacgcaccttaaaaatcattggtgggcgttggaaaatgatgattctttttcatctgattgatagtccaaaaagacaatcggaacttcttcgccttattccaaatattagccagaaggttttgattcaacaacttagagagatggaagagcacggcattgtaagtcgttttgttcatccagtcgtacctccaaaagttgaatatagtgtaactaccttaggttttagcttaagtcctatttgtaaacaactatgtgactggggtgaaaaacatctaaaagaagaagaaaccaataatcaaaaaaatcaacttaagcaaaaatag

SEQ ID NO: 50512 - DNA, 990 bp, Acinetobacter baumannii
atgaaagctattcaatttgataattttggtgaaccttcagttttaaaatctgtagatattgtaaaaccagaaattttaccaaatgaagtattaattaaagtgagtcaaattggggttaattatcatgaaactctacaaagacaaggtaattatcctggacctgctttatctctcccagcgatattaggctctgaagtagtgggtacagttgaagaattagggattgatattaactatattcaagttgggtcaagagttgctgttcctctctttgcaattcaaccaactggtggatatgcggaatatgtaaaaataccagcaaatttcttagttcctattccagattcaataagtgatgaacaagctttaagtacgatgctacaaggattagttgcatattttttacttaaagaaaactctatacaaggtaaagttgtattagtaaccgctgctgctggcggggtaggttcattacttgtcgaacttgctaagattcaaggtgcaagtaaagtaataggaatagtgggttcagatgaaaaaattgaatatttaaagactaaaggtattgattacggtctaaactacaaagcaaaagattggactcaaagtttaagtgagatatcagatagctcacctattgatttaatatttgattcagttggtggtgatattgctcaaacgatacttcaaaaattaaatacttttggaacatttgtgagctatggagctgctagtggcgtattaccggaactaaatgtaaatgatataaatcgatttattttccttagtcaaacatttaaaggttttgcattatttaactctttaaatgaaatatctattaaagagggtttaactgacctatttaaattaattgaagaaggtaaattaaaaccaacaattgatcatatctatcaatttgatgatatggttaatgttcatacattacttgaacagaataaaacaataggtaaagtgatcgtttctatataa

SEQ ID NO: 50513 - DNA, 393 bp, Acinetobacter baumannii
atgagatattggatctttcctttactaatgctaatgatgtcaaattattcaaacgcaactgaggacaatacaattgaaatctcacttattcagaatgattacaatgcatggttagataaaggaaaaacattcattaaatgggatgaaattataaaaaaatctcctgaaaatgctgtaactccagacgaagttcaaaaagattttgaagaaaatcaggtcttattttataaaaaatatagtaataaatggttcagaattaaaggatcagtacaaaatgtacaaatagaaaataatgaagtttttatcaatttaaatagcaaataccatacttttagagcctatacagaacaaaccgactacgcttctgaatggctttgttgcacaaagatttaa

SEQ ID NO: 50514 - DNA, 903 bp, Acinetobacter baumannii
ttgagtacaaaagcccaacgggaaattgcccataaattaaaagtgtttgctcatgctgaacaaaatggcaatgttgcattgacttgtcgatattttggtatttcacgagatactttttatcgttggaagaagaattataaatccaaaggagagataggattagtcaacagtaagccatgcccacagaaccctaaattacgcacccctgctgagatcgaagagaagattattcatttacgtcaacactatcattttggacggctacggatcagttggtatttatggcgttatcaccaaattaagatttcagcagctggcgtataccatgttttaaaacggcatggcatgaatcggttaccccaaaatcagcgtaaacgttctattcctactcatcaacgttatgaaaaacaagtaccagggcatcatgtgcaagttgatgtaaagtttcttttttttaaagatcagaagggaaaacaggtcaaacgctatcaatataccgctattgatgatgcaactagaattagggcattaaagatttacgatagacataatcaagccaatgctattgatttcgtcaatgatgtgatagacaaatttcctttccgtatccataccattcagactgataacggtcatgaatttcaatccaaattccattggcatctgaatgatctggccattcatcatcgctatattaaaccccgaacacccaaacataacggtaaggtcgaacgatctcataagacggagaaaatggagttctaccagttattagactataccgatgatgttgatttaaaagccaagctagccgaatgggaggcattttacaattatgcccgacctcatgcagctatgaatggcaaaacaccctatgaacgattaaaagaaaagttatgctaa

SEQ ID NO: 50515 - DNA, 216 bp, Acinetobacter baumannii
ttgccaataggtgatcttgatgagcatcagatcgaatatgaaaccctaattttagaaaagtgccgtaaagagttctgtgcgggttatgcggaagcctacttagctgaaaatggattaacactcgatgatattagtctgcgagggcgtgatgtttcagaacaatacaataaagcgattaatcataaagaatttaagtacggggaatataatgtgtga

SEQ ID NO: 50516 - DNA, 210 bp, Acinetobacter baumannii
atggatagcaaacaatatacttaccgtgttatatggtcagcagaagataatgaatatgttggattgtgtgctgagtttccattattgtcttggcttgatgcggatcagcctaaagcgctttcaggaatagtagagctcattgctgatgttgtcgatgatatgattagcaagaatgaaaaagttcctgcatcactttccgagagaatatag

SEQ ID NO: 50517 - DNA, 1335 bp, Acinetobacter baumannii
atgactcaaactatccaagaatttgaacccgtgttacgtgaatctgcaacgtttgaccgtttaaccattcaagaaatccagcgtgcagcggcaaccggcatctatgacatccgtggcggtggtaccaaacgtaaagtgccacactttgatgatttgctgctgcttggtgcaagcatgtcacgctacccgctggaaggctatcgtgaaaaatgcggtactgatgtggtactgggtacacgctttgcgaaaaaaccgattcatttaaaaattcctgtaacgattgccggtatgagctttggtgcattatctgccaatgccaaagaatctttaggccgcggtgcctctatggtcggcacatctaccaccaccggtgacggtggcatgacccctgaagaacgtggtcattcgcaaacattggtgtatcaatatttgccatcacgctacggcatgaatcctgacgatttgcgtaaagcagatgcgattgaaatcgtactcggacaaggcgctaaacccggcggtggcggtatgctgctgggcatgaaagtgacggaacgtgtggcaggcatgcgtactttgccagtgggtgtcgatcagcgcagtgcttgccgtcatccggactggacgggtccagatgacttggcaattaaaattgccgaaatccgtgaaatcaccgattgggaaaagccaatttatgtcaaaatcggggccagccgtccatattatgacgtaaaactggcggtgaaagcgggtgcagatgtgatcgtgctggatggtatgcaaggcggtacagcagcgacccaggaagtatttattgagcacgtcggtattcctattcttcctgccattccgcaagcggtacaagccttgcaggaaatgggcatgcaccgtaaggttcagctgattgtttctggtggtatccgcacaggtgccgatgtggccaaagcgatggcattgggagcagatgcggtagcaattggtacagcagcgctgattgcgctcggagataaccatccgcgtctagataaagaactgaaagaaattggttcagcagcgggttattatgatgactggcaaaatggccgtgaccctgcagggattacgacccaggatccagaactatcaaaacgtctcgatccggttgaaggtggacgccatttggccaattacctgcgtgttttagtcttggaagcacaaaccatggcacgtgcctgcggtaaatcgcatttgcataatctggatccggaagatctggtggcactgaatgtcgaggcggcggcaatggctcgtgtaccgcttgctggaaccaattggattccaggtcaaacgcagtattaa

SEQ ID NO: 50518 - DNA, 726 bp, Acinetobacter baumannii
atgaatacagcatttgcagaaaaaatcagcacttcaattttaaaagatgaatttgatttaagcgtagacagcatccgtgatttaaaccaggccctgcatagcaaagaactgatcgacagcattgtagactggaaagtcagcaatccaggcggccagcataatattgcagttggcattaaagcccctgtgaatgtcaccattgacggccatgccggatattactgcgccggcatgaatcaagaagctcatgtcatcgtcaacggtaatgttggggtgggcgtagctgaaaatatgatgtcaggttcagtgtatatcaaaggcaatgcctctcaagcagcaggcgcaacagcgcatggtggtctgctggtcattgaaggggatgctggggcacgctgtggcatttcaatgaaaggcgtcgatattgtggtaggcggcagtattggacacatgagctgctttatgggacaggctggccgtctggtggtttgtggtgatgcaggcgacgcgttgggcgactcgctgtatgaaaccagaatttatgtcaaaggtgtggtgaagtctctaggttcagactgtattgaaaaagaaatgcgtcaggaacatctggcagaactggcagaactgctgtctaaagccggatttgatgaagatcctgcttctttcaaacgttatggttcggcacgccaactgtacaacttcaaagtcgacaatgcatctgcatactaa

SEQ ID NO: 50519 - DNA, 915 bp, Acinetobacter baumannii
atgtgcggaatcgtaggcttatacttaaaaaatccagctttggaatcacaactcggtaaactgtttgaaccgatgctggagtcgatgaccgggcgtggtcctgacagcgcaggctttgccatttatggtgacgaagtgtctgagggctgggtcaaactcaccttgcagtcggttgaagatgaatttgactggtctgcatttgcagaagcactgaaagcggaactgaacaccgacatggactggttccaaaacgccacggctgcagtcattaaagcaaaatctgatgaacaaacagtgcgcgcggcgattggcaaaattgccccacagctcaagatcatgagtgtcggtcaaagtattgaaattcttaaaggtatgggtttgccggtcgaaatttctgagcgtttcggtttagcgaatatgaaaggcagtcacattatcggtcatacccggatggccactgaaagtgcagtgactatggaaggcagtcatccattttctaccggcgctgatttatgtttagtgcataacggttctctgtctaatcatgcccgtttacgccaggagttaaaacgtgaaggcatcagctttgaaacagataacgataccgaagtggctgcaggctatctgacttggcgtttacagcaaggggattctctggcagaagcactgaacaacgcattggatgatctggacggtttctttacctttgccattggcaccaaaaacggttttgccgtgatccgtgatccgattgcctgtaaaccggcagtgttggcagaaaccgatgactatgtggccatggcctccgaatatcaagccttggcatcattgccgaatattgacaaagccaaggtttgggaaccagaaccagccaccttatatgtttggcaacgcagtgcagatcaagccgcctaa

SEQ ID NO: 50520 - DNA, 1398 bp, Acinetobacter baumannii
atgttccagcaggccatcgtaaaagagttctttgaagaagaacaggacatcattagcaagcccaagtaccgtgcagaagtacagaaagtcattgatgatcatcaattaaaatatgtattggctcagtttgtcgatattcatgggtcagcaaaaacgaaatctgtaccgatttcgggtctcaaagccattgaaggtgcaggggtaggttttgccggttttgccatttcagggatgggaatgcagccgcatggtccagactttatggtgaaaggtgatttatcttctttaacaccggtaccctggcagcccggttatggccgtgtggtctgtgagggctatgtcaacggcaaaccgcatccctacgattctcgctatgtactgcgcaaacaagttgagcgcctgtcggctaaaggctggaccctcaataccggcctggaacctgaattcagcttgttccgccgtggtgaagacggcaaactgaaagcagtcgatgagtcagacaatctggacaagccctgctatgactataaaggtctatcccgttcacgccagttcctggaacggattaccgaggctttaattccagtcggttttgatatttaccaaattgaccatgaagatgcaaacggccagtttgagattaactatacctatagtgatgccatgaactcggcggatatgttcacgttcttccgtatggcggccggtgaaattgccaatgatttgggcatggtctgttcatttatgcccaagccagacccgaaacgtgccggcaatggcatgcatttccacttgtcgataggcagtgcagaatccagcaacctatttaatgatgacagtgatccgcaaggcatgggcttgtcaaaaatggcctatcactttattgcagggttgcttgagcatggtccggccctgtgtgccttctgtgccccaactgtgaactcatataagcgcctggtggtgggtcgctccctttcaggttcgacctgggcaccggcatttattgcctatggttcaaataaccgctccgccatggttcgtatcccttatggccgtattgaactgcgtttgccggatgccggttgcaacccttatttggtttctgcagcgattattgctgccggcttagacggtattgaacgtgaactgaccccgccacctgcatgcaatgaaaacctgtataccttgagtttggaagaaattgctgcacgtggtattggcaccctgcctcaatccctgaaagaagctgtcgaggctctaaaagcagatccgctgtttagagaaactctcggtgctgaaatagttgacgaattcatcctgcaaaaaagcatggaatgggttgaatacagccgccatgtttcagattgggaaattcagcgctataccgaatttttctaa

SEQ ID NO: 50521 - DNA, 600 bp, Acinetobacter baumannii
atgagacaaaacaagaacagccttaaactggaacagtacattggcattcaaatcaaacgctgccgtcaggaacagggcttgaaactggcggaagtcgcacagactgctgaaatcagtcagggtatgctgagtaaaattgagaatgcccaggtctcgaccagccttgaaacgctaagccgcctatgtgaagtactgggaatccccttatccaccttattcagtcaatatgaccatcaggaaagccgggcaatgattgtgaaatcaggcgaaggaatggaggtggtgcgtcgtggtaccgaaaaagggcatacgtatcatctgctgacccattctcgcgggccgcgcaaaaactttgaagcctatttggtcagcatggatgatgccagcgaagaatttcccacctttgcccacccgggaacagagatgctgtatctgattgaaggtgaaatcatgtaccgtcatggcgatgaagtatttcatatgcagccaggcgactgcttgactttagatggtgaaattccgcatggcccagaacaactgattaaagtcccgatccgtttgatctctatggtgaactatggggataaccaggccgaataa

SEQ ID NO: 50522 - DNA, 1314 bp, Acinetobacter baumannii
atgtgggtaaatcatttaaaaagaattgtcgcagcgatcctgctgctgcctggcttggcctttgcaggtgaaactgatctggatagcgcctccaccgtatggatgatgctgtccacactgctggtactgctgatgtttgttcccggcttggcactgttttatggcggtatggtccgtgccaaaaatattctgtccatttatacccagttttttgctgtggcaggcgtggtttgtgtactgtggctgactgtggtttatagcatgagtgcagacaaaacccatatgcaagcaggggtaaccaatctctacagctttgtcggcagtttaaataaggcctttctggtgggtattgatgaaaatactctgctgggcggtgtacctgaatatattctgatcatttttggcatgactttcgcaatcattaccccctgtctggccataggtgcttttgctgaacgcatgaagtttggcgcggtggtgttgttttctgctctgtggctggttttggtatatggaccaatgactcatatggtctggggcggtgaaggtgcaatcatgcacacctggggagttctggactttgctggcggtaccgcggtgcatattaatgccggcattgccgccttagtcggcgcaattgtattaggcaagcgtaaaggctggccggctgcacccgttcccccgcacaatgtggtctataccatgatcggcgcagcatttttatgggtaggctggttcggctttaacgtcggttctgcattcgcggtaaatgcatcggccaccattgccatgatgaccactatggtggcgacctgcggcggcatcttaggctggatggtgattgaaaaaatgcatacccatcatgtcacggctttgggcctggcttcaggtgcgattggcggattggtgggcattacccctgcagcagcttatgtcggaccttttggtgcgttggcgatcggctttatcaccgccatctgctgtttttatgccgtgaccaagctgaagcataaaatggggattgatgatgccctggatgtctttgctctgcatggcataggcggcatggtcggctgtatgcttaccggtattttctgcatcccgcaactgggcggcaaagtggccgacatttccctgctgaaccagttggctgcacaggcaggcagtattgtactcaccgtaatttattgtggcgtgctgacctggctgattatgaagttcgtcgataagaccatcggtttacgtgtaaccccggaacaggaagagcgcggtctagatgtcagcgatcacaacgaacgtgcatataacaattaa

SEQ ID NO: 50523 - DNA, 1314 bp, Acinetobacter baumannii
atgataatgaacaatgtgaagaagttactcatgctgagtgtactgctgtcgcctagcgcagtttttgccgctgagggaacgattgatggacctgccactgtatggctcatggtttctattgttattgtcctgctgatgtttattccaggacttgcgctgttttatggcggtatggtccgcgccaaaaatatcctgtctttatttacccagttttttgcgattgccgggattgtcggcattttatgggtggccggggtatatagcctggcaaccgataccactaatatgcaagagggcgtttataacctgaacagcattgtcggtggcctggataaactgatgctgcagggcatcaccgcagaaagtctggcaggtggcattcctgaatatatcttgattgtgttcctgatgacctttgccatgataacgccgtgtattgcactgggtggctttgcggaaagaatgaaattccgggcaacggttattttttcatctctgtggatagtgctggtctatggcccaatggcgcatatggtatggggcggcaaaggtgcattattccataactggggagtattggactttgccggcggtactgcggtacatattgccgccggggtcacggcatttgttggtgccatagtggtgggcaaacgtaaaggctggcctgctacgccgatgccgccgcacaatgtagtatttgtgatgattggcgcagcattgctctgggccggctggttcggttttaacgtgggttcggctctggccatcaattcttcagccgcactgattttgatgaccaccatgctggcaacctgcggtggtattgtcggctggatgtttgctgaaaaaatgtattccggccatgtcacagcctttggtctggcttcaggtgccattggcggcttggtgggcattaccccggcggccgcttatgttggcccttttggtgcaattgtgattggcctgctcaccagtatggccagctattacgcgattatgatactaaagaaaaagctcggcgtagacgacgcgctggatgtattttcattacatggcattggcggtatggttggcttcctgctgaccggtattttctgtattccggagttgggcggcaatgttgaaggcatttccctgctcccgcaattcttggcacaactggccagtattgcgatgacctttgcctatgtcggcatcttgagctggatcttgctgaaaatcattgataaaaccgtggggctacgtgtcacggcagaacaggaacaacaaggcctggatgtcagtgatcataacgaacgtgcttataattaa

SEQ ID NO: 50524 - DNA, 1152 bp, Acinetobacter baumannii
ttgtcacatcagaataccgtatttcatgagctaattaaacctgttgtgcgacaggattttgaacaacttgctaaagtacaccatgttggacagaaatttagagcggcttcccggtgggatcagtttattgccatattgatgtctcaattctcttgtaggcaaagtctgagagatattcaatccaatttggagtgccaacaggaaaagctaagtcatctcggagcaaaatctattccccgaagcacgctggcacgaatcaatgagcagcagcctgctgccttgtatcaacagctattttacaagttgcttaaatactatgaacactcaaaagtagctcataaatttcgctttaagaatcccttgtattccttggatgccagtcatattgacctgtcgctttccttaagtgaatgggccaaagttcatgactcaaaagccagcatgaaactcagcataggattgaatcacagcaatgatattcctgagtttgttgcagttgaaaatggcaaagaaaatgacatggtacaaggccgcaaattccagtttcctgctggcagcattgtagtttttgataaaggctatgtcgattaccaatggtatgcaaatctgactgctcaaaacattggatttgtcacacgttttaggcctaaatctgtgtatcaggtgatccagcaacatccagtgcttgaatccaaaggtattctaaaagatgaaaccattcagctgaatagcgcacatgccctaaaaagaaaagccccagtgttaagaagaattgaatatagagatcagcaaagtggcaagcactttagctttctcagcaataactttcatttagccgcctccaccattgcggcgatttataaagatcgttggaaagttgagctgttctttaaggcgattaagcagaatctcaaattaaaagcgtttctaggccgcagcaggaacgcaattcagacacaaatctggattgcgatgatcgcctatttattggtgagtttcgctcaacatttagggaaaacaggttggacagttcaacgtttactcagaataattcaagtgaatttgtttgaaagaagaactttaaaagctttattttcacccgataaaatacccataaaacaacaggaagctcaaatgagcttcctcttgtga

SEQ ID NO: 50525 - DNA, 666 bp, Acinetobacter baumannii
atgagtattttacctcaagcagaacgcagtcccattcaaaaaacctgtgcggcctatcagtcttatggcgcaggacgcatgtttcttgcaggcggtaagtcccagcacattcagcaatgtgcagtggtggatttaaccaatatgccacgcgtcggtttccggggaaccgacagtgccagctatttaactgcagcgggttttagattgccggatgaacccaatcgattgtgtcatcaggccaatggcagcattgtggcacggctgtctgcgaccgaatatttagtgctgggtgcaatgcaggattttggtgaaagtatagccgcactggaacagagctgggagctgagtgaccgcgccaactatctgctgccgcgtcaggatagccatgcctggattcagctaactgggcaatctgtggctttcatcatggctaagctgtgtgccgtcgatttgtccgcagaagcttttgctgcaggtcagattgcacagacctcggtggcgcgcattaatgctgtggtgatgaatgtcagcgatgcccaggcgccgaaattcaatctcttgtgtgaccgggcttctgcactgtatttgtggaatgtcctgctggatgccattgcagaatttgatggtcaggctgtcggtattgacgggctgctcagcattgcataa

SEQ ID NO: 50526 - DNA, 2913 bp, Acinetobacter baumannii
atgagcaatctagatttaaaccgactgcctttgccgtatggcattttgattgaccgcaaccagcctgtgacttttcagtttgatcagcagacttttcagggctatgcgggcgacagtattgccagtgccttgattgccaatcagcgctggattatgtcgcgctcttttaaataccaccgtccgcgtgcacctttaaccatggcgggacaagatgccaatacgctgattcaattgccgcaggagccgaatgtactggcagatagcaccgagattgcagcgcatctgtcggcaatggggcaaaactatgctggctcgttaatgaaagacagcgatgcgtttttaggcaaattctcaaaatttatgcctgtcggcttctattaccgctcattctacaagcctaaaggggtctggaagctgtgggagaccatgatccgtaaaaaagccgggctgggggtgctggatctgaattttcagcctgaatactatgacaaagcctatctatttacagatattgccattattggtgccggtccggccggcttgcaggcagcgttaaccgccgcgaatgccggcatgaaagtgttgttaattgaacaggataaaatactgggtggtagcctgcattatgcgcgttttgatgccgagggtaaaaaagccgctgcatgtgcagccaaactgattgcgcaagtagaacagcatgaaaacattagcgtgctgaaacaagccatttgtaatgcctggtttaccgatcattatttaccggtcattcaaggcaagcgtatgtataaagtccgtgccaagcaatgcattgtggccagcggcagttttgaccagccagtggtgttccgcaacaacgacttgcccggtgtgctgttgaccagtgccgtacagcgtctggtcaaactgtatggggtacggcccggccagaaaacggttattttaaccggtaacgatgacggctatctggccgccctagatctggccgaagccggtatctctgtggccgccctagtcgacatgcgcgccggtgcagaagatcccgctttgcaaaaagcggttgaactgcaccacattccggtctatctcagcagtaccgtgtatgaagccttgcatagcaaggacatgcagcatctgaccggagtcgatatacgcagtattgttgcagaaggccaggtgggtacacacagcaagaaaattgattgtgatgtgctggccatgtcatccggttatatgccggtgtaccagctgctgtgtcaagccggtgccaaactgaactataacgacaaaaaggcacagttcagcatttccggtttacctcagggattgcacattagcggctctgttgccggtgtgcatcagctggacaatgttctgcatgatgcagtgcaaaccgccacggatgcagtgaatgccattttgggcaatgctgctacagcagcgaaaaaacctgttgtcgaagcagcggtgaatttcccatggccaattttcgcgcatcctaagggcaaagaatttgtcgattatgatgaagacctgcaaatccgcgacattattaatgccaccaaatcgggctaccgtgatgtacagctggtcaagcgtttttctactgtgggtatgggaccttctcaaggccgtcattcagccttgcctactgcgcgtctcgtggcaaaatatacagaccgcacagtgagcgaaaccggggtgacgaccgcccgtccaccgttcactgcagaaaaattggcgcatattgcgggacgcggttttgatcctttccgtcagaccgccatgcatcaacgccatattgaggccggtgcacaaatgatgccagcaggcaactggcagcgtccggcctattatggtgacgtctctggccgtttgcagcatattgaaaacgaagtgcgcaatgtacgtcagaatgtcggcatgattgatgtatctactttaggcggattagatcttcgcgggcctgacagcggcgagttcctcaaccgattatatacctttggttttgtaaaattaccggtgggtaaaacccgttatgcagtcatgactgccgaagatggcgtggtgatagacgatggtgttgccgggcgtttaagtgaaaaccacttttatgttaccgcaaccaccagtggggtagaccgcatttaccagcaaatgctgaaatggaatgcgcagtggcgcttaaatgtcgatatagccaatgtcacgtcggcatttgcggcggtgaatattgccggtccgaattcccgcaaagtgctgcaaaaggtctgtcaggacgtggacttcagtgcagcagcatttccctacctgggtttgcgcaccggaaccattcagggcattgctgtgcgtatcttgcgcgttggctttgtaggcgaattgggctatgaaattcacttccctgcacgttatggcgagttcatgtgggatctgctgatgcaggcgggtcaagagttctccatgaagccttttggggtggaaagccagcgactactgcgtttggaaaagggtcatatcattatcagtcaggataccgatggcatgtcgcatcctaaagaagtggacttaggctgggctgtagcgaaaagcaagccatggttcgtgggcaagcgttccattgccattttggaacagcagcccatgaaacgcaaattggtgtcttttgtgctggacaaacagcagcaaaaaccgctggaaggccatattgtgctgaatggcgacaaaattacaggaaacgtaacttcgtgtgaatattcacccactctggaccaaattattggcatggcgtatgtcggtatcgagcaaagcgcagtgggccagcagttccagattcgtgtggaaaaaggtgcaagtgtctacgccacagtagtaaaagcgcctttctatgaccctaataatgcccgtcaggagatctga

SEQ ID NO: 50527 - DNA, 336 bp, Acinetobacter baumannii
atgaaaataatgatttgtcctttaaatggtccaagaaatatcagtgaatttagttatggcggcgagctgaaaaccatgccggaccagaacacctgcagcaatgaagaatgggcagattatgtgttcaataaaagcaatattgccggtgtggtactggaatggtggatgcataccccaagcagttattggtttattgccgagcgccatacagtgagcgatgaaattctgcgtacctttgatgccaaggaaatgtttagccagcgcatcgattttgaaaatccgccagctacagaaaaaacagcagaacaggctgctaaacaggaggtatccgcatga

SEQ ID NO: 50528 - DNA, 1239 bp, Acinetobacter baumannii
atgccacttggtttgctcaaatacggattaagcagtgaatatcctgttgaagttgatttgcctccaccgaaggagctgaaatcacactatgacgtagtgattattggcgctggcggtcatggtttggcaatcgcatattatcttgcaaaatatcaaggcatcaccaatgttgctgtgctggaaaaatcctatcttggcggtggtaatacggcgcgtaatactgcggtgatccgttccaactatctgacctcagaaggagtgaagttctattcagaatcggttgatttatttaaaaacctgtccaatgaatttgacttcaacatcatgtattcagagcgcggccagctgactttggcgcataccgattctactgtgcgtgccttccgccagcgtgccgaagtgaacaagcattttggtggtcgtaccgaaatgattgaccgccagcaaattaaggagctggtaccgtgtctgaatcttgatcccgcgcatttgcctgttctggcaggactctggcatatggatggtgccacagcacggcatgatgccgtggcctggggctatgccaaggaagcggcgaaacgcggcgtggaaatccaccagctgactgaagtacaggattttgtgactgaaaaaaaccaggtcacggcggtaaaaaccaaccgtggcagcatcaagtgtggctgcgtggtacaggcgattgccggcgcttccagcattttaatgaacaagctgcatatcaagtcgccgattcataccttcccgctgcaagccatggtgtcccagccgtttaaaccgtttatcaatcctttggtcagttcatctgctttgcactgctatgtgcagcaaaccagccgcggtgaaattgtctttggtggcggttcagacccttatccgctgtacaacacccgttctaccctggatttaaaagaaagcctgctggctcatgccattgaaatgttcccgtttatggccaatgtcaaactcatgcgccaatgggctggcatgaccgacatgacgcctgactacagcccgattatgggcaaatcgccttatgacaattattacctggatgcaggctggggcacgtggggctttaaatccaccccgatctgtggcaagaccatggcggaacttgtggcgactggccgtacgccggatctgatcaagccatttgaattgtcgcgtttcagccgcttccagcaagtcaatgaaatgggcgccactgcggcgagccattaa

SEQ ID NO: 50529 - DNA, 900 bp, Acinetobacter baumannii
atgaacatagccattcaagaacattcacagccgctgattattgacggcaaagcaactgcacaaaccgttttggacgagatcaaaagcgaagtgcagcagatgaaagcgcaaggtattgagccttgccttgcagtagtcctggtcggagatgatccggccagtcatgtctatgtgcgcaacaaggttgaaaaagcgctgtatgtcggcatccgctcactggaataccgcatgtcagcagatacagatgctgacacgctgctgcagaaaattgatgaactgaatgcagatgccaccgtgcatggcatcctggtgcagctgccgttgccggcacatattgatgaaacggcggtgttgcagcgcattcatccgcttaaggatgttgacggtttccacagtgaaaatgtcggcggtctgagtcagggccgtgaggtgttaaccccatgcacaccgaccggatgtattcgcctgctgaaagacaccttggggccggatctgtccggactgcatgctgtggtggtgggtcgttccaacattgtcggcaagccgatggcggcgctgttattaaaagaaagttgcaccgtcagcattgtccattcacgcacccagaatattcgcgacatttgcaaaaatgccgacattctggtggcagcggtcggtaggccgaaaatgatcgatgcatcctatttaaaaccgggtgcagtggtcattgatgtggggattaaccgcattcaggaaaacggcaaaaaccgtctggtcggagatgtcgattatgacgatgcgctgtctgtggtcaaagccatcacgcctgttccgggtggtgtcggtcccatgaccattgcctacctgatgaaaaatacccttgatgctgcgcgtatgcaggcaaacatttttaaaaaataa

SEQ ID NO: 50530 - DNA, 2313 bp, Acinetobacter baumannii
gtgacagatgaatatattcatctgcagcagccaatccatgaactgtatttgcgcgcagatgcacagtgcatgcacatttttgacctggatgcgggtgatcgcattcaatttgacttacctgaacaacagagtattgatctactgattttcaatacagaacagcagcttaagccagaattgctacaggcactacaggccgaatcccacctagtggccaatggtgctcgggctacacatgcacagttaaatcaggccagcgcctctagccagcgcctgaaacagcagttagcacaacatgctatacagcctgactggctggagcaggcgctgaccttgcatagtcctggaaagaacatttttcaggcatcggcggcaattcaagtcatcgtgctgaataccggcctggacatgaatgtacagcagcagtactgcatagatgaagttccagtgacgctatttaaagcccagcccgtgcattattatttgccgcagcctttagccaaaccggtgcaggaaattctgataccacgcgcttcagcacggacgtatagcgttaaagcaggacaatggattcaaattatagacttgtcgggcaagcagtgttccgattttttggcctttgatgcccaggctttggcccagggccaagaactgggtctggatgccatggccacccggaccattttggggcatgccaccccggctcccgggctgcactctaagttttttgcctcagatctgcaagcactggccgaagtggttcaagacaccgtgggccggcacgatatgttcctgagtgcctgcagtccgaagttctataacgattccggctactttggccatatttcctgcaccgataattttaaccaggttctgcagccttttggcatccaaagccgcaatgcatggcctgccattaacctgttttacaacacctttgttgaaccttgcggtgcaatcagcatggcagaaccgtggtccagaccgggagattatgtcctgctgcgtgcccaccgtgatctgctctgtgcatcatctgcctgccctgacgatattgatccttccaatggctgggtaccgacggatattctggtccggatttatgatcaggatcagcatttcccacgctcccagcattatcgaattgaccccaaggaactgccgcgcatgacccaagcatcaggattttttccgcgcatccaagcgcttacttcaaaaatcagtgagtaccacggctattggattgccaatgaatacgacggctggggtgccaaagcagaatatctggcctgccgtgaaagggtcgccatgatcgatttaagcgcgctgcgtaaatttgaaattaccggcccagatgcagaagcttttatgcagtatgcattgacccgcaatatccgcagactggcggtgggtgaaattgcctactcggcctcctgtctggaaaccggcggcatggtggatgacggcacgattttccgcatgggtgaaaactgtttccgctggatttgcggtgatgaatattcaggaacctggctgaaacagctggcacagcagcatggctataaaatcagcatccgcaattcatcccagcatattcataatattgcagtgcaaggtccacacagccgtgcgctgttgcagcaactgatctggacgcctgaacatcagccaagcgtagaaaaattagcatggttccactttaccctcggcaagctgggcggtacagacggtattccggtcatggtatcacgcaccggctatactggtgagctaggctttgaagtgtggtgtcatcctagccatgccgaacagctttgggatgccgtttggcaggaaggtcagcaatataacattgctccgctcggttttgatgccctggatttattgcgcatagaagccgggctaatctttgcacagcatgagttttcagccgaaaccaatccctatgaagccggcattggttttacagtaccgatgaaaaccaaggaagaagattttatcggtaaacaagccatgaaaaatcaggcgccggaaagccggcataaactgatgggcttagtgctggaaggcaatgaagcggtccagcatggcgacctggtctatgtcggacgttttcctgtgggtgtggtgaccagtgcagccaactcccctgtgctgcagcaacagattgccctgtgccgccttgcaccgcagtatgccctaacagacaccgccgtcgaagttggacaactggatggtcttaaaaaacgcctgaaagccaaagtggtggagttacctttttatgatccgcaaaggttaagagtaaaaagctga

SEQ ID NO: 50531 - DNA, 201 bp, Acinetobacter baumannii
atgggttacgttgcacgtgaactcagtcaaagaaataaactactgtttggcttggggtcttttttaataccggtcttgatttggtgtgcagtcagctatttaccttttatctggcatccacaagtccaaattgccgattcaggcagcgtgaactatttacaggctcaaacatttccgtgctattgcaactcgattcgataa

SEQ ID NO: 50532 - DNA, 699 bp, Acinetobacter baumannii
atgacaacacatttattcccatttttacatgaatacgtacctcctgaattttttgcttctactcatgttaagcaaattttggaagctaaaactttgaatggttctttacccatattatcagcaattcaattactgcttagttgtgtatcagataacgatgaattacatgcatgttcagaatatgagttagtagctcagtatgtgaatacactaatcacaattaaaaatgatttaaaaaatgataaaaatattattaaatttgaaccaaataaatttgggcctattgagagcaaagattttttagaaagtttagataattatgattttaaaagtataaaaacattacgagaatggattaatttcttaaataatttttctatgtttagaattcattctagaaatatttttaaattaaaaagagatatagattctaaaaataagaatagttacagtcctatttcgaaaagagatcaagccgataaggcgcggcaattaatttttaaaacattagccttaattcccgaagtagaacaaaaagaactgttaaaagttgaaaaagggaaaagaggtttaaaaaaagagatacgacttttaatctctgaagaagattataagaaattttttgactcgaatgaaaaaacttttgcaaaccgatggtctgaagttttacctgaaattaagcccgcattgctgaaataa

SEQ ID NO: 50533 - DNA, 900 bp, Acinetobacter baumannii
atggtaagtacaaaagaattgctggcacaacgtttacagcaaaatactcaaaagcatcaacaagctcagcaagagcatgttaatgatgtgaaagaattgcgtcgtaatgtacaaattacagatatccagccaagtccaaatcagccaagaaaaatatttaatccacaagatatagaagacttggcggcatcgattgaagaaattggcttgttacaaccaattgcagtgcggcggatccaggacaaatatgaattaatcgctggtgaaagacgcttgaaagcgcatcaaattctcaataaaaacaccattgaagtaattgtcattgatgcatctgatgaagaagtagcattgttaacgctagcggaaaacttaaaacgggaagacttaactgattatgaaatttatgtgggtttaagttcactggatgagaaactaaaaaagaacaagcaaaaacttgcaaaatccttaggcatgaaccgggaagatatgtataaatatttatctttcgaaaaattacctcaagagctgattgaagatttagagcaacaacctgcattgctggcgcgaactgccgcaacagcagtcaaaaagtttctctctgattatgaagaaaattacagcaatgctaaaaaagcactgctagaagcctgggcgaaattactgaaaaaagaagtagagcaaacaaaactggcagtcttggcagaaaaaattctcaaatcgaaagaaaccaaacaacccattaaaacgtcaattgtgcataaaattgaatatgatgggaaagtcgccggcaatatcaagtttgatcacaatactttaaaagtgtcattaaagataagtgaatttgatgatcaaaacttacaggagctggaaaacctgttgaaaaaaatgctaaatcagtaa

SEQ ID NO: 50534 - DNA, 153 bp, Acinetobacter baumannii
atgaccctggtgtcactgcaacagctacaaaaacaactttggaatattgccaatatgttgcgtagcagcatggtggtaaacgaatttcgagatgacatcttggttgttattttctttaaatacctgtcagaaagcggtgaactttgccgatga

SEQ ID NO: 50535 - DNA, 3201 bp, Acinetobacter baumannii
atgcaaaaaatcaaagaactaataaaaccacaactagatgatctatttgttgatattcataaaatggtgaaaaagtcgctagatagacagccttctccacctgaagtattgacgaaagaaatgcagcaaaaacttgatcagcagatcgctgaaaaatggcatgacattaaagatagtgttgattgtttgagtcaaaagttgagccgagacgaacaatcaaaactgatgcaatttactgaagatgaatttaataaaagaaggaagcaattcaaccagaatgtagataaaaaatcatacagaattaagctaaatccacatactaaacggatcgtactgcctagaaaaattgagagtacagagtcacggttagaacaggggcatctacatatccatgtacttaaggaattaaggcagtattggcaagattcatttgaatattggaatgaaccaaagtacttatggggaaatttatgcttaagttttatatatatttcaggctgtgcagatgaacagcatttgattgctattcagaagcaattgcaggaggccattgagcttggtacagatctgaattgttttcggttataccattcggactacaaaaaaatcactaatccattgttactacattatcgtgttgaaaactctcaatatggcaacgatgtagaacagggaaagttgtaccaatggaaacatgtttttttaaacccatatgcgcagttcattttgcaatatttaaaaaagttgaaagctactcagaaagaattttgtctgcaacattcagttgaagattgtattttagaaagcttgagtaagataggcaggaaaaaaagtcttggggatctgcaatatcaaattaaacgccgtggatttcgtgcatttaatgatgtgcaaatggtactcgaatttaatccaaacctcagcatagatatatttttgagtaatgtgcttcagcaagagattaatactgtcgctttaaggccatccgaatttagattgctgtggaataatgattacaatcaagtcacagaatcagataatcgccctattcattttgaacaagagcagttacttcctgaagttccgactgttcaaagcaaattacaaacgattccgtatgagttgatgttgtttggtcaaaagaaacgtaaaggtcaaaaagttgagcgtttagataaaaagaggaataaagaagaacgcacgctacgtttttggcaagaaactagaagggtgttagaggagaagatagttgatgctaatacggaggaaaagtctttaattgatgctcaactacgcttaattcactggttaatgcatttaaaaaaacgagggcttcaattatcaactattgaaagctacttaggatcgtttggcaaagaatttatatttgagatttggctcaataaattagatttaaagcaacaatccatagatgactatgaggatttatatcggcagctattgaaatacagcagtgaacgtgatgaaaaagcagttcaacgagattcggtgaaaggaaaaacctctcgtaagatgcaccaaagcgcagaataccgttttggtcgcctaaaagattttcatcaattctgtatagagaattatgatgctccaggggtattggtgttacagaattcaagttttaagcatttacaaatttgcaatgcacggctagtgagtcctttgctatttggcaaattattggaaaaactagaaaatttaagtcaagagccaacggcatcagagtgggtcgatcatctgagttgtttaaagctgatgtatttactaagttatagaactggacttcgattaaatgaagttcgttgtcttaaaatacaagatattatttgcccagagctactttataaagaaaaagaaaatacagtttttaataatatcacgcttcatatccaagacaattcatatcgccgtctgaaaacgcgaagtgcgaatcgtcaaataccattgaaaattgcattgtcagaacatgagtttttagtagtacaacgttacatacaacatcgttatgagcaatatttggttaatcagcaggatgatctactttttagtgtgaatcatcgtgtattaactgatcaatgtatcagcaaaattacagtagatttgtttagtcaaatattaggtatgcatcatggctttagttttcatacattacgccacagtgctgctaactatctagcaataactttgctcggttcaaaagaaatgatcaagacctacacagattgtccttgggtaaaagcaaaaaagatgagggatttattgtttggtatgaaagcacgtgctcaagaagagattattcaacataaatggcaggtgctcgcctcttggatggggcatagcagtattgagcaaacggcttcaaattaccttcatgttttggatttattagcagtcgatcgaatttataattcgccgtgtatcatttcaaaaaaagtattagaacagtgttttagtccagtgaagtcaagtacagactacataaacctaaatcgttatactcagcagcagaaatggtttaattcttatcagcaaacacagccagttccgatggctggccgacaagaaaagaagtttagtatagagaagagtactctgacaccttttcaacgtttgataagttttagagaaggtcgtttaagcgaagatacccaagctcaagaatggatgcaacgatgtcaatggatgagcactaaatggatggatcgccaaaaatttaatttaaaaacgaattatgtttatagtaagaatttagaagagagttggtttgatgaactttacgaaaaggctaaaaaactgactcgtccagatgaaataattcctctccttgattttcattataaagatgataggcagcaagatgcactgaaagaaaagaacatggttaaggcgcttaaaatattattattatttggaaaactgcgtaagaattttctacattttcaatgccgaatgaaaggtgatgagcaacaaattgttaattttattactggtatagagccaatgttaggagatcatctatatttagaaaaacaaaactacccagttaatttggatgctcctgagcgaaccgttaaatttagttttcaaagagttgtcggctctaacaaaaaaaatgttactccgctggttatatttaatttaatgttaaaaatgatgcaaaaagatgaactctggatcaaatag

SEQ ID NO: 50536 - DNA, 264 bp, Acinetobacter baumannii
atgaaaacatctaagtattcagacagcctaatcatgaatattttgaagcaagctgaagcaggaacccccataccgaacttttgccgcgaacatggtatgagctctgctacattctacaagtggaagtccaaacatggcagtatggatctttcaatgatgacgcgacctaaagaacttgaggctgaaaatgtccgtttaaaacgcatgtatgctgatgagcggctcaagtcagacatcttgcaagatgcgcttttaaaaagttga

SEQ ID NO: 50537 - DNA, 318 bp, Acinetobacter baumannii
atgacaaaattaaaatatacccctgaaatcagagaaagagcggttcaattattgattgaatctgaaaaagattatccatcgaattgggctgcgatcaccgctattgctcccaagataggttgtactcctgaaacactacgtgtttggtatcaaaaatatttagataaacaaaatccagttaaagtacagcagctttcagaccaagaacgtatcaaacaactcgaacgcgaaaataaagaactgcaacgcgccaatgagattctacgtaaagcagccgcttttttcgcccaggcggagctcgaccgcccacacaaataa

SEQ ID NO: 50538 - DNA, 243 bp, Acinetobacter baumannii
atggtggatttcatccataacaataaagacttatatggtgttgatgggatttgtagaattttaccgatcgcaccttcaacctattaccggactctagatctctgcgaaaatccagaacatcgagcaaagcgagatttacatgacttgcatcatgctgaggagattaaacgaatttggaaggaaagttcaggtcggtatgatcctagacagtatcgtggacaaccgatccctctaaattcttga

SEQ ID NO: 50539 - DNA, 696 bp, Acinetobacter baumannii
atggtatatgacatgcatgatttaggttacagcatgagcgaacgaaccgttggaagaatgcttaaaaagcttggtttacgtagcaggatttcgcgtaaatacaagcatacgactgattcaaaccatcgtttgcctacagcaccaaatctgttggatcgccaattttcagtcactcagccgaataaggtgtggacaacagatattacttatatccgtaccaagcaaggttggttgtatttatgtgtgatgttagatctatttagtcgtcgtatagtcggttggcaaactagccatcgaatagatcgtcaattggtgtgtgatgcatttaattatgcaatggctcgtcagggttatccaatggtcgtcatggtccattcggatcaaggctcacagtactgtagtcgtgattttagggcgctattattaacgaataactgtattcaaagtatgtcacgcaggggaaactgttgggataatgcagtgaccgaaagcttcttccatacattgaaaggtcatgtgatacatggcagtgtgttcgctactcgaaaagaggcgaatgctgtcttgtttgactatatagagatttattacaatcgggtcagaaggcattctgcaaacgattggttaagcccagaagcctttgaacagaaatatttcaagaatttagagggatcggttgtccacgatactgtctag

SEQ ID NO: 50540 - DNA, 879 bp, Acinetobacter baumannii
atgaatatgactaaaaagggtggtatgggtatcacctttttcgtgccaatggtctttgttctcttatggagcacggggttcatcgctgctaaatttacgattgcctacgcacctccatttaaattgctttttttacgaggtttgttgtcttgccttgtgtttttagtgatggtattgattgcccgagtcaaatttccacctgtaaaaagtatcattgagcaaatgaaagctggtttgctgatgcatacgttgtttctcggtggttgcttttatgcgatcaatcaggggatgtcacctgccttagttgcattaatcacaggcttacaaccaattttaaccgccattattctttctttttctgatcaagccagtatgagccgaatgaaatggctaggtgtagtcgttggttttgttggagtttgtttagttttatctccgagcaaaacatcgaatcatgtggaactgattccattgatatcagcagtattggctttagttggtgtgaccacaggggctttgtatcagaaaaaggtcaatagcacaggacatattctgtctttaacattctttcaatatgtatccttaacactggtgatgggcatactcagttacttttttgaatcggatacagtagtagcatggtctctttcatttattgcgggtctcgtctggcttgtggtcggtgtttcagtcagtgccattttacttttgatttatcttctgaagattggggaagcgactaaggttacaacctatttttatttggttcctgtcgcgactgcattagaagcatggttattctttgctgaaccaatcacgatgggtacagcagttgggatgttaacaacgattattggaatggttctggtcattatttaa

SEQ ID NO: 50541 - DNA, 699 bp, Acinetobacter baumannii
atgaacattaatgcatttgtgctgcaaactggtggtcgcacaattttggtagatagtggtgcgggtggtattaatggctggggtgggcgattacaagttgccttatctgctgcaggtattgacccgctggatattgatacagtgcttttgactcatgcgcatcctgatcatgtgggcggattagcggctcctttagcaactccgattttccgaaatgtgcaagaagtatatgtacatgaaaatgaattgggattctggcgcaatgacacaatttttgcatctgctccagatggattcaaaccattttttggtgttgcaagaaatgcgtttgatgcgtatgacgacaaattagttccatttaaaaatgaggcgatcttaccgggtatccaagcagttccattattcggtcatacaccgggacatacaggttatctgatcggtgatgaaaaggattcattactcatctggggcgatattgttcatttccctcatttacagattgctcagcctgaagtcacgattgcatttgatagtgatccaaatgaagccgcagctgtacgtgcaaccttattggatcgtgtggcaaccgacaaattatccatcagtggtatgcatttcaacctgcttgcatctggacgtatttaccgtgaaaacaatcaatatgtcttgaactatgacgcttggtcacctgctgtttaa

SEQ ID NO: 50542 - DNA, 318 bp, Acinetobacter baumannii
atgacaaaattaaaatatacccctgaaatcagagaaagagcggttcaattattgattgaatctgaaaaagattatccatcgaattgggctgcgatcacccctattgctcccaagataggttgtactcctgaaacactacgtgtttggtatcaaaaatatttagataaacaaaatccagttaaagtacagcagctttcagaccaagaacgtatcaaacaactcgaacgcgaaaataaagaactgcaacgcgccaatgagattctacgtaaagcagccgcttttttcgcccaggcggagctcgaccgcccacacaaataa

SEQ ID NO: 50543 - DNA, 726 bp, Acinetobacter baumannii
atggtggattttatccataataataaacagctgtacggagtcgaggcgatttgtagaattttaccgatcgcaccttcaacctattaccggactttagatctcacagtaaatccagaacatcgagcgaaacgaaatttacatgacttgcatcatgctgaggagatcaagcgaatttggaaagaaagttcaggtcgatacggtgtgcgtaaggtctggcaacaactgaaacgtgaaggctatgtgattgcacgttgtacagttgctcgattgatgcagaagctaggtatacaaggtgtttggcgtggtaagaataaacaaactacccgtagccgagatgaccaaaaacgggcagatgatttagtgaaacgtaattttagtgctgatcatccaaaccaactatgggtcggtgactttacgtatattcaaactcattcaggctgggtctataccgcctttattattgatgtgttttcacgagcaattgttggatggaaagtatctacacggatgaatacagatatgttgctcgatgcattggagcaagcattgcatgatcgaggcatgccaaagaatgtgattcatcattccgacagaggtgtgcaatatctttccattcgctataccaatcgtttagaagcagcaaatttacgagcatcagtcggtacgacaggcgattcatacgataatgctttggctgaaacggtgaatggcttatacaaaacatag

SEQ ID NO: 50544 - DNA, 276 bp, Acinetobacter baumannii
gtgatcgcagtccccttaatcaagcgcctaggattaaactcggtattgggatatttaattgcaggattaattattggtccatttggactggcatttttctacgattctgcgtctattctgcatatcgctgagcttggtattgtgatgtatctgtttgtgattggactagaaatgcgtccatcgtatttatggagtttaagaaaagaaatttttggattaggtacattacaaattagtgcctgttcattggggctaacggctgtaggcttggtctaa

SEQ ID NO: 50545 - DNA, 219 bp, Acinetobacter baumannii
atgaatatctgtgttggtggtgaactagatgggcaaaagatagagaaagaaggcagattactaaaagcttctgatatcgacccatcttttaaaactgagtactacaagcaagtttttaaccgcgacaacattaactatcatttttggctgccaattggatctgacttacatgatatgtctgagaaagttctaaatatcattagatcacctaaaaactag

SEQ ID NO: 50546 - DNA, 465 bp, Acinetobacter baumannii
atgaatgcagttgagtttatgaaggaacatggaatcgaaaaggctcgatttgttattggatctgctgaagtaggtggtgttgtaaccccaaagattttagaccttaaaaaattggttcaatcgttggaactaatagagcaaattggtggagttgaagttgctaaaggcaaagtatttattgctgatttcaatgatttcaatgatttcaaaatgatcaaatttttaataggtaataaagattttgttgttcatataaaaagagttcaggaggctatagcagaccacgaagcagttaatggaaatgagatagatcctttaatcaagttaaaagctggtttaacaaagttaagagataaatttataaacgatgcccatgcattaacgcttttgggtgacctagataaatcacgtgtttataacggcattgctaatcaattagatcacttattaaagggcggtgcttaa

SEQ ID NO: 50547 - DNA, 750 bp, Acinetobacter baumannii
atgcatgagattaccttgaacgaagtgcgtcaattaatcgcttctcttcgcactgtttacgctgctcagttcaataagcaatttccagcaacaggcgaaagtgcaattcctctgtcagtggttgagcaaatcgcacttaaaacactggttggcgttcaacaaaaccaatttaacaacgcacttggtcgtttacttacagcaggtggacgctttatgccgtcatttgccgagtttcgcacctggtgtatcggtgaaagttggatgtctccagaagaagcttggtctcgcgcatgtaagtttacaactgaccgttccgtggttattacccaaatcactaagtacgccttagacgaggttatgtatttgatcgaagccggccaaatgcgagcagctcaagataatttcttcgggacctacaacgtgatggttgctaaagctcagttaaaaggccgtcagcaagagttttacactccaccgctacaactagaacacaaagaacctaaacacgttcctgtgagcaatgacgaggctcaaaagcatctcaaatcattgatggaaagattaaaaatcaatggtcgtaaacctgcaccagttcaaaaacttgaggcaaaagaaaaagagcctgagcttataaaagagttgggccctgatcctttcgataatccacacgaatacgcagagatgtgccgtcgggagggtatgccaatccctagaaatattcttcagctaattgatggggcgaatgtatga

SEQ ID NO: 50548 - DNA, 441 bp, Acinetobacter baumannii
atgaacgtaaaagttaactcattcaactcatttgcatttgtcagcatggctgctcttgcaatctctggtggttctttagttgcttgccagctacaaccagctttccaaacaaaacacgcacctactctttttacacctaaaactcaaccaagtacttacggtgttttaacggcgaaaatcacaggtaaacattctggcgttgctgtaatcaaattagatagcttccgtttaaacgttagctttgattttgaagctcatccagacagttacggcgttccgggttctgaattcaccgctgttgatattactcaactcacagtaaatgaaatcactgatattaacggaaagtcatataacgatttcaccgaatttgaagacatccgaaacatcaatggtcttctaaaaggcttcatcgaacgtaacaagttggtggaggcttaa

SEQ ID NO: 50549 - DNA, 948 bp, Acinetobacter baumannii
atgactaatttactaactgcagctgaagcatttgcagctcttcaaaaaggtaaaactgttctatgtcgtccagccggagacatgttggactttgccgatttagatcaattccccgcttctgtttttggcaaaccgggttttgaattctgcatcaaaatcgaaactattgaactggctggcattacattcacaaagccattaactattgatgagtataaagcgggtcaggatgtttttgttatcaatacatatctcccttcaatttatatcataggatttgaaactgctgcactcattgaagcaattaatagtggttttgttcagcgtgatgctgaaaatgccaagcttcaattaaaagcattttcaaaagcactcggtattgaaatcaacaatgatttaagtgttattcgtcttggtgaggaacctaaaaaacagagaggcaaaaaatcaaaagcagaaaagccaagtgacgttatttctgcagaaactcaaccaacgattgttattaccaaacaaacaaatgtcaccacatctgaggatctgttagttccagaaactaacgagcataaagtagatcctgaatatcagaaggcattagatgctcttcttcagcgtgtaaaagaatcaaaaacacctgaagaggtaaatgctgtttatcgatatacccgtacgtggaatgacaaacaaatggaacctctcctccttgccactcataagcgacttgaagagctcgaaaaatctaaggtacctgcaaatgaaccaccttcactaatggttcagatccaaaacgcgcccgacatcacaacattagatgctttggaaatagatgtggccgcacgagatccacagattcaatcacgactcatggattttgttaagaaacgccgctttgaattagaaaatgcggcatcaaacgaacctgattatttactggaggaacctttctaa

SEQ ID NO: 50550 - DNA, 876 bp, Acinetobacter baumannii
atggaagaaaagataaaagttgtcagcttcagtggtggtcgtacttctggctatacagtcaatatttttaaagatgatccagaagcacattttgtttatatggatactggcgcagagcatcctgctacttatcaatttattaaagatattgtaaagcattggaaaataaacctcgtatgcctgcgtgtagtagtaaatccaaagatgaataaaggtgtgggttacaaaatcatacctattgatgagttaaaacaggacttggaaccatggaaagaaatgctcaaaaagtacggaagtccttattacgatatgccattctgtactgctcgtatgaaaacagaaccttttgaaaagtattgcaatgatgtatttggtaaaaacaactatgagcgttggattggaattagatctgatgaacccaaaagattaccaattgaggttttagaaaaattaagtttaccaatccataaagatgcaaaaaatcagaaagctggatttagatatttagctgaaatcagtgatttcactaaagaggatattctggactggtgggagcaacagccctttgatttagccattacagaacatctcggaaattgtgttttttgcattaaaaagcacttaaacaaagtcgcattagccgccaaagatgaacctgaacaagcagtgaaatggatagaggtaactgaaggtccaagagtcagatctgaaggtagaaaatacaaccatcatcggatgtatcgttcgcgattgcacttgagcgatgttattgaagctttcaaagaccataacagagatgaactttttagcgctcttagaagcagtaagcgttacgggtctggttcatgttctgaatcttgtgaagcaattgtttga

SEQ ID NO: 50551 - DNA, 1938 bp, Acinetobacter baumannii
atgaaatttcgtagcatgaataatactgacttcatttccgattgggtaactactgagaattcaattcgcccacttgcctttgaacacacctcacaagccttacttgttttagacccacatcaaaatcagtttattgatgtaaatattagtgctacgaaattactccgctatgaacgccatgagctgattcaaaaaactgtcacttcaatttttggtcattttagtcaacttccagacttagtggcatttacagaagaaacactagctaaaggctatgcatggaataatgagctatatgcttttgataaaaatggagaaaaaattcaattcgatgttagctctgtttcaatcccatataaaaataaaactttactcatttggtctttagtcgatgtcaaagatctagagctacgccaactgaataaaaatgcggataaagtcattcgagcaggtcttaaagaatggcaagctctacaagaactttttatcgattctgacactggtaagcatttgctgttgagctcagtaggtgatggaatttacagtatcaataaacaaggattatgtacctttataaatcccgttggcgcgagaatgctaggtttaaaaccagaagatgtactcggtaaaaatatacataaaatacatcatcatactcatgaaaatggatcacattatcctgttgaggaatgcccaatatatgcggctgtacatgatggtgtagtgcatgaggggatacaagagattttctggcgtcgtgatggcagtttttttcctgttgaatttacaagtacaccaatcatccgtgatagcgagatcatcggtgcagtggtggtctttagagatattagcgaacgcttaaatacagaaaaacaactcacccatgctctaatcgagctacaagacttaaaaagtcgactagaacaacaaaatgaatatttacaggaagagatattacaaaagaatcaatatcatgaaattgtgggaaatagttcctcaatcttgcaaattattgaaaaaattaaagtagttgcttctactgatgccaatgtcatgatttatggtgaatctggtacaggaaaggaactgattgcacgtgcaatccatcaatctagtcatcgtaaacaccaaccacttatacgtgttaactgtgcagccatcccctctgaattgtttgaaagtgaatttttcgggcatgtaaaaggtgcttttacgggtgctgtccgtgatcgtgcaggacgctttgagttggcagatggtggaacattgtttctagatgaaattggtgaaatacctttagaattacaaagtaagctattgagagtattacaagaaggaacatttgaacgaattggtgaagaaaaaactcgtcacgtcgatgttaggattattgcagcgactaatcgtaatctcaaagaagaagttaagctcaaaaatttccgtgaagacttatacttccgcttgaatgtatttccaatctactcccctgcattacgtgatcgtaaagaagatatacctcttttggttagccatttttcgaaactgctttgtgaaaaacgtaaagttaattatttacctttttcacaaaaacatattttagaattacaacaatatgaatggcctggaaatattcgtgaactgcaaaatgtaattgagcgagctatgattactgcaaaacaaggctcagtttcatttaaatatttactggaacaagatttactacaagggaaaaaatcatcatctgatagttcagaaaatctctcaactcaacaagtcatgacaatccatcaactaaaagatttagaaattaaaaatctgattttggccgttaaacaatgtgatggaaaaatctttggtgaagatggagcagcagtgcttttaggaattaaccctactacactcatttctaaactcaaaaaactagagatagaatattaa

SEQ ID NO: 50552 - DNA, 483 bp, Acinetobacter baumannii
atgccaaaagttgatattgaacaatacaaagatggtgattttcttgtcgattatgaagaaaaggtctttgaagatgtaaaagcgcagccaggcgaaaaagcattagtgacatttcacacggtagcttttgaagggtctattggtctggtaaatgtcctccaagccaaacgtttattacgcaaaggttttgaaaccaaaattttgctttatggtccaggtgtgcagttaggtgtgcaacgaggtttcccaacgttaggtgctgaagctttcccagggcacttggcagtgaataatcaactcaaagcctttatggaagaaggtggagaagtctatgcatgtcgtttcgctttacaagctttatatggtcaaacggaaaaagcattaatgcaggggattcgtccaatcaatcctttagatgtaatggacttgaaattactgatgcgtcgtgacaatgcgctgatcattgatacttggactgtttaa

SEQ ID NO: 50553 - DNA, 993 bp, Acinetobacter baumannii
atgaatcagattgtaaaagcagcagcagtacagtgtagtccagtgctttatagccaaaaggaaaccgtacaaaaaatctgtaatacgattttggagttaggtaaacaaggcgtacagtttgctgtttttcctgaaacagtagtgccttattacccttacttttcttttgtacaaccaccgtttgcaatgggtaaggaacatttaaaactgctcaatgaatctgtggttgtcccttctgaagcaacctttgcgattggtcaagcctgtgctgaagcaaaaatggtggtttctattgggattaatgagcgtgcaggtggaacaatctacaacgcacagttgttatttgatgctgatggttcaatcattcaacatcgacgaaaaattactccaacttatcatgaacgtatggtgtggggacaaggcgatggcagtggtttacgtgcaattgattcagctgtgggacgtgtggggtcactggcttgttgggagcattacaatcctttggcacgttttgccttaatggcagatggagaacagattcatgctgccatgttccctggttcattagtcggacaggtgttcgctgaccagatcagtgccaccattcagcatcatgctttggaatcaggttgtttcgtggttaatgcaactgcatggctacatccagagcaacaacaacaaatcatgcaagataccggttgtgaaattggtccaatttcaggtggatgcttcaccgctattgtatcgcctgaagggaaatttttagccgaacctattactcagggtgaaggttattgtatcgctgacttagatttttcattaattgataaacgtaaacgcatgatggattcagttggtcattatagccgtccagaattgttaagtttattgattgatcgtcgtccgacgcaggtattacatgaacttaaagttgaatcttcggatttaacaaatctagaaaaaatttccagatttacagaagagcaggtttaa

SEQ ID NO: 50554 - DNA, 1080 bp, Acinetobacter baumannii
atgtctgcaatacaacttttaactgatttgcaatgtaacggtctgaaatgggagggcgaatttggtctatctcgtaagggtggtgcagggccaagtgatcataaggcactcagcctagctgggcagacgatgatgattcctgtgttgaatctggttgcacaagagtctccatacagtgctaaagctgatccagattctgaccaagtgatcgtatttaaaaatcagattcctgtagcaactttaacagccccagctcgtccaaagttctatgatttgaccacagacgaaggtattccatatgaacaaattgcaactttgcatagccatgacgtcttggcaacaactgtattacaacattgcattcgtatgaatgataaagctacggcttgtcaattttgttcgatcgaccaatcgttaaaaagtggtcgtactttaattcggaaacgtccagaacagttagcagaagttgcaaaagcagctgtggaactcgatggtgtacagcaaatggtcattaccactggtacaccaagcaccccagaccgtggagcagagattttatatgacagtgtgaaagctattctggctgaagtgaatttacctatacaggtgcaatgtgagccacccgatgattttgcatggtttcaaaagttaaaagacgcaggtgcggtgtccattggtatgcatcttgaagcggtgagtgagcgggtacgccacaaaattatgccaggtaaagcagaggttcctcttaatacttattttgcagcatttaaggcggcagtagaggtatttggtcggggacaagtcagtacctatatcttagctgggctaggtgatacggaagatgaaatcatcgaaatgaccgctaaattgaccgagatgggcgtttatccatttgtagtgccatttgtaccaattcagggaacagcacttgaacatcattcaaaacctgagcaagcctttatgcgggcactctatcccaaaattggagagcaacttcgtaaaaatggattgcattcagaagacactcaagcgggttgtgccaaatgtggagcatgttcttcactgaaagcttatgagtag

SEQ ID NO: 50555 - DNA, 564 bp, Acinetobacter baumannii
atgcaactttctggttatccatggttattagagttaaatgaaggccttaaacagtttgtcacagatgacattgttatcaaggtgatcactgaagattgggaacgtcgtcaatattatcgcctgcgagaagcgacttttcgtgatgaacaaaaaatcctaaaagaagatcgtgatgaatacgactttaaagctctaggtattgttgcgattgggcaaatgtttggtgagcatgatcgtgtaataggtgctgtgcgtatcttcccagacggaacaaatacatggtggggcgggcgtttatgtgtagaacccttgtaccgccatcatcatgctattggtaaagcgttgattaatgcagccgtgacgacggcaaaaaatttaggatgtaaaacattcctagcgacagtacagcaacaaaatgagcgttattttcagaaattatgttggaacagtgtccgtgaattaatggttgctgaaattccacatatgatgatgcaagctcaaattgaacattatccgctacagcatgtggtcatgcaggcttatatgcaaaaagaggtggaatga

SEQ ID NO: 50556 - DNA, 1047 bp, Acinetobacter baumannii
atgatgccactcaatcaacttcttgaatttttgagacaaaccccagcgatgcaatcaaaacaaatgattgctaaaagtgtagtgatcccaaatttgaataaagtgaactctctgcaagctttgtatgcttatcctggagatgatactgccgctattgccatacaggatcaatatattttacatgcgtgtgaagggatgttacctagttttgttgctaatcatccttattttgccggttggtctgcagtcatggcaaatgtcagtgacattgcagcaatgggtggtcgtgccttgtcagttgtgaatagcttttggcatacaaatgttgagcatgctcaattattaatgcaaggcatgcaagatgcttgtactgcatatgatgtggcaatgattggtggacatagcaatattgctgaaaattatcagccagctttatcggttgccattcaaggtacagcacaaaaattattatcggttttgcatgttaaaccacagcaaaaaattttgattgctttaaatctacaaggtcaatttcatcccaacactgtgtattggaaatgctttgaacgtgtatccggacgtattttgcaagcacagctctcagtaatgccgcaacttgcccagcaaggagtggtatatgccgcacgagatattagtaatgcaggtgttttaggcagtttgctcatgctacttgaggcaacgcaaagtggcgcagacatagaccttcaaaaaattccaaaaccacaaaatgtggactggcagacgtggctacaaatatttccaagttatggatttttgctgacagctgatgaaggcgaatgcgaagagatcattgagttatttgaaagtcagggaatttgctgtgcagtgattggtgaaagtaatgccagtggaaaagttcatgtgcatgatcagaagcaaagtgctcaattttgggattttaatcagcaaacatttactggttttaactatgtcgaaattttaaaaaagttaaaggctcagtcggaaccgattgagccgatagagaaggaggcagcatatgcctag

SEQ ID NO: 50557 - DNA, 291 bp, Acinetobacter baumannii
atgcctagcgtgaattttaccgtgaaatggccgaatggcgagctgattcaatattactctccatccacggtgatttatgaatatctatctaaaggacattcatatccagcaatacagtttttaaagttggctgaagatggcttatctgctgcatcagaacgagtacgggtacgttatggctttgcatgtagttcagccatggacagcctatccacgatcaaacgccaagctaacttattcgccttaaaagacgaagaccaaattgaaattactgaaatgtacaatgaataa

SEQ ID NO: 50558 - DNA, 1302 bp, Acinetobacter baumannii
atgcttaatatgcaaattcaagatttacaaccaaattatgatgtcgtgattgtgggtggtggccaggcagggttatgtatcagtcattatttacaaaaagcagggattgatcatgtgattctagaaaaagaatcagagttaacccatagctggcgtagtaaacggtgggataatttcactttggttacacccaattggcaatgtttacttccagagcatccatataacggtaatgatcctgatggatttatgaaaaaaaatgaaattgttgaatacctcgacgacttcattgaaaaactgaatccaccagttttattaaatgttcaagttaagcatgtggcaaaaattgcaccgcaacattttgaaattgaaaccagtttgggcacaactactgctaaacaattagttgtagcggctggtggttatcacaccccaatttatccaaaactaagtgatcaagtacctgaacaagtattggtgatgcattcagaacaatattttaatgtggaacagttacctgaaggtaatgttttggttgtcggttcagggcaatcgggagcccaaatcgctgaagatctacatttggctggtaaaaaggtctatctttctacgggagatgcaccacgctgtgcacgtttttatcgtggtaaagacgtagtgaaatggctttatgaaatgggctattacgaaacaactgtcaaagatcatcgatacagtgaagaagttcgtaacagtactaatcattatgtgactgggcgagatggtggtcgtgatattgatctacgtaaatttgcattagaaggtatgcgactgcttggacgatttgaggactataaggatgggcagtttgtattccgtccagatttaattcagaacttagatatggcagatgcaacttataaccgtattaatgcctctattgatgactatctagagaaaaataatattgtgactgaagaacctgcatctgtatatcagccactttggcggccagagcaggaaattacccatatcgacttagttgatgaaaacatcacctcaatcatttggtgtatcggatttagaccagactattcttggattgatttagatatattccaaacaaatggatatccaaaacatgatcgcggtattacggttgacccagatgtaagctttattggattaccttggttaaacacgtggggttcaggacgttttatggatgttgctaaagatgctgggtttattgcggatcatctcattcaacaattaaatgttacacctctgcatatatcctcaacattagcatcattggcttaa

SEQ ID NO: 50559 - DNA, 384 bp, Acinetobacter baumannii
atggaccaacaaccttttgtaattaatactaatactgcaccatgggaatttcttcctgttccatttttaaatagtgaaattcctgttaaaacctgtctggcatgcccagatacaggcatgatgatctggaaattacgttatccagcaggttttacaactgttgaacactggcataattgtgcacatggcatgtatgtcttagaaggacacttggtgacaagccaaggtgaatttggaccagggaattttgtttggtttccagaagggagtgtgatgttccacggagctcgtagtgacaatgatgccctagttctttttattactaataaagactttgatatccacttcacagcagaggaaggtcttcctgaatttatcgagtaa

SEQ ID NO: 50560 - DNA, 891 bp, Acinetobacter baumannii
atgaatatgctactagtgaaacactttcctgttcgtaatcttaaattttttaagaagaacttattaaagactcactattggatgggaaactctgcaggactgacttatgcaatacttgctttatctgtcatgtttccagcaggcgagcgattttttattcaatctgtaaaaaaggctcgttttaaacctgaagcgaagcttgatattgatttacaacgacagattactaactttatggtacaagaagctattcatactcgcgaacatatgtacttcaatcgatttaatcaaattaatgaaatacatatggcagaattagagcagaaaactgaagaagccattcaatttcttagtcaatgggtttcgaatatatccagtaaatgtggtatttctacacaagaaagtgacttattaataacagttgctttagagcattgcacagcaacgattgcagcaaaatttttaaaattcaaaaaatttaatgaattgattcaagatcctgaaatttcaaggttttgggtctggcatgcgatagaggaaatcgaacataaaagcgtagcttttgaattattagagaaaatttctaaagattcatataaattcaatttcatcagatgtataacatatctatttagcttaacagggctttctttatgctatggatattgcttaatgaatctgctagtcaaagataataaaataaattatctcaatgcattaaatgatatttatcaatatagccttagtccaagtaaaggtattctattcgcttcgtttagtgatttttttgcatttttaaaacctaattttcatccgaatgaaattgatcatgaagagttactagccatttggaaggagaaaataaagttagatgtatcggatttaacataa

SEQ ID NO: 50561 - DNA, 1002 bp, Acinetobacter baumannii
atgattgcagctgacttatggatgccccgatccaagcgcttgaaacgcccgtatcagcctcgttacaaccgggattgctttggtgaactgatccaaattgatggctcacaccatgactggtttgaaggacgcgctgctaaatgctgtctgctggtgtttatcgatgatgctacaggaaaattgcagcatttacgcttctgtgagtcagaatcaacctttgactatatgatttcaacacgcttatatgtcgaacagcacggtaagcctttagcgttttacagcgacaaacattcagtctttagagtgaatcaaagcagcaagaaagacaccaagattacccagtttggacgtgtactcagcaccctgaatatcgatatcatcttcgctaattcaccgcaggccaaaggccgtgtggaacgggccaacagaacccttcaggaccgtctgatcaaggagatgcgcctgaaaggcatctgttcgattgagcaagctaatgtctggctaccctgcttcattgagcagttcaatcagaagttcgccaagatggcttttaatcctaagaatctacatcggcctatcactgaaacagccgaagagttagatgatatttttacttggcgtgaaccccgcagagtcacgaatagcctgacgattacttatgataaatgcgtatatctcctggaaaacaccgaagaaaatcaaaggttgatcggtaagtatcttgagttcctggaatacccggatggtactgtagccatcatgcataatagccgaaagatcaattacagcctcttcgataaattaagtcagctgaatcagcgagagattgttgagaataaacggttgggtgctgttctgaatcatatccaacaacagcatgaagaactggaacagcaaaacaaacgcaatcgttctcaaaagatgccaagcagacgtgcacagaaaacagcaattcaagaactaaatctaaatcctgtgcttgacttggaaatgtccatatag

SEQ ID NO: 50562 - DNA, 357 bp, Acinetobacter baumannii
atgtggacagtcattacaacggatctgtttaacgaatggcttgcacagcaagatcaatctacacaagagaaagtactcgcagcgttggtcgttctacagcaacagggaccaagtttaggtcgtcctttagtagataccgtctatgactccaaatttaccaatatgaaagagctacgtgttcagcatcgaggtaaaccactgagagcctttttcgcgtttgatcctttacgacaagctattgtgctgtgtatcggtgataaaggcggtaaaaagcgtttttataaagagatgttagatattgccgatcagcaatacgaaattcatctttcaactttaggagatcaatctaatggctaa

SEQ ID NO: 50563 - DNA, 303 bp, Acinetobacter baumannii; identical to SEQ ID NO: 47929

SEQ ID NO: 50564 - DNA, 210 bp, Acinetobacter baumannii
atgtctaataataaacctttgaaaaatagtagtaaattacttgttaacttggacaagtttatatttttagtcaatgctgctgatagcctagaggaaattgaaattattagagatttatgctgtgactatttttcacattgtaagaagtcaagctattacactgatattttcgacaatgcttattggataaaatattacgaaataacttaa

SEQ ID NO: 50565 - DNA, 264 bp, Acinetobacter baumannii
atggtgcccgttcagaaacactctatcgaggccaatatatatagtttttctgtaaaagatttagatcaattaattgaaacgaatctcaaagatgggaataaatacagtaaattattgattggatataaattattttctgatttgatgaatgatcctatattttatacagaagtgtctaattcagctctgagcgctacgaaaagaaaatataagcaactaaaaattaaaatcaccacacatcaatatcagcttcatttggaataa

SEQ ID NO: 50566 - DNA, 456 bp, Acinetobacter baumannii
gtgccgtggccgatgccgtgcggctgtctcgcgcgggcttacgcgaaggtagcaaaccggtggctaccttcctgttcctgggcccgaccggggtgggcaagaccgagctcgccaaggcgctggccgagtccatctatggcgatgaaggtgcgctgctgcgcatcgacatgtccgagtacggggaacgccataccgtggcacgtctggtgggggcgcctccaggttacatcggttacgacgaaggcggtcagctcaccgagaaggtgcggcgcaagccctacagcgtgttgctgctggacgaaatcgagaaggctcaccccgacgtctacaacatcctactgcaggtgttcgacgacgggcggctcaccgacggtaagggccgggtggtggatttcaccaataccatcatcatcgccacctcgaacttgggctcggacatcatccagcgtcggctga

SEQ ID NO: 50567 - DNA, 477 bp, Acinetobacter baumannii
gtgatcgcccttgccaatgccgccgccgagcatctcgcgcgccagcgtcgtttccagttcgctgcggatcaggcgcttgagttcacgcgcaccgaactccggcttgtagccttcttccgcgaaatggtcgatcagcgtctgatcgaaggtgagcgtcacgccctggctggcggcgttgcgggccacacgatcgagctgcaggccgacgatatggcggatctcctccttgcccagcgcatggaagacgatgatctcgtcgatgcggttgaggaactcggggcggaagtgtccgcgcagcacgtccatcacctcgaacttggtcttctcgtattcctcgccggcggcgtcacgggccttcagccgacgctggatgatgtccgagcccaagttcgaggtggcgatgatgatggtattggtgaaatccaccacccggcccttaccgtcggtgagccgcccgtcgtcgaacacctgcagtag

SEQ ID NO: 50568 - DNA, 318 bp, Acinetobacter baumannii
atggtggacatcagcgaggatgagaacgcattcctcctcaagctggatctgccggaggtccccaaggatgccgtgcgcgtcagcgcggaaaacggtgtgctcaccatcagcggcgagcgcaaactggaaaaagaggagcagggcaagaagttccaccgcatcgaacgtgcgtatggccgctttgtgcgcagctttgtcttgcctgacaacgttgatccgaccaaggtgacggcttccatgaaagacggcgtgctggaagtgcggcttgtcaaggccgagcaagccaaaccgaaacagattgaaatctcagtcaactaa

SEQ ID NO: 50569 - DNA, 915 bp, Acinetobacter baumannii
atgaatatcaaacagccccaatcaaccttctccgcacttgccctggcggtcgtcgtcggactgagcggaccggccctggcccaatcggcggcaggttctagcccaggtgctgcagcaccctctgccgcatccaaggcggcgctgccacaggtagatgacaaggtcgcccgggaagccgcgaaaaagcgcgccaaactcgcccaagatgcaatcactgcgctggccaagacccatgaggcattgatcctccttgatgcaaggaagaccaaggaggcgctcgctgcgctggaactggccagcggaaagctggaactggtattggcgcgtgagccaaaacttgctttggcgcccgtcgatgtaagcgtcatcacccatgacatccacgccgacgtggaatcggtcaagaaagcggtcaagttgtctcgggagttgttggatgatggcgaggtgcaaaaggcacggcccattgttgccaatcttgccagcgaaatcgtgatcgaaaccaacaacctgccgatggcaacgtacccggcagcgatcaagtcggccgcacggctcatcgacagcggcaagatcgacgacgccaaggcgaaactcgcccgagcactgaacacgctggtggtgacctcggtcgcctttcctctgcccgtgctacgggctgaagccgcgatggcaaaagctgaaaagctggccgagaccaacaagcgcgatgcaaagcagaacaaggagctcagcaccttgctgtcgtacgtgcgcacggagatagaaatggcgcagatcctgggttatggcaagaaggcggatttcaaacccatcttcgatcaggtgaagtccattgagcaaaagtcggctggtggcaaaagcggcaagggatggttcgacgagttgaagacgcggatccaaaagctgttctga

SEQ ID NO: 50570 - DNA, 906 bp, Acinetobacter baumannii
atgaagcttagattgtttgtcattaccttaatattagtcacatctgcatgcagtcagcagaaggaagaacacacttatggagctttgactaaagattataaagatgtgtctgaatataagtctaaacatgaactagaaaaggctgcaaaagcaaatgacgctgaggctatttttgtattagcatctatgtatgccacaggcgaaggtgaaaaacttgatcaaaagaaagcactggaactatttgagaaatctgcacaactaggctcttcaaatgccatgttgcaattaggattaatttatcggaatggtaatgatttaataaaaaaagatgatttaaaagctttaaagtggtttgaacagggggctaagaaaggtaatccttcagctatacataatttaggcgtttcatattataaaggattgggtataacagaagataaagcgaaagcttttaagtattttagtcaatctgcagaattaggcttattacaatcacaggtaatagttgcgggtcttttatacaacggtgaaggtgtaactaaagatcacaaaaaggcttttgagtgggcattaaaggcagccaatcagggggatgttgagtcacaaaacaatatcggtttagcttatgaaaatggagatggggttgcaaaagaccctgtgcttgcaaaaaaatggtttgaaaaagcagctaataatggttctgtattagggcaatataatcttgcacttaagtattttgatggtaatggtgtagagcagaatttttcaaaatcaattgagtatgcagaaaaagcagctaatgcgcagaataaagctgctatacaattgttggttgatatctattcaaatgatagaagccctaaatataatcctgagaaagctaattattggaaatctaagctttaa

SEQ ID NO: 50571 - DNA, 705 bp, Acinetobacter baumannii
atggcggtaaaaaatcctaaaggtaatactggaaaacctagtaaccaactattttccccaggcggtgataataaaacacttcataaagtttcccttagcagttttaatatgagtgcttataagactaccttagaagactttaatatttttacaaaagcaactggacaaattgagagtacatataataaacgatatagtgcaagcattgctcataaaatagcaactggtatggcgtggcaacaagccaaagattattgccaatggcttggacaacaagtggatacacccatggatttacccattgaatcgcaatgggaatatgtagcccgaaataaaggacaatatgataactacaggcattcacatgacttacaaactgtcgcgaatattccggttataggtcaaacaccaccaaatcctttaggtttttacgatcttgttaccaataattatgaatggatgaatgattggtacgataaagattattataaacactcacctagtgataacccaacaggactccaaatgggtacagaaaaagttttaagaggtactctagcaatgggagccgataacttaatgatgaatgatggttttaatatagctagaaataaagccccacccatcccagatgaggaaaccaaatcaaaatatcgcttatattctgttctttgtgttgctaatattcagcagccaattgaataa

SEQ ID NO: 50572 - DNA, 198 bp, Acinetobacter baumannii
atgatgaaacaaaatatagctattatcttattttcaagcattgctttaagtgcttgtgcaacatctactgaatcaaatcaaaaacaaacaaagccctcacctgaactggagcaaaaaattcagaagttggttgagaaaactaaaaagaatatgatttttgtcgaggtggtagctatctcatgggagattttaggctag

SEQ ID NO: 50573 - DNA, 324 bp, Acinetobacter baumannii
atggacagtaggtggattgaagcgcaacgctgtgaaatggaaaagcttatttcaccagagctaatcaagtcgaggaatttagcacgtcaaagttacttcgatcatatggaaaaagaaatggctgaccacgtatcacgctcaattgaaccactcagcggtaaaaagcaaagcacactggttgaactaagggagtcaattgaaaaactggctcagaagtataaacaagatgctcattcttccagcctttttggtgatcaggataaagcgcgagtttataactgctttgctaatcaattggaccatttgctgaaaggtggtgcttga

SEQ ID NO: 50574 - DNA, 207 bp, Acinetobacter baumannii
atgagtaaatgccaacactgtgcagttgaagagttaataaattcttacggcggttttgcagaagttaagactctttgtgaaaaattacgaggccgatataaccggagtgggctatctaatactgattacaacgagttacttcaattagagaaggcacttgaccaagcgaagaagtttaatgcggagggcgcaaaaaatggacagtag

SEQ ID NO: 50575 - DNA, 285 bp, Acinetobacter baumannii
atgagaactgatgacatgaatgaagcgagagaattgggctttttaggtggaaagctcgataaccctgtaacggtcaaatttaatgatttgaccgatgaatccatcgaaggtgtggcaaatgccagcgacatgacgaaagcagactggatacgtgaagcttgcatagaaaaactcttggtggagagacgcaagttcaatcgtatgcgaaaggtgtggggtcatcctaaggaaacaagagatgccagaggatgccatgagaatacacagtcaaatttagagcaataa

SEQ ID NO: 50576 - DNA, 258 bp, Acinetobacter baumannii
atgagcaccataaaagaagtaattaatgatgcgggtggagtttgttctgttgcatttgcagtccagctaagtgaaaggtctatttataaatggattgaaaagaactgcttgccacgttctgagtacacaggtgaaagcaactattcaaatttgatagcaaagttatgtaagaaattttcagaacaagagattctggagattggaaatcctcgtaaggcaaaaagtttagagcgtagggacgaagtaatccctacatga

SEQ ID NO: 50577 - DNA, 744 bp, Acinetobacter baumannii
atggttcataatggtgatgcaatgacttcacaaatagactcagtaaagcaagaatttgctcaacgccttaataaagcaatggaggctgcaggttatccaactagagggcgagcacgaattttgagccgagagtttaatatttccgataaaggtgcaggaaaatggttaaaaggtgacgccatacctgaaacctcaaaaatacctcttttatctaaatttttgaaagttaattctgaatggctcttatcgggttcaggttcaatgcttgcaaaaatagaagtcgataaattaagtaagaacctagataacaatgttgatatgcgaaaaaaaatcgaaatcattggaaagctagttcctgtgatatcgtgggtagaagcaggaacatggacatcaattgaatcagttcctacaggaactgaatttcatgaatggttaccgcctaatcccaaatgtggaaaaaatggctatggtctcattgttcgaggcgaatctatgtctccgaaatttgaaccagaagatcgaatttatgtaaatccagatatacctgtaagtgatttaaaaactggcgatttagtaatagtttcatgtgagggtgagaaagaggcaacttttaaaaaactagttattgaaacagatggtatgtatttagaaccattaaatcctaaatggcatgaaaaaattatggaactccatgatggctgtaaattagtaggtaaagttgttggaatgtatagagatgtataa

SEQ ID NO: 50578 - DNA, 858 bp, Acinetobacter baumannii
atggcattcgaaatattcaatgatgattgtctaaacatcttgaaaagtattgaagatgatcatatcgatcttacgatcacctctcctccttattgtattggtaaagcatatgatattcatactaccattgaaggttttattgaaatcaatgaaccagttataaagttaatttgcgaaaaaacaaaaccaggtggttctatatgttggcaagtcggacatcatgtcttaaaagatgaaatagttccgttagactttatcgtttatgaaatatttaaacgagtttgtccagaaatgaagttgaaaaatcgaattatttggacttttgagcatggtgcaaactgcaggaatagatttagcggtagacatgaaacaattctttggttttcgaaaggtaaagattgcttttttgaccttgatgctgtgcgtgtaaaacaaaaatatccaggtaagaaattttataaaggtcctaaaaagggtgaatacagcggcaatccattaggaaagaatcctggagatgtatgggctattccaaatgtgaaagctaatcatatggaaaaaactgcccacccatgccagtttcctattgcgttagctcaacgtcttattaaagcattatgtcctacagatggtattgttttggatccatttatgggatcaggttcgactggagcagccgctctactagagcagaaaaaatttcttggtattgaactagataaggaatatcatgctattgctgaaaaacgccttcacgacgccttaaatggaactttacgttatcgagaaattgataaaccaatttttgatcccgcaaaagcaggctctgttgcgaaagatccatttttagatagagaataa

SEQ ID NO: 50579 - DNA, 1050 bp, Acinetobacter baumannii
atgacttcttcaaaagattatattgaaacaaaatgtattagatttaatcaacatgataaatctatgtacttgtttagtttagatgcgaaaaccttatggaatgttcttaaaattaatgagcgtatcgaaaataaagacgaaggttatcaaagagctttatccaatactagggctgaagaattaaaaaagtttattttacaaaagggaattatctctcctgctttaattgtatctttagagggtgctacctatgatcctgcaacttcaatattaaaaattccaaatattgaaaatgctggatgggtaatagatggccagcatagattaagaggttcttatttaagtgcgattcaaaaggataatccctcaaatatcgatcttgctgtagtcgcttttttagatttaaacgaagatgatcaaattatccaatttgtaactattaataaagaagctaaaggtgttcccacttctctttactatgatttgttaactaggttacctcctaaaaaaactgctgctgatcaagcaaaagaagtagcagtagaaattgcaagggccttaacaaaagatccagaatcagttttttacgaaagaattgtatttgcacgttcacccaaaaaaggggagttatcacttaacaactttgtaagaaaagtgagtcctcttttaactgaaaataaaggtgcattaggtacaaacttttctcaattggaaaaaatcaagattataaataattattttagcgctttaaaaattgttttccctgaacaattcacttctaaaaattataggtttatggggacattaggatttggtgcagtaattaatgcctttgaatcagttttctcactgacaagaagtgaatttggttcttttacaattgatgatattgttaaagtgctaaaaagaattgaagattataatttcgacaattgggatcaatatggtacaggagtcgcagcagaaaatgccgtaggtagtgattttagaactgtattattaacaagaacacaagaacaaactaaagaagaaggcattttaagattgtaa

SEQ ID NO: 50580 - DNA, 1155 bp, Acinetobacter baumannii
atgaatgacagcaaaatagagacagagcgggccataaaccaggcaggtgatttagatcagacccaacggctgcttcgccagcgtgaattgacgctgttttatctgcaggccaaattaaagctgatgcagattcaggataccaaggccgaattgccactttttctgcaatggctgaaacagcattttcctgtgccggacttgccggaatattgtctggtgatgtgctatcccttcactcaggaatgtttcatttttcatgccttggcgcaaccgctggcgcagtctgaggtacgtctgctccaagagcagctgctaccgcgttctgtagcggtgatgcagcaggatgtgctgctgctggggcagcatgattgcctctcgctgtttactggacagaattttgcagtctggcgggtctatttaaactattcggcagcccagccggtggacgtggagctactgcagcagctggatcaggctttgcaatcgggctttcaggaacgtgcgctacagcaggagcgcatacaaaccatattgcagcaggagcggcgtgatttttcggctgacttacatgacagcattgcgcaaattattggattcttaaggttgaaatccgcgcagctgaaccagcaatgcaaacagcagcctggctatgcaccgttgctggaacagaccgaggagctggcggcttatacccattatgcttaccagcaggtgcgtgaattaattaccgcctcacgcttaacctatcaggaactggattttttcaccgcgctgaaaaaaattattgccgaatttgaacatcagtccagtgtggcttttgaactggataaccgtgttccacagctgaaagtcagtgccagacagtcggtacagctgctgtatatcatccgtgaaagcctgagcaatgttgtacgtcatgctcacgccagtacagccgtcatttctgtaaagcgcaatttcactcagcagctgcacattcagattgcagataatggccgcggcatacaggcaggacggaaacggccggacagtttcggactggaaattatgcaggaacgagccgaacggattggtgctgtgctcagtatccgcccgaatcgtccctgcggcacctgcgttgaactgatattagacctgagcactggagggaagtga

SEQ ID NO: 50581 - DNA, 717 bp, Acinetobacter baumannii
atgaataaaattgcagtcagtattgtagatgaccatgcgctgttcaggcgcggtgtggcggatattatccgccagtccgagcattttgatgtacagcaggaatacagctgcggatcagcatttttgtcagcactggacaccgcgaacattgaattgctgctgttggatgtacagatgccgcagatgagcggcattgaggtactaaaatgcatccgtgaacgcaatgtcgatcttaaagtgattattttaactgccagcctggaggacagcattgtattggatgccattcgtctgggtgccaatggctttttgcccaaagataccttgccggaagatattctgctacaactgcatcaagtcatacagggcaggaccgtactgcatgccgatggggtagctttgctggcgcagcaagtccggcagcagacgtcacccttagccgctgccttgcataaaacctctgaacaggtgctattgcagcgtaaacttctgtcggaaatgacacagcgggagcaggaaacgttaaagctgatcgcaaaaggcttgaacaataaactgattgcccgtgaattaggcatcagtgacggtacggtaaaagtctatgtgaaaagtctgctacgcaaactgaatgtgcattcacggctggagctttccgtgtgggtgcatcagcagcttaacactgcagattttgatatttatccctcttcttccgtttaa

SEQ ID NO: 50582 - DNA, 780 bp, Acinetobacter baumannii
atgtcgaaaatagcgctgccttccagcaaagatgggctgaatatggacttgaatcaggattggcctgaactgtttgaccagtttgccgatattgcactattgctggatagtcatggcgtgattcagcgcagtaatcgtacctggcacaacttgctacagctgcaaccggatgctgcagcacagcgcttacccttgagctactggctgtattccgaagatagtttgaccttccaatgtgccctcatggccggacggccgtgtaagctagcactgcgcctgttaatcccggaacagcccttggtatggtttgatctgtcgctgcagccgatctgtgccggtgccggaaaaaaccagttgcggggatggtgcattttaggcacggagcagacgcaaaaaatccggcagcaagaactgcaggatgcacagcagcgcagtctgcatgatttgctttcgcgcctgccggtcatgctgtaccgttcacgcaatgactggaactggactatggattatgtcagcagcggctgtcagcagataaccggttatcacagtgagctgctgatcaatacgccgcgctacggacagctgattcatcccgatgaccagcagtacgtctgggacagtatccagttggctgtgcagcatcatcgcgtatttcatttgcactaccgcattattactgcccagaacagcatacagcgggtacaggaaatcggacagggtctatattcgcaaagcgacatggtgctgggtcttgaaggcgctgtatttatccaaaactga

SEQ ID NO: 50583 - DNA, 1365 bp, Acinetobacter baumannii
atgaaacgagttgcaattattggggcagggccaagcgggatggcgcaactgcgcgcttttcaatctgcgcaaagcaagggcatcgaaattccggaaatggtatgctttgaaaagcaggccgactggggtggtcaatggaactacacttggcataccggcctggataaacatggtgaaccggtgcatagcagcatgtaccgttatctatggtcgaatggcccgaaagaatgtctggaatttgcagactatacctttgatgagcattttggccggccgattggttcttatccgccacgtgccgtgctgtgggactatatcaaaggtcgggtagaaaaagccgatgtacgcaaatatgtccgcttcaacagtgcggtgcgccatgtcgagtttcacccggacagcaaacagttttcagtgacggtgcataaccatgtcaccgacgagatgtataccgagacttttgattttgtggtggtggcttctggacatttttctacccccaaaattcctgaatatgaaggtttcggcagttttggtgggcggattttacatgcccatgacttccgcgatgcactggaatttaaagggaaaaatgtactgctggtcggcagcagctattctgctgaagatatcggttcacaatgctataaatatggtgcgaagcagattatcagctgttaccgcagttcaccgatgggctatcactggcctgaaaattggtcagagcgtccgcaactgctgcgggtcgatcagacccatgcctattttgccgatggtagttcggccgagattgatgccattattttatgtactggctatttgcacagtttccctttcatgtcggaaagcctacgtctaaaaaccgataacattctctatccgctgcacctgtatcagggtgtggtctgggaagccaatccgcagctattttatttaggcatgcaggatcagtggtattccttcaatatgtttgatgcacaggcctggtatgcgcgcgatgtgatgctgggtaaaattgccttgccgagttttgccgagatgcaggccgacacccaagcctggcatgaggaagaaaaaaccctgcaggatgcagcagccatgttcaaatttcaaggcgactatattatgcgcctgattgatcagaccgattatccaagctttgatattgaagcggtgcggctgacctttttgcaatggaaaaaacacaagcaagaaaacattatggccttccgtgacaatacttaccgttcattgatgaccgggacgatggcaacgccgcatcatacgccctggattgatgccctggatgactccctggaggcctatttacagaccgaggccaacctacagcaaaaggcaggttag

SEQ ID NO: 50584 - DNA, 540 bp, Acinetobacter baumannii
atgatggaagccatgcacagtacccccagatatgacactgttgaaacgctgcactggaatgcacccaagtatgttctggtgttgcagcatgcagcatcggcagtgacccggaaattaaccgaaatgagcaaacagcatccgcaaacggtgcagctgatgctggacagtcaacaagatccagccttggctggcctgctgcatgaactagagacagtgctgcagcaggaaaaggccggcgtgcgtaccgtggtctgcggtgatgaatcctttgtttggacagtacagcagtgcctggtgggtacgggctgcctagatgaggaaatcagcttgattgcggatagctccagcctgcaaaacccgcgtaaaaaagtctactgcgtgcactgcggtcatacccagaacaccgttaaagacgagctttgtagctgtgagcagtgtcaggtcgaactgctgatccgcagtcatttttctgaacgccttggcgcctatatgggagtctgtgccaatgcgcatcaacctatgggagcactcagcgcatga

SEQ ID NO: 50585 - DNA, 945 bp, Acinetobacter baumannii
atgaacccaaccgttcctgtccatgtaacccgaatttatcaagttaccccgatgattcgcgaatttaccttggccgctttagatgcccccttgcagccgttttcttccggcagtcatgtgattgtacagttgccagttgaaggccgcatcatccgcaatgcctattcattgctgaatgccccgtatgagcagcaccagtatcaaattgcggtgcgcttgcaggagaactcgcgtggcggttcgcaatacctgcatgaaaacatccaggtgggcgataccctaaatatttctgcgccgctgaatttattttccctcaattctcaggcccagcatcatgtatttattgccggcggcatcggcattaccccgttcctgtcgcatatgaaatacctgctgcatgccgggcacagttttgaactgcactatgcctgtcgtgacggcatcagcaatgcctatgaagatatgctgatgcagctgtttcatgaccaggtacatatttattcggaaaaaacccagcgccgtttggatataaacgcattgctgagccagcagtccctcggcagccatgtctatatttgcgggccagagcgtctgattcatgctgttgttgactgtgcacaaatgctgggctggtcaaaaaaacgtgtgcattgggaagctttttcttcgcctgcaccgggagtcgcatttgatgccgtgctcagtaaaagccagcgccgtattcatgtgcccggcgattttagcctgctggaagcactggaacaagaaggcattgaggtacccaatctctgccgcggcggcgtatgcggtcaatgtgccacgtcctacagccaaggcgaggtagaacatctggatcattatttaacggtgcaggagcgctcggcgcagttgatgccttgcgtttcgcgtgccaaacaaggccattgcctgcatttagacctatag

SEQ ID NO: 50586 - DNA, 1029 bp, Acinetobacter baumannii
atgacggttcaatttaaccccaatgaaaatatgcatgatcagtttcactaccataacagtgcaaaggcgattgcccgttttccttttccatttcccgaagaccagtatatgtattcggtgaatattgagcctgttgtttcaaggccggatagcatttttgagcattggttcgatgtagatgaacattatgtaacggaaatgaacgagcgccgtttaaccctggaaaaggatccgaaacgttgcattatcatgcctcacatgcgtcaagcaagctgggactttttggaaatggtgatgctgcattatgcggaagactaccctgaacatttccagctggagcgtgatggcctgaactggcactgggtcaatcaaccattaaatatcgacgtccattttatttttggtcaggcagacagcttgccgatggagccgtttgaatttatcagccgtcagttccagggcgatgttgccttgctggatcagcgtgatggcgatttgtttatggataccggcatgatcaccggccctgcagactggtcactgaattttgatgccggcatgagttttaagcaatggcacgcccctgtaccaaaactggcacataacctgggggtgtttgagcgcgcactcaaattcctgctcaacattcaggttggccagccctaccgacgtctgaattggacaatgaccatcaatccgcgtatggatacttcctcggaaacctatcatttatggggacatgaacgcggtctggtcactgcggaaaatgccggtgaactggtgcatttgcgggtggagctacaaacaatgccgcgtctggcacgcagcaatgcactgctgttcagtatccgcacttatctgattagcctgaatgatttgacccgcaacccggcatgggccaagcggctataccgcgtaatccgcgatttgcctgagccgatcgcagaatacaagggcatcagtgaatatcgtgaaccgctggtgcaatggctcagccagttcgatggcttcgatggcgtagatgaataa

SEQ ID NO: 50587 - DNA, 459 bp, Acinetobacter baumannii
gtgcaacaaagcccttctgaattaaggaaaaatgatcaagtagacctatattgttttaatggtatacacaataaaaaaatactcgctccttactcagcatcaaagtgtatgagttacggagcttatatattaaaagataaagctactgcaaaagaatattttgataaagttaagttatcagaagaatataaagaaattcaattaataagctccattctatataaaatagtaccaaaagataaattaaatcaatactgtacttctttaaaaaataacgataaatgcgttgatatgttaaataattcttttaatgatactaagagtctaaaaaccttagaaaaaatttcaaaagactgtaaaaaaagtgaatctaaaacggctttgttgcacaaagatttaaaagttaagacttctcatccacacaggcgatcagaatatcttgcaatcctcggtttttaa

SEQ ID NO: 50588 - DNA, 711 bp, Acinetobacter baumannii
atgatgaacgaacaaaaactaaaagaccttgcagcagaatttgctaaaggaatcaaaacagaagacgatctcaatcaattcacccgattgttgactaaactcactgttgaaacggctctcaatgccgaacttaccgaacacctcggacatgaaaagaatgctcgtaagaacggttcaaatgcccgtaatggttattctagtaagacagtgcttagcgatgatggggagattgagatcaccacaccacgagaccgtgatggtaccttcgaacctcaattgattaagaaaaatcagacccgtatcacgcaaatggatagccagattctatccctatatgccaaaggtatgactacccgtgaaatcgtggctacttttaaggaaatgtacgatgctgatgtatctccaaccctcatttccaaggtgactgatgccgtcagggagcaggttgctgaatggcaaaaccgcccgctggatacgatctatcccatcgtctatatggactgtattgtggttaaagtccgtcataatggcagtgtcatcaacaaggctgtattccttgccttaggcattaatcttgatggacacaaagaactgctcggtatgtggatggctgagaatgaaggtgccaagttctggctgaatgtcctgactgagcttaaaaaccgaggattgcaagatattctgatcgcctgtgtggatgagaagtcttaa

SEQ ID NO: 50589 - DNA, 261 bp, Acinetobacter baumannii
atgatccccctaaagcaagcagctgattatttgctactttcagaacgaacgttttcacgtttatttctaaaatatacaggaattccatatactaaatggtgtctaaaagcacgcttattatattctctagaattattagtattgggcaagacggtaactgagatcgcatttgacttaggatattcctcgccttcagcttttattcatgctttcaaatctttatttaataccacacctaatcaatttataaaaactgaataa

SEQ ID NO: 50590 - DNA, 291 bp, Acinetobacter baumannii
atggttaaagtagctgatttaccaagttttgatatggctgagtcactcaaaactgaagaagacatcgtgatgtatctcaatatggttcttgaagataatgatcctgctgaattagctcatgcccttggtgtcattgctaaagctagaggtatgacccaaattgctaaagaagcagggatcggacgtgaagcactttataaagcacttcgccatgattcagcaccacgttttgatacgattaatcgtgtagtaaatgctttaggcttaaaactaagagtgcaacacgcctaa

SEQ ID NO: 50591 - DNA, 297 bp, Acinetobacter baumannii
atgattgaaattaaacgtctaccagaatttgatgaatggttggatggcattaaagacaatatgacccgcattcgcttgaatcgccgattagataaggttcaacgcgggaactggggagacattaaacctctccaagatggtgtttgggaaatgagagagttcttcggttcaggatggaggatgtattacatccaacatggtgacgtagtgattgtaatgcttggtggcggagataaatcaactcaacaacaagacatcgatcgtgcagtcaaattatcgaaaacgttggaggattaa

SEQ ID NO: 50592 - DNA, 528 bp, Acinetobacter baumannii
atgggaactgtaaagctcaaatcttctgatgaagtttttcaattaaaaattagtctgctaggcagtgatcctgaaatctggagaactattcaaatttcatcggcagctactttatctaggctccataaggcaattcaatctgcttttgattgggaagatagccatttacatgaattcacgactattaagcatgaaaagatcaataaaagacaaaaattgaaagaagttctacgtgtaggtaaaaaaattatatatacatatgattttggcgattgttgggaacatttgattactgtagaaagcagacaatctcctgatttaaataaaaaatatccatgttgtatagatggtcaaaatcatgctccatttgaagatattggaggaatttttggatatcttgatattttagatgcattacaagaacccaaacatccaagatatgacgattacatgcaaattatcgaggatgaaataggagagatagagtttgatccgacctactttaattcacatgatattaagttttaa

SEQ ID NO: 50593 - DNA, 282 bp, Acinetobacter baumannii
atggctatcaaacttcgtaaatgggatagtgctgagcatcttaaaacagaagaagatatgcaagcttacctacaagcctgtatcgatgaatctaatggtgatgctgcattcattgctaaagctttaggtaacattgctaaagctaaaggaatggctcaattatcacgagatacaggtctaggccgagaaagtctttacaaagcactttctggtgatgttaaccctagttttgatactgtgattaaagttgtaaaagcactgaatttacgcttagcaatttaa

SEQ ID NO: 50594 - DNA, 303 bp, Acinetobacter baumannii
atgtactcaatatataccacagaagcctttgatgattggtttaccaagttaaaagatcaacaggcaaaaagacgcatacaagtccgaattgatcgggttgaagatgggaactttggagatactgaaccagtcggtgaaggtgtttctgagttacgtttcttctttggacctggctataggatttattactgcaagcaagggcaaagggtcgttattctcttagcaggcggagataagtctacgcaaagtaaagatataaaacttgccctacaattagcacaagatttagaggaggagctgtaa

SEQ ID NO: 50595 - DNA, 822 bp, Acinetobacter baumannii
atgctagatcaagaaattggactgacttttaaaggcttaatgtcacttataaagaataatccgctgaatgaaacttctaaaattaaatatgtacgtcacaagagcaatggagaattttcagaactttttgataatgtattcttgaatattgctgagctagaggaataccagagaatacaaagtaaaagtgtatttaaaaatattgattacataatatcttttttgggtacagaaggacaaaaatctttattttggggagtattcaaggtcgtaaatgaaaaatatagtgaaaataatctttatgaatatgaactagaagagatgccacaatttagtgagcttaagttcagagtggtagttgactgggggagagctactctatcttggcatcagcactatacctctgataaacaagttattgaaatattgcctaaaggctccctagataaatttcctggctatgaaaacgttcatctatcgtggaaagaacttaccagagtaattagaacagactcttggaagactgcattacagaatcaaaaggcagtttatttaattacagatatttctaatgggaaaaagtatgttggttcagcttatgctgaaaatatgcttcttaatagatggcaaaactatgcacaaagtcgtcatgggggaaatgttcaattacagcaattgccgttagagcatattgaaaataacttttattattcaattcttgatatttttaaagctaaaacagacgataaagttatattgagtcgagagagttggtggaaaaatacgttattaacaagaagatttggctataactccaattaa

SEQ ID NO: 50596 - DNA, 1209 bp, Acinetobacter baumannii
atggatgaagctacaatcaaaagtatggcagctgaattagctaaaggtttaaaaactcctgaagatttaaaccaaatgacagccatatttaaaaagttcatgatcgaaaccgctctgaatactgagctttctgaacatttaggctatgaaaagcatcaacctaagaaaggatctaatgcacgtaatggttttagctccaaaacagttctaacacaagatgggcagcttgctttagatatccctcgtgatcgtgacggctcttttgaaccacagattattaagaagcatcaaacgcgcattactagcatggatgatcaaattctttcgctatatgcgaaaggaatgacaaatagagaaattattgctttttttaaagaaatgtacgatgccgatgtatctgcctcccttattagtaaggtaacggatgctgtcattgaacaagtgacagaatggcaaaatagaacactcgatagtctttatcctgttgtctatttagattgcattgttgttaaggttcgtcagcattcaacagtaatcaataaatcagtttatttagcattaggcattaacttggatggccaaaaagaacttcttggcatgtggcttgctcaaacagaaggttccaaattctggctgtcagtcatgacagagcttaaaaatcgaggagtgcaagatattcttgttgcctgtgtagacgggctaaaaggctttcctgatgcgatagcttctgtctaccctcatactgacatccagctgtgtatcgtgcatgttgtacgcaatagcctgagatttgtgagctggaaggactacaaagctgtaacagcaggattgaaggcgatctatcaggcaagtacagaagaaaatgctttaaattccctaggtatcttctgcgatcaatggaatcatcagtatccaaaaattggagaatcctggcgggcaaattgggaaaatatccgaacgatctttagctatcctgctgaaataagtcatgcgatttatacaacaaatgcaattgaatcattgaatagtgtgatccgccattcaactaaaaagagaaagatcttctcttctgatgattcagtgaaaaaggtcatttatttagcaacttcaaatgctgctaaaaaatggaccatgccaattcaaaattggcgtttagcaatgaattggtttacgattcagttcgatgatcgattaaaagatcatttataa

SEQ ID NO: 50597 - DNA, 774 bp, Acinetobacter baumannii
gtgcagttcggactccagctcctgcacggccaccggccgggccgtggccgacagcttcacgcgcgcggccgcctggtcgagcaggtcgatggccttgtcgggcaaaaagcgggcggtgatgtagcggtcggacaactcagccgccgcgatgatcgcgtcctcagagatgctgaccttgtggtgcgcctcgaaggtgtcgcgcaggccgcgcagaatcatgatggcctgtgccactgtcggctcgggcaccgtcaccggctggaagcgccgctccagcgcggcatccttctcgatgtatttctggtactcgttgagcgtggtggcgccgatcaggttcagctcgccgcgcgccatcatcggcttgaagacgttggccacgtccagcccgccttcgccaccgccctggccggcaccgacgatggtgtgcacctcgtcgatgaacagaatcagctcgccctggtgctcggagatctccttcagcaccttttgcacgcgctcctcgaactcgccgcgatacttggcgccggccaccatggcgttgatattgagttccaccaggcgcttgtcgcgcaaggtctcgggcacttcaccggccaccatgcgctgcgccagcccctcgacgatggcggtcttgcccacgcccggctcgccgatcagcaccgggttgttcttcttgcgccgggccagcacctcgatggtggtctcgatctcctgcgcacggccgatcaccgggtcgagcttgccgtcatgcgccatcttggtcaggtcacgtga

SEQ ID NO: 50598 - DNA, 441 bp, Acinetobacter baumannii
atggccgagttcattggaggtcacgaaagcgcggctgagcgcatccttcacgcgcggcgacacgccgatctcgccctcgaacggcttgtccccgcgcttggcctcggactcgatctgccgcttgaggtcatcgaccttgatcttgaactgacccaggatggtcttgaccacgtcgctgtcggccagcgccagcagcagatgttcggtatccacctcggcgcggccaaattcggcagcgtgtttggcggcctcctgcagcagggcttccgactgttcgctgatgcggctggccaaaccactgccgcgacggcgcggcgcacccgaacctgcggcggcgggctcgccgaacgaggcatcgaccacgtcatcggtatcggcggccatcggcgtcgcgtcgtcgccgatgcggaagaagtcactgccgaggaagtcctcgaatag

SEQ ID NO: 50599 - DNA, 129 bp, Acinetobacter baumannii
atgcttactggagtctatataaataatgttgctacttatagtgtaccaacacaattagatggtttaaagcagataaattttatatttggggcaaatgggtctggaaaaactacaattgtagaattatag

SEQ ID NO: 50600 - DNA, 321 bp, Acinetobacter baumannii
atgagtcgattaacttttataaacggtgcgattgtttctgcgtctgatgttcgcaaatcttggagcaaaattgttcaatgtgtcaaagaaagtcataaacctgtttttgtttatacgaagaatacgcccgaagctgttgttctgagttttgaagaatttcaaaacatgcaggaaattgttgaagccgtccggcgtgaacagctaggacaacaaatggtttatgatcttttggatattaatcagctcactggtcaaccgatcaaacacatgcttttgaaccacaaaggtgtatttgaagaagtaaatggacaagaaaaatag

SEQ ID NO: 50601 - DNA, 1209 bp, Acinetobacter baumannii
atggatgaagcaacaatcaaaagtatggctgccgaattggctaaaggtctaaaaacaccagaagacttaaaccaaatgacagcagtctttaaaaaattcatgattgaaactgcactcaatactgaactttcagaccatctcggttatgaaaagcatcagcccaagaaaggctcaaatagccgtaatgggtttagttctaaaaccattacaactcaagatggacaactggctttagatattccccgtgatcgagaaggttcatttgagccacaaattatcaaaaagcaccaaacacgcatcaccagtatggatgaccaaatcctctcactgtatgcaaaaggaatgactaatagggaaattgtagccttcttcaaagaaatgtacgatgccgatgtgtcagcatctctcatcagcaaagttaccgatgctgtgattgagcaagtgactgagtggcaaaatagagccttagatagcctttatcctgttgtctatcttgactgtattgttgtcaaagtccgtcagcactccaatgtgattaacaagtccgtataccttgctttaggcatcaatatggatgggcaaaaagaattactgggtatgtggattgctcagacagaaggtgccaaattctggctgtcagtcatgacagagctaaaaaatcgaggagtacaggacattcttgttgcctgtgtagatggattaaaaggctttcctgacgcgatagcctctgtttaccctcatactgatattcaactgtgtattgtgcatgttgtacgcaatagcctgagatttgtaagctggaaagactacaaggctgttacgtcgggtctgaaagcgatttatcaggcaagtacagaggaaaatgctttaaagtccctagacatcttctgtgatcaatggaatcaccagtatcccaaaattggagaatcctggcgggccaattgggaaaatatccgaacgatctttagctatccagccgaaatacgtcatgcgatttatacaacaaatgcgattgagtcgttgaatagcgtaatacgccattcaacgaagaaaaggaaaatcttttcatctgatgactcagtaaagaaggtcatttacttagcaacatcaaatgctgcgaagaaatggacgatgccaattcaaaattggcgtttagcaatgaattggtttacgattcagttcgatgatcgattaaaagatcatttataa

SEQ ID NO: 50602 - DNA, 378 bp, Acinetobacter baumannii
atgaataaatatcttaaatttatagtttttaccgctttcatgattggtcctatagtatcttcatatgctgtctttggttttattcaagataaggatgggtacgttaatgtacgaggaaattcaagtttaaattctaaagttacgaccaaattaaataataatgaaattgtttcttgtgtgatggatgaagggacaaataatttttgtttagttaatgcaagcaatggtgtaactggatttatctataaaaatagaataaataattttagtggttacacttctattaagctatctcaatattctagagaaaaagctgtttataatgataaaaacataatagtagaagtgtatgcaaaaaaaagctattttagatcctaa

SEQ ID NO: 50603 - DNA, 174 bp, Acinetobacter baumannii
atgcaaaaaaaagctattttagatcctaaactttataaaaattttaaaggtgaatataagtattttaataataaaccattctttggtactgatggtactttacctaataatgattttttacaacttgataaaatcataattaagaataaagataagaaaatagaaattggttaa

SEQ ID NO: 50604 - DNA, 339 bp, Acinetobacter baumannii
atgaaactaatcaccgccattatcaaaccattcaaattggacgatgtccgtgaagagctcaacaaacacagcattcatggtatgaccgtgaccgaagtcaaaggcgcaggccgtcaaaaaggccataccgaaatgtaccgcggtgccgaatacagggtcgattttttgccgaaagtgaaattggaagtggccgtccggagctatcaggtcgaatcagcaattgaaattatcagcaaatttgccgctacgggcaaaattggcgatggtaaaatttttgtcagcgcgctggaacaagtggtacgtatccgcactggtgaaaccggtatggacgccatttag

SEQ ID NO: 50605 - DNA, 837 bp, Acinetobacter baumannii
gtggatgactgcgtgatttaccgtaccggaccaaatgcctttatggtggtgcatggcacaggcattggctatgaaatgctgattcgctcagcggctgggcgtcaggttgcggtactgtttgatgatgacctgcatgatttatcgctgcaagggccattggccgtggactatttagctcaacatgtcgcgggcattcgtgatttgccctattttcaccatctgcaaaccaaactgtttggtgcgcctgtcatgatttcacgtaccggctataccggcgaacgcggctatgaaattttctgtaaggcggccgatgcaccgatgatctgggaaaccattctcagtaccggcgctgaatatggcattattccctgttcatttaccacgctggactggctgcgtacagaaagttatttactcttctttccgtatgataattcagaatatttccccttcgagaatgatgtctgcggcgacaccttgtgggaactcggcctggatttcacggtttcaccgcataaaggcgaattccgcggctgctatgagcatcgccgtttaaaaggcaaagaacgctttaaaatcttcggtgtattgctggaaggcgatcaggtgcctgcaatgggagataccttatgggacggcaatcagcaagtgggggtcattacctgcggtatgcattcgccgctgaccggtaaaaccgtggccatcgcacgtctggatgtgccttatgcagagcagggtaaagccctgcaggtcaaaggcagcctggaggtaaatgcaatcgcgcataccttgccatttgatgatcccgagaaattaaaacgtaccgcaaaaggctaa

SEQ ID NO: 50606 - DNA, 726 bp, Acinetobacter baumannii
ttggttatattagagcatgtctcttttgttagtcgtcctaaaaaagttcaagtcttaagtaaattcttttacaagtgggttgatcaggttgttactttaacccaaaaggataaagaacaatttgataaatttcattctaaagttattgttattcccaatttttcacccttccctattgtctcggaatctccgctgagtagaaaacaaattgtaaccataggccgtttaaccgatcagaaaaattaccttcatttattgaaagcttggaaaaaaatatatcaaataataccagagtggcaccttaatatttatggtgaaggtgaacacaaaaaaatgctacaagattatattgaggagaactctctacagcgcgttattttgaaaggaagtacatcaaatgtgcaagaggtatatagacaatcagacttttttgtaatgtcgtctaagtatgaaggtttacctatggttttagtagaggcgcagagtttcgggttacctatagtttcttatgattgtccctttggaccaagcgatgttattcaaaatcataaaaatggcttgttggttgagaaccaaaatattgaggcattggcagatgcgattttacaacttgcttcctctccagatatgttggcgcaattctcacaaaattcattgatcaatgctaaaaaatatcaacctgaacagatcttaaaagtttggattgaaaaggttttggaaggttaa

SEQ ID NO: 50607 - DNA, 654 bp, Acinetobacter baumannii
atgagctaccagaaactcagccgtgaccagattgcacaacgtgtggcacaagatattccagatggtgcctatgtgaacttgggtattggtttaccaaccaagattgccagctacttacctgctgacaaagatgtctttctacattctgaaaatggcctgttggcttttggcccaccgccagctgcgggtgaagaagaccctgaactgattaatgcgggtaaagagtttgtgactatgcttgaaggcggcagctttttccaccatggcgattcatttgccatgatgcgtggtggtcaccttgatattgcggtgcttggggcatttcaggtggcagcgaatggtgacttagcgaactggcacacgggtgcgccggatgcgattcctgctgttggtggtgcgatggatttggcggttggtgccaagaaagtatttatcactacagaccatgtaaccaagcaaggtgagccaaagattgtggctgagctgacctatccggtaacgggtaaacactgtgttgaccgtatttacactgacctgtgtgtgattgatgtgactaaagatggtttaaaggtgattgagaaagttgaaggtcttagctttgatgagttacaggctttaaccggtgcaactttgattgatgcgactcaagggtaa

SEQ ID NO: 50608 - DNA, 369 bp, Acinetobacter baumannii
atgacattaaaaaacgcttatatcatcgatgccatccgtactccatttggccgttatgccggtggccttgcgcctgtccgtgccgatgaccttggcgctgtgccgattaaagcgctcatgcagcgtaacccaagtgtagattgggaacaggtcgatgatgtgatctatggctgtgccaatcaagccggtgaagataaccgtagcagccatggccatgatcgggccaaagttacgtgcagatttacggtaaaccagattgccccagcggtcgcccttataggctttaatcagggcaaagtcagccttgatcggatactcaagcacgtaatctttaccatcaatatgacgggtttctttgccttcagctaa

SEQ ID NO: 50609 - DNA, 654 bp, Acinetobacter baumannii; identical to SEQ ID NO: 50607

SEQ ID NO: 50610 - DNA, 132 bp, Acinetobacter baumannii
atggccatggctgctgatgtcaccattgcccaggtttctgaagtggttgaactgggtggattagacccggaacacatcattaccccaggtatctttgtacagcacgttgtacaagtacagcccgcacagtaa

SEQ ID NO: 50611 - DNA, 132 bp, Acinetobacter baumannii; identical to SEQ ID NO: 50610

SEQ ID NO: 50612 - DNA, 654 bp, Acinetobacter baumannii; identical to SEQ ID NO: 50607

SEQ ID NO: 50613 - DNA, 369 bp, Acinetobacter baumannii; identical to SEQ ID NO: 50608

SEQ ID NO: 50614 - DNA, 321 bp, Acinetobacter baumannii
atggcatggatagttttagttctggccggtatttttgagattatctgggcctattccatgaaactttcagccggttttagcaaaccgatccccaccctcatgacagtggtttttgtaattttaagctttctgctgttgagctatgccatgcgtacgctgcccctaggcacggcttataccatttggtcgggcataggtgtggtcggggcatttttgctgggcatcttgatcttgggcgagcaggccaccttgatgcgtattttagccgccgttttgattacggctggactgctattgatgaaattttccgagctctcctga

SEQ ID NO: 50615 - DNA, 234 bp, Acinetobacter baumannii
atgagctatccggaacactttgtgattaagaaaattcgcttattaacaccgaccacctgtgaggtgtatatgctgaatatgaacaaaaagtttatgaaaggctggctgattcgatgcaatcagggtctggttcagcagtttcatgaacagatgaatcatttgatgcagtctgcccagccttttcaggcattgttacagctgaagcagtttcatcgggtagaggttttatgttaa

SEQ ID NO: 50616 - DNA, 306 bp, Acinetobacter baumannii
atgacacgtagaccaagaagaaatcattcaaatgactttaaagctaaggtagcacttgctgcgattaaagcagaaaaaacacttgctgaattgagtgctgaatttgatgttcatcaaaaccaaattattgactggaaaaatcaactgatttcagcttcctcgcaagctttcgatcaatcaaaagcttcaacagaaccacccatcgatctaaaaaaactacatgcaaaaatcggtgagcaggcattagaaattgattttttagaaggtgtgttgaagaaactgggtcgcttcaaccacaaaagttaa

SEQ ID NO: 50617 - DNA, 693 bp, Acinetobacter baumannii
atgcaatacccttttgcaggtagccgtatgatgcgtgatttattgaatcgtcaaggacatcatataggacgacgtcatacacgtactttaatgaagaaaatgggcattaatgcgttatatcgtaaaccaaatctaagtcaggccaatcaagctcaccgtaaatatccatatctgctcaaaggattggctattcagcgcagtaatcaagtgtggtgtacggatataacgtatatccctatggcaaaaggctttgtttatttatgtgctgtgattgattggcatagccgcaaggtacttgcgcatagggtatcgattagtatggaggtggatttttgtatttcggctttaaatgaagcgattgaaaaatatggatcacctgaaatatttaatacagaccagggcagtcagttcaccagtgatgcatttattgatgtattgaaatcaaatggcattcaaatcagtatggatggtaaaggtcgatggattgataatgtgatggttgaacggttatggagaagcgttaaatatgaagaggtgtatctcaaagcttatagcagtgttaccgatgcgaaaaagcaattgagtgcatattttgaattttataatttgaaacgacctcattcgagtctggacaaaatgactccagatgagttttactatgaccagctaccacaacaaaataaggtagcttaa

SEQ ID NO: 50618 - DNA, 321 bp, Acinetobacter baumannii
gtgtttattgccacggctgcaccagaaaagttagcgaatgttttactcgagtctatcaatctagatgtacaaattattggtactcctttgcaaaagaaactaggaggatggacaagtgggatacattgtaggtctgaagaaaaagtaagaagattgaataaacttgatatcaaacaaccttggttcgcgacatacagtgatgatattgaagatgacttgcctattttgatgggtgccaaactctcctacttaattaatggagataataataagattaaacatataaaaatcaaaaatttaaaactattaaattgggtttaa

SEQ ID NO: 50619 - DNA, 219 bp, Acinetobacter baumannii
atgaatgattctttaaatatttatgctataaattctatatatgttaaaaacaatcctgctgtctggggagtgatgtcaaaagaatttaaatcaggctataaagttaatgatggttttaaatttagattaacaaaagataataaaattaaatgtgagaatttaaaaggttcaactttagaatgcaatgaaggttttatgcaaatttatcaaataaaatag

SEQ ID NO: 50620 - DNA, 903 bp, Acinetobacter baumannii
atggtggatttcatccataacaataaggcgttatatggtgttgaggcgatttgtaggattttaccgatctcagcttctacctattatcgaacactagatattgctgaaaacccagaacatcgagcaaagcgagatctacatgatttgcatcatgctgaacaaattaaacgaatttggaaagaaagttcaggtcgatatggtgtacgtaaagtttggcaacaactgaaacgtgaaggttatgttattgcacgctgtacagtggttcgcttgatgaagaagctaggtatacagggtgtttggcgtgggaagaataaatacaccacccgtagccgagatgatcaaaaaagagcggatgatttagtgaaacgtaattttactgctgattatccaaaccaactatgggtcggtgacttcacgtatattcaaactcattcaggctgggtctataccgcctttattattgatgtgttctcacgagcgattgttggatggaaagtatcaacacgtatgaatacagacatggtgctcgatgcactagagcaagcattgcatgaccgaggtatgcctaagaatgtgattcatcattcagatagaggtgttcaatatctttcaattcgctataccaatcgtttagaagcagcaaatttacgagcatcagtcggtacgaccggtgattcatacgataacgctttggctgaaacagtgaatgggttatacaaaacagaggtgattgaatatttaaaagcagactggcaaggtttagcggatgtacaacttgcgacattaaattgggtagattggttcaacaaaaagcgtgtacacagcgcattgggttatgtatcgccttttgagtttgaagcaatgtactatgataagattaacccgttaggtcacgtggcctaa

SEQ ID NO: 50621 - DNA, 477 bp, Acinetobacter baumannii; identical to SEQ ID NO: 50567

SEQ ID NO: 50622 - DNA, 456 bp, Acinetobacter baumannii; identical to SEQ ID NO: 50566

SEQ ID NO: 50623 - DNA, 309 bp, Acinetobacter baumannii
atgatggcgatacagcaggttgaggaaacagtgatcaaatttgctgaccaggatcatgactttcatcggtgcgctgcagtcatagaaggtggcctgcatcgcgaactgctgttcgacttcggcaaagctggctttcaggctgtcaatatcgccactggcgtcattgaaacggaagacaatacgggtaaagaaatagccggtggtctcgtcatcatactgtgccatttcactgatatagcagccgttctgggcaaggcagccgctgatggcggcaacgatgccggatgcagccgggcaacggatttttag

SEQ ID NO: 50624 - DNA, 207 bp, Acinetobacter baumannii
atgttgctcgatgcattggagcaagcattgcatgatcgaggcatgccaaagaatgtgattcatcattccgacagaggtgtgcaatatctttccattcgctataccaatcgtttagaagcagcaaatttacgagcatcagtcggtacgacaggcgattcatacgataatgctctggctgaaacggtgaatggcttatacaaaacatag

SEQ ID NO: 50625 - DNA, 174 bp, Acinetobacter baumannii
atggatgaatgggactctatagaccctatggcgaatgcttgggcgaaatcactgttctcaaacattgtcaaagacggaaaagcagcagtggtgatcggcgtcgacgaaatcgaacctgaaaaggctgctccgcttgcttcagataaaccccgaacaaaagcatttgtttggtaa

SEQ ID NO: 50626 - DNA, 591 bp, Acinetobacter baumannii
atgagcaatgacaaactaaaactctttgcagaaggaaatcccgctcgtgttaccgttcggttagaccccctcgaaagagatattgaagccgcacttagttactccaaaagtaaggctatgaaaatagcggtaaacgaaggcttcatttcctctcaatgcctgaattgtcattgctttaaggttcaaagcgaagttgttcgcactcgcaagagctgggaggatgagctaagagtaacgataagatgtgattcgcaaacgatttttcgaccagttatctgccctgctccattaggcgcaaacgagctaacaaacagcttatcaaatctcacatcgagagtaagtgcggcagacctttcagtcaaagcaagcgcaagtgcaatttcttcgttggtaagtcgagttgattatgactcgttgcggaataaaaaagctgaatcatgggatggctattttgaacgtgactcaattatcgttccacccataacgccaaagaaaacacctgaagagctagaaaaagagcttgaagaagcctcagatgaatcagtgggcatcacaaaagatacccctcgaactggtggggtggcatggtga

SEQ ID NO: 50627 - DNA, 594 bp, Acinetobacter baumannii
atgagtaatacagtacgcgtaatcgggattgacccatcattaaagaatttcggaatcgtagttgccgatgtgaatttggatgatccagatctttcattctctgttgtgagcatgaacttaattaaatctgaagagaacaaggcaactaaaaaagttgttcgcaaaaacagtgatgacttacgccgggcaaaatcgcttcatgatggtttaaaagaagcttgtaagggtgcttcatttgctatttgcgaagttcctgttggctctcagtcagcgcgagcaatggtttcttacggtatttgcattggggttttgtctagttgtccgcttcctttaattcaagtcacaccgaccgaagtaaaattagctggaaccggcattaaaaccgcaacaaagggcgaaatgatcgaagctgcaatgaatgctcatcctgaagctaaatggccaatgcgaaaaatcaaaggcgtactagagccattaagtagtaacgaacatttggcagatgctactttcgcgattaaggcaggtttggacaccgacgagtttaaatctgcaattcagatgctcaagcagttaaaaaatgcccaactaaattaa

SEQ ID NO: 50628 - DNA, 633 bp, Acinetobacter baumannii
gtgaacatctatgaagctattgaggatgaagtcctcgctcagctagaaaaggaggacagtttaattcagcagcatttgaatttgtgcgcaaatgaggatgcaaaactcgcttcaaaagtgaaggaaatcctttctggcgttgtgcatcaaatgaatgctgaacttgatatgaatgctaacgactctgaattttcccctctgtcatttgctaacgagtttatgttggctcagggtgggaatattcaggttcgaaaaatctataaaagcggtacggactcttggacgcagcgagagtttttgggtggagaatcattccttttgtttaaggctggcataaatgaaagcctcattgagcaaatggacttttggaaagttcaagaggacatccttgatttaattcacctccgcttcagacccgcttttgctgccgattttgcagaaatcatggttgatataaatcgtggccgtcagctttttaacggattgcatgaaacgctgacggaagttttcgacagcttgtcatttagaccagcgatcaaatcaatccaagaggcaaaagcggaaatcaagaagctccgctgtgtgcgcgagcaaaagattcaaagtttaaaaaacaatgtggcagtgtggtaa

SEQ ID NO: 50629 - DNA, 1953 bp, Acinetobacter baumannii
atggaatttttaacactcaagattaataacttcttaacgattggcgaagcccgtcttgatttagctaatcgtggattattgttggtgcaaggtgaaaacaaagacaactcatccgcagactcaaatggttcaggtaagtcatccattgttgacgctttatgttggtgcctctacggaactaccgcaagagacgttacaggagatttagtcattaataagacggccaaaaaggattgtgcggtcgaactcacgattcatgacaatggacagtgttacaaaatcgctcgtcaccgcaaacatgcgacacacaaaaacgcgctgattgtcttaaaaaccgatatttacggcaatgagttacctaatggcaacatcacgaaaggcactgataaagaaactcaggagcttgtagttgatattgttggttctacgctagatgtctttatgtcatccgtatatgcgggtcaggaaatgatgccaaacctccccgcccttacggataaaaacctgaaagtcttaattgaagaggcggctggcattcaggttttagagcaagcgcacaccattgcaaaacgtaagttagccgaagttaaagcgaagctctcaaataagctcacaatacgcgataattttgcgacggtacttgcgaccatgcagagtcaactggctgagacacaagcgaaattaaagcagtttgacgacacaaaagagtcacgcgctagagctgtgttgagcgaagcgttaccgctgaagaaggctattgaagacatcaaagtccaaatgggcaataccgacattaacgctctcaatgccgagaaacaaagtattgaaaccgcgattagtaaagcggaagatttagttaatgaggcaaagaaattaactcagatccgtgatgacttgggtatcaagtaccgcatcactaataataattattcttctcttaaaactaatttaaataatttagcgaccaaaattcgaggcattgacggtttagttggtacgccttgcacacagtgcggtaaagaatattgcgctagtgatttacagcaagcgcggtcggttcaaatgaatcaagcccaagttgcaaaacaagatgcgctgaaagccaaagccgaaatggaacaggtgaaagctgaatttgaagcggctgagaagaacctcaatgacttccttcaaaacaattcgctggacgttcgcaagctctatgctgacaaggctgctgttgaaggcgcaattgctgcatttacttcgtcaagctctgagattgaccgcaatctcaaggacattgaaagaatcaaaaagcgcgcaaaagatgtaatgaatgaggcgaatccattctcagcaatggaagctgaccaacaagcaaaaattgcggattacatcgcaaagaactctgcaattgatcaggaagtgcaggaattgcaagcgttagttgaattacatgaacatgcggttttgatttatggcccatcaggtgtgcgcgctcatattctcgatacagttacgccgttcttgaatgagcgaaccgaagactatctcggcgcacttactgacggcaacactcatgcggtttggtcgaccttgacgcttaacagcaaaaaagagcttaaagaaaaattcacaatcgatgtccgtgacaatacgggcggagagtcatttaaaggtttgagcggcggtgaaaaacgtaaggttcgtttagctaccgctttagcactgcaagatctggttgctagtcgcgcaaccaagccgattagtttgttcatcggtgacgaaattgatgatgcattggataaatcaggtcttgaacgtcttatgggtgtgcttgagcgaaaagcacgagaacgaggcaccgtgatcgttgtgtcgcattcagagctgcgagattggattgacgatgttgtggtagtcactaaggaaaatggttactcaactgtgagcggtgcaaatctcgtttaa

SEQ ID NO: 50630 - DNA, 1095 bp, Acinetobacter baumannii
atgaaaccttatggcattcagtcagattcgcatcaccataattggagtgcgttttcacacactactgctaacggtatcaataaccgtttagaagggtgtttaaacgaagttcgccgtcttgcagcagaagttaaaagcgcaggcggcaacactatttatcacacaggtgatttatttcatgtgcgcgggcagattgcgccctcagtactaaaccctacgcttgatgtttaccgccaattgattgaagaaggttttatcattcgtatattagctggcaaccatgatcttgaagatcgtcatgtcacacgcaccggctctgcagtaacagcattagaaggtatcggttgtcaaatcgttaataagcctactttcttcaatgatgatcgtgttgtgatgataccgtggattgaaagcgtaaaagggcttaaagacgagatagaaaaggctaaaaagcacatcgaatcaatgccatcccctccgcctttgcgctctatggaaagcataagtgattggacgttaatgattcatgcgcctgtagacggcgttattgcgggattacctgagcatggacttaccgcaagtgatcttgagcaatatggatttaagctcgtatttagcggtcactaccatcatcacaaacaacttagcgaaactgtttattcggtaggtgcattggctcactacacatggtctgacgttggccataaagcaggattcttagttgtaaataacaccgatgtgcgttggtacaaatcccatttacctgcctttgttgaaattgatggctcaatggatgaattagacattcaagctgttgtgcctggtaactatgtccgcgcaaaaatcaagatcgttaaacaaatcgaaattgagcagttccgcaaataccttacagatattggcgctcaaggtgtgacgatcattgcgtccaaaccagttgcagacgttcaacgtgcaaacgcagcggtaaaagctggcgcgtcaattgagtcgtccgtaactcaatttattactaactcgccgttaaacagccctcaacttgatgcgctgtgccaatcaattttgacagaagcgcgcatggaggttgctgagtaa

SEQ ID NO: 50631 - DNA, 399 bp, Acinetobacter baumannii
atgattttgacatccgcgctgacatgcctagctttgaacatttaccacgaagcacgaggtgaaccaaagctaggcaaagagttagttgcaattaccacccttaaccgcgctgaaggcgacaatagtaaaatttgtcaggaagtccttagaaaacatcaattctcatggactgcaagtaaggtaagcggtagaacgctcaacagcagcggaaagccaaaagaaaaagaagcttgggaagattcaaaacgaattgcagaacaagccttaaatggtcgattttcagttccagtacggtacagcggtgttactcattttttctcacatcgtaagcgaggctgggaaaaacaactcaaatatgttggtcaaataggcaaccatcatttttatatggcaaaataa

SEQ ID NO: 50632 - DNA, 213 bp, Acinetobacter baumannii
atgaacatttctaacaatcgcacgattgaccgagcagctaaagccttaattaaggaaggttggacatatcgccaaagtaaaggcggtcacgttgtcttgaaagacccaaaaacgggcttttctctccccgctcctgtttctccttcttgccatagagccgagaaaaattggctttcagctgtgaagaaaatacgacaaggagttcgaccataa

SEQ ID NO: 50633 - DNA, 366 bp, Acinetobacter baumannii
atgagaaaaccacactcaatcaacggcaaacaagtcggcatggtttacacgcaaggcggcaaatctatctacttggccatgagatcaggagctaagaatcgcaatattgatttaaagaccaactcatggctttttgaacctattatcatcagtcattgtattaacaactcaattgatgcaattggggtagttcaccgcgtaaacaagaaatgcacttactacctcacccctttaagccactttctcgagaactgcgaaccacacagcacatcaaaaggcttgtacaaacgtttaaacatgaacaaattcatgatcaattcagagcgttttcacggcaatcttgaaaaatcactcaaaattaagtag

SEQ ID NO: 50634 - DNA, 519 bp, Acinetobacter baumannii
atgaaatacatcccgaatctaaatgctgagctaagcgtcttagaataccgatttagaaacgagtatgaaaacagccgtctaatgattatctccacgttagacagaactaagatggcttatgtcaaaggtcacacgcgtcgagacgtaccagaattaggctctcagcgacccgaagtgaaattatccaatgatgaagagcatttcaatgttggggagctgtacagctatgcccttgatgaaattcacacctacatgcgcgaacacaatgatgccactcatcataaatgtgaacgcgaggagtacactgtattttttaataactcgtttagagcgggagagctgattggaaagatagaaggggctgttggtggctcaaaagccagagaagtgctgtgctttcttggggcgtattttgcgctcaccaaagaaagtgtagatcaacccgaagttccaaatccaaaaagaacaaatcctaattattcaaaaagaacaaatcctaattgggggttattttcatga

SEQ ID NO: 50635 - DNA, 438 bp, Acinetobacter baumannii
atgttagaagaacagttagagccagatctaaacgttgttgagcatctttttcaacaaggcaattatgtttaccgtttaatgtttttaagcaatgcaaatgaaaccaaaatggcttttttgaagggtctctataattggcgagaaccacatgcgcctccaatggaaacaatccttttaacatctgaaaacacagataaagaagagctgttcgccaatggaaagactttcattgaggaagtcaaaagagatgtagctggaaaggccgaatatatttggtgggcatcgcctctttattttaacgatgacagtcaaatgtgtatgttagagacgaaactaactagaacagttggtttttattataaaaatgcggttttgaagttctttcgagatccacccgttccgaaacgcaacaatccaaattggggagcttggtcatga

SEQ ID NO: 50636 - DNA, 399 bp, Acinetobacter baumannii
gtgactataaaatttgatgagaagtttcctgaagggaaatacaaagggcgaacaccggctgaacttattctcatgcttcagaatgactccgattttgaaggtgttgattacttattgtggttgagaaaatttcgagcgggtaagtttggtggtttggcaagtacatttgacgaaaccgtcaacgcaattatcgacttaattgtttttgaagtgccggagttaaagaaaagatatccagttaccgtctacacaaagctagaagccaaagaaattttcgacaaatatcataaagaagctcaagaagccgcaaaacaggaagcgattagaaaagaaatgaaagctcgcgcagatcgcgagcgagcggaacgctacaaaggcaaatgggggagctgggcataa

SEQ ID NO: 50637 - DNA, 354 bp, Acinetobacter baumannii
atgaaacattatgttttggattttgtaccaccactacaaggcatggatgatcacttcaatacaattcgtttgggggttacatggtcaaagaaacttgccgctggtgatcgagtgtatctccaaaattcaaaaactaaaatgatcgaaggtttagcgattgttgatcgtgtaattgtcgggaagcttggcgagctatgcgcttattacggtgctgataatcacaccgaaattgacagcgaagacaaatgcagaagcgcagagcgcttatataaattaaccttaaagctttacgggccacacatcgcaagcgcaatgaagaaatcaacagttatttatttaaggcgaatagagtga

SEQ ID NO: 50638 - DNA, 1497 bp, Acinetobacter baumannii
atgacagcacaagcacaaatcgacgcactaaatgacgcattattcaaagcaatcggtgataaccatgcagaacaagcggtcactcgttggattgatacgggcaaccctgaattaaaccgcattatttcaggaagctacgaaggcggtttgccatttggtcgaatggttgaagtatttggcgaatcatctactggtaaaactgctgacgctactgaatggatggttcgcgctcagaaaatgggtggctgtgcaatcttcattgactgggaacgctctttcgatgttcgtttggctgaagggttcggtcttaacacacagcgtccatattggatttacgcgaagcctgcaacatgggaggaaggaaacacacttgccgctaaagcgtgccagttaattcgtgcatctaaagctattcctgatgatgcgccaattttagttgtatttgactctattgctgctgcattacctaaatcgcaagctggcaaagaaattgatgaatacaccatgaatgacactacggcgctggctcgtgtaacgtcttctacgttaaaaaccatgagtcaccgagctgaagagtttagcgcgacattcgtatatctcaaccaaatgcgcttaaagccgggtgttatgtttggtgatcctcgctgtttacgtggtgacgttcaaattccctttgttgatggcacaactgcaacaatcaaggaaatcgttaagaacaagatcaacaaggaagtgtggtcatacaacgaaacaacaggtgaaattgagcctaaatttatcgttgattggcatgacaatggctctatcgctgataccgacaagcgttggattcacattcgagcaactacacctgaaacgaagaatggcgtatctgcggttacagcaacaaacgatcacaaaattcttactcgcgagtgtggctggattaacgcagaggatgtgaaggttggctatcaccttgttactcataagcacaaaaccgcctatgctgtcgtcacagaggttcgcgaaggcggtaagaagttagacacccgcatgtatgacattaccattgagggcaatcacaacttccttgcgggcaacaaagacaatggcttcattgttcacaactgcacaccaggcggaaaagcaatggagttttacgcttctgcacgcttggctttaggtcgtcaaaaaatcatggacaaagacgaagttggtgaaaaggaatttgtgggccaaaacattaccgttcaatgcgtcaaaacaaaattcactcgaccgttccaagagtgcaatttacgcatgatgtacaacgaatttgatgtggcttacttcgatcatatcgccgctatgcttgatcatttaattaagcgcggttggattgaatacaacaagcctcgtgttacatggacagatggcaagaagtactttgtcaaagagcttgtagccaagttaaacgcagaacctaatggcatggagcagttaaaagctttcttacccaagtccgataaataa

SEQ ID NO: 50639 - DNA, 1065 bp, Acinetobacter baumannii
atgccacatttaacgattttaattgatgcgaactctattggttacgcagctcatcacgctacaaaactgcattcgggtgttatgcaaactcaggcagtgtacggttttcttcgtacagtgcgcgaattacgcatccgcaacccgttagcaacaatctatgtgctatgggatggaaaagctcaatttcgctttgatatgtgccctgaatacaaaattaagcgcgttgctgatacacctgaaaaggtcgctgataaagaagcttacaaagcgcagttaccgtttatcaaagcggctctatctgctttaggcattacgcagattctttcatacattcatgaagctgatgacttagctggaatcttagtaaagcaaatcatgaaaaatccagatcaagaaatcttacttgcgtcaggcgacgtagattgggtgcaactcatacgtcgtggtgtgcgttggcaagatttgcgtgacaaacgaaatgagaaggttattacctttgaaaattttgttgaaaagactggctataaaactccactagcgtttttggagggcaaagctcttcaaggcgattcttctgactgcataccgggagttggcggtattggtgaagcaacagcgccgttatttctagctgaacatggttcggttggtaaattcattcaacgttgcgaaagtggcgaaattaaaccagccaataaagctcaacgctcattgtggaaaggcacttctccctacacgaaagagcaatggaaaaacttattccattatcaacgtgacgactctctaagtgacgaagagaacgagaaggaacacaagaaacagctgaaaaaacacatggacgcatatatcggtcaaggtcgttcgatcttcattcgaaatatgaaaatcatgcagctgatcaacccacatcctttagagaagcaacaccttgaaatagacaaaggcaactttgacttagacaagttcattgacatatgcgcggagctgaacttcgcatccattttgaacgtaattgataactttgttcaaccgttcaaacaagcattaccgacacaaactaattga

SEQ ID NO: 50640 - DNA, 888 bp, Acinetobacter baumannii
atgactcaattcgttttagacccagctaaattaatggaaaccgcagcaaataagcaaaacgctattcgctcgcgtgagaaaactctcaaacctaaagatgggtcgaatcgttatgtattacttccggggtggggttggaagcaaggtaagcaagacgtgtggttccacgatttcggtatgcactttattaaagatgcaaacggtgatctacagtctacttatgtttgtttagataagacatttggcaaggattgcccgatctgtggcgctttaaaacaagctgctaacatagctacaacagaagctcaagtcgaagcattaaaagagtgtggttcacgccaaacttatttaatgaacgttttggctttagattctgaccgtccaaacgatccgcaaatcttagaagtgcctaaaacagtatttagcgcaatctttgatgtattggctaaatggggtgcgcgtttatttgatcctaacggttcacaagtcattgtgattaaccgaaacggctcaggtatgaacaccaaatacactgttttaccagatgccgaaaccaaaccagttcctccacaagtttacgaaaaacttaacaatcttgatgaatatgtttctcaagaaaatgacgaacgtttacaacgctcgttaggacacgttcaacaagttgtaggtttgttaccgcccgctcaaagcaacgatacgcctcgtactgcacctgctgcaattggcttagctgctggcggcgctgcgcaacctgcatatcaacagaccgcagaggaaatttcgtataccgaagttactcagcctgcacaacctcaaacggttgagcatgccccgatcaaccttaacactgatttagaagcgttattagacctcgatattccagtttaa

SEQ ID NO: 50641 - DNA, 1107 bp, Acinetobacter baumannii
atgacaactcaaacacaagatttcgcaacagaacaggacttagacaaactatttgaagaattagacatgcttggcgaaatgcattctacgccagctgagcaaccttctgcaccagcagcagaaccacagcctcaagtagttcaacaaacagtgaccgcaccttctccacagcctcaagcggtacctgagccgccagtgcagcaagttattactcctgagccaacccctgttgcatcaacacctcaagctatgttcgccaattttaatgttggtggaatgcttaaacacgctgaaggaaaagttgaattagaaccagagactcaaacacccccaccacaacagcagactacgttacaaccgccagttccagaaagggtggacaatgatgcagatcaaaaagttgttgatcaaatatttgctacgaccgcttctactccatccgccgctcctgctaatactagcgtcgtaccacctatcgcaactgctcctaaaaatcctcaacctattgctgagcaagctgctccaagccctgcgcaacaaacatcagcaatggctcaacaaaagcgagcaacgggatatgtcggaaaattaggtatcacattagaaaacctgaaatacaagccggatgtacacgcatttcagatagaaacagcgatttccgatgtcacaattgaccaatgtatgacagctcaaccttcattaatggcttactggtcagctcaacaagctctcgcagatcatcagcaagcactggcgaagcgacagctcgaacatgtagaagctacgttgtttcaggtgtaccgtaaatcacttattaaagcaggtgaaaagcctactgaacgtctcattgacgcttatattcgcagagacccaacatgggaactggcttatgacgtacatgctacggcaacgcaatacgccaacatccataagggaaatgtgtttgcgcttgtacatcgtcgtgacatgttaattcaacgcggatctagtttgcgcgccgagctacaaggtcagatgcggatattaaatcaagataatcataatgacgattcgatggccgcggttgaaaacgctgctcgctcattaaatcgtacatatacccaataa

SEQ ID NO: 50642 - DNA, 3456 bp, Acinetobacter baumannii
atgaatattaatcatgccctttccgtacagtcggacttctcgattggtcagtcaatgcttcaagttgatcatatcattgagaaagcgaaggagttgggttatcaatcggtggctttagtggatgatatgagcgtgcatgcgttaattcagttcacttacaaagctgagaaagaaggcataaaaccaattgctggcgtgcgtgtacgtgtttatgacgaccctacctaccgtcgacctacaaaacaatctcaagagattcctaaagaaaatctgtcgtttatctgtaaggtttacgcgaagactgaggttggattcaaagggctgcttaggctattgaccgaagcaaatactccagagcgcttttattacaatccacgctcgtgtttaaaagacttgcttgagttagaagacgtcatcatatctacaggcgatatgttcggtatgtgtagtcatccagactatgaaaatatagctcgtcaactcaaagcgcgttttggtgaagatttctatgcggaactttgccctataaacactccccttttcgacaaaatgaataagcgcgcaatcgagctggttggctcattgggctgcaagccacttgtcacctaccctttccgctacttagataatgcagacgctagtacgatggatgtgatgagtgccattgcgagtaacacgcagttagatgcaccttttcgcagtcgtcagtatgttaaggaatttgcatttgtagagcctagcgcaatcatagaccgcactaaagctgctattgcacgcggaattaagtttaatcgcactgtacttgaccctaaatcggtaactgcaatttggacaaatggcattaagaactgcgaagaagtagtgcaaaagtgccagtacaagtttgaaaaacaaccagtttcattgcctaaactcgctaatgatgagtttaagaagttgtgcgagttatgcgttgagggttggaaaaaacgttttagcaagcccgtcttaggctatttgccacctaaaaatttactcgataccgtttacaaagaacgcttaggctatgagttaaaaacgcttaaaaacatgggttttgaatcttacttccttatggttgaagaccttgttacatgggcgaaaaacaatggtgtgattgtaggtccgggacgtggttcggttaatggttcacttgttgcgtatctaatcggtattgccgacgtcgatccaattcgattcggtttgatctttgagcgttttattaaccctgaacgtttagacttacccgatgctgacttggactttgcctcttcacgtcgtcataaggtcgttgagtatttgattgataaatacggtaaagactacgtagcgggtatttccaactattcgaccttagcctctgcgtcagcgctacgtgatgttggtcgtctaagtggtttaacacctcttgaactcacagcttcaaaattcgtactcaaagatcatggccaaacaatgtctttggaagagtcagctaaagcggttcctgaattagagaaatttaaaaaagcacatcctgagatctggaagcacgcggtcaaacttgcaggcacaatgaagtcatttggccaacacgctgccggtattgttgttgcaggtgagccgattgtgaatcgcgctgtattagagcgaagatctgaagacactgtggtcaattgggataaacgcgttgtagaagattgcggtttggtcaaaatggacttactcggtttgtccactttagatacgctgaatatcgcccgtgattatattaaagaacgtcatggtatttatctaaattacttagaaattccattagatgacccaaaaacattgcaagctttcgcaaacggtaatactacgggcgtgttccagtttgaatcaggaggcatgaagcagctgcttaaagatattgcgaaaggcggttcaatgacctttgatgatatttcagctgcaaccgcgttgtatcgtccgggtccgatggattcaggacttttagatgattatgttgctacgcgtcagggtatgcgttcagtaagttacgatcatcctaatatggttgaagcactcaaagacacgctaggcgtcataatctatcaagaacaggtaatgaaagtctctgtggattttgcaggttttacaaatgctgaagcggataaactccgtaaagcaatgggtaaaaagaatgtagatgaaatggctaaaatgcgtcaaaagttcattgatggcgccgttgctaaatcaggagtagaaccaggagaagccggtcgcatctttgacaagatcgaagcctttgctggctatggtttcaacaaaagtcacgcaacggcttattcgattatctcggtatggtgtgcatacgttcgtgtccactaccctgctgagtatttcgcagcctctttatcaatcgtagacgaagacaaattgaaggggttggtaaaggatgcgcgcgaatgcggtatcgaagtattgccgcccgatattaacttatcttctgatcgttacaccattttagacaatcacaacattcttgcaccttttaacgctgtaaagggtgtgtcagagacaacggcgcgcgctattgtgaaattacgcgaaaagcatcgtgacttgaagattgttaagtataaacgcgacaaaacacccgtttggggctatgacgacgatgcgccaattaaaaaacgttttgatagtctctttgagttccaagaagcagcagcacagcctaaaacaaaggtaaacagcaaagtggttgaatcgcttaatgcaattggcgctttagcgagtgttgagcctactcaattacctgcacgacacgtcgaccgtcgcaaggctcaaatggacttattgcccggcattatcattgatactgtaaaagctgaccgtgttgctgatctaaccgagcagcatttaaagagtcgcatcattatggtggctcaagaatacaaacagtgtgacgcttgtgatttgaaaggtaaaaagcaccctactatgcgctgtggtaacaaagttaagtttatggttgtcacagattgtcctaacgtcgatgaggacaaacaagacaaacttatggtcggtgatgtctcaacttatcttaaacaggcaattaaagacgctggcttaaatcctagtgatggttattacacaactatggtgaaagcgcgtaaatcagataagtttcttactaactcgcagattaacaactgtagtaagtacttggaagaagagataaaactcgtaaaaccgagcattattgttgcgctaggatcttcggtggccaaaaagttcttaccgtcggttaaaggtggaatatcagaactgaatgctacagcggtttatgacccaacgcttgatgcaacaatcgtatgcgggattagtccagctcaattaccgtttgacccttcaaaattaccagaccttactttagcctttgaaaaagtggctgaagtattaagttga

SEQ ID NO: 50643 - DNA, 690 bp, Acinetobacter baumannii
atgacacacgaaaatgaacataaaaaagctgcattgaatgcgcccgcttgttttggtgccgtctcatgtttttctcatgaaagtgcggtatgcaaagagtgtccagcatttgaacaatgtattccagcggtaacagagacgttaaatcgcattaagggcgtaattaacgttgaggactatttgaaaaaacacgaaaaggccaagaaagaagcgagagcgcgcattgaagagcgtatgaagcaagaaatggctgaaaaagcagctgaacgcaaagaaatgcctatgcctgaaatgaaagtgccgcgcaaaactaaggttgagaaggtcgaatttaaattaacagacgatcaaaacactctaatcgcagagcttccagtgaaagcacagtcgtttgcggtacagctttgtaagactggtttagtcgaccgtatcaagaaagaccttacagctggtgttaatccacttgaaaagactggcccaaagtggcttgcaatccttattgaaatgttaattaagggcggtgtaacacgcgcacaattgaagagcgagtatatgagccgtcttgagtggtcagatggtacagctggcagtcacacatcattagctttcaagatttttcaggcatttgaaatcgccgttgagtctgagtcaaaactcatagctaatcctaagttatttgaatctaattaa

SEQ ID NO: 50644 - DNA, 684 bp, Acinetobacter baumannii
atgaataaatcagtaaacgaactctacaaagagcatgttggcttaatcaacaaagtaacaagcaacattttaaaacgtgttgccaatatgcaaagcgcagggatgcaggttccgatcgaacttcaagacggcgaagacattcacaacctactttttgaagttttcgtgaaaacgatcaaaggctttgatgagaaacaaaattttcgtttctcgacctacttcgtaaagtcggcatataaccgtattaatcgcattatcgaaaatgctgttggcgaccgttcgattaatacagtctctttctttgaccttgcgaatcatcacgaaagcgagccggtagatgccgaagtctttttggacgtagagcaggaaaactcattagaacaagtggatctatccaaccttcttagctacgtgcaaaagcaattaagtcctttggccgtagcgctgcttaaacaggttattcatccagaccaagaatttgagcgcgagtatgaggctcaatatgccaaaagagagtttgcgcttcaatttcacagctcccactacaaagcgatggtaaagcctctcaatctcgcatttattgtgcgctgtgttaaacgcacagcaagaaacaataaggagttggtgctaatcgacgaagcagcaaaagagatccgcaaattgcttagcaatgagcttatgtga

SEQ ID NO: 50645 - DNA, 1200 bp, Acinetobacter baumannii
atgactgtaaatcaaaatgaaacaatcgcatgcgaaatttgtaaagctcaagtgcattctatacctcatcaccttaatactgatcacccaaaggtgacttttgagaattataaatcttcttatcctaatgcaccgacccaatcgccagctttaatcgagcgcatcagaatgaaagcggaagagcagaagaaaaaggctcaagaacaagcggcagctcagccagctcaaccaagttcggtaattcaaaagccgggttcgttcgtcgctaaagacaccttagttgcgcgtaatttacatgaaatttttgaaatctctggcccagaaggtaaaaacgcacagggtgatccaatcccagtatcttgtattgagaactcatcatcaccagacatggtgcctgaaattaacaacacatacgtttttgaaattgatgtgttgaaaaatacccttatcgcgcttgaactgaatattcctttttatgtttggggccacaaaggtactggtaaaacagaacttattgatcaggtggctgcaagaactggtcgaccagtcgttcgtattcagcacaccgccaatacagaagaagcacatatcgtcggcatgtggactgtagttgatggaaacatgactttccaacttgggccgttggcgttagcgatgaagcatggctggttatatcttgctgacgaatatgactttgcgcagccaagtgtattgtctgtttatcaagctgttatggaaggtaagccgctcaacattaaagaagctgaccctgaaaatcgcattatcaaacctcatccaaatttccgcttctgtgcgacgggtaacaccaatggtacgggtgatgaaacaggtttgtattcaggaacaaccattcaaaacacggcgaactatgaccgctttggcatggtgatggaaaagcattacatgtctaaagaagatgaagcaaaagccattgtacgtcacacacaaattgacccaatagatgcgaaaaatctagttgagtttgcaactaaggtgcgcgctgcttatagcaataaagaaattagcgatacgatttctttgcgctctctaatctatgcggcgaaattaggtgtgatgcgcggctctatgaatacgggtatctctttagcttatgccaacaaacaatcttcccgcgattacgaaattgtgaagggaattgcgcagcgagtgttcgggtaa

SEQ ID NO: 50646 - DNA, 2058 bp, Acinetobacter baumannii
atgaacaatcgcattgctaatttacgcaacgctatcgttgcaatcacaaatgctctcattgagaaaaaaattgaagtaactcaaataggtatggaagcatacgtcaagtctgacattaatggaaatccgatttctatcaatttaccgtacctttcggacaatgcatcagaagaacttataagagcaatacagggattcttagatcatgaggttgcacatgttcttttctctgattttaaagccctaaatagcgttggcgattaccttttaaaaagtctcgcaaatattttagaagacgcccgcatcgaaaaatgcatggctgaaaaatttagaggttctggttctaacttagatcacaccgcacacttctttttagaagagatgattactccgaaatttaaagaagttatggcgcatcccgatgttgatgaaacaaagattatgggtatcttggccactccatatctccgcagcctttcgggtcaatcaacttttgaaatttatatgcgcgacaagattcatttgttgccaaatattcatgctgccatcaaacaccttgcgccacaacttcaatcaatgcagtcgtctcaggatgccgttcgcttagctaaagaaatttacaaagctctaaaaagtcccgaagacgagaaacaacccccgcaagatcaacaacaggaagaagaatgtgatcaacaaggaaatggtcaatctaacgaagatgaagatgagcaaccaggcggctcaggtggcggaaattctgacgaagatgaaggttcagatgcagacggtcagcaaggcgctggtgagggagatgatggcgattctgaagaagatggtgccggtgagtcttcaggcgatgctgatgagcaagacgaacaaggtgatggaggtaaaggcggtcaatccgaagatgaggatggtgggaacgaatcagatggtaaaagtgagcgccaccaaaataagtctgacaaatcgaatggtaagggcgacagcaatgaaggcaacgagtctagcgactctgagaatcagacgtcagaaaagaaaaaggaattaagaaagcttaatttagacgctaaggcgattttgcaagagatcgacaaggagtcagcgaatgattttgacgcctcgtttgccgttcagttaagcaatgaagcaaaagactttgcttgcactgcgccatatctcgtttatacaaacagatatgacgttatcgaaacattaaaaattggcagaaattacaaatcgtcctttatggatgatttagatagagcaaccaataaaattacgggaacaattcaaaaagatttggaacgtcttatggttgctcgatcagcaagaacatgggagaacggtttacggcaaggaaaaattaaccaggcgtcactttctcgtttagctgttagagacgaccgtatattccgtcgcaaacaagagaatcgttccaaagatgtcgctgtaaccctcttaattgactgttcaggttcaatgaagggcgaacgcattaacacagcctctcaagcgtcatatgcaatgtcatctgttcttgaccgtctcaacattaatcatgaagttattggattcacaactaaaaacggtgatccacacgcaaaagaaagctttacgcataatggcaaaacgattcgatacacaagaacggaaggtttatatatgccagtcattaaagggtttaatgagcgcttaacgctcgaaaaccgccatcgttttgcatggttgcctcatgttaggttcttaaacacgaatgttgatggggagtgtcttcaaattgcggcacagcggctaagcgctcaaaaagaagcacggaaaatcattatggtgttaagtgatggtaatccaaatggtagcggcccgaccccaacgctaaacaaacacctcaaaacaaccgttcaggaaatttctcgctcaggatttgaagttattggaattggaatcaatacgcaaagcgtaaaagagttctatccaaaaaatgtcgttttgagatctgttgccgacttacctaacacggttattggcgagcttcgctcattacttctcaagtaa

SEQ ID NO: 50647 - DNA, 201 bp, Acinetobacter baumannii
atgactgtgacattgaatgatcaattccaaactgtagacttggatgaacttgctgaaattttagaaaaaacagaaggtgtagaaacactgctaaatgacgggttttacactataaagcgctataagcatctgaatttaggggacattgaggtaattaatacctgcgctccaaaaagtatagttagagtgataaatccataa

SEQ ID NO: 50648 - DNA, 465 bp, Acinetobacter baumannii
atggctaaaaatcgcaacaatatgaacgtggcagaatatctcgcagacttaatcgagaattctcctaaaagccagcgtgagattgctgaggaaataggttttaaacgccctaacgttttatcgatgattaagagtggtgaaactcgcttaccgatcgataaaatcaagcctaccgctttagcattaggcgaaaaccctactcgccttcttatacgcgttctaaaagaatatgcaccggacttaattgatgttgtcgagtcaatcactgggcaaactccattaacccctaacgaaattaatatcgtcaaaactattcgcagtgtaactatggaagacccttctttttatggagacactcgtgacaagtttgttgacgtaattaaggaaatggaaagcgagacaattaagcaccgcgctgagcttcaaaaaaataaggaggaatcggcattcagatctcagaaatga

SEQ ID NO: 50649 - DNA, 678 bp, Acinetobacter baumannii
atgattatcgtgtacgccaatacaaaaggcggcgtgagcaaaacaactcttgccacatctactgtggccgcgctgcaccaaagaggtaacactgttatcggtattgacctagatgccaacaaaggctctttcgaatggagccaagcacgagaagccgaaaacgaagtagaaaacggtaaattttttcatttaacaggcaatatcgaagacgaagctcgtcgcttaaatgaagaatatgattacgtcgtaattgacacgccgggatatgactctgccgaaatgcgctcggctcttttagctgcggacgttattgtttcgcctcttaaagttggagctcaagatctcaaagggctttatacgcttttggatttagttgatttgatcaatgacactgttcgcaaaccggctggcgagaacccaattgtcgtgcatcctgttattacccaagctcctgcggccgataattcagttgatttacgcgacaccattaaagcacttgaagcgattcaaaacgaagccccacgtcttcaaacaattatgcgtttacgtatgccatatagccgcgcttatcgaaacaacgtcggcattactgaaatggaaatggacgtaaacaatcgagttgcaattaaagaatttgaacagttacttgaggagatcattgaaaatggcaaacgataa

SEQ ID NO: 50650 - DNA, 417 bp, Acinetobacter baumannii
atggcaaacgataaaaatgcaccattgcctcagcgtgcagcacgcgaagctaaagagtctatcttaaattccgctcctgtagcagctcaacctttagcgccaaaagttgaagctccgcaagtagaagaacctgaagctgaagtggttgaagttcaacaaaaagcaactgaagcgactaactttctaaacgacgcagcaccgtggcgtaaaaagtccacaatgtctgaagaagagttgatgcttgcaaccaagaagttttcagcaaaccttccgatggaattatatttaagactcaactttattgttgctattgagcagttaaatagtccaaaaaaacttgacatgacgcagattgtgactaaagctctaatggagagtacagaaaagactctcaaaaaaatgggttacaaggtctaa

SEQ ID NO: 50651 - DNA, 405 bp, Acinetobacter baumannii
atgttaaaaatagatctgaacaatgagcctgtggtgactcgaatgcttcagatcagattagacgtactcgctgccgcaagacaacttgctaccgcgtatttgaacgtatttaaagctgaatactcgatgattcaaaatcatcgagataacgctattatcgttgaaataagcgctaaaactgacttagaaacgtcaccaattgttcgcataagatatgacgacaggggcacaacaatcacggtgcatgtgcctcctgcgtataatgcggttatacaactcgaagcggatgactacaacttcttttcttggtgggtaaaccgcatttttacagaagatgaatttgtcagagccaataaagatttttggctcagaagcgggcgcatccagaaaaatacactattctag

SEQ ID NO: 50652 - DNA, 615 bp, Acinetobacter baumannii
atgcttttaaaagatgttcctggtgttttgccaagacttgaaaattcattaatttctaaaacagatatgtggacggcagaggttgatacggttattccggctcaattcttagctttccgaaaaattattaaatcagactatcccgatgtagatatagaccgagatattaattatttagtgcgtcaggtgcagtttgcagagttagaaaatgttttaacgtcacctttgcgtgattatgtcgaaccaaacgaaaactttttactcacaagcgaattaaaagaaggtttgcaaaaattaagtcagacctatcaacatgcctttttgttcggaatggaaacgcactattcttcttttcagatagaaaccatgtcataccagcaggcgattaaggtttgtccaaacacggctttggccacaagtattattaattcattaattcctagctcaagaacgatcaatgctttttggaaagttgagaatggccaacatgtcccactggatgacttagagtctgaagtttatcgtgctttcggcaaaacatggcgtgaattgttgtctggatattcacgattgattacggatgaaattgacgttgattttgtaatgtatctatag

SEQ ID NO: 50653 - DNA, 627 bp, Acinetobacter baumannii
atgattttaataatttcaggaaaaacatgttcggggaaatcgactctcgcgaaacaccttattgagaatggcggttttgggcgaatcgtaacttgcacaactcgacaaccgcgtgaaggcgagaaaaatggtgtccattaccacttcttgaccaaagagcaattcagcgatgccattaacaaagacgagtttattgagtttaacgtgcatggtggcgtcatgtacggtgtgcgcaagaaagagatcattcaagcaatagatgcgccgtttgactctttgatagtgattgaacccgtcggtcgtcgtaagcttgtaaaatatcttcaaggtaatcaaatgcgatatttgtcgatctaccttgacataagctcggtaatacaagctgaacggtttatgaatcgcattcaaatggcgagcgctaatgaattaacagatttaactgaccgtatggcgtctatgttggaagttgagcaaaactggcttaaatcatcaaccactgacggctcttgtgatatggtttttgcgtcgtttaatacagcatccgatttaaagcatgtgacggacatcatcatgcagcatgtgatgaaaaaaccatttgatcaaaccgaaaaggcaaaggcagtttga

SEQ ID NO: 50654 - DNA, 390 bp, Acinetobacter baumannii
atgcgaaaaatacaaggtaagcataaatcagcgttgttagttgttgcggctgcaatcttaacagcggcaagcatagctacttttgcaccatcggcacacgcggcagtttctgcccgtgcgtcggtatcttctgcgcgatctgtttcggtttcacgcccttcggcaattcgctcaatatctacaacgccagtgagaacaagctataagccgaccgttagcaagccagtagtaacgaagccaacgacacccgctcgcacatcatatgtaagcagctcggcggcaaagaaaaagcgctctactggccctgaatatgaatattacgcttggggcgactgtgcgccttattcaaatttaaactttagaggctggaaatgcctagaccgcgattaa

SEQ ID NO: 50655 - DNA, 1404 bp, Acinetobacter baumannii
atggcaactttggagccagtcttaacacaaacattcaatagcgaccttgtgtgtcaggcgctcaatgaaatagctcaagagagttctaaaaataaaaaactggaaatggtgagccactacataagcaatcctttatttaaagaagtgtgttcacttgcttataacccattccgcatatttggtattctcccggataaagatgcaaagggcactggtgagctatggtttgacgaagcggatactttagaaatcatatacgcactagaaaaacgtgaacttacaggcaatgcagctcgcgaagcggttcgttgtcagctggctcaattgagcgaaaagtcaggcgatctatttattcgaattttgcgtaaagacttacgcgcaggctttagtgaatcaacaatcaataaagcatgcaaaggcttaattcctgaatttccatatcaacgttgttctttgcctaaagatgcaaaatttgatacgtggacatggggcaaaggcgttttctcacaagagaaagcagacggcatgtacgcgaacggaaataaacgtgcaaatgaactactttcatttgtctctcgtcaaggctctcaattccctatggatgagtttaaagacatcgtagaagaagcggagcttttacttcagcctaacttccagtatcacggcgagctacttgtcgagcgtgatggtgtagagcttccacgagagattggcaatggcattcttaatagcgtcttgaagggcggtaaatttgccgagaatgagcgtccaatttataaagtgtgggatttcatcccttttgaggcggtagtgccaaaaggggtatttaaggcgccatacgctaatcgttttcgcgcactgtttaacatggttaagggcggtaaatacattcgcatcatcgagacccgtattgtaaatagcctaagcgaagcatataagcactgtgaagagaagctgctattaggaaaagaaggcacggttattaaaaactcaacagcaatttggaaagacggcacaagtaaagaacaaatcaaattaaagcttgaggctgactgtgagttagaagtcgtgggtatcaatgaaggcaaggctggatcgaaaaatgaaggaagggcaggggcattaagttgcaagtcagcgtgcggtcaattaattgtcgacgtcgccgttaaaaatgaaaaattacgtgacgaattggacgcaaacccggaagactggattggtcgaatcattactgtgcgttcgaacacgattctaaaaccttcagcgagcagtcctaattattcgttgtttttgccacgcatggttgaagactgttatcgcttagacaaaacggttgcagacgatctagcgcgcatttatgagcaatttgataacgcgattaaaaacgtacaggtaggttaa

SEQ ID NO: 50656 - DNA, 258 bp, Acinetobacter baumannii
atgactgatttatatcaaatattaagttgccaagttgctgaggttaagcgaactaaaggcgcaacacgaaaagacatcattaacgcccttaaaaaattgatgggtgatgagttgggtaactttgctgcggcgaagcatttagacgatgagcaaatcagagcaatggttgctgatttagcaagtggcgttgagctgatagctcagcaaagagtttcaaatatagagcgcattgagcgtgattatctggcccgtttataa

SEQ ID NO: 50657 - DNA, 600 bp, Acinetobacter baumannii
atgaataatcgtatagaaatagtgccattcgtcgatacagcaatttaccctgttgaagcttctgctcaaggggacaatgctttttaccttgaatattgtggcgcttctggttatcgcccagcttatgcttcgtgcttaaatcgcatacgcgagatagaggcgggtaaattgcttccatctgttgagtctggttgctcagctgcaatatgcaataaagtttgtcaggcgttgactatgcgccaagaagagaagcggaatggtgcagcgatctactacatcaaccgagttaagatgcgccagaacgtgcgtcacaacgcagctcaatacggtattaaaatttccgatatcgtaattaaaaacgacattaaaaagccaactcttacgccgtcagagccagtaaatacattcgaagttggttcgattgcagacgccataaatagtcgcattgctaaggaaatgaagtcggaaaatcaacaatccgctttaaattccactgagaaacctttatcatcacataaagatcagtcagtactgactgttaaaaaaggtatgtcattaatagatattgccaaagcaaagcgacaacaattaagtgtttga

SEQ ID NO: 50658 - DNA, 423 bp, Acinetobacter baumannii
atgatcaggcttaaaactggcggttcatacatgagccatgacttttctacaactagatccatccatcttgttagcgtcggtgacgaccctaacaaatgtgtggtttttgattttattgtcaatcagaaagcaaatggcaaattcaagatcacagacaatagttttgtctgccgcattaatgaggggataaatcacattgcgcttgaggtggaaaaattaggaaaagacgaaaaatttgcaggctccaaagcaattcagtttggactatctgcatttaaaaacaactcaatgctatcgactgaggacattgttcaacgaatcggcaagtttttgactgaagccaagataagaatcttggtgtcaaaagcaagctcaagatatgagacggaaggcaagagtttggtttggggtagttggagttaa

SEQ ID NO: 50659 - DNA, 516 bp, Acinetobacter baumannii
atgacccttaaaatcgaaatggttgaatacatgatctgtgactcaagttcgggcggcaaagattatatgcttatccatgcgtataacacccaaactggcgcgggttgggttagaggatattacgggaagttatccgggcggtttcaagaagtggtttatctttttaaggatgcgcgctcagccaaagagcatctttcaaaagtgattgatgagaaaaaatcaaaaggctacacctcacacacgcctgaagaacgcaaattggcaaacacgctatttggaaaatttagagacctttgcgcacacgaaattgtggtgagaagaccacatatgatcgaatttaacgcaaacagaataatgaaggcgacattaagtcaatttttggcagatgactaccttgaatacctttttggggttatggatgaccaatacgcaatgccgactgtgccagtatcaaaagcatcagaagcgaaacgtatccaagaaagctatggctccaagtggggtgcgtggtcatga

SEQ ID NO: 50660 - DNA, 357 bp, Acinetobacter baumannii
atgattcaaaggtttcttaaattatttaacagaaagccatctgaaataaagatcaatggtaaaagttatcacggctcaaacgtggtcattcaagacgatggcattttcattgatggaggttgcgttcagggcctttcgccaaaaattgaagttgtgataaatggcgattgtgattcagtggatactacaagtggaaatgtcagaattgaaggcaatgtgggcgacattagcacagtatcgggcaacgtgacttgtggcgacgttactggtgatattgagaccgttactggcgatgttcgagcgcgtgtgatcaagggcgatattgaaaccctttctggcgatgtaactacaagatag

SEQ ID NO: 50661 - DNA, 1113 bp, Acinetobacter baumannii
atgagtggccaaccgtcaaaagaagattttggcgaaatactcgaccacattgatattgagtattggctaaatcgtgaaggcgttgagtataaagttactcgtggtcgaaatggtgtgcagctgaacttgaaggaatgtcctgtttgcggtaacgcgaattggaaggtctacattggggccacgacaggtttgggcaactgctttcatggtgactgtgaggctaaattctctaaatggtcatttattaaagctgagcttggcaatttaaccaataaagaaattgcagaacacatcaaggtcgttgcaagggagcagggttggcaaccgaagcataaacaagaagtccagcgaccaaagttgggaaatctgcactttccagcttcgtttgagttgcccattctcggtaaagactcaaagcttcacaatttgaagtatttagctgatcgaggcattagcatcgagacggctaaagcttttggtctgcgtttttgtcagcagggttctttttcttacatcgattcattcggtcagaagaagcgccaaagttttgataaccgcatcatcattcccgttcgagatctgaatggaaaattagtttcgtatcaagggcgtgacattacaggcttagctgagaagaaatatctttttccttcaggttatgcgtctacagctgcctttctttacaacggtaataacgcgtatggatgcgtagatattgcgatgggtgaaggcgcttttgacgtcatggctatacatcaagccttttcagaagatgacgcactttgcaatgtcggtgtcattggttcgttcggtaaacacctttcatacggcgatgaagaaacacaattcgcagaactgttaaagctcaaagaggctggtttgcaacgcttgacctttatgtgggatggagagcgacgagcaattcaagatgcaatcgaagcagctctaatggttcgtaaatgtggcatcactgtacgaatagccatcctccctcccggcaaagaccctaatgaaattccaccagaaatggtgcgctcactctacagatcggcaattgtcgtcaatgaaatgagcgcggtaactctcaagctacaatatggagtcaaaaaatga

SEQ ID NO: 50662 - DNA, 1398 bp, Acinetobacter baumannii
atgtcagttcaaagtactgcggcggctcagcccgccacagcacaacagccagtaacagatcaatttgagtttgacgatgcttttcagttgaagatagcagcgctttctttgcgtgatagtgaatttttgcgtcgatcagccatgatgttaaaacctgagtttttcgtaaacgaagggctaggacagttggttgcggtcgcattagaccactttcaaaaatacaactgcgctccagataacgcttctttaatcgctcagctgaaagaaagaataacgaagcgggccattcgtagagagttgacgccacttgttattcaagcagctaaagacgttcagttagcagacttatctaaccgtcaatttgtcgaagaaaaattggtggattttgctcgcacattcgcgatgaaaactgcaattttgaaggcggtcgatctacttaacaaatgtaaagtcgaagcgattcaccctgtcattgaagaagcgcttgctgtcggtattaatgaagatggcgcgggttatgacttctttgctcatgatcgcatccagcaacgtaccgttgagcgcatagagaaggtgagtggcgttcttcctccacagggtatatcgacgggcgaccctcgtttagatgggcttttatatcatcgaggatgggggcgcaaagagttatatgcgttcttgggtgggccaaagtcaggtaaaactacagctttaattcactttgctcgaattgcctcatggttaggttttaacgttttgtacgcaaccttagaagtgggcgcaaatatcattgcggatcgttttgatgcgtcgcttacagacaccatgatgaaagagcttggcgtgaaagccaatgatgttgcgcaacaaattcagaagctcgctaaagaatctggtcaattgcgtattcatgaatacgcatcaggaacattgactggcaatcagttgcgaaatctcattcagtcttacaagcgtgcagctcgtaacccggatggaacaattcgaccgccaataactttcgatttaatcgtagtcgattatgcagacattatggcgccgaattaccgcacatcagacccaatcgaaaactcaaagcaagtctgggtggatcttcgtgcaatcgcctttgaagaaaatgccgctgttctaaccgcgactcaatcgaatcgtgatggtagtaaacaaacggtagccaaagcagaacacgtagcagacgactttaacaaagtgcgtatcgtggatttgatgatttcgattaacaaaaccgaagaagagcgtcaaaacggtgaagcgcggttgtattttgctgcatcacgtaaccaagaagcaggtttcacaatcgttattaagcaagacttatctcgtatgaagttcatcgagagaattttaagggtggactaa

SEQ ID NO: 50663 - DNA, 540 bp, Acinetobacter baumannii
atgattcaaggttggaatactcaggatgagatgatttctcaagcacaatatggtcgtatgatgatgcaaaacgaacctgatgaggaattcgggcaagcgattgatcagaaagtgccaaacccatacataaaagagcgatttgcggtaggtaactccgctatgccgcctgtggttactgacactttagagtttcgtcacccttacaaccatccaaaaggtacattgcgtcatggtttccgtgatcaaaaagagtggagaaagggaatctttagtaatgatcagacagagagcaaaaaaactttcttatctggtcatcgtaaatatttgttcaacttacaagagactcaaagtccaatcgaagtgacgttgaccaatggcatgacgtacacgggaaccattcgaacctcagatgaagaaacgatttcgcttgagtgtccgaatgaagacggcaaaacctacactgtgcgagtgatttttaaacacaatttggtaatgttctcaccgattactgcggtgacaactgcaccaagaccaagctaa

SEQ ID NO: 50664 - DNA, 561 bp, Acinetobacter baumannii
atggccacttattattttttccacttgtacagcgaagcttacaaaaacttttggcgtcaaaacatcaactgcgagcaggcagactttgtaaagccaatgcgtaagtacgttgattttctcgactcaactcaagagcgaaatacaatttggcgtttaagacaaatggtagatgcttgcggcatgagatatgagttcttttttacaagtgcaatgaagcatttgcataagatgatctataacggtcgaattatgccaccacgcccatcaatgcttaaaaatgaagagctgttcgaaaaagtgtatgcagactggttggaaacatgtgaggcggtaactcaatacgcttgtagcccctacttcaacgtcgcaaactactcaaacagtgtagttcaacgtgattatgaggactatttgattaagcaaattaagcgtaaacgtttacctcaatatgctttgtcttattgtctttatgagaaagagtgcttgagaatcgagagggtcattgctgagtttgatcttgacattgttcaggaggcgatcaatgaagctaaattcatttaa

SEQ ID NO: 50665 - DNA, 849 bp, Acinetobacter baumannii
atgtcctctattgttaaaagcaatccaaaagttaagaaacacaataacttaacacaggctcatttttttaatgtatcagtcatcgcttatagacttatattattagccggtacggacaagttcttagaaaacatgctaaagtctggcgagaatacttacattcgcattacagcgcatgattatcacaatttatatggctcaagttcggacatgtcgggttcgtataaagcaattaaagatgcgcccgatgatttacttaatgccaagttgaaatacaaaagacttaaaacagaatcagaccccggccgttgggtaggtggtattaactgggtacaagacgctcgttataacgacgagttaaaatgtgttgaaattctattttctacaacagtacttcctttgctggcgaatgttcgcaaaagttttacttattacaacctacgacatattggtcggttgtcatccatgcattcgattaggatgtatgaactaatgatgatgtggcgcaaaagcggcaaaacgccagacttgacagttagctatatgaaaaacttcttaggcgtgccagacaatgaatattccgacccaaaagagttaaagtttttcacagctcaagtaattaaaaagtccgtcaaagaagtcacaagtaaaactaatattgaaatggactttgaagttgtaagaggggaaaagagagcaactatcggctattcttttagtcataaattgaaagcgctgcctgaaggtgaacagcctgagcaagaagaacttgaggacgataacgaaggcggcggagatccaagcaaattgctaccgaacaatgacgacgacccagagttgccattttaa

SEQ ID NO: 50666 - DNA, 159 bp, Acinetobacter baumannii
atgcacttacttcaaggaacaaaacccctcaaagtttttcttgttgttgttcttcttgtaattgtgagtgcatggagttacttgcttggttctaacgatgcaaccaagaaagcaaaacaacaagctgaaacagttatccacagtgaaaaaattaagtga

SEQ ID NO: 50667 - DNA, 570 bp, Acinetobacter baumannii
atgagtgcaaatccagaattaccgtggatcgcagaggctcgccgtcacatagggttggctgaaatcgccggccccaaacacaaccagacaatcatcaaatggctgaaggacttaaagtcctcttggcttgacgatgaaactgcatggtgcggaacattcgttgcgcactgtctccaaacggcgggatttcaaagaggaagtgtaaactcgcgttccaaaacttataaatcaggaacaaaggccccaccaggcttttatcctttcaactggtatgccgcacttgaatacatcaaagaaggcggagtcaaattagacaagccttgttatgggtgtgttgcggtaaaatcaagagagggcggtggccatgtaactttcgttgttggtaaaacacctactggtaaattaatttgcttaggtggtaatcagtcaaataaagtttgttttgcagtatatgacgtttcggcttttgaagcctttatgtggtatggcaaaacaagtaaaccagctgctcaccgatacgatttaccagtcctaaaaatcgtttctgttacgagtgtttcagaggcttaa

SEQ ID NO: 50668 - DNA, 318 bp, Acinetobacter baumannii
atgacagacccattcagcacaggcaccgatcaagtccagtggtggcacgtcctgttagctgcaatcacggcaatgtggggaggcattgtcaactacttgggcaaagttcaagcgggtgaaaaaccaacatttatcggcgcaacaattcatttatcaatgagtggatttgccggtcttttgtgttggttgttgtgcgctcaattccaagttgccggatttatgacagcaatctgtacaggtctagctgggcatttgggttcagagttcattcgtttgttagaagccaagtttgtgcgaaaaatcaaaggagttgaataa

SEQ ID NO: 50669 - DNA, 177 bp, Acinetobacter baumannii
atgaaaactatcactcgcgaggaagcgaatttaacaacttggttgcttggtcaagtaagtttggttgagagtcaaacaggacgaaaggttgaaaagttggaattaacatatgacggcgttaccggcgagaatggcatcaatttaattctcgaagagcaaccaacggcttcagtctaa

SEQ ID NO: 50670 - DNA, 132 bp, Acinetobacter baumannii
atgaaaaaattgattgccgctcttgctgtgttggtcgttctaactggttgtgtgtacgatcctgtaaattacgacaaaatacacgatcaagagttcgaagatcacctcaagcaaaacggcggtgactcataa

SEQ ID NO: 50671 - DNA, 558 bp, Acinetobacter baumannii
atgagaactcgatatgtcatttccgatgagggtaaatgcattgcctcatttacggggtcaaatgaaatactcgaactcaacactcaaggaaagaaatataccgagaagcaacccaccagtcctagtgactggtggaacttcgaaaccgaaagttgggaaagcataggtgaaaaacctagtgaagtgcatgaatttgattacacagctaagaagtggtctgatccaagatcactcgatcaagtcaaagaagaaaaatggaacaagattaagcttcagcgcaatcaactcgaatttggtggttttgagtttaatggccatactttcgactcagacatcgcgtctcaaagtcgcatagctacagctgcggcgcttggactggaagtggagtggacaaccaaagacaactcaaccattttgctaaactctgaacagttaaaaaacctacaagtggcattagctcaacatgtaaataaacttcatgaactcggcagaaaggctcgcttaaagatcgccgaagctaccactaaagaggaagtagaagctgtcacgctgatttga

SEQ ID NO: 50672 - DNA, 11679 bp, Acinetobacter baumannii
atggaagcagtaaccaacctacaaactattaatcaagctattaaagatgtacataaggcccctaaagtcatcgcaggcgcaggcggtggcggtggtggcaaagggggcagtgaatcagacgacgatcttgaatcgaaatcgttcctgtctttgattgatttgctcggtgaggggcaaattggtggcttggtagatgacagccctaagtcaatcttccttaacgatacgcctttggtgaacgcggcaggggagtacaacttccaaaacgtaacttgggccatgcttaaaggaacccaagaccagccatctttaggtgaaggtttcgacactgttgagtcttctacttcggttgggcagcttattacccgcgattctcctgcaactttctcaattacagacccaaatgcagatagagcgcgtgtaattatctctacaccatctttgatcagtacaaccagtcgtggcgacattgttggctcatcagtcgagtacaaattctctatctcgctgaataacagtcattttgttgagatcggcaaaggcaaaatcacaggtaagacacgctcgcgttatcagcgtcaatacgagtatgcgcttccaaaacaaacggaagacggcacacgcgtaacaatgtggacgatcaagattgagcgcgtaagtcctgagagtaatgaatcatcaacttcaaacgatatttaccttgatagttattcggtaattatcggttcgcgtttgtcttatccaaactcagccgtttttggattgagtatttcgtcagaacaatttcaaagcattccaacccgttcttacttagttgacggtttactcattcgcgttccgtctaactatgactacaaaacgcgtaaatacgaaggtacttggaacggcactttcaaactcgctccaagcgataaccctgcatggattctttacgacgttattaccaacgagcgttatggcttaggtcaatttgttgaccctgcatatgcaaaccctgctcgcttatatgtgattggtcaatattgtgacgaaatggtcgatgatggttttggcggaaaggaaccacgtttcacattaaataccgtaatcaatagcatttcagatgcttatcaattaattagcgacatcacttccgtattcaacggcatggcctactggtctggctctcaatttggctacatgtgcgacatgccaactcagccgaccatgctttacaacgcctcaaacgttgttaatggtgagtttgtttattcgggcgcgtctcgaaaagacatgcattcagttgctttgattacttggaacgaccctgaacgcaactatcaacgcgccgttgaatatgttgaagaccctgaactcattcaacgttacggcgtgcgtaaagctgaaattacatcattcggctgtacatcacgcggtcaggcgcatcgtatcggtaaatggttgctttatacagagcgtaaccagtcacgcaccatttccttcaaagttggtgttgattcttcctttgtgcttccgggtgacgttgtacagattgcagaccctaatcgctcaggcaaacgaatgggcggtcgtttaattggcgcaactgcaacttcagcaactctcgattctgaaattattctcaacgaaaactcatcaatcatgttgcgcttggcgagtggtgattttgtcgaacgtaacatcaagaccattggcactgacttagcaacaggcaactcggttatcaactgggatactgcgctttctacattgccaacggataacgccgtttggattgttaagtctccagagttagagcctcaacttgcgcgtgtagttgccattggtgacagcgaggatgctccgggaacttacacgatcactacaatcgctcacaacccaagcaaattcgacttcatcgaaagcaacattcagcttgatagtccgaatgtgacaatcatttcgccgtcactcattgaggcgacaaagaatgttgaaatcattgaagaagcacgtatcgaacagggtattacggttcgaaacatgtcgatcaattgggagcaagtgccgaacgctgtttcttacgaagttaagtataagaaaaccgaaggtaactggttcacacttccaattacaaaaggattaagcgtagagattgagaatgtctacgagggtgaatatgtggctcaagtagtagctatttcgtccactggcagccgttcaccagcaacctactctattcctacaaaagttaatggccaagcttcggtattgccaaaactaggcttatttaaagctacgcctgcaatgtttgccattgaccttgcatgggaatacgcgccgggcaccaaaggcgttgatcacgtagagattcaaatgagcctagacaactcattagaagctaactttgctctactaggcacatatccagacccaatgaaagcccaccaagtgacaggtttaaacctgagtgatacgcgttggttccgcgctcgcttagtggacaaattcggaatctctggcgaatggtctgatgttgtatcggctgcaccagatattgacccggataaagtacttgaagttatttctgggcatattgacgaaagcgttttagatactgccttacaggaaaaaattgatacctctgagcaaactgccaatgccgcaaaagatgcagcgtcagcagctcaaggcgcagcgtcggcagcgcaaaacgtagccaatgccgcaaaagatgcagcggctaccgctaagaacacggcaaatttagcgcaaaacgtagccaaagaggctcaaagcactgccgcgaccgctcaaaaccaagcaaatgccgctaagaccgccgcagatcaagccgttgccgcatcaaaccaagccaaagacacagcagataaggccacttcagctgcaactactgcgcaaacgatggcgaacagcgcttctacagcggcagcgaaagccaatacagccgcaacgaacgcacaaacaaccgcgaataatgcagcgtccgcagcgtcaaaagttgccagcgatttaacaacctcaacaaatcagttgaaccaaaaaatcgccgatgaagcagatgcacgcacagtggcaatttctaatctgaaagacggtctcacgacagaaacaactcaacgcaagtcagaagacgctgcgttgttaagcaacattgagacgttcaaatcaagcactaaaggctcgttatctagcttgcaagagcagatcacaacgaacgccacgaatacagatgccaatgctcagaaaatcacgtcgcttgattcccgtttgaccacaaacgagggcaaaaccgccgaagcgattaattctgctgctacagctcaacaaaccgcaagtacagcggtagacaaggctaacgctgccgcaaactccgttacagctcttaaatcagaattaagcagcggaaaaggcattaataacattgttgcgcccttctcggacccacaagaacttccagctctaggtggagcaggtcgtaccgtagctttagtggactctgcgttacgtcgaaacggtaaggcttacaaagtgtcattcacggcggcggctcattatgtgtatttcggcaccgctcaggccgctctagcgccatcacaaatggcgatgcaagttgaggcggggcgcgcttatacatttagcgcttggttgaaggctttatcaacggccgttccatcattccgtttcaacatcatgtggtttattcgtgaccctagcactggaaacatcacaacaaatgccggaatcatttttccacaaggtcaaacagattcttacgttgctccaaacgctaacggtcaacgttattcctttaaaccagtcaactcacctgcaaacacaatcggcgcaaccgtctatgttgtaggcaacccttcggggccttctgccggcgaatacctcatcgatatgttgatgctagaagagtctgtcggttccgaaaagcctgcttctacgtggacggcgggtcctgctgatctaaatgcgattaagaatgccttagatacaaacgctgtagcaatcaacaacctaactacacgcgtttcgaacgacgaggggaaaattacatctcagggcaattcgatcacgcaactaaacaacagcattaatacgattaatggaaccctttcaaacaaagcggatgctacggctttaaatgcattaacaactcgcgtttctaatgctgaggggcaaatttcatcacaagggtcgtcaattgtctctcttcaaaacgatctagcatctaccaacaaagccgtttcaaccaaagctgactcaagcgctctcaattctttggattcaaaagtatcagaaattgatggtcgagtaacaagtactgccaatgccgttacctcgcttcagggcagtgtttccagcattgagaaggggctttcaactaaagctgacgcgtctgcattaaacaactactacacaaaaactgaggctgattctgccgcctctggcgcaatcgacaagttcaacagtcaattgacgattggtggtgtaaacgttgttgcgaactccgaagctcctcgcacttcaactgccgcaacgaatcgcgaatatttactgtatgaacgtagcgccgaattaaaagcgttctatgacgaaaaccttgagaagccaatcacgatttcgtttgaaatgagcgttcctgtggctggaccggttcaagtttattcgtcaaatggttctgctcaccaattcgttacttccgttaatgcaattatcgtaaatcaatttgccaaatattcagtaacagttagtccaaaagcgcatacggcaagtacaactgtttcgacaattgagttctatggaacgtatggaactggccgtatcccgacgattcgtaaattacaaattgaagcgggcacaaaggctaccgcttggagtccaagccctcgtgatacaaaggctgcaattgacgccaatgcttctgcaattcaaacgacccaaacaaaagttgacaatatcgatggtcggctaaccactgctacagattcgattacgtcactaaattcgcgcatgtctacagccgaaggaaatatcaacagcacaaatactgcggttggtggactttcgacacgcatggcaaccgctgagggcaagatcaccaatcaaagtgattcaattgcatcgctacaaaatagcgtcacctcaatcaatggaacactggcaaacaaagccgattcaagcgcggtcaataacctaactagccgagtggaaacagccgaaggcaagatttcaagtcaaagcgggcagattacttcgcttagcaatagccttgatctaacaaacagtaacttgaacgacgtaaacgttctggctcgactgttatctcttggcaagcctttacgtgacgacccaacttttaaaactacctctgcgggcgggttgtctgcatacagtttccctgcgggcacctcatggattaagcaagccaagtcaacggacaacccaactggctcaactaatgaaatgctgatcaaagcgactcaagctttgggcggtggctggtatccaactgcacctacgcttgtactcactgcaaataaaaccttcttaattaaacaaattattaagatgccagtgggtacaaaattacaagccatcggtaatgctacgggtacgggtggatacatccgaatcttgggtaatgatctaggaactggcaaatttgaaacgtactactctgtcgtacaaggtggggctgatttaagtggctctactattcaaggtcatttccgcgtaattgccggtactaacccgccagtaccaacggttgataatccagtctttgtcattcttgcttcttatgaagtatttgatgtaacggctgtgaacgacaccattccaaaggcttatagcgatgctattgcagccaatgcgaatgcgattaacaccctatcaaatacagtcagccagcagggtaataccattacttcccatagtaattctattacccaactcaacaacagcatttcaagcattaatggcgcactttcgagtaaagcggatacgagcgcattacagtcgcttgattcaaaagtaaccctaatcgacggcaaagttacatctaactcttctgcattaaccacattacaaagcagctttgatgggttgccgaatcagggcgtgaacttgcttggccctgagatttcaaatccagtagaaaagccaaccaactggacgtctggattgccatttgaaatcatccaatcgccagatacggtaaatgtacgcgcgttccaattcacgatgcctgcttcttcaaggaacggcacatacttcaacattggaggcggccaagttccgcgacagtggctaacagaaggtacatacatttttagttttgttgccaaaactgttggcggaaccccaccgcatgctattgagtggcaactctacaatgtagatagtacacgcctgcgctttaatattaccgcaacattaacccgctatagcggggtgttcacggtgcccgctggtggtgccgctgcatgtatgctgttaatcggaaaccctacaggcaaacctgcgggacaagttatcaatatcgaaagaatgatgcttgaacggcaagttggcaacaacacaaccccttcggcttggattgcaggtagcgacccaaccggaatgattctttcaacgcaagccaaggcgactgatttattcaacacagccactagccaaaacgccgcgactgcgggacgcgtcactagcctcgaaagtcgcatgacgaccacagaaggcaatttaaacaaaaaagctgatgcttctgcgcttcaaaacctcgacacgaaagttacgaatgtcgatggcaaagtaacgtcaaataccaatgccattacagctttaagttcaactttaagcaacgctacttcaagcatttcaatgaatgcgggtaatgcacagggcgattggacattctttaatacgtcaggcgaatactcaattgttgcacaagcggatggccaagcgggtcgtgttattcaacttggaaataatgctggcaatgatattgtttggatgcatccgaataacttcattccttttgatgcaactaagacatatcgacttcgtgcgcggtatcgccgtcgtgccggaacaggcacaatttacctcggtgtctctcagaaaaccccagacaaggcactatacgtaacaacagccaacgcattatcgggcgatatggggtcttctaactatgttgttaatgcgcacgcacctgcgatcgatgaatggcaagaaatcgttgcgtatatcaaaggtcgatcagcaggagcagcatcgggttcaggctcaaaaacaagcccacgtactgtttcacaacaagcaggcttcatcacgccgatgtttattgcaaactattcggcgcaaacgggcattgttgagcttgattacctaattctggaagatgcagaggcaattgttggcaatgatgcaaatgcatcagcgattagcgctcttgataccaaagtatcagaagttgatggacgcttaacgacagcaacaaattcaatcacttcgcttaactctcgtatgagtgcagcagaagggaatatctcagcggcaaactcggctctaagcggtctttcaacgagaatgacggctgctgaaaatggtttaaccaatcaaagtaatgcgattactaatttaagtaacagcttaacggttacaaccaatacagcgaacgctgcattgccaaagattcagggcggcactggcgcagctaagttatttagaggcgtgctggtgtggcaacaaaacggcgcaaatctaactggcaatatcgtaatccaaacgccaattacgttcacaaataaaatgttccgactttcacttactggctataactacttggccgctaagaatgaaattaatctgaacattgggggttatgcatattcgggcacctctctacttcaacatggtgtagtgaattcgggcaccatgccaattcgagttcgcatgggcgtccgtaatggcacagtagtcattattttgacgtcccaagcgcccggtgcttattggcagtatccaaaattcaacattgatgccgaaatcggctatacaactccgccagacgaatggatgaatggttggtctgcaagcttcatggcagaggcagacctcgcatctaatggcatttcggcgatcattgagccgtctttattagacatttcaacaacgcttaatgccactgcatctgcaattagcaatctgacaaatactgtgtctcaacagggtaatacaattacttcacaaagtaattctattaccaccttaaccaacaagattactaacaacgatttatcgaatcttgttcttaatcctgatttcgtagacccgaaaagcgattggacatctggcgtaattgttgatgcgactgacgcagcacctaacccgccttctccaaaagcattaagactgaataaccgcgatagttattacggtcctttcgtcaaatgtaatgttggcgacatgttctatgtttcggcttggtttgcgacgccaaatacatcagtaatcgcttctgctgtacttggtttcaatactcgaaacagtgcaggtacttatacttggtatagtgttgccgtcaagtctacagataaaaatgcttggggtatggtggaaggttatttcactgtgccaaatggcatggttgaaattcgaccttggcttcaagtaagtattgctgcgtcagaggcagcggggcagcaatggcatgttacgaacattcaagtacgtaacattacaggtaataagaaattagcaaccgacttgcaagcaacctcgtctgcattaagtacgcttgattccaaagttacaaatattgacggccgtgtaacttccgcatctaacaatattgtttcgctcaacaatagcgtcacaaacatcaatgccacccttgctcaaaaggcagatgcgacagcgttaaattcgctctctaaccgcgtaacaaatgcagaaggaaatatcacaagccaaggtaactcaattacctcattgactaactcattagcagttagcggaaaaggtggaactaaccttctcattaaatcaaatgtagttggcttgtatgatggcgtctcatacccacaccacacttacaaactaggtgaagattgggaaattggcgctaaatacaccttgatctggtgcgctgaacataaacgagggactggcgataacaactcttacctagcggtttacgcgggtggtggtagccagactttgcaatctattgttaatacagacggtaaggttatcagcaaagttacctttgttaaaaacagcgcagttgcctctggtccaattatccacttctacatgatcaaccgtccgaccgcagataagggcactatcggtactgtttattgggcagttttagtcaaaggcgatgtactcacgactgacgcttggattccaagcccatatgattacattcctgatagcaatgcaaatgccgctgctatcgcaaatcttactaatacagtaagtcagcaaggcaatactattacatcaaatagcagcagcattacctcgctcactaatcaaatcggtaatacgaagtcatattcgctggtgactttccgtaacggctctgccgttggcatgccaaaggcggctggcgtctacactggaaacaatacgcgattatatggatttgggcgcggtttaaatctcattgtgtttaaaaatggggatgttgaaagctgtacgcaatatgacacctatggcgacatcgtatctgcatgtaacgccatctatgccgctatcaaggcgcttgcatcgggaacttactttgcaatcgtgggtacagataacattggctcagttggaaattcaaacccaaatactgatttacgtgcgcttttacttgcttctggtgctggcgacacatatttcagatcttggaactggaatgctcttcctatttttgtaggacgcaaagacctagatgcaggcaatggtattctcggtatgtttgattcgactgttcctaatcagtggattgaatacccgcttagttttgtgaatggtgtacctgtaggtttaggtgactcccgaactttaaccactcaactggatgcaaatgcttctgccatttcgtcattgtcgaacacagtgactcaacaaggtaaggatattgcttcacatagcagtagtattacctcgctaaacaatagcatcaccaatattaacggcacgttagcaacaaaagcagatagttcggctctaacaaacctcgccaaccgcgtaactacaaccgaaggtgcaattacctctcaaggctcaagtattacttcgctgaatgcatctgtgaatggcttattaaaggatgttgcagtatccgatactcgatctactaatcagcctccatcgtggtattggtcaaactatccattgcgtatcgttcgcgagttcaagcaagcctctgtgctaggtttgactggcatgggtacatatgtctcccttgaaacatacgtttattggactgacgcatctggtggtccgatcatccagattgcacgaggtacagattcgaaacttactgctgaacgccgtagcaccagtacatcaacttggggctcatggactcaggacatcaaaacccttagcgacgggcttgccaataaagctgaagcatcggcggtaaatacgttagacgccaaagtttcaaccattgatggcaaagtttcaactcaagccagcaatattgttagtttacaaactgctgtcggtggaaacacaagtgctatctctgagcagtcaaaatcaattgatggcattagaaacatcaagacgattacgattgacaataacggtgtaatgtcaggctatggcttaatctctgacctagttaatggtaaagtgacttccacttttggcgtcaatgcagacaacttctacattggccctccaagtggtggcaaaaagccattcctggtcacaacaaccaacacaaccgttaatggtgtgacttacccgccgggtacttggattgataccgcatacattgctacggcatctatcaagagcgcgcacatccaagatgcagcaattactactgcaaaaattgctgatgcggcaattgataccgcaaaaatcaaagatgcggctatcacaaacgccaaaattgccgatttaacggtcgatacgatcaaaatcaaagacaatgcaattacggtggcaactgttgctgaaaatacacaagccagcaagatcttaacgcctagtagttcaacctttgatgcctgtcaggttacggtagtcacttcgggtacaaactttgtgaaaattgatgtttcgccatttttgtacgcttggaataaatattccagcccacaaatctacctagatatttaccgtgatgacaccttgattaaaaccttcaacttgccgtggattcaaagcactgaagtattcaaggatagatcttggacagaaggtggttcttatgatgttctttacaatattgtcgtatacaccatgaacacaatggctggttcgatgtttacgacattagacagacctgcggctggcacacacgtctacaaggcaacgctcagaagaacgaccaactggggacgggataacgcaatggacatggcgcgtcgatacaacgagattgagtttacaaacgctcttattttaatcacggaggttaaaaaataa

SEQ ID NO: 50673 - DNA, 621 bp, Acinetobacter baumannii
atgctagttagcgttcatcttcatggcccaatgggcaaggagtttggcaaggaatggaacctagctatcaaaactccacgcgaagcattagctctcattgatgcaaacacaggacgtttgtttcattggatgcgagcaaatcttcaaaagtacaaaaactaccgagtgttttgcatcttcaagaacggcaaaaaggaatttttgacgaaagacactttgctctcggcaaacaacattcaatccgttcacttcgctcctgtcgttacgggttcaggtaagtggggaaaaatcatcgccggtgtggttttgatggtcgcttcctactggcttggcccaatggcgttccaagccggacttgcgcttgttatgagcggggtaagtgagcttctagctccgaaggtcaaaactggctcaaccagaacctctcattactttcaaggcgccaccaatacggtgcagcaaggcgaccccgttcctttgatttacggacgaatcaaaacgggtgcttcgcctatttccgtacgcatgactgtcaacgaattgtcagcttttacaaccactcaaacgaatcaagtaaaagggtttttgcatggaagcagtaaccaacctacaaactattaa

SEQ ID NO: 50674 - DNA, 759 bp, Acinetobacter baumannii
gtggcgacgattaatcctaaagctcgtcagtctgttgctgcccgaatccgtgaaattgctgagcttcgttacccatacgaagcttgcggcttcattgtgggggtgggcaagaagactctcgttatcgaaaagcaaaatgaagcacacaacaaacgcactaacttcttaatgaatcccggcgcttgggctgaagcggagcaagaaggtgagcttttaggcgtttggcatacccatgttgaagagccggcacgaccaacaccagcagatttagctgcgtgcgaagaaagtgaattgccgtggttcttgatgggcatttataagcgctcagactgctttgaattttccgatcttatttactttgagccgactggataccaacaaccttacgttggtcgtccatatgtgtacggcacgtttgattgctggtcactcgttgttgattaccttaaacgcgaattaaacattgagatcagcaacaactatccacgacttgaaaacttttggctcaaggatgagacaaattttttcgacacccacttcgccaatgaaggtcttttcgaaatcgaaggagagcttcaaaagggcgatgttttgatgtttcaaacggacgccagcggtcacgcaaaccatgtcggcgtctacattggaaacaatcaatttcttcatcacgttcaaggtcgcttatcaaccattgatacctacggcggctattgggaaaagcacaccatcagacgattgagacacgtaaatgctagttag

SEQ ID NO: 50675 - DNA, 711 bp, Acinetobacter baumannii
gtgaacattccagttgtaaacattcagacggagattcaatcgctttctccgtcagctttggtggagttgtttgtaatcgacaccacaatgtttgaaaacggctcaattatgcgtttccactcaggaatcgcgcagggctatcaagacatcgtttggcaaggcttgaattacaagcctatgccaatcgaaagcagcggttttgacaagacagctcaaggcactttgccacgccctaagctaaaaattgccaatgtgggcggtttgttctcggctatggtcatccaaatggacgatctggtgggcgctcgaatcactcgcaaacgaacttttgctcgctatcttgatgctgtcaatttccgcaacggcaatccagaagagaaccccgaccaacatttaccagacgaaatgtggctggttgatcgtaaagctaccgaaaccaaagatgtcatcgaatgggagctggcttcagcatttgatttcgacggcatcaaactgccttatcgacaagttctaaagaactcatgcgcatggcggtatcgaggccctgaatgtggctactcaggtggctattacgacgagtttgaccagcctacaaacgacatcaataaggactgttgcccaaagcggtttacgtcctgcaaagcccgacaaggtagtgatgttgttttgacgtttggtggaatgccgggggttcaacgtggcgacgattaa

SEQ ID NO: 50676 - DNA, 330 bp, Acinetobacter baumannii
atgctaaaatttgaatggagtccagatttaggctgtgagcgggatgaaaccccgctcgttacagtcacgaaatttggcgatggatatgaagcaagactggcaacaggaattaactcccaaccgaataaatggactgtcacgttcacgaagaacttagacgagtaccgaaaaattcgggctttccttaaacagcatggagcagttaaggcgtttgagtgggttgatccagaaggcgaattaggacgatacgtctgccggtcttggaaaagtaaacaagtcgggttcggagtacttcagataacgggggtattcgaacaggtatttgagtaa

SEQ ID NO: 50677 - DNA, 5745 bp, Acinetobacter baumannii
atgatcggcggcggcgaagttaaaaacagcctcacgttagatgcatcgcaatttgattccgcaattgagcaagccaccaaaaaggcaatcgcgcttgagaaggaattagacaacctcggtaaacagtcaactaagctcgattcaaaacttgctgatacaaagcaggggatggtcgagcttaatcgtcgttttagcgatgctgaaaaaacactaggcaccacaagcaaaacatttactgatgctcaaaagaaagttggcgaaactaccaagaacgtcgacttgctttcgcgcaagcttgaaaagctgacaggtgcggctactcagcaaaaaagcgccatcacttcccttaaagaactcaccgaccattacggcaataccattgatggtctaaaccccgtacttgatcgcgttcgtaaaaccgaagagcgactaggcaagtctcgcatcaaacatgctggcgaaggggcggaaaaggaaaaaacacgttggcttgagcgtcgccgcattctcgctgaggaagagcaggcaaaccaacagtccttaaaatctcgcgagcagctttataagcaatacgaagccctagagcgcaagttagagactgttaagcgcaatgccactagccaagctaataaattcgccacagcgacaactgagcgcggtttagcggcatataaaaaccattccggcaaagcaaacgctgcggaagagcaattaacaacccttcgccaaaccaagctcgcaattgaacagtctgtttccatgttgcgggagcggaacaaagagcttaaaaacgcaatcaaaatcactgatgatggcttgcgtctggaacgccaagagcgtgatgttttaaaagaacaaaatgacttagccaaaaaacgcaatgatacagagcgcgaacgcattcgtgctattaaggacgtcgaaaaggccgaacgtggattggccgcccttaaagatcgtgaatcaaaacaacagatcgccaactccaaacaggaacaaagagcggctgaattaaagatcaaagcagaagagcgcgatttaaatcggcttgaacgcttaaaggagcgtaaccaccaagcggaactagcgcgtcgacgccgcgaagctgctgaaatcaaccgcgcgaatgccgaagcggccgcagcggtaactgctgttggagctggcgcggcaaccgttgcgggtgtacatgaagcggcgagttatcaagatgtcgaagatcgcgttcgcatgcttaacttatctcctgaagagtttaatcgcttcaaggagaagtcatgggatttggcaagtactgaaaaatacttatccagaaccgcagcaatgcaaacccgtctcgatgctctgacggcaattggctacaacaaagagccaacgatcgacaaaaccatatcgagcgcttctcgaaatgcatatcttttgcgttctttgggttatgaaaacggcacacattcagacgtcgtaaaaaatctatatggttttgccgaagcaaggcaggtgatggatgaccctaacgaagtcaataagtcatttgatattgcccgcagaatggccgttgcttcaggcggcaaaatcaagatggccgacattgagacggtggcccgtaatattggtgatttgcgccaaaccatgtcttctgaagggtggattagactcgccgcagtaatggagcagtttaagacagctggcggcggaaacggtggcggtggtggcgtttcctcagttggtaccatctttaaaatgatgagcctttatgcatcaggcaagccaataaccaacacggcggctctcaatttgcttggtgcggacgttatgaacgacgcattcgccgatggtacgtcgcaacaattccagaactcgcgagaaattcaaggcgcaatgatgaaagctgtgaaaacagctggcttcaaagacgtcaaggaaatgtcgaaggaccctatcaagttctttgctggattgcgtggtcaattgctcgattacatgatgcaagacgcacagttcaagaagttctttggtgcaaatacgcctaagcatagctacaacgccgaagggcgaatgatcggtgcaaatggtcagctggtagatcagcgcacacaagatgacattgaaaacgcagcatttaagcgtttctttgcacagtcgggcatgtccaacaaaaccattgacggtatgttgttgaccatgaaccgcagttttgtggagcgttcaaaccacgcagctgaaacagcaatgggatctcaaggcgaacttgaggcgatgcaaaatctaaccgagaactggaatgccaacatggacattctaaaagcttctttggctgattttgctgtcacctttgagcctcttcttgctaagttagccgaagttcctaagttctttgcaagcatcattcgctcattcagtgaatttggtaaggacaatccaactctagccacgctttctttgatgacggtagggtttggcctgctcaaagttactattatggcaacgctctcgcctattcgaatgttattgggtgtgttggggttgatgcctaaatctttggggaacattgtttcttcaatgaaaaacttagggacggcatcaggggcggccaaaacctcaatcaacgcaaccaaagatactgtcggaaaagccgcatctgaatttacatccttcggcacaacagctgaaaaatccgcagaacgcgccaatgcaggcgtaaaaggatttgcaggcaagctatctggccacttgggttcagttaaggtatttgctgggggcgcacttcgcctattgggttctgtggtcaattgggctggttggctcatcttggcggggcaatttggttgggcgattggtaagtggatcggctcgctcaaagtgggcggaacagaaattaacacccacatccaaaatattgtcaatgacatcgtgtccaattgggatttgatgatcaactctcttaaaggcgcttggctatcctttaaagagttctttacaggtgagcaattacaggcccgcgctgaaattcaagaaacgcgccgtcagattaaggagcagcaagagcgtcttcatgtagttacggaaggcgaaaagcaagaaaaggttaataacatctcaaccgaagtaaccaagcgttacgcgaatttgcttaaaggtgcaaaagttggcgatacggttaagggagttaaagttaccgatagcgtcaagaactgggctaacgcttacgagtacagccaatctggggctcgttatggccatactgacgtcaaagccccacgtatgccttatgaagttaaggttcaatacgacaaagcgatggggcatgtcaaaaagaactatggcttaacttcggacgaacagaagaaaacatctgcaactactgacaaagacaaccacacttcagctaccccagctggcttcatgccgggaactggtaatcacgatattagctctccaacgcttgctaccaagcctaaaaaagatcgaggctctggtggttcaactcgtgactttgaaagcaaagtcatgggggttaatgaaggtctgttagctaaaattgcggagctgaatgttcttgatgattcagttttggaaaaaggcgcgccagattactacaaactcgccaagctttcatttatcaaagagtggatgcaaggcaactttgacgatggcagaaaccctaagaatcgcccatttgctaaccgcagctaccaaaaagggcgcgtatggaagcaagaggatattgactggaacgccgtagatccaaaaacaggtatttcagttgagcagattctcaaaaacatggctcaagttcgtcagcttgaagacatgcataagtcggttcaatttgcggtttctaaatcagcaaatgcaaatgagaacttcaaagactcactcgaagatgcaacaaatgacatagacaatcaaagtgatgctttggctgcattacgtcgtgaatttgcgcgatttgaagcgaagaatccgttcgcatacggcgaccctaattacgtttcaaataaaaatgcatctatcgcaatgcaaacagcttcagattatttgggttacgcgaaaaaggcgaaaaactcaaactccgaagattcatctgtatttgtcgacaatgaatacgcgcgaaaccaacaagcggtaaataaaaagtatgacgacctgatcaagccatacaagttgattcaatctcaacttgacgagcagatcgcctctttagacgccgtacagcaacgcactcaagaacaagaggacttgtatgcgaagttattgcagacacgcaaagactttgaagaagagttttcagagttttaccgcattcaagaggaaaagcgccgccgtgagctaatgtccacctatgatcaggcaatgatcaaatggcgggattacgaaaccacatatcgtcaaaccatttcagatcttggcgttgaaatgtcggatggcatttttaataagttcctgaaaggcgatgacgtctccctaagcggcatcttgtctgagagcgcatctaaaatttcacaaggcgctttccgctacgtgtggcaagacatgtctaaacgcgcgcttggtgatggcgctaataccgacctttactcaatgggcaaatccttactcaaaggcgaggccgttgatgaaagtggatttgttggaaagtggctaaacaaaatccgtggtttgactggggtggcgtcaagtgactcttcagcagactcggcggaggcttctaacacaatcgcggtaaatgccaacaccgcagcaattcaaaacctcacagcagcactccgtggccaaagcatttctagtgtcattggtggtgttgcatcatcagttggtggtgaagacctaacaaccttcgcaagcgcagtactagggcctgaaaatgttggggctattgattatgtcaatggttctggtggcttccttgaccatctagccggcgggtttgaaggtggtgccggtatggaccctaacttacctagcttcctcaacggcggattgatggataaaagcgttgggggttcgctagaaggcgcagaaggtggagtgcttggtggtctgtttgcgcagatcaaatctggcttcatggacatcttcggacagggagcgggtggcggcatcttctcaacaatcaagtcgggcttctctaatttattcagcaacggcagtggcttaatgagttctatcggcagtgcatttagcagcttgttcggtggaggcgctggcggtggtggaatttttagcagcctagcaagtgccattagtggtttgtttagcggtggcggtggagctggcggaggtatgggaggtgctggtggctggattggtgcggctgcatctatcgcttcctctttctttgctaacggtggcgcttttggcgctggtacacatgcttttgctaacggcggggcatttaccaatgggatttacgattcaccaacctacttcaagtttgccaaaggcggcggatttgcaaacggcgtaatgggagaagctgggccagaagcggtcatgccattgcaacgtgattcttcaggacgtttaggggttgctctaaacggaggcgcgccagttggtgggggcacggttgtaagcatcaacattgaagtcaacaacaatggagatacaacaacagaaagctcaaaaggcggagacaacgaatccaactggaaagacttgtctaacagagtcaagtcattagttcaggaagagatcgtgaagcaaaaacgaccaggcggtatgttgcgttcaacaaaccagtaa

SEQ ID NO: 50678 - DNA, 279 bp, Acinetobacter baumannii
atgcatttttactcagaaacctatcaatctctactcgctatgccaatcaaaacattttggttgcttagcaacagtgttgaacggatcgaggctcaaagagatctccgacacttaaaaattgcgctggcaggaagcatgggcgcaactcaagagggcattgagaacctaatggagtctcttagaaaggaagttggcgaagtaatcaagggagataacaacccaattttaaacaccgaaagagacgaagctggattcgaagcgctccgaaatatgacataa

SEQ ID NO: 50679 - DNA, 324 bp, Acinetobacter baumannii
atgaaattattaaacattgaaaacatctcagttaaaagtgatcgatttatcgaaatcgctggcaaaaaacatgaactcaaaatcatgagcgttggggaatttactcaattcgtcaaagatgctcgtgaaattgcagcttcgcgtgaccctcttcgtgaacttgaatttgccatcaaagttgttagctctgcccttccagacgttcctgttgaggaaatcgaaaagcttcaacttcctcaacttcaagcaattgttgcgtttgttagcggacaagacaatgactctgaagaggctgatgaggcggcagacaaagagggaaagtaa

SEQ ID NO: 50680 - DNA, 528 bp, Acinetobacter baumannii
atggcaagcgatgttaaaaacgtcaagcttggtgtttgtaaaatcatgttcgatggagtggacttaggttttacaaaaggcggcgttgacgtaactgtctcaactgaaacccacaaggttcaagttgaccagtttggccaaacaccaatcaatgaatacattctcggtcgtaccgtagttgtaaaagcccctctcgcagaaaccactttggaaaacttggtaaaaatcatgcctggtgccactttggttactgacgctcaaacccctgctaaaaaacgcgtagatgttcctactggcgttggtatcaacttgctcgacttcgcaaaagaattggtattgcacccaattggcaagcctgataccgacaaatctgacgactttgttgttaaacgtgcggcaactgctggcgcattggatttcggctacaagctggaagatgagcgtttgtttaacactgagttcaacgcgtatccagacgagaacggcaaactgttctctattggtgatccggcagctggtaaggcttaa

SEQ ID NO: 50681 - DNA, 501 bp, Acinetobacter baumannii
atgttcaaaaagggaaattttggaagactgcgagcaagactggaagctctttcagaagtgcccgaaaaagtagctgcaacaaccttgcgtgactgtgcctacaaggtaaaagaaaccgccatcaatatgacaccaattgacgagggcgaccttcgacgttcaattaaggtgcgtcgaattggcggtggtacaaataaattggggcaatttagtcgagggcaatccagatgggaggtgtatgtcaacatgtcccaacctacaagcggcggtaaaaaagaagcttttgtgggggaatatgcttggttaatacacgaacacatgggctggggaaatgtgcgcatgtcaatcatgccttcggaacgatcagtggcggcgggattagcaaatggagttcatgccggcgggcgcttcatggatagagcgctcatgtaccacgccaaagagattcagaaggatattcgcgcacaagttcttagagaaatcaagaaactggacaaataa

SEQ ID NO: 50682 - DNA, 390 bp, Acinetobacter baumannii
atgaatctactaccactagctaagctgcttcagactaaacaggttggcattacggggcagaccatctttgtcaacatgattccaatttccgccccaaaaggcgtgttgttgagaaatgatttacccggaacggaaatcgattacgagcttcccggatatttcaaaacaggattcgtagtcattgtccgagatacttcctttgatctggctgagcaaaggatgcaaagggtgagtgaagttctcacactcaatgacacaactgtcggagacttccacttcaactattgtcgaccaaaaacacgacctaacgcatacccaatgtctgcggggaacttaattgaactcgccgcagaatacagcgtttgtggctatgaaattaaaggagagtaa

SEQ ID NO: 50683 - DNA, 366 bp, Acinetobacter baumannii
atgttcagacctaatcaaacttgcgtggttcgttcgattgctggttacagcgtttatggccaaccacaagagggaaagcgcaaaagggaaaaatgcgcaatcgttcgctacgtcatcaagaatgaaaagtcttctgtgcgagccgactcttccgcaacacgaggaaatgcacgggagcaacaagcggatgcaatcttcttgatgagccccaacacaactgcggacattgacagtgtaattgagttacatagccatgattttcgcgttgtttcaaaagagccacgttttgcaatcagtggtcgcctagaccattttgaagttggttgcagttattggagcgacaatgaatctactaccactagctaa

SEQ ID NO: 50684 - DNA, 477 bp, Acinetobacter baumannii
atgaataaacacgacattgacatcgctcaggcaggagcgctaaccaaaactttcgttatggcgctaaatggcgccttcttcactgttcgcggcaataagtccaagcccacccctcaagacattgaaagagcgaagatcaatgttcagatcgcctcatatacatatcttagtgcggtaggggagttgcttaatccttcacaccctatgtccaaagagacacgggcgaaaattatcaacgtcaccacacaattaattcgtcaagcaaacgcatcaattgcaggtggctactcaaacaaggcggctcagctgcttggttcgaatgtgcatggcgcacaggggcaattaattcagcgaaaaatgcgccaactggacttgcgcgtgatcgacaagcatgggcgtgggtggagcgacccatctcggctagttgaggaaatcatgactcatcatttttcaggggagggaaatgttcagacctaa

SEQ ID NO: 50685 - DNA, 774 bp, Acinetobacter baumannii
atgaacatttacttagttggcacaccagttaagctaaatgttgatttcagcgacagtgacggcaaccctctcgccgtcaccgaagcaaagtaccgtgttgttgaccaagactccaaagagttacttcaaatgcggtcattcgacacaacacttggcgagctgacaatcccttcagaaatcaacaccattgccgctctggacattaatgccatcaccactgacaacaaattgaattttcgcactcgcgaagtgcgcgttgttgaatttgagctaaccctacaagacggcaacatcgtaccgcataacctcgcttatgcgattcgattgagagatcctctaattgccggacttaacagcttccaaacgatgagtcaggcaactttaagctccctttcaatcagtgcattgagcgcatggaatgaagcgagtctcgattcgaagattagcgcattaattgaggcctacgagcgcatttgtaaattaggttttactttagttgataacctcgaccttctttccccgaaagatttttcagctttggacgctcgatttgtcgatgcgctcaaaaaggctcaagtagccgaagcagatgcaatcttgggcggtggagagtccacattgatgagccggaagcaaggattgctctcacaaacaattggcgaaactcatgaaacctatcaaaaaggcatgccattagatttagtagtctctaaattgaccatgcgttatttgagtgggttcatttcgacaaataagcgaattggacgggcttaa

SEQ ID NO: 50686 - DNA, 498 bp, Acinetobacter baumannii
atgaaactacgattaacagctaagggctatgaaaacttcactgggcatatgggcgccgtttatttcgaaaacggtctttctgctatggatgtattgccagtccatgcggtacgcattggcagcacaattggcgccgagtgggaaaatggacaatccaccaacccggctgaattgttggtgtccaacgcaaatacgagcgcattaaactcacaggaagcttctgaatacgatcaacgcatggttgaggctcaaattgatgatgcaatcaaagctgaagagcatctaaataaagtggcacaacttggcattgtcgctacaactgaccccgatgccaaactccctacacctgaaagcaaaaaatacacccgtgaagaacttgaagccattgcagaagaaggtgggttagcaggtcttcgcgctgtagctaccgaagttggcgtaaagggtggttcgattgtggtgttgattgagcgcatcttggaagttgcaggtgcctaa

SEQ ID NO: 50687 - DNA, 903 bp, Acinetobacter baumannii
atgccactattacgtgaagaagctgcgaagcttagtaataaccaactcgtttcgggtgtggtcgaggaaattatcgataaggacgaaatgtttgcgtttcttccatttgtaggcgtgaaagggaaagcatacgtctataaccgtgaaaaaacgttagctgacgctgatttcttagatccaaacgaagaaatcaaagagtctgcatcaacgttcgaagaagtcactgccaagttacgtattttggctggcgacgtcgacattgacaaattccttgattccactatggatgacaccaacaaccaaatggcgatccaagtgacgcaaaaggcgaagggtgtaggtcgtaaattccacaaaactttagctactggtgatgcttctgttaatccaaaagaatttgacggtatcgcaaaacttgtaactgaagagcaaacaattagcgccggcccagatggtggcggtatcactttagcgttgttagatgaattactcgacaaggttcctcatggagctgactgtttagtaatgcgtcgcggtacaattcgcgcgtaccgtaacttactccgtgtaacatcgggtactgacgctgttatgcagatggttgaaaactttggtcgtccaatgttgacacacaacggtgtgccaattgtgatgaacgagttcttaccagctgacgaagtgatgggcactaataccaaaacgtgttcaatttacgcaatccgtgcaaacgaagtagacggccttcatggcatctacggcggtggccctgctggtatcgttgttgaaaacatcggtactgtacaaaacaaagacgcaacccgtatccgtttgaagtggtatgttggtttagtcttgaaatcaactaagtctttagcgcgtttaaaaggtgttaccaacatctaa

SEQ ID NO: 50688 - DNA, 852 bp, Acinetobacter baumannii
atgcctttatggatgcaacttttaatgaatggcggcttacttcgacaagaagccaatggtgaaggttctgatttaggaggcggctcaggcggcgaaggcggggaaggtgacgagaaaaaagagcctaccgaacctactaaaaaagactcagaagccgacgatgaaagtaaaaacaagccgactgacaaagaagctgaattactcaaagaagtaatgaagaaaaaagccgaagctcaaaaagtgaagcaggagcttgaagaactgaaggcgcgatatatcgacatcgaccctgaaatcgctcgcaaggcaattaacgaacagaaggaaaaagaaaccaaagagcttgaagcgaagggtgattttgaacgtctgaaagcgcgtatggccgaagagcatgctaaagaagtaaatgccctaaaagcaaaaatcgcagagcttgaaggtgccaatgcttcgaagtctcaaatgatcaatgacctgacggttggcgctcaattcaaccaatctcaatacatcaaacaagatttaatttacacgccaactaagttacgtgcgttatatggtaatcactttgaaattgaagatggcaaagtggttggttatgacaaacctcgcggcgcggcagagcgaactaagatcgtcgatagtcatggcaaccctgtaaattttgataaagctttagaaaaaattgtatcaatggaccctgatgcaaattacatgatcaaagccaaatcaaaacaaggagctggttcacagccaaatccaaaacaaggcgcgcctaaaccagaagctaaattgtcttcaactgccaaaatttcaaatggcttgagtgagctgtttgctaatcagtaa

SEQ ID NO: 50689 - DNA, 1701 bp, Acinetobacter baumannii
atgaatcttaaacacggagaatcggcagtaattgatttgcaagctgaagaagcgaagcaaaacgccacttccgttatcagtgacccagcacgtttacgcactttgatcgagagacggcatccaaagtacgaagcgttagttgctcactggaacttcatggaggaaacatacaacggcgggcgcaaatggtttagttccaatatttttcgctacatcaaagagggtgacaaggagttcaaaaatcgaattgagcgtgcttatcgcttcaatcacacgcgtgaagttgttgatttaattaacaagtacctgttcaagcaggctatcactcgtaatgataaagatgcgcctcaatgtgttattgatttttggaagtcagcaaccaaaggaaacttaacgatcaatgattttgttcgtcaagttagtaagaaaacttctttgtttgggcgagtgggtatcgttgtcgatagaagccgcgccgacatggaaattgtttctcgccaagatgaggttgaagccaacttacacacttacagttacattgttgagccgcaacgactcttggattactcatttgatgaaaacggcgaattaaattggattttaattcatgaaatcgggcgtgacgacgaagacccatttgactcttcaggaaagccggtaaatcgcttcagactttggacgaagcagcactgggcgctttatgaagtaaaagaaggtaaaggtaaaaaagttgccgtgagtttggttgattcgagcaatcatgatctcggcgaagtacctgttattttggcggataacattattggtgatgatcaatattcagctccggcacttattgatgacattgcttatcttgaccgcgctacagccaattacctttcaaacttggatgcaatcattcaagaccaaaccttcagtcaacttgcgatgccggcccaaaacctaatgccgggtgaagagagccatgacaagctcttggaaatggggactaaacgagtgttcctctatgatggagagggtggatctcaacctttctatctatcgccagacgtaaagcaggctgatcttttgatgaccactatcaataagatcattggagaaatttatcacactgtcggtttagcaggagagcgcacaaaacaggacaatgcggtaggtatcgacaacagttcgggcgtagcgaaagcttatgactttgaacgtgtaaacgccttgcttacagcgaaagctgattcacttgaaacaatcgaaaacaagatcgttcgactcgttgccaaatggaacggcgaaagaatcgacgataaagactcatacgtctcataccctgacaacttcgatactcgtggcttgtatgacgaatttgatatttctgcacgcctaatgttgatcgaagcgccagacacggtaagacgtactcaaatggaagctgtgattgataagttgttccctcagttagctaaggaactcaaagagaagatgcttaaagagctgaaggattggccggttgacccacttgaattggcgtcacaaatcacagacggaaccagcacgggccaacttaaaaaccgcaccagcatcaaaaagaatgatgacggagcggaagataagaccgctgctaaagcaaaaaaccctcaaggaaacaaagcggccaaagcgacaaagaataatcgtcaaggccaagtgaccgaacaaacaaagtaa

SEQ ID NO: 50690 - DNA, 1245 bp, Acinetobacter baumannii
atgggaatcaaagaaaaactcagtctgcatcctaaacaaatgcaggtgtaccaatcaaaggcgcgtttccgcgtagttgtggcggggcgtcgttggggtaagagtcaactttcaaagattttgatgatttccaaagcgcgcattccaaagcaaaaggtctggtatgttgccccaacatacaagatggccaagcagattatgtggaatgatctgcttgacgccatccctaaatcttggattgcgaaggtcaacgagtcaaacctttcaatccgattggttaataaatcacgaattgagctgaagggtgctgacaaagccgactccctacgtggtgtcggtatcaactttctagttctcgatgagtttcaagacatggacgaagacacttggacaaaagtgttacgtcctacgctggcagatacaggcggtcacgccatcttcatcggtacgccaaaagcttacaactgtctctacaccgtctacaaattagggcaagaccctaaaaaagttagatctggtcaatgggagtcatggcagtttccaacgattacatccccattcattccattgtctgaattagccgccgctaaagcagatatggatgaaaaatccttcaaacaggagtttttagcgtcattcgaaaccatgagtggtcgtgtttactatccatttgaccgaaatctgcatgtagggaaatacgaaattaaccctaatttgccgatttgggttgggatggacttcaacattgacccaatgagcgccgttttgtttcaacctcaagaaaacggtgagctttgggcggttgatgaagttgttcagtttggctcaaacactgaagacatgtgtagagctttagatgaaaaactttggaagcacagatcgcggattgttatttaccccgacccagctggcggacaaaggcagcatgcgcgaggcgagacagacttggacatcctaagagaaatgggtttcaagaatatcaagtatcgcaaaaagcatccaatgattgctgatagggtcaacgctgtaaaccgaatgctaatgtcagcagatggctctattcgaatgagaattgatgagaagtgcaaacatctcattaactccttcgagcaaaccatttataagcctggttctcgagacgtcgacaagtcggctggtgtagaacatagtgctgacgcagcagggtacgcaatcgaacttgagtttccagtacgcaaaatcgactttggtgggatttcaatttaa

SEQ ID NO: 50691 - DNA, 591 bp, Acinetobacter baumannii
atgaccaaccaacgcaaatccgttccattgaagaaatgggcggaggcagaagcactctgggcgaatggtgatgcgactcgcaaggaaattgcaaagaagttgggcgtatcggagtctgccgttcaacagcacatggcaaaagcaggcgttaagtaccgacaaaatgccgagcagcacagggcaaagattgccgacgcagttcagcaagccgcaacggaagaggcgtcgttacatgctcagcgaatccgtgagacgaagaacgagcattacgcaatatctcaaaatattgcaaagctggtttggcaggaagttcttacagcaaagaagaataaccagccgctcgcaaccgcagctccaaatcttaaagcgttagatattgctatcacagcgcttgccaaagcccgcatggaacgatggtctgtattgggtcttgaccgaccagatgccgtagataccaacgagcttgctacgttggagattaccgagctgacggctgacgaaatcgaggaattacgtgagcgtaattttaacgagttcgaaattgaagggacggaaccagtacaggagacagtggaagttaaatcaagttag

SEQ ID NO: 50692 - DNA, 396 bp, Acinetobacter baumannii
atgaccctagatgaacacaaagccctcatcatcggttacgattacgaggcgggagcggatacagatacggatattgattcgctcctcggacacgacacaatgctttttgatggaaagcctattcgatgtgatgacaccggatgttttgaggcccctagatactctgaagatattgaaattacaaagcttgaactagaaaaacttaaaatcgacccccttattgttccagctgtcccttatagcgctaaaaagacgcacaagccagccagagacatcgaacataaatttgctgcactcttctgttttggcggtgaacaatgcgtaactagaccgtttgacagcgagaatgaagccctagcgtgtgtgctatggtatgcactttcttatttttattaa

SEQ ID NO: 50693 - DNA, 327 bp, Acinetobacter baumannii
atgacagttaatttgacgccgaagcaagttgaaattctcttgctggtatttaaaaagaataccgacggcactcacttagacctagatcaacttctcaatgagctaagctacaagccgacgaaacaggcattgcagttttccatacggtcgctcatcaaaaaccataagtacatcaccaaaggcagtgaaaaacgccgtggccgtagacatgtcacatacattgctacaccaacaggtgaatatatggcgcaacagtacatgcctaagccgagcggttctactggattaaaaaccgcactggtcgaagatgactcaaccgcaatttaa

SEQ ID NO: 50694 - DNA, 951 bp, Acinetobacter baumannii
atgcaagaaattctgatggacaatcaggatgccctcattgttcgaaaaccgattccaactaaccaccttctttcactgcttaatgaaatctacattgagcctggtacaaaggaggattgggagcttctgcatgaactccactacaaggcggacactttaggcatcgggccgcgttattggcgtgttgttttgcatggccaaactatcggcgtcggcgttatgacggttccaaaaatgctgctatcaggcagaaatgaactgtttgaacatttgcgccccaataccaacggtaaagattcacgtttgatcaatcgacaccgcgccctatggttaaataacaacgcctgcacaaactcgcgactggttttagacaccatgtatcgcggcgctgggattgcttatcgtgcgcaaaatttaatgatgcgtatgagtggttgtttgttaattgagtttcaaagctcgatgtcaaaattcaacccatttgccgctaaagccggcattcagttcgccccaccaaaacgagccaccaattatgaacgcggattacaatttttccgtcgttggttcgagtcgattccgactgattttgttggcgtaatgcaggaaatcgaaaaaatgcccgcgccagttcgggaaaaatgcgtggccgaaatgcgtaagttttactattcctttagttcgatggagaaatcaggagacaaccgcatgaatggaacgaagcgagtcgactcactctcgattgaaaagctcttaaaaaacacgcaacagctagtgtttgcttcgccgttatacggcgtgtacgtaaaccccgacgttaaagcggcaaaagaagcgggaaccaaaccaaaacttccaatccgtctgcctttgatggcgtttgaaaaccagttacctaacgagccgttaaatctcaacgcaataagcgaaaaggacattgcttatgacagttaa

SEQ ID NO: 50695 - DNA, 354 bp, Acinetobacter baumannii
atgccaccacgcacaactaaaacagcaacggctgtgacaactgaagaacaaattcaagttcaagacactgccgaagctgcagaaacaacagcgcctaaacgctacatcaaagttttcacaagcccaacatgcgggccgtgtaaacgatacaagccgctcttgttagaagaggcagagaagcgcggcgttgaagtgattcaggtggaactgtcagatgaaaccaaagaccagttcatggaattgggtattcgacaggtgccggtcacgattgtttttgaagccgacaaggaagtgtcgcgattgatgggcgctccagcaaacatcattccccaaatggacagctggggcttctaa

SEQ ID NO: 50696 - DNA, 657 bp, Acinetobacter baumannii
gtgaccgtatacagaatagacaaaaaatttgacacggaagtgaatcgaagtgaacgcgttctggaagtcgctgaagcgtttggtcttggccttgatgataaaacctttgttgtctttgataatttggatctgccaattgatcaaggcgacattgtttacattacaggtcaatcaggtagtggcaagtccactattttacgcgaactatcaaaagctatgtcagctgacggcctttctgtgtcagatattaatgctattgagtttgaagataagcctttgattgaccagatcggtaaggatctgaacgaggcattaaatcttctatcaattgccgggttaaacgacgcctatttgtttatccgcaaaccaaatgagctgtctgacggtcaaagataccgtttttgcttagccaaactcattgaatccaaagccaaagtatgggttgcagatgaatttttagctgttctcgaccgaactacagcaaaagttatcgcttacaaccttcagaaaatcgctcgaaaagtcggggccaccgttttagtggcgactactcacgacgatatggtggaagacctagcgccgaatgtcacgatcgtcaaaaaataccgtgaaaaggtcgtaatccaccgaaatgatgaatacaaatcaacgatttaa

SEQ ID NO: 50697 - DNA, 642 bp, Acinetobacter baumannii
atggaattaattattcaacaatggaatgttgatgaagttaagccatacgaactgaatgcaaaaatccacgacaaagcacaagttgaacgaatcgctcagtcaattaaagaatttggttgggatcaacctattgtcgtggacaaggaaggcgtaattatcaaggggcatggtcgtcgcgaggcggctttgcttcttggcttgaaagttgttccagttctagttcgatctgaccttgatgaacatcaagttcgcgcggcacgcttggccgacaaccgcgttgccattggtgacatcgacactgaccttctccaaaaagaacttcagacccttaactttgatttggaaggcattttcgacaaaaaggaactcaacttcgtagttgccgacctgtcgggaatgaatgtggattcaattgttttggatctcgacagtgaaatcgccaaacaaacagaagaaaccatcaaaaagatcgaagaaacggacgcgcgagctgttcggatcgataaggctttgggcttcaaagagatcaaaggcaaggatgaacgatttgtcgctcagtttatggctgtggcagaaggcgaaacaggcctagaaggggcggatgcattcattgagtacatcaaaaatcaggtggcacagtga

SEQ ID NO: 50698 - DNA, 522 bp, Acinetobacter baumannii
atgaacgaacaagaaattgaacagcgtttgcaggagttgcaacgtaccgcgccgcgcctatcaccagagcaaatcgacgaaaagattgttaaaaaagcctttcatgtattagggggcaagctaacaatttgtgttttgacgctaaaaaatggctttgaaatcgttggtgagtctgcgtgtgcgcatccagataatttcgtccaagaattaggcgaacaggcggcttttgaaaatgcccgtcgtcaaatttggaagttagaaggttacttactttgccaaaaactctatgaacaagctttagaggacggcaaaacattcttggatcgcctttatgaagaattagctcaacaagtagagcgtcgcgataaacttcacgcctttatgttgaaaggtaagcctgatgatgtgactgaagttgagtggttccaaatggcagaccaacttgatgtactggcagattacgtagacatcctcgaaacgcgcattgccattcacaccaagtccgacgaagaagaggaataa

SEQ ID NO: 50699 - DNA, 681 bp, Acinetobacter baumannii
atggcaaagtataagtcagtactgactgatcttctagtaattatgacacacgaactcatatgggttgaccctgcacagttgcagcctaacccgtggaactcaaacatcgtgtcgccagaaaatgaagctaagttaaaggcatccatcgagcgtcgtgggatgttcaagccaattgttgtgcgtcaactcaacaatggcactctccaaattatcggaggggaacatcgcgctctagtcgcaaaacaaatgaaagtggacaaggtgcccgctttcaatcttggaaaaatcagcgacgttgaagcaaaagaaattggactgctcgataacgggcggtacggttctgacgacgcactaaaattggcagaaatctttgcggacattggtactcccgaagacctcgctacgttcatgcctttcacttcttctgacatcgacacgattttctctaattcaactatagccctagatgctctagctgatctcaatttgccagaagaagacattgaattgccttcaggaaaggcggttcaaacacaccaaatcatgcgtttcaaagtccctgtggagcaagtggacaaagtagttgatcgcattcaggccgttattaagtcacaaggatatgacgatgacgacccaatgattaacgcaggggacgctttagcccacatcgtactcaagtaa

SEQ ID NO: 50700 - DNA, 1716 bp, Acinetobacter baumannii
atgtcagaggtagttacgattgccgccgacgcggtaaatgccgtgctgagtcagcccagcacaaaagtaaaactaatcgttcaaaaggcgctttcgtaccaagttgacggcgctgaaacaatggctgtttttaaacagcataagtgggatggccgttcgtccttctttgtgtataaaaattgctccttccctgccggctttcttcatttcgtcgctgccaatcttcgccgtgaggggtacaaggtcaatattgttcgcaagcccttccctgcccctttaggccctgagcgcccacaggtagacgcttttggttatgactctaaatatgattaccaaccagaggttatggacaggttggtaaaacatggccaaatcattgctcagattgctacaggtggcggtaagtcacgtattgcccgtctttgtttcgctcgtattgctcgccctaccctctttctcaccacgcgctcaatcctgatgtatcaaatgaaggatgcgtttgagaaagatatgggcattccatgttctgtctttggtgatgggcaatttggcaacgtgaacgctcaaggtcagacgactatcaaaatgatgtcggttggcacagtacagacattcatgagcaagttggaagtcaccacaattcaggaagagttcaatgttctgttcaatgccgtgcaggagaagttcaaaaaagaaattgtggcattgaagggcaagttagcgaaagccaagaaaagtacagctgaaattacagctgctacaaatgatctgatttctaaacagcaggcatggttgaaggccaacaatcaagacatggccaataaggccaaagccaaatttgacgaaaagaatatcgagcgtcaaaaaaccatcaagcttctttccatgttcgagttcgtaattttggaagaggcgcatgaagcttcaggtaattcttactacgaaatcttgcgctattgtaagaatgctcattaccgcttggcattaaccggtacgccgtttatgcgtgagagcgaagagtcgaacatgcgtctaatggcatgctctggcccgatcgcaatcaaagtcactgaggaaatgctaattcagcgcggtgtacttgctaagccttacttcaaatatattgagcttcgcaaaaagccagatcaccttctccgcactactggttggcaatcggcatatagattgggtgtcacagaaaatgaagaacgcaatttagctattgtgagtgagattattcgagccaaagcttacggtttgacgtcgatgattcttgtgcaacatacatcgcatggcgagcatttaaacgagcttttaacgcaatatggtttacgtgctgagttcattaagggtgaaaacaatcaagctgagcgcaaactagcgttgaacaagcttgccagtggttcggttgatgcgctaattggtacaaccattttggatgtgggagtagacgttccagctgtgggtatgattattcttgcgggcggcggtaaggctgaaattgcattgcgtcaacgtattggtcgcggtttgcgtgcgaagaagattggtccaaatgtggcgttcattgtcgactttacagaccattggaatacacataccaaaaaacatgctacgcagcgacgcgagattgttttgcatactaaaggtttcggagagaacattgttaatgatttcaattttgaacaattaggcttcaccagattgtctgcataa

SEQ ID NO: 50701 - DNA, 279 bp, Acinetobacter baumannii
atgccatcgtttgattcaaagaagttctatgacgaaaagggtttggtacgtaagccattcactgtgacgcaagaagcctcagagattattgctcgtttcgctgagaagtaccctacccttacgcaaggcgatattgtctcggttttggcaggttttcttgaagatgatcgcatgagctatgtagttgaagaggcttgtgctaaattcgctgaagccaaaccaccaaaaattcatgcgagagctggtgggcggccaaaaaagaaaacagaagattcttaa

SEQ ID NO: 50702 - DNA, 702 bp, Acinetobacter baumannii
atgaatactaaagcaaaccttgatcttttagctgctgaaacaactatagaaaacgctgctactgctaaaaaagaagttaaaacaaacttcaaagcacgcgctaagaacatacaaaagactattcttgcgaaccttgagatacgcaaggtgcatcaaccgttatcacgcgacatagtaagtgaaattaactttttctctactgatgcaggtttagcaactatagagcaatgtttaattaaaggtatcgagctaaaagcattcgctgacattatcggtaattacagtgaagatataaaaggtaaagacggttatttagcaagcaaagcaattgttaagtgtcgcaagctcatgcaagcaattgcacaaaacaactgcatgaagattgacccgtacacacgttctattttgcgtaatttaatcgagtttaaacaattacgtcattttgagcttgaacgttgcttgtgtgctgctatagagaacaaagacgggttagagaacgttaaacgcgttagacagtatcatagtacgggcatgaataccgcaccgactcaaacatgttcaactaaagcaatgttacaaatgttcaatatatgcgaccttgtgaaaggtgaaaaacacggtatggtcagctttacaagtgaagacgtgaccgcgttaatagtcgaaatgtttaaaacattcactatcgagaaaaaacgctaa

SEQ ID NO: 50703 - DNA, 327 bp, Acinetobacter baumannii
atgacaactcaaattatgcgtaaaaatgctatagctaaacttgctaatgaattaaacaatgatagtgaattgcttaatagtgtattagaaggtaaacgcgcatacatgcatttaatacagcaacgcgcaatagttcacgctgataagtgcatagagagacaaaacaagcgcattgaatacttaacagctatcactaagcacaaaaaagttttaaaggtatctaaaagcgcatttatgaatgattttattaatagatacatgcttaactttatgcagtaccgtagcattgcgttaaacgtgcataacatacgcttaacagtgatttaa

SEQ ID NO: 50704 - DNA, 264 bp, Acinetobacter baumannii
atgaaaaccttatggcacaagggttggcgcgatttttgggtgatcacgtccgaggcaattcctatcaaaaattggattgccgtgtggctcttccacggcggcactgaggcgagtggcagctccttatgcgagcgtgcgggtgttttaggaaaattctatagttcagccgaggcaacgccgtttttcactcttggatggggcgtggatctgctttggattgtcctaggcatgttgcgtacgataataaaaaaccgctcaagttag

SEQ ID NO: 50705 - DNA, 498 bp, Acinetobacter baumannii
atgaaagttacagcacaccgtatagcgagatcaggatatgacgcagtaattataggattcgatcgaccgtgcataatatctttatatctacacaacgtatctcctctgtgcggtccaagtcacaagaatgacgagggtgtttttcgctatagctctcactctaaagaagatgcggataataaaaacctatcagctaaaaactatacgtatgtcgacggtttgacaattaaggacttctacgaatacttcagcacaatggatttatcacatcttaatcacgaacaacacaaagcgctatatgcagcagttgcagagattaacgacattacagactactgcgcacatgtaattgacctcatagatgaagaagatgacgaagaaatccaacattatcgaagtgagctaaagcgcactgatagcatgatagtggacctagaaaattgtgtaatagaattttctgatggaagcaaagcaacatacgacgacttgcacaattaa

SEQ ID NO: 50706 - DNA, 366 bp, Acinetobacter baumannii
atgaaaacttatgacagcaacgatgaagtaaagaaaagcgactggaccttttcgcatatagctgatttagatgtgttaaacgtacattacggtcaaatcatcttgttgaactctggaattgatgcttatgcgcttcatttgtctgtgcatgaaaatgaagaagagattcattatttagtaaacgtttgcaaagtggacgcagataagcatgaaaaacttgaagcgtataacctttcacagaccgatgactttgtgtatgaagtctcaaagataactcgacaagtaatatttacgacttatatcgaagctcaacaatttatgtgtgagcaaatgcaagaattgacacacttaaactttaaacgctaa

SEQ ID NO: 50707 - DNA, 294 bp, Acinetobacter baumannii
atgactcaactaataactaaagcaggcgactaccgcacacgcaacggtagccgagttacagttcacgaagtaaacggtgatggcacattcgctataaaaggctctgtttggaagatgtttagaggtaagctacgcccacgcggtttaaatacatggaaaccttgcggtcacaatcaagcctacaatcacagcgacctagatatagtggcagagtggggcggtgtcagtgaggaattgtcgataggctgcaattgttatccaaaacaaaccgacacagcggagttgaagatatga

SEQ ID NO: 50708 - DNA, 543 bp, Acinetobacter baumannii
atgacttacgaaactaacgatcaagtgactatagagcagtttttagcgaagttttctaaccctgataacaagaaacgttttcgcttagaaggcttcagctttacgcatcaacacggttttaacctttactttgatgaatacgacgacttcatagatgagttaggcgatgtagagatagagttttggcagctagaagacacttgggccaacgaagagataaaagtctcatcattcaaaatgcttgaaactttaattgagtttttagtaagccttgatcttgatgaagttaaagaagttggcacatacgctgcattagttgaaggcaactatgctgattggtcaaacgttaaagagtggcacgaagatcgttacgtgtgtgactacgaaaatgacgatgattttggacgctatttaattgatgaatgttctgctttggaaataccagaggacattcaaggttatttcgactatgaacgttacgggcgcgacgctttaattagtgattatcttgtagctgaaggaaaggtttaccgaaactattaa

SEQ ID NO: 50709 - DNA, 378 bp, Acinetobacter baumannii
atgcaaccaatcgtcaccatataccgcgcagtaaacgagcttttctctaataaggctcagaccgcaataatatccgcagatcaaccttatctcgctgagatatacattggcgaaccagataagcacatgaacacctacacaagtgcagaaacgggtttaaagctacaaaccactatgcgcctagatgaatacaagcaagagttcatagatgctgtaataaaggcggttgctcttattgccgacggttactccgaatataatcaattagtttgcgaagagagtgaagaatattttgaaatgacttccaaaatacatttagacaccgccactaacgctctttattacagtgattttacgaccacagatcatggtctttaa

SEQ ID NO: 50710 - DNA, 219 bp, Acinetobacter baumannii
atgacttgcagaagaatgcccggcggtttcgtgtgcctggttccaacttttagattgcgcttacttgatgggcgatatgtatacatgacatggaacaactactgtggcccgctcttctcacatgaccgagatgaaactcgtgtgattgaagattggcacaaagacgaaatgctctgtaaggcggttgattggtttgtgggaagaggcaagaaggcatga

SEQ ID NO: 50711 - DNA, 342 bp, Acinetobacter baumannii
atgagcattgcaaaggttcgctattggacaacaggtgaaattaataagctaatcaccttacattctaataacactccaattgctgaaatagcaaaggagctgaacagaactgtaggaacgatcaactcaaacattgcaaggctacgcaagagtggcaagttaccacagccaaagacagcgttagagcatattggcagcttagagagagctaaaaagctagttgcgcaagctgaggcacgcggattcaaaacaataccgatcaagacggacaatggctattcgcaaacgtatatctggcgcctccgcacattgattcaaaaagcggagcagaaagcagcatga

SEQ ID NO: 50712 - DNA, 633 bp, Acinetobacter baumannii
atgaatgaacaaatagaaataaaagaggcagcgtacaaagcaggctttcatgacggtcgacatggtacgccgtgcgagttgattgagttgcaggctgaaaatgaacgcttgcggtatctggtaggtgagaaggttggccacccatcaacccgtgatttgctggacgctgagattaacagacagcttacagagcaaaaagcgaacggtgacaaggagtttatgtcagatgaagatatagaacaattaattagggaggttcttaaagatcatgacgaaaaccctaataaatactggaaaaacctttatcgacaaattgattccttgttagatgaactggctgaagaaaaaagattaaacagatcaaaagattttaaagttggacaacttcaagatcgaatcactgaattgcttgatgaaagacaagatttgtatgcacagattaataatgcaaaacaaattccagatgggtatgtcgcaattcctaagaaaatgccgcaatcaacagtggaagctttgcattacggtgggtacaaatggggagatgaagagggaacgcgagagtattttgagcctgtgtattccattgtggttaaaacggctggcaaatctcaggaggtcattaatgaagattag

SEQ ID NO: 50713 - DNA, 378 bp, Acinetobacter baumannii
atgcagactgacacatttaatcgtgatgacttcatggcgttctttcgcgatgaagagaagcttaacacgctatccaatgaagatcgtatagagattttttctagcatacttgcaggttcaagtgatttgactgtatcgcttctggatgaagtactaagagattacgacgtgcaaaacatcattgttgttgacgtggaaagtatagacgctcaacccattcctagttcagcgatgtcggcactagagaaggttctcaagttttgcagagacggcttcaatgaagagcaaaggctgtatgaagaaaacgtaagcatagaacactccattagaactgacgtttttgaagaagttagagattttgtagaaggcttaatgtga

SEQ ID NO: 50714 - DNA, 627 bp, Acinetobacter baumannii
atgccatatttagttaaatggattgaaaaagacacacaacgttgtggcgaaaagaccgtcgacacgcttcaacaggcgcgtgagtatttggaagatgaaacctacgcggaaggaccgattaagattgttcttgaggaaggtttttactcaggcatatacgatgaagtgagcattacaaaggttggaccaataatgaaactttggcaggcattaaaacaggcagattatggcaccgttggctcagagacgatcaagtggagtaaaaatttgctaggccctagtcctgaaactgaaattaggcttattcaactcattgatggcgatgggcataactgggcaatagtagatcaattccaaactgtcgaactcagcgaagaccgaactgtagttaagtttttggatgactcgaacgcatcgcatgacatgaaattgtttgcaaacagacccgttacgcttgaagagccaaaaataccaacgtggcaatttaaagcgtcagcgatagttcaaattaaggctgaaacacaggcggaagctgcccggctttacagtgaacacttctttactccagatgagttggatttcgaaatgaaagttttcgatgtgcaacttgagccgtacacaggttaa

SEQ ID NO: 50715 - DNA, 492 bp, Acinetobacter baumannii
atgctagtgacattaatgactgatgcctcgctttgtcacaaaactggcgccgctgggtttggatactggtgcgcgtcagacagaggcaaacgtgcgggtgggaacattattaaaggcgttgttaaagacagctacgaggcggaatttaaaggcgtagctaactctttgcaggcgtctatcaatgccgggcttatctcaaaaggtgatgaggttttaattcaagtagacaacgagggtgttctcttctgccttagcggtaagtgcaaggttcgtcctgacattgcagttgttctaaatcacatattagacaccgccaaaatgtatgaactaaagctcagatgtcgacacgttaaaggtcatacgaaattaaccgataaccgctatttagcgaaccatcattgtgacagtagagctaaatacgcaatgagacaagcccgcaaggtattgaagaaaagcattgcagaaaaggtaatgagcaatgaagcagattaa

SEQ ID NO: 50716 - DNA, 537 bp, Acinetobacter baumannii
atgagcctaattgaccttgtatatgcgtttgaatcagccactcgcgcacatgaaaacattggcagtcaaccactcgaagatcacgcaatcattgaggaagagtttaagtccgccaaagaaaatctaatcgtcgaaataaaagagcgcactaacgacccggctcttgctgttatccaatacatattaagtgacaatgtggatggcaccgatgacgcaatggaatttttgaactattggaacgaaggtgagttcgacattcttcgtcgtaactggaacaacattcctgatgaagtattcattggcgcagatccattatttaaagttgcgccacctgttcgtgttggtcgacatattgaaggcgtatcaattaacggtcttgaatacattttggatgattcaaagcaaatttgcatattcaaaaatgaagcaaccgctcgtcaatgccttgttaataactttggattcaaagaagagcagttagacgaccttgtttttgaagagttggaccactcttatgctagtgacattaatgactga

SEQ ID NO: 50717 - DNA, 597 bp, Acinetobacter baumannii
atgtcacattcttatcagctatatagcgtgctttcatctctaaaaaaattacataacgacacgacagtaagttttttagagtttgtcaaatcaaaaacaggatttgaagttgttaattcgcaagtggcaaatgatttaaaaaacgaacaataccattttggagtttacgacaaagggtggattgagtttgacgaagattcgcaaaatgttattgacgtaataatgcgattgaaagctggcccagttccaatcgtggaggctttaacgctggaaaacgattgcatgattgggcaaacgtggtttccaaaaggaactcctgtaataaatctaattaaacacgctgaaggcgtctataaagctgaagcagtggcgcaaaactctaagatcgaatttggcaccgacgataacgaaatttggtgggcgcatgatgtgccattttacggtcgggttcagcttcaaagatttgtagaacatggcgtggtcgaatgggacattcatttcaatgattgttggcaagggccttttgattcaaaagtaagtgcaattcaacacttagaagaatgcatagctgaaaaacgcgaggaggaagcggtatga

SEQ ID NO: 50718 - DNA, 1203 bp, Acinetobacter baumannii
atgacacaatatcttcgccaaaacgacacttatcacttagctccagatgtaagtggcgtcgctattgatagcttgcctgctggtttttaccgcttatgttttcatgacaagctcggtttctaccttcaaatcaccaacccgcttacattaattccgaaagcgtatggtaacgcctaccaacatcaagaccgcatcatggaaaccttcaatgagcgcacagaaatacccacaactatcatgcttgaaggttttaagggtacaggtaaaactctattagctaaaaagctatgcgttgattttgtgaaaagtggcggtatttgcattttacaaagtgaagcctatgtcggtgatgactacaaaggcttccttcaaaaaattaaccaacaaaaaattgttttcattgatgagttcgacaaggtttacaccaagccagaacaagttaatgacatgctaacacttcttgatggcatgtacccaatgcacacacttttcattctcactatgaatgcggattctcgcagctcgcgctatgagtacttccataaccgtccgggtcgtgtttattacaacatacactttggcagcatcagcgagtcaaccattcgcgaatatgcaaacgacgtactaataaacaaagatcgcatcgacgaaattcttgaatacgtagggcgtttctcaatgttcaacatggatatgttgaccatcttaattaaggaaattaataaatcagaaggtcaaaacatttcagtccgcgatctaggcaagtttttaaatattaaacctaccatttcttatgatgatattcgccttcaaaaagaagcaacctacaaaggttatgacgtttcggattcatttgacttcacttactttgatgcggactacatcgaacgaatgatgacagacgatacatttgagttccgtttaatgattcgacctaatggtttccgaaaaaccgacgatggcaaactttgggaagacgaaaacggcgatgctaaacagtgcatcggctttatggctgaagataaatttattgagcttgagccatatcaccgcattgttaaaccaaatgacgtcaagtgtgagtttgaccctaaaacgcgtgtctttaccttgactgacaaggagcatgacgtggttgtgaccgttcaggcaagtccgaccttcagctaccttaacaaagacgaacgtgtagttaatttctaa

SEQ ID NO: 50719 - DNA, 408 bp, Acinetobacter baumannii
atgaacatatgtatagatcagtcactatttagtgattttaatgactctcatattatttattctgcaatgactccgcgtgaagagtttcgtcttaacggatgcttatgcctcgcaactcaacaaaagcttattgagcgggttgaagacttagaagacgaagtaatcgataaagacgcgattgaaggctacttaggcgaaatcaaaggaaatttaatcgattcgagcgatttgaaacgtctttcagaagagctttttgcactgcaaggacacttgcgcggagaaaaccgcaaacgaatggctgaagtaatggaagcattcactcacctacgtcatgcggttgaaggtcaaagcgaatatgcatgcgagcaaatcaaacatgtggtcgaggaattaaagctggcaaagtga

SEQ ID NO: 50720 - DNA, 387 bp, Acinetobacter baumannii
atgattaggagggttcgccttcctcaaattcgggtgccaattatgaatttaagtgttttgaagaaattatctacagaggcccttttccaacttcaagaaggggtaaagcaagaaatagaatctcgtatagattacagtattgaagttgggcgatatgcaacttttgttgattcccgaaagggcgtcaatcgacgagttcgcatcaccaaaataaacaccaaaacagcaacggtagttgaaacgagcgatagtgccaatccgggtcttgagtggcgcgtaagttttgactttttaaatgtagagggcgttcaaagaaagaaccctataacaacctctaaagtcgaagcgccaaagaaaatggtcacaaacacaaagaatgcatggtaa

SEQ ID NO: 50721 - DNA, 939 bp, Acinetobacter baumannii
atgacagctcaagcaaacattcaacaagatgaagtttttcttgaacagctttttgatgaaacaactgatttaactgatttaatcaatgttcttgatggtcaaggttctacagctcaagcgaccgaagcaagcatagacgacgctgctttatccattgaagatcttcaattagatgcatctttagttgaagaggttgccacacaaacagaagttaaaactgaacaagtagcgactgaaccacaagatactctcgaaggtctgattgaagatactgattttgatgcatccgcactcgacttatctttagcggttacagaagtttccactgaagagaagaaggtcgaaaagaagtctaaaaagactaaaaaagagactgaagccgctaaaaatcaagagaatcagcgcgaagcttcaccgtctacttatcgaacaacatatcaaaatagcaaagtatcggctgttttgttgtctcgattaggcgacgatgcttatgaccaccttctacttgaagttgaagatgctgaattacttgaaaaagatccagaagctttaaaagctagacagcaagaattgttaaacattcttaatgcgcgtccgggttcaggttcgtctattacgactcaaaagaaggttgctgaaaaaatcgttcaactcttcacatggttgaagaatggcggtgaattaaatgttgttatgcatcgtacttttggcgttttgttgaaagacggttatatcacaacaaagaaaacgggtaacttgtattcaaatcttcttgcaaagccttactctcctggtactgcaagcgcacagagcggtcagatgatgcaaatgttaccgatgctcaaaattgccttgaaagatgaacagggtcgcttagtgcctaatccaaactctcttcttttgatgaagatcaaaagcgaattatttccagagctttaa

SEQ ID NO: 50722 - DNA, 711 bp, Acinetobacter baumannii
atgaacatttttattttaaacgatcaaagcgtgaagacggttagaaacactcatagcgcactcaaagggaaaaaattgattgcgcgtggacagttttcaggtgtctacgaaagcggtaattcagatacggttttaaaactaagtattgacgctatgggttatgagtcattgtttggcccctactctctatctcgcgagagtaatcatttcactcggcctatccgggactttggcaaagtgggtgaatttattgttggcaaaaacattagcaagactgctattactcaacccaaaaccatgcctgtaccgatgtacttgtatgaggttgaacgacttcataagctacctgttaaggggcctaatcgctcattggtgaatcgtatttgtaaaaaattacgcattctaaatggttgtagctttattgatgaccgccatgagcgaaatatcacttgcttaatggatttggcgtttgatgaccatttaaaagatcacccatcgcttagcatgagttttttaacaatggctaaatttttgaagcaaaattccgatgcatttcccgacctccacacgggtaatttcatgcaacgtcaagatggaacgctagtgatctcagatccagtaggctcaacaagcatttacgaatgctgtaatacgtttaagcccgtttcatatgatgctccacttaaaaacgaagagttgaattgcgcttag

SEQ ID NO: 50723 - DNA, 252 bp, Acinetobacter baumannii
atggataaccttgattctgaagcctctcgcatgtcgcccgaagagttaaaacaggcaggtgagatactttacggcactcaatggcaaacagaattggctcgcgcgattgatgtggactcaagcagagtaagacaatggatggcggaagaacgccctattccaataagtttgcgtagtaaaataattctgctattaatggaaaagagtagaaaatcagttgcatatgcagattatttagatcatcaattttga

SEQ ID NO: 50724 - DNA, 534 bp, Acinetobacter baumannii
atgattttacgtggttttgataccgagactacaggtttagagcaagccgacggtcatcgcattattgaagttgcaattttgtcttatgactcagacacaagacagctcgttgataaatacgtacaacgcatcgatccagaacgaccgatcgaccccaaagctcaggctgttcacggaattgattatagccagcttttaggttgccctaaatgggaacaagttgcgccaactgtgcatcaccttttaagcacagctgacgtagtaattgctcataacattgactttgatatgccctttacgcaagcagagcttagacgcgttggatccttattaccgcctgttcgtcagttctgtacgatggaaaatggtcgatgggctacttttgatggaaaatcaccgaaattgggcgaactttgttttgcgctcaatattgattatgaccccaatgcagctcacgcagccgactatgacgtcgatgtaatgatgcagtgtttctttgcaggcttagatcgcggtttttataagattgtgtga

SEQ ID NO: 50725 - DNA, 276 bp, Acinetobacter baumannii
atgaaaaatatagcaagaagtcacttagaaatgcttcaggaaaccgaagtttggtttgaagacactttaaatcgcttaactggcattgttcaaagcgaagaaggtcaagagccaaagcatattattctcaacaccggcaaagagaagattttgcttgataatccagatgaaattcgaatagctcaaaacactatcaaggcagttatcaacactttgcagtttactttcccttattcaactaaaaatacgattactgaggaaggcgtttcagaatga

SEQ ID NO: 50726 - DNA, 822 bp, Acinetobacter baumannii
atgaagttaaaaagctcaatccttatagctctcactgtcggcatgacaatggcttttactggttgttcaaaggttgaaactggtcacgtaggtgttgaatcggttttcggcaaaatgaaaatggacgaattggctccgggtgtgtatcaaaccatcactcgtgacctaaaggtaattagcgtccgtgaaactaccgttccacttgaaaacattcacccgaagacgaaagataatgtatcgatgcaagaagtcgatatggacattcgttacatgattcagccaaataaagtcgctgacacactttctaaactagctggtgacttgggggcaaataaagacggcgacacagtggtgggcgaacgctttgttaaacgccatgcacttgaagcggttttcaaagcaacggcaaaatatgattccagcgaaattcatctaaagcgtgatgaaatcgcggctgatgttgtagcttcattacagaagtctttagataaagaaatgcccaatacatttaccattgctggtgcttctgtccgcgctcttgttactgacgaaaaattggaacaagcaattactcgtgccgctcaaattgaatttgatatatcacgtaaaaaagaagagcaacaccttgcagatgctcaagcccaagttactttaaccaaagctcgtgctgaagctgaagccaaccgtattgttggtgcgtcactcacgccaatgctaatcaaaaagatggaaattgaagcacaacaagcctttgctcaacaaggcactcacactgttttactcccttcaaatagcgcaactccactcgtaaacgttaagtaa

SEQ ID NO: 50727 - DNA, 234 bp, Acinetobacter baumannii
atgccacgtattacggtacatcaagcatctgacggcacacttcaccgcacttacgatgaatatgtaaagcatgaagaagctctccgtattaaccatgcgtatgtcgagtctgaattgcctgctttcattgatgatgtggatgttaaatcgttcattcttgctaacaagaatgaaatcgaaaagatcatcctcaaatccaaagttaaacgcaaagctcagcctaagaagaaatga

SEQ ID NO: 50728 - DNA, 717 bp, Acinetobacter baumannii
atgtgccttcactgttttgcaaaggaaattgaaaaatctggaatgggccaagtggtagttttagaaatgaccaaagatggtttacgaccagctgaactcaatccttctactgataaagccgcgacaactgaaactaaagcagctgcaaatcaattttttgtttcgaatgctaacctcgctgctggccctgtgggtggagctggagtgcaaattacagatagtggggtaatttcaagtttaggtcttctaggcaaagcaacaaaagctgaaggcaaaattagtacagcgggagcaaatcaagcacttccaaaacatgcaaattttgtggcttcaggtggtaacaaaatccaagcggtaaacatcaatacgttagatcaagcatatacagcgagcgaaaaaatgcatcgctttgtagtgccaaatcttgatgagttattacttcgcacgcaacaaagcgtgggcgttttgagcggtttaagcgtagctttaaacaacggcgacgaaaacaaatactcggaagctgaatatatcaaagagttaattaagttgaccgctctgaatttcatggcccttcaggaacgcggtgttgctttggaagatgttgttaagcaaatcactcaaacttttgaagacatgggcacccaaacccttcgtgatgaagtgaccaactttcttaaagaacgtggtttcggcactgatctgaaggcaggagcttaa

SEQ ID NO: 50729 - DNA, 324 bp, Acinetobacter baumannii
atgaagcttgattggtattggacccaaccaaaagaaaaaattagtcgtttagttgcgtctcaagcgattaaatatttaacagaacatagctttaacagtgatgatgctaagttttactttcgcgaatttcgcgatgggttctattacgatgctcaaaatgatctttggatgcttgagtttgcgggtaaaacaaagtgtttgacggacggcgattgggttttcctttcgtcaaacaccaatgtcatacacgagaatcccgaagcacttcctcttagagaggttgagcgcattgctctgcggatgattacgatcgcaactgattaa

SEQ ID NO: 50730 - DNA, 459 bp, Acinetobacter baumannii
atgctgcataagtgccctaatgctggttgctcaaaaaccttctttttcaaacgcaacatgacttgttcaaactgtgacggaagtaaacgttcgcaacgtctgcatactgctcctgcgtcatcaacacgccatacaagcaacggcctgtctcctgaagccttgtatgcacagcaaaacgctatgcagttaaatcaaacactcatggccctagaaagctctgacagctcgaaagagtgcaaatcaagcgatgacagtcatattcgccgtaatcaatgtgaagacacccctacccgcatagagccgtcatatacgcactctcatagccatagtagccatgattatagtggtggttcttcctcttcgtcgtctagcgacagttggagttcttcatcgtacagctcagacggcggctcatcgtatgacagtagcagttcatcatcttcggatagcagctggtag

SEQ ID NO: 50731 - DNA, 492 bp, Acinetobacter baumannii
atgactgcatatacagcacaacaaatagtgaagtttttaattttagaagaagcgattcagctctatgacgaatttcacgaagcttcaatccgtcttctgaatgaagcaaacgccacagacactcccttgccagaagatgctgagccagatgaaattttggcattaataaattcctcaaacgtagattcaatctatgacaccatttacgcagagattgaaggcggagaggatgaagacgcaatagagcgggctgaaactgctcgcgaaattattcgtacatgtggcgatttacacgattacataccgacggtaaatacatcgcctgaacttgatgtaacaacgcgtgcaatcgagcttaatggacagtgggtttgctgggatgttgatttagatgacgaagagtctgaatggatgcacactgcccgtttagcaaaaatggacgaagcaacaggtaaacttgttcttattgaaggagaggacaatgctgcataa

SEQ ID NO: 50732 - DNA, 855 bp, Acinetobacter baumannii
gtggtgaaaaaactacgactatcaattaaagatcgcctgaagcttttgcgaagagcggtaattgtagcgttcatgccaaacgtcagacaggtcaatgtaatttggcaagaagaagtaggcgacattaagcaacacgccttctttgtggatggcattaacccaactgatatgacatttttgtacttctcttacgtggcgggcaatagtgacacttttgaggatttaacaagacgcaccaagtttttgcttaataaaattgcagtagcttatgcgctctataacaaggtgtcttcaaaatctattcaatacacacctgagccatttagactggttagaaaacttaaccttcatttgcttgagcgtaactttgaccctgatttatacgagaacatcgttttaaatcacgaagaaatcgtcctgacggtgtatttgcattgcttaaacggtaaattagttggctatcaacaataccgcccagactgcaatgataagcgaaccaataacccaaaattggctcgttacttcacttacaagactcctggtaatattgcggtttggggcttggaaacattggactacagccgaaagcgtttatacatagttgaaggtatttttaaagcctctgcccttcacatgcttggacataatgcggtggcccttttaactggctctccttcaatagacatgctgaattggctccgttcattgccttttgagctatacgctattggtgataatgacgataccggcaaacgcttagttcgtgcggtgggtaatggcacatgttttgaaaaagatgtggacgaatactcattagaagagttggaatcattattggggtcttctcaaatttaa

SEQ ID NO: 50733 - DNA, 366 bp, Acinetobacter baumannii
atgctcaaatctgaattaaaagtcggacaaacggtatgtttggtgccaagtttttatattggcagaagtttaacccccatcgaagttgaagtgacaaagattgctagaaagtacgcctacacttctcataaccatcacaaaataattttgacagatggcactctttgtactgaaaaagactatacgggactttattacatcgtatggaaaagcaaggctgattacgaagagcatgtacgacagcagcacttcattggcgaagttaggaagaaatttgccaacgctaaactctcctattctgacgctttagagttaaataaatggtttgaggaaagaagtggtgaaaaaactacgactatcaattaa

SEQ ID NO: 50734 - DNA, 276 bp, Acinetobacter baumannii
atgagaaacgcattaatactttttctggctgttcagttaagcgcttgtgaggtttctaacacggcgttcaacgagtctatagtgccacaaacccaagatttcaacccttcgcaacactgttacgtgatgcgttatagacaggggctagtgtggcgcgaggcaaacatagtttcagaaaccgagcttgattatcaggaagctcaggcgaaggttgaaaagttagtgggttggtacaacgacactggcgaaaaatcagagtacccatgcaaattttag

SEQ ID NO: 50735 - DNA, 423 bp, Acinetobacter baumannii
atgagtgagtttaaaaatttccaatcatgccccgtttgccgagagcagactgatcaatgcttgtcgtgcgcctcgtatgttgtggatggcgaacgtatttattatgaaaaactgaaagattatggcgcaactcaagatcatgaattgcgttttattcgccatattcagaagcatagaacaacggcattttttcataatggaaaattgtatataccaagccgacaaggaagatcagttcctttagcaattggtttgcaatgggaggcttggcaggaacaacaattaaaagtggacgaacttcaaaatcgtattaattcggcgcttgcaagggctgacatgacttgtattggtcaatccatgttttttaagcagtttgatgacgttattgcaattttgagaggagagaaacgcaatgatacataa

SEQ ID NO: 50736 - DNA, 204 bp, Acinetobacter baumannii
atgcttgttgatgagcaaatcaaaatgcttgaaagcggtgactatgttctagtgcctaaagagcctacacaaaaaatgcttaatgctgctcactgctacatgaacccagttaaaggaagtgatgtgcatcctgaaacaaatagaaagcgcagagagatgtacaaggcgatgattggggcatttaaaggagccagccatgagtga

SEQ ID NO: 50737 - DNA, 237 bp, Acinetobacter baumannii
atgaatcaagaatttttgaattgggcaaaaaagaatttgaattacacaggtgtagatgcatttgaagcgggaaaacaaagtcgacaggctgagattgatgcaaatgaactaaagctcttaaagcttagtgaagccatctatgcgtgtggtgatctacgtgaatattctgatgatgagctattaggcttctacagggtcctcaaaggcattttggaggataaagaccatgcttgttga

SEQ ID NO: 50738 - DNA, 309 bp, Acinetobacter baumannii
atgaatgctgttaaatttattcaggattttggacttaagaaggcgagagaggttattgaagccgcaatagatggttctactcatgtcatctataagcaagcggacggactcattaatttgaaagacctcaagcgtctagtggagtctttggatcgtatagcgcagcttggcggattgtcgaaagcaaaagatcacttggcttatttgatttcgttcggttctgagtttgctggagtaagcaaagacgagatcaaggaattgcagcaagacgtggctgtccacgaatcaatatacggaggcggggaatga

SEQ ID NO: 50739 - DNA, 396 bp, Acinetobacter baumannii
atgatcgttattagatttacaaatcaccaatcgcctttggggataaagaaaggctggactttgggtgatagaaaaaagccgcaagaccttcttttaatacgcattccttttgtagaggtcattcatacaaaagaaggtcgtttatttgacttccttcgcatgtgggttaatgaagatctcagctggcacaaattggttcgtcgtgagcgtaataaaggttacgcacgcggaaaagccgaagggcttaaaaacgttagagacgacttgcagtattggaaagatgcatttgacaagcagtacgcaaaaactcgcgagattgaggctgaaaatcaaaccctcaaacagaccattaaaggattggtcatcataaagggtgacgaaaatggcaaagcatga

SEQ ID NO: 50740 - DNA, 171 bp, Acinetobacter baumannii
atgagcaagatggcttggtttttattgggattcattgttgcgtggttcatgtgtcacaactacacacactcaatgatcgcctctgaatgtgaacgtctaggcgggttctttgtaggtaagaaggtgtttaagtgcatcgcggtcgagaaacttgaagaggaaaagaaatga

SEQ ID NO: 50741 - DNA, 204 bp, Acinetobacter baumannii
atgagtgacgcagcggtccaacaattacaagcgcaagtaaccgaccttactgcaaaagtgacagcgctcacaaacactgttacggcgcagggtgaagaaatcaagcagcttaaacaaagtgctgacgcgaatgcgtccgctattagttctttaagcacctcggtttatagcttatcgaatcgtgtaacgcgtcttggtggctaa

SEQ ID NO: 50742 - DNA, 684 bp, Acinetobacter baumannii
atgtttggtctttgtggaagtcaccgtactggtaagacagcgcttgctcaagcatacgcggaaaagcacggtgctatttttctgaaaagtgacatcacaggatggcaacgtgagattgggtttgattcatcgaatcagacctactcattcgatgatcgaatgaagatccaagagcatatgattgcccgccttgaggatttatacgttgaacacttcatgggcgagagcaaactcgaaccagtcattacagatcgcacgcctattgacctgatgatgtacaccctcgctgccgtgacagacggtttaagcgatgaacagtctcagcgcttggaagcgtatttgaacaaatgctttgaagtccaaaacaaatatttcacgggggtaatgcttgttcagccgggtattcctttggtcaaaaaagaaggctcagccaagtgctgtaaagctttcattgaaaagctaaacacgattgttttgggcctgtttatggatggtcgtttacgagtgccgcattggtatctcaaacgcgacgtccttgatcttaataaacgtatttctctttgtcattcatgctggcacaaagcacggatttcgctaattgccaaattggatgcaaaggaaacagtttcaagcaagcctgattccatgaatgggattgagtttgccactgaaacacgccagtag

SEQ ID NO: 50743 - DNA, 459 bp, Acinetobacter baumannii
atggttccagtggaagtaaaaattttagatgaccgcttattaagtgagtttggtgcgcctgtatatgccactcaaggctctgcgggtttggatctacgtgcatgccttgacgctgaagtaacgttgaatccgggagaacaattactcgtatcaactggcatcgccattcacctaaaaaacaaaaacttggtgggcatgctgtacccacgttcagggctaggcgttaaacatggaattgttttagcgaatggcactggcgttattgatagcgactatcaaggtgaaattaaagcgtgtctccgcaacaacggcgacaagccatttgtattaaagccgggtgaacgcattgctcaatatgttgttttgccaacattccaactagcgatgactgttgtagatgaatttgattcatcaactgaacgcggtgaaggcggcttcggaagcacaggtacagaataa

SEQ ID NO: 50744 - DNA, 294 bp, Acinetobacter baumannii
atgagcttttggaaatggttattcggctcaaatgagtcaagcccacagccacagaaatcggtcgacttgattattggaaatatcaccaagcaagttgaagaactaagcgctttggaagaacaaaaacttcgcgaagcaaacaatcacggcgaagaagcagcaaaaatcttattcaaacaagatgaagcaaatgccgaagctgctcgcgctcgtactgttggcgcagctttaagcaagctaatcacagcgcctcaaaatttaaccattgaagatgtaaagaaggaaattaactga

SEQ ID NO: 50745 - DNA, 861 bp, Acinetobacter baumannii
atgcaagtcaaaattattgcggattcttgcagccatgaaggtaagcgaattactacctttcagctgcgttatccgcgctttattcacagtgaagtgatgacccaccgcgtatttagtcgcaatgcttcaagctcgcgtgccatccctgttatcaagttgattaaccaagttgaagcaaatccggcaatgcctgttcattggggtaaaaaccaagctggtatgcaagcttgggaagaggtgaatgagtacaaaaaggagcttgcgcgtgaagcatggttggaagctgctaaaaatgcagtaaataccgcacgtttcatggctgacgatcttggtctgcacaaacaagttgttaatcgcattttagaacctttccaatttattgaagtggttttaacagcgacaagcttcgataacttttttgagctacgccatcacgaagatgcggacccaaccatttttgccttaactgcattaatgaaggctgcgctagaaaaatcaatacctgtcttattggcccctaatgagtggcaccttccgtacattctggatgaagaacgcgaaaagtatccaaccgacattttgttgcaagtgtcggcggctcgttgttgtcgtgtgtcctacttgcggcatgacggtaaagcgccagacatccaaaaggatattcgcctttgcgaaaagctagtgggttctgagccgctacatgcctctccatttgaacaccaagccacaccagatattcgcaatccgtggttagtgaagttgttcaaaggcgaatggcaaaacaaacatctacatgggaatttcgatggctttgtacagcatcgaaaattaatcgaacttcaatttaaggaagcagcatga

SEQ ID NO: 50746 - DNA, 363 bp, Acinetobacter baumannii
atgaaaagatttagcgagtttttagctgagcgtaaaaacaaatctaaaagcgaaagaattttagagcttcaaagagtttttaaatcaactcctgaagttagcgaagaagagaaggaacgcttagttaaaagatatttgtcacaacacgccagcattaaagaggcggttgaagttatgacgtctttaaagctttctcaggagtatgcgaaggttatggatgaaattcataacgatgtgttggctcgcgcggctgtagcaatggagttaaatgcatctcctgcttctgagcgtttggtgcgcggagttgctcgcagtgttattcgtgatcatcacgaggaactcgaacgtctggcttataagtaa

SEQ ID NO: 50747 - DNA, 420 bp, Acinetobacter baumannii
atgtatgatccagcgccattaattaacgcaacgcttgttgaagcgattcatagcgagattttagacagcgtagaaggaggcatgagaggtccaactaattatggtcttctcgaaagtgctttaaatagagttcagcagtatgtttattatgacggtttgaatgacatttatgagattgcggcatggtatgggatttctatttccactcaacatgcattctcagacggcaataagcgaactggattaaccgtaatgttgacttaccttcgtatgcaaggcgtctatatcgagcctaatcaagatcttgatgacatgatggttgatattgtgcaaagcgcacaatcaacagaagatggaaatcataaagagattgctgaggctttagctgagtatctctatcagtatgttcatcagttatag

SEQ ID NO: 50748 - DNA, 993 bp, Acinetobacter baumannii
atgacatacgcaaaccgaattaatgatcgacgcttaattttagggccaaaggatgaccttatggcgatcagcccgatgaaacacacatgggccagagacattcatcaacgcatgaaggataacaattggttccccgaagtggtcgacttgagtaatgaaggcatttgctatcgagacaagcttaccgaagcggaacgtcgattgtatgacaagagccttgcgtttttatcgaaccttgacggcattcaatttcacaatatcaaccaaaatattgcaaaacatgtgacctcaccggaagttgccatatgtttgtcccgtcaagcttgggaggaagccaaccatgtagagtcttatgccaaactcatcgaaacggtctcagcggacccaatgagtgtctatatgacatttgaacgcgatggtattttggcgaagaaaaacgagtttattttgcgtcaatcacgcatcttgggagatcagttctcagcgcgtggttttgcccttgcttgcatttctaacgtcatgcttgagggcgagtatttcttctcaggattcttaggattttatctacttgctttcaaaggtaagatgttgggttctgcggatatgattcgctatattcaacgtgatgaagaaggaacgcatcttgatctgttcttgaacatgattgaaacattgcgtattgaaaatcctgaagtgtttacttcttcattttgggaagatgcggctaaaatcattgatgaatctaccaaaatggaaattagttggggtcaatatattcatcaaggcgttaccaatccagaagcgattgaactgtatattaaatatttagctaataaacgcgccgctcaaattcgagcgccatttgtgccttatcctggtgtggtaaatccgtttccgtgggtagaagagttctctaagcctaatacagccgaaaagaatttctttgaaacacgcgtaacagactacaaaactggcggtgcgttagcatggtaa

SEQ ID NO: 50749 - DNA, 444 bp, Acinetobacter baumannii
atgagttatctatttttatcgtgtacagagaaaacgaacttaggtggcgtgtacaaagtgattgacccatcggtgcgtcatgttggaacaaactatcacttacttaaagaggcgttctatgttgatcagctatggattattaaagccgcagctgttcgacaaaaatggatctgtcagtctcaatcaactaacttgttcgctaagcaaggaacaactggtagagacttagacctcatttacaccgaagctcaccgcaagggtttgaagaccacttactacctacgtggccaatcagctaccaaagattcagcatcggcaaaagatgacgtcattgaagcattgaaatcagcagtggctcaaggggcgacattgagtgatgcagaagctcaccaacaagccaaattgtgttcgattttcgagcctgattgcgaaagttgccaataa

SEQ ID NO: 50750 - DNA, 345 bp, Acinetobacter baumannii
atgtctttgccaaactgtccaaaatgccaatcagaatatacatatcaagacggcgatttattaatttgtccagaatgctcacacgagtggaaagaaggggaagctttagtaactgaagagcaagaagtgattaaagatgctaatggaaatgttttggcggatggcgatagcgttactgtaattaaagatttaaaaattaaaggttcttcttcagttgttaaagtcggaacaaaagtaaaaagtattcgtttagttccagatgcaagtgatggtcacaatattgactgtaaaattgatggtattggtcagatgaagttaaaatctgaatttgtaaaaaaagcttaa

SEQ ID NO: 50751 - DNA, 885 bp, Acinetobacter baumannii
atgcactactacgagcgaaatattggtgattattaccgcaaggctggaagattaaacattttgcagcatggggtttataacttgctcatggatgcctgttacgaccgtgaatcgttcccaacgcttgaagaggctattgaatgggtatgggcggaaactgaggaagaaattgacgctgttaaatttgtacttaagaagtttttcaaattaaatgaggatggggtttatattcaaaaccacattaaagaagagcttgaaaagtatagagccttccttgctaaacaagcagagaatggcaaaaaaggtggtcgcccaaagaaaaacccaaaaaatgattctggtaataatgggaatgattttgataattctggctttaaaaatgaaagccaagacaaccaaaatgaaagcgaattaaacccagaaaaacccaaagaaacccaaataaagcctaaaccatctaaccatctaaccaacgaaccatctaaccaagaaaataatatatgtccgcctaacggcgaacctgtacctgctgaaaaaccaaaagagaatttcaaaaatgagattcaagagattttcgatttttggaaagttacgtttaacaaaaacgatagaaccgttctaagcaatgatcgcaagaataagatcaaagctcgactcaaggaggggtatacatcccaagatttgaaacaggctgtgataggttgttcaaaatcctcatttcacattgagaagaattttactgacattgagttaatttgcagaagtgcaaagcatgtagatcaattcttggttaatgctggtagctcccaagttcctgttgagaatggtcagcaaggagaaacagcaccacctgctcaatacaaagtaattgaagggagatggtaa

SEQ ID NO: 50752 - DNA, 828 bp, Acinetobacter baumannii
ttgattaagcatataactgaagcaaaacggttgagtggagataagacttacaaaacgcaagttattgattgggggcagggtgaaaatgacgccatttatactgttcgaaccccctatgcggtttataagtctgaacttgcacagctgcagttagatgtaagcagtgatattaaagaaatcaccgggcaatctgaaacagcaccatttattacttaccagatgtcatatgctgcccgcacatggcctgatattgcaaaagctcaattagatttagttcgagaaagcccgtattttatgctttcaacacctatgtatcacatgccatatgcagaagacagcattcatttaacaaatgttggttacaagtggcttggtgcttatgttggtcgagcttataagcaatatatgattgatgggcgaaaatcagatttcatcaacccgaaagtagctcaacttgtaggtgatgaaatacacattcattttgatgtgccgaaagcgccacttgtgcttgatacggcaactttggctgctactacagacaacggctttaaggttttagtaaatgatactgcggcaacgatttccggcattagcgcagaaaatgacaaagttattatcaaactgtctagcccacctgcaacaggtgcatcggtaattgttagatacgccctagattacctaggtgctggattatcaatagatggcggtgcttccggcaatctccgtgattcaacaacagattcaattgaaattgcaggtgtagaaagaccgctatatcacgtatgcccgcattttgaattaactgcatttacagataaaggaatttaa

SEQ ID NO: 50753 - DNA, 1113 bp, Acinetobacter baumannii
atgacgcaattacaacaatcaattaaatttgcttattgggtaccaaatgtaagcggtggccttgtcgtaagtaacatcgaacagcgtacagactggagttatgactacaatgttcgacttgcacaggctgccgaaaacaatggttttgaatatgcgctcacccagattcgttttacggcagggtatggggcagaaaaccagcatgaatctgtgagtttcagtcatgcattacttgcaaaaactgagaaacttaaagtgattgcggctattctgcccggcccttggaaaccggcacttgcagctaaacaactcgcaacgattgattatctaaccgaaggccgtattgccattaatgtggtgagtggttggttcagaggtgagtttgatgctattggcgaagaatggcctgagcatgatgaacgttatgtccgctctgaagaatttattcgcacgttaaaaggaatctggactaccgataactatagtttcgatggtaagtattaccaatttcagaactacactcttaaaccaaaacctctgcaaaaaccacatattgaagtctttcaaggtggtagttcacgtgccgcacgtgacatggcctctcgtgtgtctgactggtattttaccaacggtaatactgtcgaagaaattcaaaaacaggtcgaagatatccgagccaaagcaaaagccaataaccatcaagttaaaattggggtgaacgctttcattattgctcgagataccgaagaagaagctaaagcagtacttcaagaaattattgataaagccaacactgaagcagtcaacgcgtttggcgatgcaactcgtgaagcgggtgcggcctcaccagaacaagaaggcaactgggcaaaatcaacttttgaagatttagttcaatataacgatggctttaaaaccaatttaattggtacacctcagcaaattgcagagcgtattgtggcgcttaaaaatgtaggtgtcgacttggttctttcaggtttcttacactttattgaagaggtggaatactttggtgaaaaagttctgccgctcgttcgtcagttagaactacaacaggaaaaggaggtagaaattcaagctaaatcagcctaa

SEQ ID NO: 50754 - DNA, 582 bp, Acinetobacter baumannii
atgaaagaaattactcttggatgtaaaagttatatggatttgataaaaagaaatgttgctgaattttcaagaaatagcattattatttttgatggggacgagaaagaaggaaataaattcaaaaacactctttgtcttccaggaaccctacctccagatcaactcttatttgattttctttatagattacctgccgatgatatgtattggaaaaataataaaattagcttttctaaaccagtatttttaagaatagcctctccaatattggaattttttaatcttgaccaaactcctacggaaaattatgacttagaaactatcattttagagaaaagagcttcgagtagtgagtcaggagggaaagcgagagaaaaatttaaaaatttctataaaaatgaaattattcaatctctaatcaaaggaaagattagtgataatcctttcagagtcatgattgattataatcctgagaaatataatacttttcaggaagattttaagaaaactcttttatacgtgataagtaccaatcatcctactatgaaagatagtataaaagacttcttaaaaattaagtaa

SEQ ID NO: 50755 - DNA, 1143 bp, Acinetobacter baumannii
atgacttcaaatataactcaattgaaaaaaataaaagttaatcattttcgtggattaaagaatattgagataaatcttggcgatagattaacagttatttgtggaaaaaatggtacttcaaaatcaacaattttaggaatgattgcgcaaatttttaattttgataaaaatcattttgatggtagtgatattaattttaagacattggctggtaagaattttaaatcgagttttagagaacattttagattttcaaaaacttatgacttacctggtactatggatgtagagtttgaaatctttgatgcatattttaaaaaaataattccagatttaaaattacgtctttatggttctgaagataggcctcaatcaagaccagttgtaagagataatttaaaagttgatgctgaggacaactcgagcagaaacgttactcatcctcttatttatctaagtttaaaaagattaatgccaattgcggagagaagtaaatatagtcttaattcagaagaggtagaatattttacaagaatttctagagagttcactatcactaataatcgcttgttagggaaaattagtggaactactgtatcaaaaacgactggtacaatcgaatctgctgtagttcatggaaataattatgatcatgagtctgtttcggttggagaggataatactggtcaaatcttaatggctcttttttcatttcaaaaattaaaagaagaatatgttgattatcatggtggaattctcctgattgatgaaattgatgcaggcttatttccagctgcacaagtagaattaataaaaattctagaaagttttgctaagagattgaatttacagataatttttacaactcattctccgatagtaattcaaaatatttttgaaaaatctaaatatgataaatctaataataaaactatttacttaactgatacttatggaggtgttgaagtagctgaaaattattcttgggataaaatttatgcagatttgtttattgatacaattcaatttgatgtagaaaaaaaatacctaaaacaaacatttattatgaagatgatgaggcttatgaattctttaaagctcttattagagaaagaaatattaataaaattatcgatccaatga

SEQ ID NO: 50756 - DNA, 846 bp, Acinetobacter baumannii
atgagcatacctcagtctttgcttgaacagtcaattcaaatcaatattcaacaagcattacaagaagatattggggacggtgacattaccgccatgctcacacctgaagatgaacaggctaccgcaagtatcattagccgtgaagatatggttttagctggacagccgtgggtgaatgcgctcatctcagcgtatgacaacactgtacaggtgacttggttaaaacaagaaggtgaccgtgttgctgcaaatgaagcctttttaaagcttgctggttctgcacgtagcttactgactgtagagcgccctgctttaaactttattcaaacattatcagctgttgcaacaaaaactgctgaatatgttcagcatcttgaaggtttaaacacaaaacttctcgatacacgtaaaactttaccgggcttacgtattgcacaaaaatacgccgtaaccgtcggcggcggacaaaatcaccgcctcggtttatttgatgcattcttaattaaagaaaatcatattatggcagcgggcggtattgcccaagcgatagcaaaagcacatcaaattgcgccgggtaaacctgttgaagtcgaagttgaaacttgggatgagctaaaccaagcgcttgaagcaggtgcagacattgtcatgctcgacaattttagccaacaacaaatgattgatgctgtaaaacacgtggcgggtcgctgtaaactcgaagcttcgggtaatatcactattgaaaacttacgcgaagtagcgactactggtgtcgactatatttctatgggcgtgttgactaaagatgtcaaagccgttgatttatcaatgcgttttaatgcctaa

SEQ ID NO: 50757 - DNA, 1215 bp, Acinetobacter baumannii
atggaccaatctactacctctaaagcacgacccatgacttccacacaagggagctggtttgctattttggctgttgccatcgcagcctttgccttggtaacgagtgaatttttacctgttggtgtcttaaatagcgttgcagccgatttacacatttctgtaggtacagcaggtcttattattacagtacccggcattatggcagcgattgcagccccactattacccgtttcagtaaagcaactcgaccgtcgttatgtgcttattttactgactgctattatggtgattgccaataccattacggcttttgcagaaaactttcatgttctattgttgagccgtttgattttagggatttcaattggtggcttctgggcaacagcaattgccttaagcggtaagctcgcacctgcaaatttacctattgccaaagcaactgctgtagtaatggctggtgtaactttcgccactgtactaggtgtaccgattggaacatggttaagtgagttttatgggtggcgcagtgcctttggaattacagctgctatcggtcttgttgtattagtgcttcagcttattttcttaccaaaacttttaccagagtcagcaatacatattcgtgatttacctgcattattacgcacacctaaagcacgtagcggcatgcttattgttttattaattggacttgctcacttctgtgcatatagttatttagcccctttctttaaaaatgtagccgggtttaatggcacaactattagctcattattattgctttacggaatagccggtatttttggaaatgcatttgcagggtacagtggtaatttaaatgttcggtataccttagctttcgttggaacatgttttgccattgtattctttggcttcccaatctttgctatccatgagtttggtgccattgtccttacagcattatggggcttcgcatttggtgccttccctacctctgccaatatttggatgtttgtacacgcacctcatgctgtagaaaaaggtatgccgctttttgttggtatgttccaagtcatgattgctacagggtcattattaggtggttatgtagttgatcatttcaatgaaaatactttaatttatggggtattaagcttcgttgccttagctttaattagtacatttaccttagccaaaggtttaaacaatcccaaagcaacatgtgaaaattag

SEQ ID NO: 50758 - DNA, 1179 bp, Acinetobacter baumannii
atgtctacgttctatcgaatgagcctgcttgtctttttagcgacttgcctaggaattggtatttttagattttcctataccgcactcatgcctattatgattgtgcaatatggatggactcacgactttgcaagctacttaggaagtgcaaatttattgggctatctggttggcgcactattggccctgtttagcattaaagaaaaatctatacctgctttgattatgacttcggcggttttaggcagcttaagcctactctgctgttcgtttatacacatgtctctggcttggtttattctctggcgcaccatttcaggtatcgcaggtggcctactcatgattttagcgcccagctttgccatgaaaaatattgcaattagccaaaggctcaaagtcaattttttagggtttagtggtattggcgcaggcgtgttatctgccactctcattattcctgcacttaaaaatatgcctgttcaatatgtctgggaaatttttgccgtcatttccattattggcagtttggtacttttacagttattaaggcacccacctaccgagtccgttcaaacggccaatcacgctcctcaaaacttcatacattcacgtttaggactggtcattattattgcttatatgtgcagtgcttttgcatatatccctcactctttgttttggatggactatttatcggggaccctacattttccattgcaacaacgaaacttattttgggttctttatggggtcggaagttgtgttggcgcctttgtggcgtattgtttaagccgccttattggatatttgcaggcaattaaatgtctatacggtgtctattgcttggcagttgccctaccatttttttcacatgctactgctttgctcactttatcgtcctttcttacaggtttactcacacctgccaccgtatttattagctcttacagcctgctacagatttatgaacagcgttatcaaaaaatctggagccttgccaccattgggtttgccagcactcagttattaggtggcgttgttattagtactttacatcacttgcattggtcttatgcccatctgtttttaatgggcggcattgttttgttatttgcattgagccttttaattcctatccgttcttccccgccgaacactctcggagaaaccaaatcgtga

SEQ ID NO: 50759 - DNA, 441 bp, Acinetobacter baumannii
  misc_feature (405)..(414): n is a, c, g, or t
atgcaaaagattcttcaagatttctcaataccagccgtatttgctggttttattacctttcttattggtattagtgtttcagctattttagtgattcaggctgctcaagctttaggtgcgtcatctgaacaaatcacctcatggttttgggctttaggcttaggtattggtttatcaggactcatcctttctcggaaatttaaatatcccgtagcaacagcttggtcaactgcgggcctcgctttaattatggcaacaggtagtggctatagtttaaatgaagcaattggcgcttttttagtaggtggtttacttactgcgattttaggcttttcaggtatattccaaaaagcgctttcctatataccacaaagcttaaccagtgccatgcttgccggagttttnnnnnnnnnnttcgcttttcgcgagcttgcaaaatga

SEQ ID NO: 50760 - DNA, 408 bp, Acinetobacter baumannii; identical to SEQ ID NO: 46148

SEQ ID NO: 50761 - DNA, 1122 bp, Acinetobacter baumannii
atggctctaccgattattactgctgaccaaactttattagttcaagcaattattgtgtacctatacgctgatccgggtttaggtaaatcatcgatgggctttactgcggaaaaagcaatttcttttgactttgaccgtggtgctcaccgtactggtgaattacgtcgaggtgcggttgtacaggttcaacaatggagtgatgttgcaaaccttacgccgcaggacttagcaccctataaaaccgtagtcattgataccgtgggtgcaatgcttgaatgcattaaaacccacctgttacttacggcaaataaccgtcaaaaagatggttctttaaagttaaaggctcaaggattagcgaaccaaacgttcaagcaatacatcaatactttgatcagtttaggtaaagacgttgttttcattgcacacgcttcagaagatcaaaacggtgatcaaattatttaccgaccagatctaggtggtaaaaaccgtaacgagctttaccgtatcgcagatgtgatgggttatctaacaactgttactacaggtgaaggtaaaaatgcccgcgttattaattttaaaccctcgcctacacatcatgcgaaaaactcaggtgctttaggtggtgaaactggtgaagtatgggtaccagatcttaaagcacatcctactttcttggctgacctgattactcaagctaaagatcacattaacaccttaacgcctgcacaacttgcagcagctaaagcccaagaagagctagaaaactggaaacaaagctgtgaagaagctgagcatgcaggtgaccttaatcaattaactgagtcgcttgataaagaacacatgtattaccagaacatgcgccaagcaatgttaatgagagctaaagcattgaattgcacgtttgataaacaacgtggcacttggattagtccaccagaatttaacggtatctcagatcaacaaagagatgaacttcaaaactttattgctgaacgtggcctcgatgtaaaaacagtttgtgagcacttcggcatagatgccctgatccaaattgaagcggcaaaactaactgcagttaaacaagaaattgaaaccttagcgaaaacggggatgacagcatga

SEQ ID NO: 50762 - DNA, 273 bp, Acinetobacter baumannii
atgcaaaacaatttatcaaatcaaacaaccgaacgcaaccagccagaatttttagtgggtgacgttgtagtgcttactaaagagtgccgtactttcaaatcaaatgatttgtttgaagttaaaaacaaaactttgactagtttatggaccatcaaatcagagaatcatttgattctagtttcttcaaaagaaatccgcacagcaacagttgctgaacttaacgccaaacgccgactaacaagcgctgagcaagcattagcggaggtgtcatga

SEQ ID NO: 50763 - DNA, 1104 bp, Acinetobacter baumannii
atggcaacagatatcaaaaaactatttgaagcactcactcagcaccaggcctatctttatcgcgcttcatcaaaaacggtaaatgagttattggctttattcaatgatgatacgagcaagatgctatctaagcttcgggatttattggatgagcttaatgagtcggagaaagttgctttagctggtggtaaatatacaacttcaaatttaagggaaattagggatttgattgcccaatggtttgccagtgttaatttagcattacctgaagcttttgccgtttctgctacggcgctggctgtttatgaggccaattacgtagctaagctctatggagcaaaaattaataagcctgatggggaaaaactattcttatccgctaaaaaagttccgttggcaggtggcgctcttgtcgatgatctgctttcaagaattgctgaaaatgcccgtcaaaaggttgagtatgcaattcgagatggtattaattcaggcaaaactaaccaagaaattgttcagcgtattcgcggaaccaagcgccttaattatgaggatgggcttttaagtagctctaagacggatattgaacgtaccgtaagaacagttcgtagtcatgttgctaatcaaacgtatttagatactttcaaacagttaggttttgagtatgttcgttttattagtgtattggatggaagaacatctaagctttgtgctcatttagacggtactgtctggaggattgatgatccggcaaaacgtgtaccgccgttgcatcctaattgtcgcagcgaactagtaccagttaaaaaagatggtcaacttgttggcgaacggccatttgtaatggacgaacgtagagttaaagacatccccaaagaagagcgaagccagttaataggacagttagatgcaaacaccacattcaaagagttctttaagaagacagacgatttctttcaaagagaatggttaggaccaaagcgctacaagctttataaagaaggaaagtttgattttgaaaagttcttcgatcctgaaggacgattgtacacattagaccaacttcgtaagttggatgagcaaacctttaaggagttgggcttatga

SEQ ID NO: 50764 - DNA, 918 bp, Acinetobacter baumannii
atgccttattacaccatgcccgatcaggaaagtttatttgtacgccgtgttggtcgtggtgaaccggtattagttttatccggtttaggtatgcaaagttggcaatggctaccttttatctatgcaaatcgtaaagaatacgagtttattattcccgactggcggggctttggcggttcaaaaaattgtgcaattcccgagcaagatgccatatcaagccactggcaagatgttgctcacttaattgagcaattaaaattagataaatttattttaatgggctactcaatgggagccaccactgcaatgcatggcatgaaacatgctcatctcgctcagcagttaaaggcctatttacatatcgatcaaacgcctaaaatttcagtagatgctacatggcaatatgggttatttgggccattacatgcccaatttaaacaattactcaatgatatttatcagttattatcaatccataaaaatgctaaatatctttatgaattatcacttccggaccgtcaaaagttggtgcgtttgtgggtagattttattgaattgcaaagtagcaatccatttagcccttttgtttttaaaactgcgttaaaacaaccatttttacaaaaatatcttcttccgattcaacgtttagactacttattttggtatgttgaaaattatcttttccacaatgaagattatcgtgaagcacttcagcaattacagtgcccaacaactttctttattggacgcaattcgacactctatccagaaacggggcaaaccctgattgcacatagtgtcgaacatgcaaaaacaatttattttgaacgttcaggccacacgccattattaaccgaaccaaaaaaattcgggcatgaaatcactacttttttatccgaacttaaacatgcttcttaa

SEQ ID NO: 50765 - DNA, 2025 bp, Acinetobacter baumannii
atgtcgttatatccacatttattaaaaccattagatttaggttttacgacattaaaaaatcgcgtattgatggggtctatgcatgttggtctagaagaagcgcctggtggttatgagcgtatggcagctttttatgcagaacgtgctaaaggtgatgtgggtcttattgttactggcggtattgcacccaatcaggcaggtttaacctttgctcatgcttctaagttagatagcacagaagaagccgaaaaacataaagtcattaccgaagctgtacatgctgctggcgggaagattgcattacaaatattacatacgggccgatattcttatcagccagagattgttgcgccttcggcaattcaggcacctattaatcctattaagcctaaagcaatgacttctgctgaggttcaacaaacgattgatgattttgcaaactgtgcgaagcttgctcaatacgctggatatgacggcgttgagattatgggttcagaaggttatttaattaacgagtttattgcagccagaacaaaccatcgtgatgatgaatggggtggtagctatgaaaaccgtattcgttttcctgttgagatcgtaaaacgcacacgtgaaatagtgggtgaaaactttattattatttaccgtttatcaatgcttgatttagttgaaggtggttctactttagaagaagtgattcaacttgctaaagcgattgaaaaagctggggctacgatcattaatacgggtattggctggcatgaagctcgtattccaacaattgccaccaaagttccaagagctgcatttacttgggtcactgaaaaattaaaaggtgaagtttcagttccattaattacatcgaaccgtattaatacaccagaaatggctgaacatgtattagtgtcgggtcatgcggatatggtttcaatggcacgtccaatgcttgcagatcctgattttgttttaaaagcaagtgaaggccgtagcgatgaaattaatacgtgtattggctgtaaccaagcttgtctcgaccacattttctctatgaaaattgcaacatgtttggttaatcctcgagcatgttatgaaacagaactaatctttaaagaagcacaaaatcagaaaaatattgctgtcataggtgcaggaccagcaggtttaagttttgctgtatatgcggcagatcgtggacaccaagttaaaatctttgaagcaagtcatcaaattggtggtcagtttaatatcgctaaaactgtgccaggtaaagaagagttctacgaaacattgcgctatttcaatcgtcaaattgaattacgcccgaacattgaacttgtattaaaccatccagccacttatgaagagctaagccaatcagactttgatgaaatagtagttgcaactggtgtaacacctcgtcaattacaatttgaaggtattgatcatccaaaagtgttgagctacttacaggtgcttaaagagcgtgcaccagtaggtcagcgtgttgccattattggtgcgggtggtattggttttgatacggctgagtacctaacccatgaaggtgaaagtggcagtttaaatccagaaaaattttatgaagagtggggtattgatactcactatgaacatgtcggaggtttaaagcagccaaaagttgaagcttctgaacgagaaatctatttgttgcagcgtaaagtttcctcagtaggtgcgggattgggtaaaacgactggttggattcaccgtaccgggcttaagaacagaaacgtgaaaatgttagcaggtgtgcaatacgacaaagtagatgatcaagggcttcatattactgttgatggcaaaccaacagtgcttgaggttgataatgttgtgatttgcgcgggtcaagaatcatttactgcgatgtatgaccaattaaaagcagatggtaagaatgttcatttgattggtggtgctaaagaagcaggtgagttggatgctaaacgtgctattcgacaaggtgctgaactagcagcggttctttaa

SEQ ID NO: 50766 - DNA, 408 bp, Acinetobacter baumannii
atgacactcgaaataactaaacagtcattagaaaaatggcatcacatgattcaatcaaatgacttatcgaacttaaatgatttgctggcagatgaagtcgttttccgttcaccggttgcttataaaccttatgagggaagacaagttgttttctttattctcaccaatgtaattcaggtatttcagaattttacctatcatcgagagttttacacggaaaatggtgaaaatgtagtgctggagtttagtgcgaatgtaggagataaatcattaaaaggtatcgatatgattcgttttaatgagcagggtaaaattattgattttgaagtaatgattcgtccattgagcggtttagctgcattagctgagcaaatgggcatacgaatagctcaatttaaacctcaataa

SEQ ID NO: 50767 - DNA, 327 bp, Acinetobacter baumannii; identical to SEQ ID NO: 49402

SEQ ID NO: 50768 - DNA, 900 bp, Acinetobacter baumannii
atgtctagtttagcattaagttttaatgaagtgaaattcaatcccgtgccacggcaagatggccagatttggctttcttcaggtgaattggcacaagcattaggatataaacaagagaacgcggtcagtaaaatttttaatcgtaattctgatgaatttacggaaaatatgacacaaattattgataatcctcggctacccaatttgggtatgcggatcttctcactacgtggctgccacctaatagcaatatttgctcgtactgctgtagcgaagcaattccgcaagtgggtacttgatgttttagataaagaagttggcacaccagttgccaaaacccacaaatccgaacgtgaacccctaaccaatgctgtaaatcttcttgtagctaaaactaagcatttgaattacagcgatgcttataaattagttcatcagcgtttcaatgttcagcatattgatgaaatcccatatgacatgattcctgttgcagtggaatatgttcatcatctgattgcgatgtacagtagtgcagagaagaaggctcaaggttctttatttgataatgaaacattgggtttggttaaggatctggtagatgcaattatttcccaaaactttgtgacaagcaaaatctatcgtgcaatacacatgcttagtaatgaacaaggtcactacttagctgaatatgcgtttaaaaccaatattgcagttctaaaactcactcgaacaatggatttaagaggacctcttaatagaaaaatcattagtgatgatttaaaaaccataagctacacaacaggtaatcaacattatggcgaccgttggtttcacccactgatggagtcaagtcgattgatggaagtacttgaaatttcaggtagtctgattcgtcactaa

SEQ ID NO: 50769 - DNA, 753 bp, Acinetobacter baumannii; identical to SEQ ID NO: 46211

SEQ ID NO: 50770 - DNA, 855 bp, Acinetobacter baumannii
atgcaaatgctttcttctcggcaatttgctgcgattgccacaattattgaatatttatatgaacatctagaccagcaaccaagcttagaagatgtcgctacatatatgaatttaagtccgagttatatccagcggcagttccaagaatgggtaggcattagccctaagaagtttgtgcaatatatgagcttgcagcaagcaaaatattatttaatgcagcaacgtagcttattagatgcggctttaaatactggactgtcgggtacgggtcgtttacatgatttgtttattcagcttgaagggatgacccctggtgaatacaagcagcaaggtgatggcgttgaactgaattattcagttgaaacgagtccatttggtgacttattggtagtaagtagtgataaagggatttgttctgttcgctttgttgatcatagtgagaacatacaagaaatcgttaaacagtattttccgaaagctcagttaaaaaatcactctccgatttggcatcaacagattgcacagtggtttagacaagacttctcagaacatttacagcagaaattaccgcttaatcttgcaggaacaccatttcagctacaagtatgggaggcactgcttactattcccgaagggcagttacgaacctatcaagatattgctgagcaaattggaaaacctaaggcagtcagagcagtggctacagcaattggccaaaatccgattgcgtatttaattccatgtcatcgggtcattcgcgcaacaggaatggtcggtgagtaccattggcaaaaagggcgtaaactggcattgttagcttgggagatggctaagcagcaaggggagattgcatga

SEQ ID NO: 50771 - DNA, 1341 bp, Acinetobacter baumannii
  misc_feature (503)..(512): n is a, c, g, or t
atgaaaaaaatagatattaccggaattggtattgggccattcaacttaggtttagctgctcttttgtctcatcatcccgaaatcaaaagcgtatttttagaacgcaaaccagaatttcgatggcatgaaggactgctattgcaaggtacgacattacaagttcctttctttgccgacttggttactatggccaatccttgccatcccttaggctatattaattatttacatcaacatgatcgcttacatcagttttattattacgacagttttttaattccacgccgtgaatatgaccattattgccgttgggcttcaaaacaattacccgattgtcgatttggagaaaacgtaagccatgtggaatatgacgccaagctggataaatttattatagaaagtgaatcagcctcgggcgaaaaacaaaaatatataagccaaaatctggcgattggtattggaactaaacctcgaattccgctgaatgttttaccaaagggtgnnnnnnnnnnatggctggaaacatgcaaacaccctttggtaaaacattcagcggagtttgcaaaaattcaggaacaactcaagcaatgtaaacaggtcacggttattggctcgggccagagtgcagcagaatgtgtacttgctttatttaattcacttacaccagaacaagtaaaagcaggtgcatctattcgttggatcacacgttctgccggctttcacccaatggaatattctaaacttggacaagagtgctttacccctgcatatatgcaatatttccaaagcctgcctagagataaacgccgcgatattgctgctagtcagggcctgatctataaagggattagcttctcaaccattggcgatatatatgatgtgctttatgagcgttcagtggctggtgaaaaatccggtttaagcctatacacaagctgtgaggttgaatcggttaaagaacttgaatcgggttctctgcgtttaacttgtttgcatacccaactcgatcaacgttgcgaattagaaactgatgcccttgtcgcagctacaggctatgttcatgattggcctgaatggttccaaaatatgaagggttctattttagctgttgatgataaaaatgattgtattgttcaagaagactttacggctttacgttgtgatcagggacaaggtcgaattttcattcaaaatgccgagatttttcagcaaggcgttggttctcctgacttaggaatcggagcaactcgaaattcagtcattattaatcaattactaggacgtaatgcttatcgaattcctaaacagtcttctttccagcactatggcttaccagaataa

SEQ ID NO: 50772 - DNA, 1152 bp, Acinetobacter baumannii
atgattttatcgcctgctgatcaagagagaattgagacattctggaattactgtttaaaacatcaatacttcaatattggatatcctgaatctgcagattttgattattccgctttattccgttttttcaaattctctattaataattgtggtgattggaaagactatagtaattacgcattgaattcttttgattttgaaaaagatgtgatggcgtattttgctgaaatttttcaaattccctttgaagaaagctggggatacgtaaccaatggtggcacagaaggtaatatgtttggctgctatctggcgcgtgagctatttcctgattccacattatattactcaaaagatacgcattattcggtgagaaaaatcgccaaattattgcagatgaaatcttgtgtgatcgaatcattggataatggtgaaatcgactatgatgatttaatccataaaataaaaaccaataaagaaagtcaccccattatttttgcaaatattggtacgaccatgaccggtgcaattgatgatattgaaatgattcaagagcgcttagcgcaaatcggaatcatgcgccgagattattatattcatgccgacgctgccttaagtggcatgattttaccttttgttgatcatcctcaagcgttttcctttgctcatggtatcgactcaatctgtgtgtctggtcataaaatgattggctcaccgattccgtgtggcattgttgtggccaaacgccaaaatgtagagcgtatatcggtagatgttgactatatctctacacgtgatcaaaccattagcggttctcgtaatggtcataccgtcttactgatgtgggcagcaatacgtagccaaaccaatttacaaagacgacagagaattcaacattgtctaaaaatggcccagtacgcggttgatcgctttcaggcagtgggcattcctgcttggcggaatccgaattcaatcactgtggtatttccgtgtccttctgagcacatctggaaaaagcattatctagcaacctctggaaatatggctcatttaattactacggcacatcaccgagatacacgtcagattgatagcttaattgacgacgttatttttgatttacaaggtgcctctaaacgtacagttggtttttag

SEQ ID NO: 50773 - DNA, 1530 bp, Acinetobacter baumannii
atgacgcaacaaaacgctcaatcgacttctgaaccaactatttccgaaaacgatttaattgcacagcgtcatgccaaattaaagcaaatccaagatgttgcaaaggaaactggaaagagtccttggccaaatacattcaaacgtgaacattacgctgctgatttacaagaacaatttaaagatcagtctaaagaacaaatcgaaagcgctgaacatgtttatgtaaaagttgctggccgtgtcatgttaaaccgtggttctttcatggtgattcaagacatgactggtcgtatccaattatatgttgaccgtaaaggtttaccaaaagatacgcttgaaactattaaaggtttagaccttggcgatattattgctgctgaaggttatatcggtcgttctggcaaaggtgacttatatgtacaccttgaaggttttgaacttcttacaaaatcgcttcgtccattgccggataaatttcatggtttgaacgacacagaagttaaatatcgtaagcgttatcttgacttaattgtgaatgaagaaacgcgtaagacttttgaaattcgtgccaaagtcgttgcaggtattcgcgcatttttaaccaatgaacgtttcatggaagttgaaacgccaatgatgcatgtgattccgggtggtgcgtctgcacgtccgtttgagacgcatcataatgctttagatatgccattattcttacgtatcgcaccagagctttatttaaaacgtttagttgttggtggttttgagcgtgtgtttgaaattaaccgtaacttccgtaatgaaggggtatcaacacgtcataaccctgaatttaccatgatcgagttttatcaggcatatgctgattataaagacttgatggctttgactgaaaacatgcttgaaaagctagcaattgatattttaggtacgactgatgtgccttaccaaggcgaagtgtttagctttaaagggccattcaagaaaatctctatgtttgatgcgattttggagaataatccgcagttcacacctgaaaatgtaggcgatcgtgaattccttgcaaaatttgttcgtgaggaattaaaagaagaagttaaacctggttttggtttaggtaagcttcaaacaatcgtatttgaagaaacggttgagactaaacttcgtcagcctacttttattactgagtacccagcagagacttctccacttgctcgccgtaatgatgataatccgcacattactgatcgttttgagttctttattggtggccgtgaattggcaaacggctttagtgagttaaatgatccgattgatcaagctgaacgtttccaagcgcaagttgctgaaaaagatgctggtgatgatgaagcaatgcattacgatgcagagtttgttgaagcacttgaatatggtttacctccaacagcgggtgaaggtattggtattgaccgtttggttatgctttttgcagatgcaccaagtattcgtgatgtgattttgttcccgcatatgcgtcgtaaagaaggttaa

SEQ ID NO: 50774 - DNA, 2187 bp, Acinetobacter baumannii
atgaaccaacaaaatactaataccgaagatacaattgacttaaaagaattgtttttttcactgattgctcagtggaaactcattgctctatgcgttattttaagcgttgtatgtgccctactatatttacgtgtaacgccagatacctattcggtagatgcgttggttcaggttgaggacagtaaaggggcttctgctgcacttttaggtgatctctcacaaatgattgagcaaaaatcaccggctcaagcagaaatagaaattttaaaatctcgtttggttttaggcacggtcattaaggacttacatctaaatatacaggtctctagcactgaaaatacgcttacccatcgcttattgagtgatgctgactataaaactgaatatactacgaaatcagtcatttttaaggatggcttaaaaagttttgatatccgtcagtttgagattcctgcttattacttagataagaacttacttcttgattttgataaacaatctttacgtttaaccgatcctgtaactgaagaagtcatcttaactgttccattaaaccaagttaaccatgttgctggtcctcatggtttatggaaagttgctatctttacaaaagaccaatttgacgcaacctataatattaaaagtctatctttacctattgctgtaaatgctattagtgcgaattatgctgtggccgaacgcggcaaacttacaggagtgttaggtcttaactatcaaggtcaagacaaagagcatattaccaaagttctcaatgcgatcttagcgacctatagtgcacaaaatattgaacgccgttcggcagaatctgctcaaaccttaaaatttttagatgaacaactacctgacctgaaaaaacagctagatgatgcagagcgtcaatttaataaattccgtcaacagtataataccgttgatgtgactaaagaatctgagctgtatttaacccaaagtattactttggaaactaaaaaagcagagcttgagcagaaacaagctgaaatggcagctaaatatactgcagagcacccagcaatgcgtgaaattaatggccagctcgctgcgattaataagcaaattggtgagctcaatagtactttaaaacaattaccggatgttcaacgccaatatttacagctttatcgtgaagttgaagttaaaacacaactctatacagcccttttaaactcataccaacaacttcgtattgccaaagctggtgaaattggtaatgtacgtattgttgacactgcagttgagccagttgaaccaattaaaccgaaaaagttgttagtccttattttatcggtatttgtgggtggctttattggagctctaatagccttattacgtaatatgttacgtacaggtattaaagactctggtcaaattgaaaatgaaatggatttaccggtttatgcaaccgttcctcgttctccaattcaagaaagccgtatcaagattttaaagaagaagaagagtattcctattcttgcggttaaaaacagtgatgatattgccattgaaagcttacgcagtatccgtacagctattcactttgcattagcaaatgcaaaaaataatatcattatgattgctggtccttctcctgaagtgggtaaatcgtttatttcaactaacttggcaactattttcgcgcaaggtaataaacgagtactattgatcgatgccgatatgcgccgtggttatatgcataaatatttcgatgttgatgtgaagccaggtctatcagaacttttaagtggacaagctgatttacaaaaagtattgcacaaaactcaggtagccaatcttgatgtgattactcgtggtaagagtccaacaaatccttcagagattttaagctcaaaccagtttaaagaattacttgagcagctacaaagccaatatgaccacatcattatcgatactccaccagtgcttgcagtaaccgatggtattattatttcgcaatatactggtgtgaacttaattgttgcacgctacgccaagtcacaaatgaaagagcttgaactaactgttaatcgttttgaacaggcgggtgttaaagttaacggctttattctcaatgatattcaacgtgctagcgctggctatggttatggctataactatgcttatgcctataaggcacaaaaagaagactaa

SEQ ID NO: 50775 - DNA, 1074 bp, Acinetobacter baumannii; identical to SEQ ID NO: 45939

SEQ ID NO: 50776 - DNA, 633 bp, Acinetobacter baumannii
atggaagttttcttagttattgcatttactcattttttagcactcttatcaccgggtccagatttctttcttattctcactagtcttctacaaaaaggacgccgttatacatatggtattgttctaggaatcactttaggaaatgctttaattctggctggatgcctgtttagttttatattgcttggaaatctaagtagtatcttacttttaatatttaaatggcttggcgctttgtatttggcttatttgagttttctttgttttaatgcagcccgatctacagctctaaatttctcaaccgatgtaaataatttaagtgaccaagcagaagataagcacaacaaaattaaaagcttggtattaggtttgcaatcgagtcttttaaatccaaaaaatattatgttttatagtagcttaatgctgcttatacaaaataaatttagtttatttcaaaaactgcttatgagtgtatggatggtcggtgtggttttaatctggaatatcttattggttaaactgctggcccatgaacgaattttagtcaaaattaagcgctctgcaacaggtttatattattgttctgcgctagcttttattctttttgctgtgcttttgattacatataaatag

SEQ ID NO: 50777 - DNA, 5676 bp, Acinetobacter baumannii
gtgactggtcagattgtgatccatgctgaggctgtagatgcgcaaggtaacgtagatgttgctgatgcagatgtaacagtaacactcgatgtcactccacctgatatcactacaacagtattagcaattgaccctgttaccgcagacaatattcttgatgcgacagaagctggtggaacagtaactttaactggtacattgaccaacgttcctgcagatgcaacaaccacaggtgtagtggtgactataaatggtaatgactacacagcaacagtagatgctatagcgggtacttggacagttaatgttgcgggcaatgaccttgctctagatccagacttaactgttgatgctaaagcgactttcacagatctcgctggaaacagtagtactctacaagatacacaaacttatactcttgcaggttctatcactgcctttgacaacactgatcatgcagttcttagtccgaaaccagcgcttgttggtgatgatgtaagtctaggtagtacttcttatttagtacttacatctgtagcaggcttagaccttcaacttggtggtaattctctaggatttactgtcgatgctggccatgaaggtgatgttactttccaatatagtggcttaatcgacgcagctgtactttctgattacaagttagtagttcagaagttcaatacaacaactaaccaatgggaatctatacatggtgatgctaattcatcattaattagcttgcacttgttaggtattggtacaggaaatgttcctggtgcagtccttgatggtttagatgcgggtcaataccgtgccttcttagcctacgacggactgttaggattgggcgtgttaggcactctttctgccactatggatgattatgatttgtctgtagcaggtggatatgaaattggtaatgctgaaggtaacgtgattactgatccagatccaacaacaggtcaagtcgatcaggtaactgcaaatacttatgtttcatcagtgaatggtcatccgattgatgctgatggagagacatttgcaggtacttacggaacaattactttctatcaagatggtagttatgtgtatgtaccaaatgcagatggttctggtgtaggtcaaactgatgtattcacatatacgttaactgactcagtaactggagcaacaggtcaagctaatcttaatatcgtgtttgattcgattcgtgcagcggataaccttgttgaggttgaactcaatccacaatatcaattggtgggtacagagactgattcagcattctatggcgttctattgaatgttggaaatattgttgacctacaactcctcacagtagatacggttgactttactatcggtgctggtcaggaaggggttgcaacatttaacttcaatagcttgattggtgcatctgctttaggtgactacaatgttgtgttgcaaaaatacaatgatgtgacaggacaatgggaagcagtgaatggtacaggtgatcgttcattactgaacttgaccttgcttggtaatacgccaactgcgcaaataggcgggcttacagagggtgaatatagagcattcttatcattcaatggcttggtaggcggagcagtagctgtaacattaaacggcagtgtagatgtctataacccagcggttattactggttacgatgtcgtagcagctcatggcaacctaatctctgatccaaatacgaatggtgatgttgatatcgctacacctaacagtattatcagtgaagtcaatggtgttgcagtaagtgcatctccaactgagattattggtactcacggtactttactcatctatgcaaatggtgattatacctatacgccaaatgctgatagtgctggattaggtcaggttgatcaatttacttataccttgttagacccagcttctaatataacttcacaagctacgttctatgtacatctagatagtaaagttgtggatatgaattgggatgcagctgatccatcacaacctgctactgtaacgattacagcagtggatgacgctgtaaatgctgcaattgctgctgagcctcatctcatcgaagatgacagagcattgggtagtgcaacttatcttgcattgttatcgttggctggcatcaacctacaagctcctttaccattcgtgaatagtactgtggagttcaatgtaggtgctggtgaaactggaaccgcaacctttaaatacagcagtttaattaatgaaggagcactcggtgattaccaacttgtagtacagaaattcaatactgctacaaatcgttgggaatcaattaccggtagcagtgaagcttctttactgaacttaagtgtattgggtataggtgtgaatgcgacaccgggagtggttgttgaagggcttgacgaaggtcaataccgtgcctttatgacatacaacggcctctatggtaagagtatcctaggtacattgtcaggtacgatggatgtttacgatccaaaccaaattgactttactggtttggcatctgaaggcaatgtcattactggtcttggcgtaggtacaaatgctgatgctgtaactggatacacaattgttgattcagttactgtaaacggtgtgactacgaatgttgatccaaatactggaacaattattcagggtcaatacggtacgcttcaaatattcgcgaatggtgattacatctatacgccgaataatacgaatgccaacctcggtctagtcgatcacttcacttatacgttggctgatcctttgggcggcaatataagtgcaagtctagacttcactattggcaacagtacgccagtgattgccgtagacgaccttgctgtagctgttgttaatccagaatatctgcaaattggtaacgatgttgcggtagatagctacctatatgtggcgttattaagcttaactgacaattttgacttccagttgggtggacaaggtgttgactttactttgaccgatagcaccttaaatgatgtgaccttcaattacagtgcattaatagatgcaagtctgcttgctgattatgtactcgtggttcagaaatttgatactgcaaccaatcaatgggtagctgtaaatggcactggagaagcggacttactcagtctggcagcctttggtggaaattcagtgacattggaaggtctagctgctggtcaatatagagcctatatgacttatgctggtagtggtgttggcgttagcttattaggtacattgtcagttcagaaagatgtatttgatgcgacaaatatcacaggttatagcactcaagttgcagaaggtaatgttattcatgatgtcggcttaaatggacacgcagatactgcttctggttttagcacagtaactagcgttgaatttaacggcacagcatttgctgttaatgcgacaggtgtcacaaccattgtcggtgaccacggtacattgtcaatttatgctaatggtaactacagctatcagccaaatggtgaggctgcaagccttggtcaagttgatcaatttacttacaccttgtcagatggtctaaatacatcgcaagcgaccttgtatctccatattgatagcgatgcagtcgatatgacttggaatacaagtgatccatcacaacctgctgtcatcacagttactcctgtagacgcgattgataacgttgtttctgctggtgtagatatcgttcctcaaggcgagcttggtgtagctgtaggttctgcaacttatctagcattggtgggcattacagaggacttaaatgtttccttgttaggaacaccaagtgttgcatttacaattgatgctggacacgaagctgatgtgacattcgcatatgctccagtgctttcattatcattgtttaatgactataaagttgtattacagcaaaaaggtgctgatggtgcttggcataatattgacggcggctcaagtactggcttactcaatattggtttactaggtaacggtggaattggtgttactgttccagatctaggccaaggtgaataccgtgcatttatggtttacaccggtttaggagtaggtatcctaggtacaatgagtgtagtgaaagatgactttgattacacagttgcgcctaccaatacagcggttgttgcagatggtaatgtattgactgatgacgtaactacgttaactactcaagttaccactgtgacatctgaagtagtgggtgctctaccacaaactgtcggaacagatacagttataaacggtgcatacggtacattggtgatttctacaaatggtcactacacctatacaccaaatacaactgatctgagcgcgattggtaaagtggattcattcacttatacaattcgtgatgtattaacaggggcaacagatacagcgacattacatgttcaggttggttcaccagacgtaacgatcgcatgggatgctgctaacccagcaaatgatggcgtagtacaattaactgctaatcctgatcatgtggttacaactacagacttctcaaatgctgctgatctaccagtagatgtggcgagccctgtggtttctgtaaacctcatcggttctaattcagtagtgtctgatcagtttgtagtaggagctggaactgttgctaatattgatctatcagcggtttatacagcacaacctttagcaagtgtactaccgacagtaagttatgtgatccaaagctggaatggtacagcatgggtgaatacaatttactcaggttctcaaactgctctaggaagtgtggcaactattcaagcgggtagtgttgcattccaagacactgttgagcatttagctgcaggtacctaccgcgtacaatatacgctaacaggtgtttcacttggtgcgacttcactagatacaaatgtttctacaacgacagttcatctagatacttatcgttcagattggatcagcggaaatgtgttggcaggagacaacattggtggagtagcggatacaggcatcttgtctcatgaaggagctaaactccaagtttgggataatgcacaaaatgcttatgttgatgcagttggacaaacaatcaataccggtaacggtgtattgattatgcaatcaaatggtgaatatgagtaccgtccaaatgatgtgactacaaccacacaattggcgtctactgacagtattaactataagattgtgtccgtaactggtggagttgaatctcaatcaaccttaacgattgatttaacacatactgattacaatcttctttacacaagtacttctgcgaatgacacattcacaacaggtacgggttcagatactgtgatttatcaattgttgaatggaactgctgctacagctaacaatggtgcaaatacaggtggtaacggtgtagatacttggactgacttccatgttggtaatgttgctacagacaaacaagctgatctgattgatatcagagccttgttagatggagatcaaacagatgctaatattggacaatatctgaatgtcactacaagtggtggtaacactacaattcagattgaccgtgatggattatcaggactcatcccaggtaataacttcactacattgttagtcttacaaggtgttactacaacagagactgaattacttaacaatggtcaaattctctattaa

SEQ ID NO: 50778 - DNA, 258 bp, Acinetobacter baumannii; identical to SEQ ID NO: 49182

SEQ ID NO: 50779 - DNA, 915 bp, Acinetobacter baumannii
  misc_feature (41)..(50): n is a, c, g, or t
  misc_feature (869)..(878): n is a, c, g, or t
atggtgtggagttcgcccaaccaatcgccttggtctggttnnnnnnnnnntgaatatatttggattccggttcatccttggcaatgggaaaaccatttaatttctatttttgctgaagaaattctaaatggcaaaattgtttatttagggcaaagtcaggatcgctatttagcccaacaatctctacgcactatgactaacttgcagcatccggaaaagccttatatcaaactgtcgatgagtctaactaatacatcaagctcacgtgttctggctaaacatacagtaatgaatgggccaattattacagactggttgcaacgcttaattaaacagagcaaaaccgcccaagagcttgattttgctgtattacgtgaagtgtatggtttaagcgtggattttactaaattgccaaaatcacatgctcaacaggcctatggtacaattggatgtctatggcgtgagagtgtgcatcaatatttacgtgaaggtgaagatgcaataccgttaaatggcgtgagtcatatccaaaaagatgggcaagcattaattgcaccatggttacagcaatatggtgttgaatcatggacacgtcaacttttgaaagttgtgattactcctttgattcatttactttttgcggagggaattgcaactgaatcacatggccaaaatattattcttgtacataaacaaggttggccaacgcgagttcttttaaaggacttccatgatggtgtgcgctatagtccagcacatttagcacaccctgaattggctcctgaactcgatcagttgccgcctgagcatgcaaaaaccaacagtatgtcatttattttgacagatgatttaaatggtattcgtgattnnnnnnnnnngattttagctgtgcctgtctgttttttgtcgctttaa

SEQ ID NO: 50780 - DNA, 702 bp, Acinetobacter baumannii
  misc_feature (5)..(14): n is a, c, g, or t
atggnnnnnnnnnnatttatttttgtacaaaagaataagtctatgccattaatcgagccagctttgtttgctacgaaggggttccgctacagcttagtcatttgtgtggcacaaacagtaggcttatttattggcatgttgctcattccactatggatacagcaccttctaaagttaagcccgctttggactggttttgcgctaatgagcagtgcagtagttaccggtatttgtagtcaacctgcaggaaaatatctagatcgttacggtgctgcaaaaatcatgtctcttggactaatgattactgtggcttcttttcttttgcttgcttgggcacctatacaaaatgtctggttcattgtgttttgtatgatattacatggcttaggaatgggactttcttatatgccatcgactacggcaggtttgaacagcttacgccagcagcaacagcatctagttactcaagcggccgctctaaataatttattccgacgtatttttgcagcagtggcagtcgttattgccgcgttatatcttcagctaagacaacaatcattgccgttaaatactcaagcaatatttacatcatttcacactatgcaggaaatctttgtgtgttgtgcaattcttatactttgcactttgcctttcgcatggcgttttcctgaacagtacagaatcgaccaattaaagaaatag

SEQ ID NO: 50781 - DNA, 750 bp, Acinetobacter baumannii
  misc_feature (717)..(726): n is a, c, g, or t
atggaacgttcttctgtgtccgcggctcaacctcatgagcaaagtttacaacgctacgtacttctgacggttatgcttggtacaggtacggttagtttaaataacagtagtttcaaccctgcaatacctcatttaatgtcctattttcaggtaggtgaggtatgggcaagttgggtagttgttgcctttttattagcaatgagtatcagtttgcctttagctgggttcctaagccagcgttttggtaagcggtcaatttatttaattgccttattgggatttgctttggcttctacagcaggtggtttatttaatcagtttgaatcggtgttgattgctagagctctgcaaggcttttgtagcggattaatgattccattatctcttggactaattttttcagttacgcccagtgaacaacggggaagtacaacaggattatggggtgccatgatcatgctaaccttagcagttgggcctatgctcggagcactggttttggtatggcttaattggaaggccttattttttatcaatttacctgttgcttgtctggcattaattttaggctatgtttttctacctaaagagcaatgggacaataagcaagagtttgactgggcaggattcttttttctcggttcaagcatagttttattacttgggacactgagccaaatccatcaaattcaggacttacttcaacctctatatggnnnnnnnnnnatttatttttgtacaaaagaataa

SEQ ID NO: 50782 - DNA, 399 bp, Acinetobacter baumannii
atgcggatccgcaaccttcagaaaaaaaccaaaaagacatatggaaaaccggatcctcaaaaaatgatccgaatatatcatttgaagggaaaacggaagtttctagcgataaatctaataacgctgataaagaagcaccagataaacgaattgacaactctgaaacgcaaaatccgagcgatagcgccatatcaaatgaaaaagctagtcaagtatcaggaaaatcccaaaaagagccagaaacgcaaaatatgggccaagaagcgcatattcaagatgaagttagattgggtaagaaacaaactgaacctaaagcgagtaacaattcaaaagaccagactgtacctagagaacgaccttatcaaagaaagaatcgtgaatctcaacaagtactcataa

SEQ ID NO: 50783 - DNA, 2151 bp, Acinetobacter baumannii
atgaaccagtttgtaacgaacacgaaaaatgtaattcgtggaaagtatcatccggaatttttgcagaatgaagtcttagccgatatttttgctcatactgcacaaactcttcctgataaaacggctttaattgaagcagataaaacgctgagttatggtgagctgtatcagcaagccttaattatggctcaacatctggctttaaaaggggtaaagccaggtcatattgtagggctatggctgccgcgtggtattgagcttttaaaagctcaactggccatttgtttaagcggtgcagcttggcttccttttgatatggatacgcccgcggaccgtattgcggtatgtcttgaagatgctgaagcggtaggaatgattactacagatgaatggtatgaacatttagctgaagtgccgcaaacaaaatggaccaacaccgagctgcaaaaaccattaagcgaaagtgtaagtttagcgaaaaccactccagatcaacctgcctatattatttatacctcgggttcgacaggtaaacccaaaggaattgtgattactcaaaaaaatatttgtcactttttacgtagtgaaaatagtattttgggtattcaagagcaagacaaggtctatcaaggcttttcagtcgcttttgatatgtcgtttgaagagatttggctttcttatttggtaggtgcaacgttgtggattgcaccgaagtcacttgtcagtgaccctgagcggttatgccaaaccttaaagcaggaacaaattacagtactgcatgctgttccaacgttacttgccttatttcctgaagacgtacctaatttaagaattattaatttaggtggggaaatgtgtccggactcactggttgaccgctgggcattacctcatcatcaaatgtttaacacctatggaccaaccgaaaccacggtttctgcaagtcttgagttattagaacgcggtaaacccgtcaccattggcaagcccttaccaaactacggtatgttggtcattaactctgaaagagagttgctggagcaaggtgaaacaggggagttatgtatttttggtccaagtgtggcacaaggctatttaggacgtcctgatttaaccgcagataagtttattgaaaacccttgggcaatgagtgtagaggaagaattactctaccgtactggggatttggctaaaattgatgagtttggtcaagtacactgtttaggtcgtgccgatgaccaagttaaaatccgtggtttccgtgtagagcttggcgagatcgaagctgcgctttgcgatattgatggaattggtacggcagccgttattcttcgtcctgaagacggcattgatcaacttattgcgtttattgcgccagaaattgatgcaaagcaagctatagaaattaaagaactacggcataacttgagtcagcgattaccgccttatatggtgccaaatcgttttgagattattgaagaagttccacgtctattatccgggaaaattgaccgtaaagctttaaaagcaagaccgctcacaagtgtggtagatcgcagtgaatctgaccagccacagaacccggccgaagaaatcctatttgaaattttgaatcgcttgttcccgaacatgccgattaaactcgattcagatttcttcgatgatttaggcgggcattcactactcgctgctgttttaatttcaaatctgcgtgagcatgcggaatatagccatctgaccattcaaaacttatatcaagcgagaagagtaggcgcgattgctgcactcatgttagagcagcctgaacctactttatttgatagccaaattggacaagataaccctcgtaatcagacctataaatggttatgtggtattgcacagcttgtaactattccggttttaatctcgattaatattttgcagtggttagcgccattctttacctatcactactttaccggtggaactcgcgacagtatttattccgtatgcgattgcgttgtctttattggtgtatgtcagtgtcattatgagcagttttgtactgtcgattacggtaaaacgactattaatgttaggaattggcgcagggcgttatccattatggggattaacctatttccgttggtggctagcagaccgtattag

SEQ ID NO: 50784 - DNA, 1830 bp, Acinetobacter baumannii
ttgtcgggttcgactttacttaacttatatttgaaagcacttggtgcaaaaatcggtcacgacgttaccattagttctgtacatattcgtatgccatctttactgactattgaagatggcgtgagtatcggttctcaggtgaatttagaaaatgccaaagttgaacatggccacttggtattaggttcaattcaccttaaacaagacagttatgtaggttcgtatgctgtattagaagaaaatacagtgttagaaaaacaggcccatgtaaatgccttaacttcaattgaatatgacacggttgtacctgagggcgaaatttgggatggaacacctgctcagaaaatagggcatatagatgagcaagctaaattgccagagcgtcctaaactatcgtttatacgtaaaattgctgaatatggatactatggcgttagcgcattaattattgcctgtcttttctttattccaatttttccaagcttccttttggtcgactggttagatgtaaatgtatttaatattaacccgaacaaccatttgcaaatcgcgctttattatttcattttagcgattccggctagtgcaatgatgatgatgattactgcggtgatttcttcaggtttacgtaaaattgcattgccgcgtcttgaaaccggaacctatgcggttcatggcagcacatattatcgtaaatggtttgcggcccaaattttagaaacgagcttacaaaccttacatggcttgtttgccaccatttatgcgcctacatggttccgtatgcttggagcaaaagtaggtaaaaataccgaaatttctaccgcaaccggcgtcattccagaaatgctgactttgggtgaagagagctttattgccgatgctgtaatgctgggtgatgaagagattaaaggcggttggatgtctttaaaagcaaccaaaatcggtaaccgtagttttgtgggaaatagtgcttatattgctgatgggacagtgttaccagacaatgttttaattggcgtgcaatcaaaaacaccagataaccgtgaaatgtatgatggacaaacttggtttggttctccggcgttgctgttacctgcacgtgaagctgctgaaaaatatcctgaccatttaacctttaaaccaagtattaagcgccgtttaatgcgcgggtttattgaagggcttcgtattgtattgccggccgcacttgcgattggggtgggttatatgatcgtgctagacgttattgatgtgattaataactacaatattgagacgggtctggttgcattaacgctcgcaggactgctttatggtgttggctgtttccttattgttgcgctattaaagtggattttgattggtcgctatcaaccgcgttcgacacctatgtggaccatgtttgtatggttaagtgaagggattaccagcctatatgaatcagttgcgattcctaacttcttaaactacttaagaggaacaccaatgttgccattcttcttgcgtattttaggggttcgtattggtaaagacgtttatatggatacagctgatattaccgagttcgactgtgtcagcattggtgaccgtgccgagtttaatagcttctcgggcccacaaactcacttgtttgaagaccgtattatgaaaattgggcaagtaaatgttggcaatgatgtagtggtcaatgcgcgcagtattattttatataacgcaaacgtgagcaatcatgcagtgttagggccattaacactggtcatgaaaggtgaaaatattccggctaaatctgcatggattggttcaccggctgtgccttgggttcacaaataa

SEQ ID NO: 50785 - DNA, 423 bp, Acinetobacter baumannii
atgaatacagatgttgttgagttaaaaaccattaatgaagttggtttaccattagatcctgagacattttctagagtaatcctagattttttagggcgtaaagaaaatttatcttataaaagtcatgataattttattataaatcttgaagatatatctcaatttaatcatattttaaatagtaaaatttcttatcaaaaaaatattattcttgaacatttttcaattaactttggatattcagatggtacctttcgagaaataaatggcagtgaggctttgagtaaatttctggaaacaaggtcgattgatacaactagtataaatttaaattggaaaattattattaagtttgatcacagtcctactatagaaaggctttgttgcacaaacctatctctaaaggcttattccacaatataa

SEQ ID NO: 50786 - DNA, 1224 bp, Acinetobacter baumannii; identical to SEQ ID NO: 45777

SEQ ID NO: 50787 - DNA, 771 bp, Acinetobacter baumannii
atggatgggctgatattggatcttatttatattaaccgattaaaagaaaacacatggtttagtgtgctgccggaagcattccaaaagtttattctagaatatggcaagcaaattacttttgagaaaaacagctatgttttccacgctcaagatgagtttgatggtatttataccgtccttgaaggctcaattagtttaggttatgtcgatgtaaatggtaatgaagcactttctgcaattgctgagccgattatgtggttcggtgaaatatctttaattgaccatgaaccacgttcgcacgatgcgattgctttgaaaaaaagtacagttctacatattcctgcaaaaccattaaatgagctactaaaagaacatccatattattggtattattttgcacgtttaactagccaaaaactcaggtacgttttcttagaacagattgcgatacaaacacgcagtatttctcaaaggcttgcacaacgtcttctgttcattttagaaggatacggtaaccatattcttattcaagatcatcacattcagatttctcaagagcaattagccaacatgctaactacatctaggcagacgatcaaccatgaattgagcctacttgaaaaacaaaatattattaaaattgcttttagaaaaattgagattttagatattgaaaaattaaaagtaattgctaatcaaaacattgttcaaactctatttccacaaaataaatgttttaaagcagaatttttcaccttacactcaagctga

SEQ ID NO: 50788 - DNA, 768 bp, Acinetobacter baumannii
atgttgaatcaacatgagataaatttaaaacagtatcaaaataaatctttaagttatttgaatagcaccgctcactctgaaggggtcgagtttgataaattcattaaagaaattgatgaatatccaaatgccgttgttttagatttaggttgcggtggtggtcatgtagcttataacgttgctcgccatgcagatctggtttttgcttacgatttatctcatgaaatgctcgatacagtttcaaaagctgccaatgctcgaaaaataaaaaatatttttgtacagcaaggtattgctgaagatatgccttttactgatgaacagtttgatgtaattattagtcgatattctgcccatcattggcagcatgtaccaacagcaatgaaagaaataaatcgtgtattaaagccaaatggcactgttatttttgttgatattattagctcaagtttccctattttagatacatttttacagactatagaagtgattcgagaccctagtcatgtaagaaattacagtattaaagactgggttcactttattgaagatgctgggtttgaattaacaactttagagaaacaaaccctcaaactagattttgatagttgggtacagcgcatgaagacacctgaagatcaaataaaaacgcttaagtatctccaagaaaatgcagcagatgttgttaaaaagtattttaatattcaaaaagacggaagttttgaaagtaaggtcggatactttgtatttaaaaaactatccttctaa

SEQ ID NO: 50789 - DNA, 1095 bp, Acinetobacter baumannii
  misc_feature (50)..(59): n is a, c, g, or t
atgaaacgcttaaagtcccttgtctcagaacaaagtcaaatcaagcaccnnnnnnnnnnctctacccgactatttcgtcctcaaacattagtattgtcacaaagcactccatttgaagtgattggtgaattcaaccaaacccgtgttcgttattatgcagctacagaaaagagctttagagaaccattagtatttgtggcacctttagctattaatatggcgatttatgatttatatccatatcgttctcttatcaaatacttccaaaatgcaggttttgacgtataccttgtcgattgggggcgtttaggctttaaagatagacatcttaactttttatcgtttattgaagattttattcctaaagctatagagcttgtacgcacacattcaggcagtgatcaagtttctctacacggatggagtatggctggcatattcgttactttatatacagcgcataatcatccgaattatgtcaaaaaccttatagttttaggtagcccaatcgatagctatgcttctggttatattggaaaactctaccgaaccataaacaacactattgcccgcaataaaaagcttcaggaacgtatctactcaggtttaccgaagcgtttaattcataccccgggcattttaaattccttaggctttaaaattcttgaccctaaaggctggttcgatggtcatattcaattacttaagaaccttaataatcttcagttcgtacaagaacatgccacattaagcagttttttaaacaatatgattgattatccgggaggtattaatcaggacatgttatttaatgtttggctgcaaaatccattaatacaaggttctattcagttaaaagataaaaaaatcgaattgaaaaatatcgactgttcactcttagttggagctggtcgtagtgatcaattagtgacggcagatgcagctcagccattaagtcagttaaccagtagccaagatgttacatttactcttattcctggcggtcatttaggtctaatgtcaagccaagcaagtgcgcaggaattctggccaaagctagcaacatggctgagtgagcgttcaacaaaaatctaa

SEQ ID NO: 50790 - DNA, 2205 bp, Acinetobacter baumannii
atgcacggtatggcaggtagttattcaatggaaagacgttcgttaaatcttcacttcatgacatgctctaaaacagcattggcttcatctattgcactcataacatctgtcgtctatgcaaatgaagcggaggtttcgcagctcccaaccattactgtgaacgctacacaaaatagtgatgcactatacacatcaaaaaaagtgagtttatctggttttcaaactggtgatgtaaagaaagtacctgcatctattaccaccattacatctgaacgtatagcagatcaacacgcaaaaacactgaccgatgtgattaaaaatgattcatccttaggcgatggttatgctgcaattggctactatccaaattttgtagcacgtggttttgcgcttgatttaggctcaagctatctcattaatggccataccatacgtggcgaacaaaatgtagctttagaaaataaagaacaagttgaaatcttaaaaggcatttctgcaattcaaagtggaatgtcgacaccaggtggtgtggttaactatgtaaccaaaagacctgccgatattaaaactattacggtcgatgcaaattcagaaggcggctatacactggcaacggatgtaggcggctttgttaatgatagttttggttatcgaatcaatttagcccatgaaagcatccatccaaatgttgatcacgcaaatggtaagcgtgagtttggttcagttgctttagactggaaaattaatgagcgttctaaattattgtttgatattgaagctcagcatcaaagtcaacgttcagtacccggttatcaactgcttgatgggcaagaagtaccaacaaatgtagatcaagaccgtttattgggttatcagtcttggagtaaacctgttgtaaataacagtgtaaatgcaagtttgaaatatcaatatgcatttaacgatcaatggaatggtagcttaagtgcatcacaaagccgtgttgtgattgatgataatagtgctttcccatggggatgttataacgatatttgtgaatattctggtttgggcaatacttttgataaacacggaaattatgacatttatgacttccgcagcccagatgatacacgaattactaaccagttcgctgctgggttaaatggtcatttcaatactggcaacattcagcatcaaatcgctttcgaattacaacgtacatataaaaccttaaaacaccatacaccactgaatgtagcggtaggaacaggcaatatctatgaagatacggtcgactacagtccttcatcggaaagccctggcgatcgttacaaagctctagagagtgatcagactgcacttactgtatctgaccgagttcaatttaatgatcaatggtcaactctactcggtggaaaactgattcaccttgatgagcaagcttataattcagatgggcagcaaagccgtgatacggatttaaacaaattcttgccacaattagcactcatgtatagcccaacttccacgactaatctttatgcttcatatgccaaaggattatcagatggtggtgaagctccgtggttcgctaataatgctctagaagttctatctcctaaaaactctgaacaatatgaagttggtattaagcaacaaattcggaacttcttagtaacagcagctatttttgatttaaagcaagataatcaatatacgactgcaaattctgcaggagaattagaatttatttcacaaggcgaacaacacaatcaaggtattgagttaggtttaacaggtgccttaaccgatacacttgacgtaagttctggcattacctataccaaatctcgtctagttgatattgatactgacagttacaaaggtcatcaaactcaaaatgtaccgaaagtacgtgctacagcccagttatcttataaagtaccgtcagttgaaggattaagattactcagtggtatgcaatacagtagcagtaaatatgcaaataaagagggaactgcaaaagtaggcggatatagtgtctttaatattggtgctgcctataaaacaaattttgctgggcatgacactacttttagattcaatattgataacttatttaataagaaatattggcgtgatgtaggggcatttatgggagatgactatctgttcttaggtaatcctcgcacagctcaattttctacaaattttagcttttaa

SEQ ID NO: 50791 - DNA, 360 bp, Acinetobacter baumannii
  misc_feature (338)..(347): n is a, c, g, or t
atgacaaaaattgcagaaaaatcgaaacaagaatatggcgacttactaaaagaaaaagaccatttacaagatatggaacagcttgagatgactattgtctcgattcagacgccgtatccttctattgtaagaattcaaggaaaaatcaacacattacaaccagagctttggcaagctcccaatttggcaattcggttaattgtgaacaatccgccagagggacaacccatttcacgcgtctatacggtccgttcatttaaccctgtaaatgctcaaatcgaaattgattttgttaaacatgaagatttaagcccagcaatggaatggcttaattcggnnnnnnnnnngagacaggcttaa

SEQ ID NO: 50792 - DNA, 273 bp, Acinetobacter baumannii
atgaatgcttatttgcatcgtagtgaagatcgtggtcatgttaaagcaggctggttagagtcttatcatagcttttcgtttggtagctggtataaccctaaatatatgggggtaagtgcacttcgagtcattaatgatgaccgaatcgatgcccacaacggtttcggcactcactcgcatgacaatatggaaattttaacctgtgcatcttggcgaatatgcattggtgcatttgcgtcagggcctgcaatcaaatgccattcgttcggttga

SEQ ID NO: 50793 - DNA, 261 bp, Acinetobacter baumannii
  misc_feature (169)..(178): n is a, c, g, or t
atggttaaatgggttagtgcctggttcttggttattaatatttactctccgaataaacatgctgtttatacgataccgttccaatcagaacaagagtgtaaaaaagaagtacttaagcgtttaaaacatgatgctggtaacgaaattcttagcgttaagtttggatcannnnnnnnnngcgttaagtttggttcagaggtaaaagagcgaagatcatatagctgtgataaaggacaattacccgtatatccagttaagtaa

SEQ ID NO: 50794 - DNA, 1257 bp, Acinetobacter baumannii; identical to SEQ ID NO: 49188

SEQ ID NO: 50795 - DNA, 585 bp, Acinetobacter baumannii
atgcgctgccgcccctcactagtgagaggtagggcagcgcaagtcaatcctggcggattcactacccctgcgcgaaggccatcggtgccgcatcgaacggccggttgcggaaagtcctccctgcgtccgctgatggccggcagcagcccgtcgttgcctgatggatccaacccctccgctgctatagtgcagtcggcttctgacgttcagtgcagccgtcttctgaaaacgacaatggaggtggtagccgagggtgtggaaacacccgactgccttgcgtggttgcggcaggcgggttgcgacacggtgcagggtttcctgttcgccaggccgatgccggcggcggccttcgtcggcttcgtcaaccaatggaggaacaccaccatgaacgccaatgaaccgagcaccagttgctgcgtgtgctgcaaggaaatcccgctcgatgccgccttcacgccggaaggggccgagtacgtggagcatttctgcgggctggagtgctatcagcgcttccaggcgcgggccagcactgcgaccgaaaccagcgtcaaaccggacgcttgtgattcgccgccgtcaggttga

SEQ ID NO: 50796 - DNA, 3243 bp, Acinetobacter baumannii; identical to SEQ ID NO: 49967

SEQ ID NO: 50797 - DNA, 600 bp, Acinetobacter baumannii
atgaatgcattaaaaaatattgccaaggcatttttagctttaacaataggcgtgattttaggcattcttcttacccaattacatacccatattccctttaatagttggtatttactattactttttatttttttaatcggaatcgaacttgcttttactcattttaatcgtacatggttaagttggaaaattcttattgtacctttggccgcctttataggctcgtgcttagctgggcttctcaactattccttacttggtcatgagtttacacttaatgaaatattagctttgggccaaggctatggttggtattcaatgtcaggtattttatttacacagctacattcagctgagttaggtgggattgccttgctcacagatctatttagagagatagttgcaattttactcatgtatacaatgggttggcggtttccacgtccagcgatttcaagtgctggcgctacctcaatggatgtaacattagcaatggtaaaacagtcatgtggcacacattatgtaccacatgccatgatgagcggcttactcttaagtctactcgctccacttttaattactgtgtttttaaacttttaa

SEQ ID NO: 50798 - DNA, 999 bp, Acinetobacter baumannii
atgaaaattacctcagctcgtcaagatcaaggtattccaggagtctatggcttattgctattagatgtagtttcacgttggggatacaacgatgaaacattatttgctccttttcatcttactagtgagcaattggccgatcctgaatatcgtatttcaacacccgtagcaaatgagctagtcaaacatgccttaaatcttaccggtgaaagtacactgggttatcatattggcactcaaatgcgtatttccattcacggatttattggctacgcgataatgacagcaaaagatattacagaagcgattgctctcgctgcccgttttatccaattacgcttaccttttttacaattatatttttctactttcgggccaaaagccacattacaattgcaatgtgatattgagttagaacctcttcgtactgaaatcgttttaggtttaactattggtattatgaccatggctaaagcgattacgggtattgaagatttagcgggtgatgttgatttagactttccagaaccggaaggttttgataaatataagagcaaactaagcagtactattcggtttaaccagcctcatctaatctctagctttgacaaaaaatatttaggttttaagttagttaatgccgatccaatcgcaagtcaaatcgctattaaccaatgtgaagcggaactatctgctttaggcgaacgccgccgtctagccatgcgtgtacgtgatattttaagtaattctgaacaacattacttaagcatagaaaatgtagcagaatatttacatatgtcagatcgtaccttaaagcgacaattggcagccgaaggtacttcattttctactttagtagatgaagttcgatatcgtcatgcgacctctctgctttcgcgtacagattatagtcttgaacaaattgcagatgaacttggttactcggatgtcgcaaatttcagtcgcgctggctttgttgcacaaagatttaaaagttaa

SEQ ID NO: 50799 - DNA, 1209 bp, Acinetobacter baumannii
atgactgatattaccctagctccagtacaacctgatcaaccaacacatttaatggctacttatggtcgccaagcgatcagttttgttcgaggccgaggggcgtatctttatacacaagatggtacagaatatttagatgcactcactggtattgctgtatgtggtttagggcactctcatccagctattgcagaagccattgcagagcaagcagctacactcgtgcatacgagtaatttgtttgaaattccttggcaaactgcggctgctcaaaagcttgctgaagtttcaggtatggaagaaattttcttttcaaacagtggcgccgagtcaaatgaaggagcaattaaaattgctcgtaaatttggtactcaacaaggtataagcttgccaaagattattgttgctgagcagtcctttcatggtcgtactttggcgacactttctgcaacaggtaacaagaaagtacaagacggttttgcacctttagtggaaggctttattcgagtgccatttggtgatattgaagcgattcaagaggctgccttacagcatccagatatcgttgctattttaattgaaccaatccaaggtgaaggtggtattaatactgctccacaaggatttagctatttagaagaagttcgccaaatttgtaaccagcataactggttaatgatgctagatgaaattcaaactggtaatggtcgtactggtaaatactttgcgtatcaacatacgaatattattccggatgttttgaccacagcaaaaggtttgggtaatggttttccggtgggtgctgtaatgactcaaggtaaagcagtaggcttgttagggcctggcagtcatggttctacttatggtggtacagtattgggttctcgtgtggtttacacggtaattgatacgatccagaaggaaaatgcagtagagaatgcagcagtagtgggtaattatattgttgaccaattacgtgcccaattgtcggataagaatgtgcaagtacgtggtttcggtatgatgattggtatccaattacctaaagattgtgctgagctcgttgcgattgctcgtgatgaatacaaacttattattaacgttacggcaggttcggtggtgcgtttattaccgccaattaacatgacacaagctcaagctgatattttgctagagcgtttagtcgcattaattacgaattatctttaa

SEQ ID NO: 50800 - DNA, 1989 bp, Acinetobacter baumannii; identical to SEQ ID NO: 46156

SEQ ID NO: 50801 - DNA, 690 bp, Acinetobacter baumannii
  misc_feature (675)..(684): n is a, c, g, or t
atgaaacgatcggcacttggtttaatctatttaattcaaggaatgcgcaatgcgggcattgatgtcgactcacgtttggcagatataggtattaaagtagattccttggacccaagctcaacaattcatgacagtttggaatgggatatacagcaaattattagtgagaatgttgacccagagaaaggattatttattggacaacattacgcattggcaggttatggtcctttactcatgttacttgtgaccagccatgatatacaaacagccttagaaaaaggcatacagtatcaaaagcttacgcatttatttggtactttgagcttacaagaaactgaaaatcacatcattttaaactatttaccggtcgatttaaaaacagaaatcggtttactccgtgcccaatgcgaaatttcgggcacttataagtttattcaggatatttataccatgatgggcttaaaaatgcctgatatgcgtatagatttaccatttccgaaaccctctgatccagataccgttactcaatattacgcatattatggagatgatctacattttaattctacacatgcagcatttagcctaagtaagaatgtgctggaaataaaaattccttcagcagatattattactcatcgtatctatgaggctaaatgtattaaagaaatnnnnnnnnnngattaa

SEQ ID NO: 50802 - DNA, 1281 bp, Acinetobacter baumannii
atgaacactaagtacttatctgcattaaaaacaaatttcattaatgaaaacgaactagactcattattaagtgaaattcaggatttaccaggtcatccgcaatcccttacgaccttacaagatttcggatataaaatgggtgtaatccatgaagattactttaacgtaatgtcatctttcacatttcaacaatttgaaaaaagtaagagatctattctatacgtctacgataaagaactagtttataaacatatacaagcaatacagaaagctaaatatgtactacctttaattcttaagcagtatgaaaatacagagcgaaaacttaaagaacttatcgaaggttgtattgctgaaaaacaaaagtatcaaaggaactttgaattacgtcaaagacttagagaggtcttacaaaagaaattaagtgaactgacttctgataatgaagatgagtataaaaagctatctaagcttaatgatttaaatagcctgcaaattgtgaacagtgacttaagccttaagtcttttgatatggctattaatcttgctaaagataaattgggtaactttgatatagcgaagacacacggggatatgtggaacaccaattattctattaaagctttacagagtgataataaggccctgatagaaatttctaaagaccctgaaaaatatgacaaattcaatatcagagacttatctttagtaaattatgtttgcgtcataatttttgtacttgttcttcttgtagcgggattactaacgttaggtgataataaaagcgaaattaaagaaccagttcattttgcagcacttgatgtttataacatggtgaatggttcaaatccttcttcaacaataggaaaacataacaaagaattctttctaaaaaattatgaaagtacggttcaaatatataataaatcacaggacgttttagtagaatatttgaacggttcacgaactttgacaccacagaatagggaggctattcaaaaagggtataccatacttttgcagttagcagatttaaaaaaggatgatattactttttctattaatcctgatattaagtattcgtatgagtatgctttaggaatcaccaaaaagaatgataattttagtggcttttggaacttttattataaagccgtagtttattggtttttatttattttaatcccttttggcatacttaacggtttatctgaattaaggcaatatgaactgagaaataaaattagaaaaatgattgagccatattataagcataattaa

SEQ ID NO: 50803 - DNA, 1056 bp, Acinetobacter baumannii
atggaaaaacttgatcttgatattgatagaaaagatgaagttttagcaatagttgaaaacttagatctaattaagaacccacaaaaggtacttgagttgggggctaataaccgtgattcgttagctgatctttctaaccaaatgctgtcattagttactaatgatcagttgggagttatgggagaattaatgacggatattactgtaaaattaaaaagaacagacttttccattggtagtgataaatcaaatataccgttgataggggggctgttagcaaaaattggtaattcaaaagacaggcttattactaaatttaagacagtagaatcacaattaaatgataatttattgcaagtagcagaagctcagaaagggttgcaattaaataatgatagcttgacgaaattatttgagcatacaatttctgtttatactcaactaggttttgctgtcatagctggtcgatataaaaaaaatgagcttattggcttgattgagtcacttaacagtgaaggtacagatctagcaaagcaaagagcaaatgcatattcacaaatcttagagcgtttagataagcgtattacggatctagaattgttgagattaagtgccttacaaacgttgcctcagattacttttttgcagaacaataatattgcgttaattgaaaagttccaaactatatctggcttaactattccagcctggcaaagacaattaatgttggccttgaatattttagatcaaaagaaatactcacaattaggtgaggaaattgataatttcacaaacgaaacacttctagaaagcgcgaaagattttaaagaaacttcaattcatattgcaaaacaaagcaatcgccaagttatagatattgagacacttcagaaggtgcagcttgatacattaactgcttttgaagaagttatggcaatcaacaaaacttcagctcagaagcgaaaagaaacacaattacaggcacaacaattaaatgatcagctcaaaagcctggtcgttgcggatccgcaacaattaaaaatcagtgcagattaa

SEQ ID NO: 50804 - DNA, 2250 bp, Acinetobacter baumannii
ttgttcagcttttacggtaattttaaaactgggaatgatcaaagaattaatcaccgttcttttgtattaaatggtgttgcatctgcacaaatagcccttcgattaggctatgcattaggcaccgtatttgttctatgtgcatcaaatacctatgctgctgttattgataattcagcaaaaactctagaacaacaaactgctcaaacaaatgtagcagctttacccgcaattaccgtaaaagctgaacaagatgatacttatgcgggagggcaggtttcgtcgaaaagctcagttggctttttaggtaataaaaccgttatggaaaccccgtttaataccattgcgtatacggatacatatatcgccgataaacaggcaaaagatataacaagtgtgattgcgaaaacagatccatccgtgttcaccaatgcggcaagtggtggctggagtgaaaactattatattcgtggctttgagtcgagcccgagtgatatgtctatgaatggattgtttggtataaccccttattatcgaacttcacctgaaatgtttgaaaaaataaatgtacttaaaggtccttctgcattactcaatggaatgccaccaacaggttccattggtgggacagttgatctcactaccaaacgtgcaacggatgaaccattaacacgtttgactacgacatatatgtctgactctcagtttggtgggcatttagatgttggacgacgatttggttcggacaaggaattcggtgtgcgagcaaatgcggtatatcgggatggctctggaccagtagaaaaacaggatttgaaaactgagttattttcattaggaatggattggcatggtgatcgtgcacgtgtttcgacagatctttacacatccaaagatcgagtggatggcgtaacacgaggcatcaacctcggaaaagatatcgcgattccgaaaccacctaaacctgagactttactcaatccagattggtcttttgtggacattcaagataagggcgccatgatacgcggtgaatatgatctgaccaataacgtgatggggtacgcaacctatggacaaagtaaaactgaatataaatataatggtgcgatgtcagcaactgttttagataacactggaaccttccaaacaagtattggtcaactggcatttaatgttgataaaaagtcggcagatgtagggctgaaaggaaaatttaatacaggagcagtaggacatcaatgggtagtcaatgcgacatattacaaacataatcaagatgattatggggtaagaaatgtggcaggagctgaatggacgactaatctttatgatccaatttgggggaaagctgtcccttttaatgcacccctaatatctaattctgaattgcaattaaatagttacggtttggcggataccctatcttttattgaagatcgcttacagttaactttaggtgtacgttatcaagaggtagaaagtagtaatttatttgtgccgacatcgactttgactaaatataaaaagaatgcaacgacaccaggcgccgcaattctatttaaagcgacagataaagtttcgatttatgcaaactacatcgagggcttaaccaaaggtgatgcagccccccttactgcggcaaactatccaacaatatttgcaccttacaaaacaaagcaaacagaatttggggtgaagtttgatcaaggtacatttgcgcataccttgtcattgtttgaaatcaaaaaaccaagtgcttacactgatttagtaactaatatatatacgtctgggggagagcaacgtaatcgagggattgaatggagtttctttggatcaccaattgaaaatgtacgtttgatgggcggtgcatcttatattgaacctgaagtgactaaaacagccatccaaagcaatgaaggaaatatggccgtaggtgtccctaaaacacaagggaaattaggtgttgaatgggataatgaagttgcacaaggcgttttaactttatctagcaatgcaaccgcagtttcgaaacagtatatcgatcaagaaaatacattgcatattcctggacgtacgctgatagatgtcggtgcacgatataaaacttcaatctcaaatcatcctattacttttaaagcagacatcaataacttgatgaataaagcctattggggaatgcctaaactatcgaatttggctttaggcgcaccaagaacgtatatgctatctgtatcatatgacttttaa

SEQ ID NO: 50805 - DNA, 2157 bp, Acinetobacter baumannii; identical to SEQ ID NO: 46110

SEQ ID NO: 50806 - DNA, 507 bp, Acinetobacter baumannii
atgatcagtttatattttctggcaaattggctaccgactttggccaaagagtccgggctttcattaaatcaggcattgttgatcggctccactctacaattaggcggtacgattggtagtgtggtgatgggccttaaaattgataagacaggattttataaagtattaattcctgtttttctggttgcagtgattagtgttgctttaattggctattctgttagtcatatcgttttattgtttattatcatttttattgctggctttgccattgttggtgggcaacctgccattaatgctttgtcggccagttattacccagtttcacttcgtactacaggggtgggctggagtattggaattgctcgtttgggttctgtcattgggccgttatttggcggttatctctctcaatttctggtcattacccatttatttgtgattgctgccataccttcgctattcgtcattatcatgctgatgattcaggccaagtatcggtcataa

SEQ ID NO: 50807 - DNA, 1005 bp, Acinetobacter baumannii
atgattgattgggcatctgcaatactcccttgtaaacacgaccctagtaagctcatatcgggcgttgttatgtcatttgacccattgggtaacaatgaatggattgttaataaaacattgagtgttgagggttcttattcttcaaagattcaaattaaatctcatactgataatcagatttacatttcgggcaacccaactaaatttttacaaggtcataacctattcggttctaatgacctagtttcaataatggattcttgttttgaaaagcttttgacatacgataatttaggtttatgccccgacccatttcaaagagctgctattaaagatggttactatgaactgactagggtggatgtaaatgaaacttggcatctgaaaaataaaaatgaggttctagcctggattcgggctgtaggtgaaacagcaattcttaaacatcgtggggctggtcaattctctggtgatactgcttattttggtaaaaattctcgccgatggtctctaaagtgttactccaaaggtttagaaattttggcaaaaggtcataaattaccacaggaattatgtattcctgaaatgattgaatatgcaaacaaagccttgagaatagagggtgttataagacaattagagcttaaaagacgtcatttaaatgtagctgctaattgggatatagacacagcagaggtgttactcctagaatatatatctaaattagaaatgagtgatgtctatatgctcaaagatgatgttcttgactctttgcctcatcgcctacgccttacatatcaatcatggctaaatggtgatgatctgaagcagattttaccccataacactttttatcgttataaaaaggctcttcgtgaatatgggatagatatttctacaaagtcacctaaagagaaaaataatgtaattccattaattcgggttttagaagcaaaacctgtaggtattcctgactgggcttatgaaaagggtctagtcgcttaa

SEQ ID NO: 50808 - DNA, 225 bp, Acinetobacter baumannii
atggctgatgccaatactactgctttcgaatttttaggcaagactgtttcatttgaatatgtccgccacattcaaataactgaacaatcttcgattgattttagagaaaaggtttctggagtcatcactaatattgttctcagtctcaattctgaacctgaaatttctataaatgatggggatttttactccctatctgatttaattaatttcacagtttcctaa

SEQ ID NO: 50809 - DNA, 840 bp, Acinetobacter baumannii
ttgtcgttaagcctaacgctttgtaccataccgtctgctaagcgtacttgggggtttgttgagtcagatccagacgactttcaaaaggctactgttaaaaatggttgtactacctctatctatagacctaataaagaggtatttaactggtatgaatctacggtattagatacccacaaatttaaaattcctaccaagttatttaagatggttggtcttttagctgctcttgttggtttctctgtatatatgggatatccagtatttaataaatattttggttctaaagaacaagaagtctctgctacagacacttcaccacagcctaataattcaaatatgaccttagctgaaaaggctaagcttgatgcagctatggctggacttactccagagcagtacgctgatttaatgcatcctgaaaaacgtaacgctgaactccaagctgttaacgatgtaagaatggaaactatagccgtaaaatataatcctaatcgtccttacgatatggatacttcacagattcaatatgaagttaccgctaagcctgttttttcaggttgtatgaagaaaaatggtaaatacgttgcttatactcaacagggaactattttgcatgatgtaagccaatctgattgccgtaaacttatggaagatggcgatagaccatttaattattttcaggttcagaataaccgacctgctcaggtaaataatgctatgccacaggtgcagatgcagcctaattattcttcttatcaggctaataattatgttcagcctaacctacagcgtagttctgtagatggtgcaaattctcaaagttctttttctttctga

SEQ ID NO: 50810 - DNA, 495 bp, Acinetobacter baumannii; identical to SEQ ID NO: 20174

SEQ ID NO: 50811 - DNA, 510 bp, Acinetobacter baumannii
atgctcaagcttcacgatttttgcaacagagcccacacgagtattgagcatagtcgagattggtgcagatcacttctgatattgaactgtcaggagctggctgcacaacagccattacgcccaatcaactggtgcagtcgtcttctgaaaatgacatttggtatctctcataaacggatgtttttgagagaactatcttcggccttcacacgcacgaaaggcggcgaagctccgccgttaatccgtccgccggagatctcgcccaggcaggctgaaggccgagcaagcctgacaggcccgaaaagcccggcacgggcgtcggcggcgatgacggcggcggcattatccagggttgatgatggaagtggaggatatcgacaacctctcgcgcaaccaagacatcgcggtcggactgcaagtgatcttgaagccacgggcccgtcccaccccgacatggacctcgatgcccgaacggacgttagatttcgagttctaggcgttctgcgatga

SEQ ID NO: 50812 - DNA, 678 bp, Acinetobacter baumannii
atgaaaaaagttctcttgtttgacctagatcaaactattcttaaccgaaatgaatcacttttaaaatttcttaactggcaagtaagctacttaaacttagtaccccatgagctaaaaaaatcttttattaaccgattcatagagctagacaataacggaagcgtttggaaagatattgtttacagtcaattaattaaagattttaatatcaaaaaatatgatacatctgaattgctgcaatcttacattaatgattttaataaattctctacagcatttgaaaatgctccaaaaactattcaaaatcttcatgctcaaggatacacattaggcttagtatccaatggaaaaacaccttttcaggagaaaaatttttatgctttagaattaacggactatttttcgattatcgtgatttctgaagctataggtttaagaaaaccagatcctgaaatctatttatacacttgcaatcaactagattgtaagccatcagattgtatttttattggagacaatcccaaagcagatatagaaggtgccaaaaaaattggtatgaaaacaatatattttcatccaactcttacccttcatccttctctttcagatgcaagtattcatcattacgatgaacttgaagaaacggttagaaggttaattaatccgcctcatttttaa

SEQ ID NO: 50813 - DNA, 195 bp, Acinetobacter baumannii
atgattgatttcattctaactccttacacttttaagtatttcagagagtattcttttattagtattaccgatagttctgctgataatgcaattgttgttgatgacaaaaagaaagggattttcaattttgtcttcagtatcgcttcattaactttaggtatgctcgttctcaattttgttaagggattattctaa

SEQ ID NO: 50814 - DNA, 243 bp, Acinetobacter baumannii
gtgacggatgagtctgaaaaggattttacactcaaaatcaataacttggttggaataaaatacagtaaagatcaattaaaggatcaactcgaaaaagacaataacttttatcgtggacgagagttatttattaatcatgctggggatttaccgcaattaatgaatgaaaaggaaatacaagattttcatattactcaagaacaaagcttacaacatgatgttggcgtagaactagacagataa

SEQ ID NO: 50815 - DNA, 1266 bp, Acinetobacter baumannii; identical to SEQ ID NO: 49209

SEQ ID NO: 50816 - DNA, 939 bp, Acinetobacter baumannii; identical to SEQ ID NO: 48602

SEQ ID NO: 50817 - DNA, 1338 bp, Acinetobacter baumannii
atgctgacattacttggtgttggcatgattttatgcttcatgtatttaatcatgtccaaacgtttaagccctattattgctttaattctcatcccatttattttttctcttattgcctggggccttggtcactactttgaaagcttgagccatattgagcttaaaggtctcagtgaaatgatgttagatggcatcaaaaaacttgcgcctactggcgtaatgctattatttgcaattttatattttgccttaatgatcgatgcaggtcttttcgatcctccggttaaatggattttgaaaaaagttaaaggtgaccccctaaaaattacattagggaccgtttttttaactacattagtctctcttgatggcgatggctcaaccacttacatgatttgcgtggcagccatgctccctctttatcaacgcctcggtatgaatacactgatcatgacagcacttatgttgttatgtagtggtgtaatgaatctgaccccatggggtggtcctactgcccgtgcagcaagtgcgctccaagttgacccaagccatatctttgtaccaatgattcttccgatggtgattagtattggctggttattcttcttggcatatttatatggtcgctatgagcaaaaacgtttaggcgtgattgagcttgaaagtcaccatggtgacaacattacagtttcaaaagacccagaagcaactcgtccacatttacgtaaagtaaatatggtactcaccattcttcttatgattgcattgatcaaaggtattttaccgatgtcagtgttattcatgctggcgttctgtattgcaatgctcatcaactaccctgatgttgatatgcagaaaaagcgtatcgctatgcacgcagacagtatcttggctgttgtaggtttaatttttgcggcaggtatttttacaggtattttatctggtacaggcatggttgaagccatgtctaaagaatttgttgcaatgatccctacaagtatggggccatatctagcgccaattactgctctggtgagcatgccattgacgttctttatgtcaaatgatgcattcttctatggtgtattacctattcttgctgaagcagcttcacattatggtattagcccagaagcgattgctcgtgcatcaattgtaggtcagccagtgcatttgttatcacctctcgttccatcaacctacttgttatgtggtcttgctaaagtcgactttgcagaccatcaaaagttcacttttaagtgggcatttattacttgtatggtgttaatgggtacagctttagtgattggtgttttcccactttttagtacgatgtaa

SEQ ID NO: 50818 - DNA, 1404 bp, Acinetobacter baumannii; identical to SEQ ID NO: 45796

SEQ ID NO: 50819 - DNA, 414 bp, Acinetobacter baumannii
atggcatatgatgatcaaaatatcttcgcaaaaattttacgtggtgaacttccagcgataaaactctatgaagatgatcaagttctagcttttatggatattatgccccaagccgatggtcatgcattagttattccaaaaactcctgcagtaactttacttgatttacctcctgaagcggcagcttataccatccagatcgtgcaaaaaattgctaaggcaatggaaactgcattaaatttggatggaattgtgctcatgcagttatcaggagcagctgccggacaaactgtccctcatgttcattttcacctaattcctacaaatgttcaccaacttggcaaacatgcggcgcaattaggagaccaagataaaatcaaagctttggctgagaaaattaaagcagcactttga

SEQ ID NO: 50820 - DNA, 1176 bp, Acinetobacter baumannii; identical to SEQ ID NO: 49211

SEQ ID NO: 50821 - DNA, 498 bp, Acinetobacter baumannii
gtgcatttatttgaattacaagatgcttatcaacaaattcttcgtgatactttgcagattatccctttatccgcaaaccaaggtggtcaacttcatccagctttagaaatcgataatcaaattttacgttttagcaaagcaggcgtaacggatcctttaaaacaaggcttatcaccatttgaacgaattgaatatcgttatgatgcagaccaaaaaaaattatatcgtcttaaatatacaaatttgaatacttcgaacagagagcaacctttatcgagtactttgttaagtcaagtcgaccaatatcagattatggttttgactccgcaagaagtcacaaaatggcccgaggttaatattgatccaacgaaacctaatgagttaaaaaaattaccgaaagggataaaaatccaacttacagtcgctggtgtaaattatgagtggatttatagcttaaatcagggtgacttatcgctttcgcaggaaggtaattcataa

SEQ ID NO: 50822 - DNA, 789 bp, Acinetobacter baumannii
atgatgtcaaataatttacctaccattcatgctttgtggattggagaaaaacttggagcaatttctagatgttgcttacactcttttgtaatgagggggcatgaagtccatttacatacatatgcagatattatagatgttccaaatggagtaaagttggtagatgcaaataaaattatttctaaagaccaaattataaagcataaggaaacaggaagttatgcattattttcagacattttccgttatgaattaatgcgtaaagttgatggtgtctatgttgactgtgatgtgtattgtttaaaacctatttcaataccagagcatggatacttattaggctttgaggatgatgagtggattaacggagcgattttgcgtattcctaaagaaagcgatttacttaaagaactattaaaagcggcatatgatccattttttgtaccaccatggttctctatgagtaaacaatttaaattaaaaacaaaaaaaataatgggaattggaaaaagtttagcagatatgccatggggagttattggtcctaaagccattacttattatgttaagcaattggacttaaaaaataatattcaacccattgatattttttatcctgttcactatcaatgtataagtcagctttgtgatcctgccctcactatagatgatattactacttctcgtactacttgtattcatttatataacgagatgttaaaaggtataaaactagaggaattagatgatcgtactattatgtcacgtcttttaaaatgtgatatttaa

SEQ ID NO: 50823 - DNA, 648 bp, Acinetobacter baumannii
atgacatcattgcccactttagctagctcaaaccagcacaatttagaaacgtatattaatagagaactatctttattagagtttcataaacgggtgcttgctcaagccaaagatatagaacacccattactggaacgtttgaattttttaattattttttcgcgtaatctggatgagttttttgaaattcgtgtggcaagtttaatccagaaaattagcttgatgagtcaggcaaccggaccagaaggtttaccgttagtagaagtattaaagcaaatttcaaaaaatgctcatgaggcggttgaagagcaatataaaatcttaaactatactttgttaccgcaactccaaggctatggcgttcattttattcagcacggcgatatattagaaaagcataaagaatggattaaagaatacttttttaaagaagtacaacccgtagttacgccaatcagtctagatccagcacacccatttccaagattggtcaataaaagtctaaacttcattgtaactttagaaggtaaagacgcttttggacgtcttcacaaatttccgcatcattggtcagcaaaccaaaatcggtatagattttggcattcactgcatgatagttgcctgtacctaaatgcacatatcttttga

SEQ ID NO: 50824 - DNA, 744 bp, Acinetobacter baumannii
ttggctgctgctttaaaaggcgaattatcttcacgccgttttggccaagcagttcgtttggaagtagcaaaaaaatgtcctgaagaaattgctaactatttattagagcaattcgatttagatgcagaacatctttactacgtcgatggccccgttaatttagcccgttttatctcaaactttgatttaccagagttacgctataaaccatatcaacaagttttgcctcagcttttatacactaaaaaaccgatttttgatgtgttaaaagcaggagatgttctacttcatcatccatttgattcttttgcacctgttatcaagttccttcgggaagctgcgcaagatccaaatgtcttggcaattaaacaaaccttataccgtagtggtgccaactcggaaatcgtacagctacttgcagaagcggcgcgtaatggtaaagaagtaaccgcggttattgagttgcgggcacgttttgatgaagaatcaaatattgaagtcgcaaacgttttacaagaagctggcgcagtcgtggtgtatggcattgttggctataaaactcacgctaaaatgattttagtggtccgccgtgaacaagacaaaatcaaaagatatgtgcatttaggtacaggcaactatcatgcagtgaatgccaaaatctataccgattttggtttgctgaccaatgatgcggaaatttgtgaagacgtccaaaagcgtctttaccttctaaagttacaatga

SEQ ID NO: 50825 - DNA, 834 bp, Acinetobacter baumannii; identical to SEQ ID NO: 46183

SEQ ID NO: 50826 - DNA, 639 bp, Acinetobacter baumannii
ttgaataacgtagctcgtatttacatgcgtgtcagtacagagaaacaagatcttgagcgacaagataaggtgataaatgatgcgcgaaatgctggttattatattgcagcagtctatagggaaaaagcttcaggtattacacctgatcgtccagaacttaataggatgatacatgaccttcaagccggtgaagtagttattgcagagcgaattgaccgtattagtagattaccattacctgaagccgagaagttaattgttgcaattaaagaaaaaggtgcaaaactttcaatacccggtgtaattgatttatctgaattttcaaaagatgctagtggaatttctaaaattgtattagatcaagtacaagacatgttgctaaaaattgcattgcaaatggcacatgaagattatttgttaattaaaaaaagaagggaagagggaattgaacttcgaaaaaataaaggtctttacaatggtagaaaagctgacaaaaaacttcacgataaaattgtagagttaagaaagcagaatattagtatttcaaaaacggcattaatagcaaattgtagtgtttctttagttaagctagtttggaagagatatagcgaatcaaattcatctcaagctttaaagtaa

SEQ ID NO: 50827 - DNA, 435 bp, Acinetobacter baumannii; identical to SEQ ID NO: 26756

SEQ ID NO: 50828 - DNA, 165 bp, Acinetobacter baumannii
gtggctttagctcatccagataccgacttacgtttgtttggtaaaccagaaggtttcaaacgtcgtcgtatgggtgtggcaactgctcgcgctgaaaatactgatcttgcccgtactttagcgaaagaaaccgctgatcaagtaagcgttcaaactaacttttaa

SEQ ID NO: 50829 - DNA, 780 bp, Acinetobacter baumannii; identical to SEQ ID NO: 30171

SEQ ID NO: 50830 - DNA, 336 bp, Acinetobacter baumannii
atggcaaaaaaaggcataaattctttaaatctcattaatagttatgagtcaaaaattatgaatgttaagttatcaactgttgaagcagctctcaatactccgttaaaaccattagaattaaattccgaagtaaaatgtcctaaatgtaaaagtcggaatctcatatgcagcgttagataccaaacagcagatgtaattcattttgaaaatggatgttttcaattaaaggaatcagaagcatcaaagattttcaaaaaaattgatctggaatgtaaagactgtggcaataaatttgaaaatgaaaaagttaagacacccaatgaagtgttgttctaa

SEQ ID NO: 50831 - DNA, 513 bp, Acinetobacter baumannii
gtgtttacaggaaccttaggccgtatagaccgaacagcactaaaaaaacgggaacgtgcacttcgtcaatttggttttaaagagctggaaactggtatttacatccgcccagacaatttagcttatagctttgaaaaaacctgtgatgagcttgttttagcagggctagagaaagaagcaaaaatttgtattattcagcatttcgactcaacaacgcttaagcaaattttttctttatgggataccaaacaactcgaaaaaaattatgaaatgtatagccgagatattacgcactggcttgaaaattatgctcactcccctttaaacgatgcagcagtcaaggcacttcttttaggaagggaaacaattgccttactcatgaatgatccattattacccgcgccatttgtaaatgaatctgctcgtaatcaatttgctcaagatgtacagcaactagatgcaattggccagaaactttggaaaaaaatatatgaacaggaattaaatttatag

SEQ ID NO: 50832 - DNA, 381 bp, Acinetobacter baumannii; identical to SEQ ID NO: 49207

SEQ ID NO: 50833 - DNA, 585 bp, Acinetobacter baumannii
atgaatgaattaagttttattagaaaaaatttaagatctagaagacgagctttaacccaatttgagcaaaaacaggctcagcttaatgttttacattgcctaaatcaccttcctatttttcattcatcaaaaaaaatcggtttatatctgcatgctttcggtgaaatccataccgatcttcttatcaaattatgttttaaaaagaacaaacaagtttatttacccatgatttgttcgatgaagcaacgtttagtatgggtaaaaataaataaaaaccaatatttaagtcgtcgtttttctcatcacccattgggaatgaaagaacctatggcgactcgcggaaaacatgtagcacagcttgatttgctacttatgccacttttagcttgcgatcactatgggacacgtattggtatgggtggtggttattatgatcgtacattagctagtgctaaacataagccctaccgtttaggattggcacatcaatttcaatttattgaacacactttagaacgtcaaagttgggatcaaccattagatggtttactgactccacagcacttttattattttaaaagatga

SEQ ID NO: 50834 - DNA, 198 bp, Acinetobacter baumannii
atggggtttaaatttagtttaattacgctaattattacagcattaggtgtactatttattttggtaggtttgtattggtacaaatctaaaaagtatcaaaatgatttatgggttcaaaatgtaggccatatgactttaattatcggtctatttctgagtataaatggcattggtttttcaattaaatttaatcagtaa

SEQ ID NO: 50835 - DNA, 378 bp, Acinetobacter baumannii
gtgggtacgtttgataatgatgtagttgagacagctacagccaaccagacatattcatatactttagatacaggtgcagacactttaattttcaaagttcttgatgacattgataatttaggtggtaatagtaatggagagtggacagattttaatctttcagagaatgataaacttgatttgtcacaattgcttataaataacaatggaaaccttcaagaatttataacggtaaaagatacgcaggctggagtagttatgtctgtagatagagatggctctaatcaatccacttatcattcacaagaattaattctacttactgctaagcactatacgttagaggatttaatggcttcaaatgcatttattcattaa

SEQ ID NO: 50836 - DNA, 684 bp, Acinetobacter baumannii; identical to SEQ ID NO: 49392

SEQ ID NO: 50837 - DNA, 162 bp, Acinetobacter baumannii; identical to SEQ ID NO: 49509

SEQ ID NO: 50838 - DNA, 432 bp, Acinetobacter baumannii
atgatgcatgagtttgcacactgtattgatattaaaagagattatttaacatttaatatcaatgcagataattcaaataagacaacaattttaggtacaaatgctattacaccaaaatttagatcacacgttaaagatttaatcacttatcaagagtttgggagtgcttctacattgtggaaagaggtttttgctgatctttatatggcaggttatctatatataaatcatcccggcattgcggaccaaattgtacaaaattggagtaaattaagggaaaaaaatgcagaagatgatgaaggtcattcaactagttgttggttaaatattgcacaaaaattaccaaaacctaagacgaacaaagaattaattacatggtctgacaatattaggtccaccagcaaatgtaaaagtgatttttataagtcttaa

SEQ ID NO: 50839 - DNA, 495 bp, Acinetobacter baumannii
gtgaggtttatttcgcagggatattttcttaatcagaaagctatagatttatatcaattagaaaaaagtgttcccatagaatatgtgcctaatccaattgatatcgatttcaattttgatgttaaaacttatgttaaaaagaatataatcatttttttaggtcgtttagaatctgtaaaacggggctggctattttgtgaaattgcaaaaagaatgccacaatatgaattctatgtattaggacagacatttagagaggaaagtaaaaataatgagattatgaaaagatatcaaaatattgataatttacattttgcgggtcatgttgaaggcagtgaaaaagaaaaatttttaaaagatgctaaattacttattaacacctctattcatgaagccttacctatttcatttttagaagcactttcttttggaactttattagtaagtaaccgtaatcctgaagaattaacgaggctttgttgcacaaagatttaa

SEQ ID NO: 50840 - DNA, 489 bp, Acinetobacter baumannii
gtggtatcaactgtatatgtttgtgtatcgttaacactgctgctattacctgccgcatctgtaaacgttactttggcatcaatcgttttatcagtatcagcaaccaaaccgctacctggtacgcttactgtccatgtgcccgctgtgctatctacagttgcagtatacgtctggccattgatcacaacagtgaccactgtatttgctgcatctgccggaacatttttcaatacgcctgtaacagtaacgttgcctgacgcttctgatgcattaatcacattgtcagctgttactgaatcaaccgtgaagttaacgccatcggtatttggaccaactgcatcaacaatagctgtacctggtaaagatgggttgcctgctggatctgtagcaattgcctcaacttcgtcaccatcatttaaacctgggtttggtactgaccagctgccatcaggtcctgctacaactgttgctgtgtcaccattaggatag

SEQ ID NO: 50841 - DNA, 162 bp, Acinetobacter baumannii; identical to SEQ ID NO: 46255

SEQ ID NO: 50842 - DNA, 240 bp, Acinetobacter baumannii
atggtagctttaacgatagggttaaatggctgtgcaagcatcattacaggttcttcacaaacacttacttttacaagtgtgcctgagtcagcaactattgagattaaaaatcgtaatggggtaaaagtccatacggggcaaacacctgctaccgttagcttaaaaaaggtgccggttatttcaaaccagaaagttatcaagtatctttcagtaaacctggttatcaaactaaaacggtag

SEQ ID NO: 50843 - DNA, 234 bp, Acinetobacter baumannii; identical to SEQ ID NO: 49212

SEQ ID NO: 50844 - DNA, 231 bp, Acinetobacter baumannii
atgagtgagtcaagacatttagtgctaaagcgtcaccctactttgaaaggttatctggttatttgtgatgaagaaactggacagccactagctggacaaagagcagtacagatgaattctgatgccttaaatggacccgcaacaattactgtaacttttgaagcatatggtgctcatggtgttcgcttactgactgatgaaccaaggccgactcaaacaaagcaaatgtag

SEQ ID NO: 50845 - DNA, 186 bp, Acinetobacter baumannii
atgaaaccatatcaacaggctttagatattgctttaccaacagttagaactgtaaatgatccaatcctgaattctgtatttgtaaaaggaagttatacactatcagaatatggatcactcgcaaaaaaatacaacgaaagatcagaagtaattaaatcatttgccattaaaaactcttgtaaataa

SEQ ID NO: 50846 - DNA, 483 bp, Acinetobacter baumannii
atgaatgcacaaaaaggttttacattaatcgaacttatgatcgtggttgccattattggtattttggctgcgattgcgattcctgcttatcaggactatacggttagaacaaaatgggcttctaatgtagcagatgtggaaggcattaagtcggctattaaaaattgcttaaatgatcaagcaacagatggtactaaatgcgatacactaactgaacttcagggatatgattttcctggcacagctttacctactcctagctatgctatggccgctgtaacaattactggtacagctccagcggcagcatcggggactactccagcagcaccaggtaaggtaaacattgcatttacaggaacatctgaagtgaaatctctagtttttaatgcagattgtagtgtgaatgctggtggtaatttcgagtgtactaaaactagtactgatactttggataaatatatgaagggtaataagcgttaa

SEQ ID NO: 50847 - DNA, 1413 bp, Acinetobacter baumannii
atgtcacaaaactccacactacagcggggcttaaacacccgccacattcgtttcttggcattgggctcagcaattggaactgggcttttctatggttcggcaactgctattaaaatggcagggccttcagtattacttgcttacatcgttgcagggattgcaatttatattgtgatgcgcgcactgggtgaaatggcagtccataaccctgtctctggctcatttagccactatgcttctcagtacattggtcctttggccggctttacgacgggctggacttatgtttttgagatggtgattgttgcaattgccgatgtcactgcgtttggtatttatatggggttctggtatcccgatgtcccacggtggatctggattttgtctctcatcatgttcttgggcgcaattaacctcattcatgtgaaagtctttggtgaactcgaattttggctctcaattgtcaaggtgagtgccattgttgccatgattttagggggcttaggtttgatgttctatggcttccatgctgaccatagcagtgtagtgccggggattcaaaacttatggatctatgaaggctttatgccacatggcattgcaggcttggttgcatgtttatctgtagtggtatttgctttcggtggtatcgaaattattggtattacagcaggtgaatcacaagacccgaaaactactttacctaaagcaattaatgctgttccggtacgtattttacttttctatgtactaaccatctttgtactcatgtcgattttcccatggaaccagattggtagccaaggcagcccgtttgtacaaatttttgaaaacttaggcattaaatctgctgcaaatattttaaatattgtggtggtaactgctgcaatttcggcaattaacagtgatgtgtttggtgcaggccgtatgttgtacggtatggcaaatcgtggtcaagcgcctcgaattttccaaaaattatcgcgtaatggcgtgccttggatgactgttgtggttatggctggcgtactgttaattggcgtcgtgctgaactacctgattcctgaaaatgtgtttgtcatcattgcatcaattgcaacgtttgcaactgtttgggtatggctcatgatcttgctttcgcaagtggctatgcgccgtaaattatctactgctgaaattaaggcacttgatttccctgtatttggctggccatatgcccctgcttttgcaatcggttttatggtgttcattttagtgatgatgggctacttcccagactcgcgtcctgcaatttatgtaggaatcacttggcttgctctcttaactattgcttatcgtatttgggtaaaaccagagcaaagcttgggaaaggaaagtgagcctgtccagcaaaacatagaaatggaaagctaa

SEQ ID NO: 50848 - DNA, 534 bp, Acinetobacter baumannii
ttgggttcaaaccgtgaactttctggtgtcgagcttgccattgccgagcaagaaggtcgtgagttcattttaaagaatgctttgaatgaaattcgggactcattcgattacattattgttgattgcgcgcctagcttaagtttaattaccgtgaatgctttagctgcagtagatggtgtaatcattccaatgcaatgcgaatactatgcattagaaggtttggcagatttaactcaaacgatcgatcgtattcaaaaagcgttaaatccagatttggaaattattggtgttttacgcaccatgtatgatgcgcgtaatgccttaactcgcgatgtatctgctgagttggaacaatattttggtaagaaactctacgacactgtgattccacgtaatgttcgtttggctgaagctccagcacatggtttgccagtgatttattttgaaaaaagttcgaaaggtgcagttgcatacttaaatcttgcggctgagatgttaaagaaaagtaaagtgaagaaaggaagtaaagtatga

SEQ ID NO: 50849 - DNA, 150 bp, Acinetobacter baumannii
atgcctcttcgtttaagaacattgcgtcaacaaaccctacactccaatcacctaggcttgattcaacgtcagcttcttcaacttcaaatggaaattcaatcccattttcatttgctaaatcttgacgaatcgactctagccaaaccttga

SEQ ID NO: 50850 - DNA, 360 bp, Acinetobacter baumannii
atgaacgacttgataacgagatgtgtaaataatctggggcagtggcatgaagttgcactgacaatgactaaagcgatagttgcaataggggtgttgtgcttagttgcttatcttttaacaattggctatatcccgtcggaaattagctttggtgatacacttatttttctactgatttttgctgcgttctctattgcttacgctgtattagggtttatgctatttttctttggcacatccttagctccagtgacctatcttgtcttaagctgggttgataagtatttaccacctcatattagaattgggaaaaaacttccttttccaaaaattaatattattacgctctgtacacgataa

SEQ ID NO: 50851 - DNA, 1056 bp, Acinetobacter baumannii
atgaatgccttaaatactttactaactcaaagcaatacaaaagaaacaccagttagtttacctgttcagttaaaagctaaatacccgcttgtgcagaccttcgcacgacaaattgcagaacatcgtcaaattattcaaaatattcttgctggcaaagatcagcgcttaatggttattacaggaccatgttcaattcatgacccagttgctgtacttgaatacgcagatagattgcaaaaattacaagaaaaagtaaaagatcaaatcttcattgtgatgcgtgcttatattgaaaagccgcgtacaacagtaggttggaaagggtttatgtatgacccaaatcttgatggttcatctaatctacaattaggtttagaaaaatcgcgtgagctatatttacaaattattgaaaaaggcttaccgattgcgagcgaaattttaagcccaatggcaacaggctattttgatgatttattggcttggggtgcaattggagctcgtactagtgagtcccagattcaccgtgaaatctcaagtcatatgccatacagtattggcttcaagaatggtacggatggctcaattcaaattgctttagatgctattcagtctgcacaaaatgagcatcaatttttaggtatgaatcagcaaggtttgccttcagtgattcagagtgctggaaatccattgccacacttgattttacgtggagccaatcatggtcctaattatgatttggcttcaattcaggcaattagagaaaagcacaaacaaaacctacctgccttagttattgactgtagtcatggcaacagtggtaaagatcctttacgtcagccagaagttttacagcaaatcgttgctgaacgtctaaaaactcaggtaaagggtgtcatgattgaaagccatttagttgatggtaaccagaagatttcatgtgaaatgacttatggtcagtcggtaacggatggttgtttagggtggaataaaactgaacagcttttgttaaatgttgctaaacaattaaaagcaagtgaattagctcattcggcttaa

SEQ ID NO: 50852 - DNA, 285 bp, Acinetobacter baumannii
atggcagctgcacaaaaaattgatgaccctttcgatactcttttattgcttcagatgaaataccgcaaaccagtggtaacacttgaagaactattgccggattatttgccacatctttcgccgccacaggcaaacaaacgtgcaaataaatgtgatttaccatttccagtttttaagccggatggtaaatattcaccttggtgtgcacatttaaatgatgtagcattatggctgaagagcaaacaagaagaagctagagccgactggcgcgcaatgcatagctaa

SEQ ID NO: 50853 - DNA, 213 bp, Acinetobacter baumannii
ttgaaaggagtaattatttctgaagaagaattggacaaagcgctggaaaccggcacaagttatcgtgaaattcttgaccatgtatttttagtcattattgaaaaagctttgattaaatcacgcggtagtaaaaataaagctgctgcaatgctcaagctcaaccggggcacgatgaataaagtattagcccgcagaaagaaggaggcgaattaa

SEQ ID NO: 50854 - DNA, 894 bp, Acinetobacter baumannii
atgaatagtgcagcggaaatgaaaagaattactgaaataaaaaccttcgaagaatataagtcgaaggtagcgcaagcattaaaaaatgatgcttttgggttaactgtttctcagctaatgactatctgcaagttgagtgcaaaaactgtgaagcaagtgctagataatttagaagttgaaaaatgtggtgatacatacacgttagtcggtatgcaatcagctttacaaaacacaactccacgaatagaagtattaaaagtgaatactaagccaaatagttttaatccagtagaagtttctccagttagtccacaaccttctttacaagagaaagattacagtcaaatgaatgacgaagagatccgatctttaataagtcttaaacgaagaattactgcagtaattattcatcatgaacgtttaggtcttaaacaaatgatggaaatctctggtgctacaaaggaagaactattagcggaagcactttcactctccaggaaagcaatggttaaatttgttgcaaaagctggtgctgatttttacgaatctcacaaagtagatgaggagtctttaccagttgcaaacgaagatttaccgctaaaaatcgaagatttaccgctaaaaatcgaagatttgccactcaaaaatgaagaattaccacaaaaaaatgaatgttttgcaatgactagcaatgatgcgaacccaaagccccaacttataaatactttccgcagtttggtgaaaaagaaacaaattatagagaaggaattatttctggatagtgaccagttagccgacttgttacaagagatatttggattaaataacataacttgggatatgcgcggccgtatcctgatgggcgttcgattaagttctactgaggtgatttaa

SEQ ID NO: 50855 - DNA, 204 bp, Acinetobacter baumannii
atgcgaaaggtcgtgaaacgcaaaaacctcttagccttcaaaatctggttagcccatttgggctaccaggttcgagatatggaagatggccgcggctttaattttaggttcaaaaaacaatatggaatggtcactagagagttagtcggcaattcgttagctcagactcttggtaaagagtttgaagaacacttgaagtcttag

SEQ ID NO: 50856 - DNA, 144 bp, Acinetobacter baumannii
atgaaatttagatactcatcgatgactagaacattaatagttattggcgaattcatgaaccatcacttcgataacgtaaatgcttctgaaattgatcagtgcctctataacgttttgctgaaagaaggtagctggagaaagtga

SEQ ID NO: 50857 - DNA, 1353 bp, Acinetobacter baumannii
atgaatattttaaataatgttgaagcttttgcagctttgcaaagcggtaaaaatttactttgtcgccatattgagggcgaatttgcagagctaaatgagttccctgcgacagtgtttggaaaccctgaatatcagttctgcatcgatattgaaaaaattgagcttgctggtttcacctttacaaagccttgtactttagatgagttagttgatgagcaaaaagtcttttgggttgatttttctaaatcaacaatcattgctggcgatttcagttcaaaaaatacttacctagttactcttgtaaataatggtgtagtacagagagattttgaaaatgcccagttgtttttaaaaggctttcaagcatttgttggaatcaatcaagaaattactcttactacttgcgatccgatttttaatgatgcaaacgaagatgaggatctttctacagaaacaaagtcggtaaaatcaaaaggcaaaaagaaaacaaaagaagtgtcagcagatccacaattattggaaaccgaaaaggacattattcttgacggtattagctccagcaaaacagagtgtgaaattgattcgctttgctttggccttgaaaaacactctttcacccctgaccagcttaaagcaattgaagatgctaaaaatacgaagcttgctgaattagccgaaatcaaatctaaggctgaggatgaaaaacatgacttacttaatttagctgaagcgaaaactcaagatccggaattatcagttttatgtgaagcctttattgatgagatttctaattctaagagtaaagaagacttagattttattcgtgctcgtataaattctaacggcgttttaacagaagttgaaaatgcagaattaaatacacgcctaaacattaaagctaaatcatttgaaaaagttgatgtctatgtaaatgttccagacgcttctcaaaacaatggcaaaaagtacattgaagaggaagaaggtaaatatcagaaaaaacttgctgaattaaaaaagcgcgtagacgaatcaaagacagtaacagaagttaatgctgtaactaaatacacaaattcatggtcagctgagcagcgcgcaccattgttgcaatatatgcataaacgcctcgaggagcttaaaaaagagaagcaagctaatgaaccatcattgcttgtgaaaatccaaaatgcccctgacttagctactttagatgcatatgaaattgatattcacagtttagatccgcttgctcaaccgaagatgatgcaagccgtaacagctcgaaaacttgaacttgaaaagcctaatactagctcttctatctatttgatcgatgaggatctgccatga

SEQ ID NO: 50858 - DNA, 630 bp, Acinetobacter baumannii
atgagcgcattaattttagatactgaaacctcagatttcgagaagtttccaattgagatcgctcatgtaccggttagctttcttgatagcggtgaattgtttgttgataaagatgcttgttttgatgagtacttctcatgccctgagccgatcagtttcggggccatggcggtacatcacattctagaaacagatatagcagacaagcctagctatgaaacattccgcttgcctaaggatgttcaatacatcattggccacaatgttgattatgacctgagagctatcaagcttgctgacaagtccgtaaatgcaaaatcaatttgcacgttagccttgtctcgccttgtctggccagatgcagctcataatctttcggcactcatttacatgctgtcaaatggctcagtaaaagcccgagaatctattcgtaatgctcataacgcgaagcaggatgttttgttaactgcagtattgctcaagcaaatttgcaaagctttaggcatcaaagatatgcaatcgctgttcttgttttcagagcaagcacgcatcccaaaaaaattactttcggcaagcataaaggtatggacattaaagacttacctgctgattacgtcacctggttattaa

SEQ ID NO: 50859 - DNA, 1035 bp, Acinetobacter baumannii
atgaatgctgcaattaatcccgatgtattaggtaatgctacaactgtaaatcctcttgacttacctggtcttgaacaagtttttcatcatccaacttttattaaagttgttaatgagcttaaggctccaaagtctcatacaaatgaatttggtggtggctataaatatcgctctgctgaggatattcaagaagcattaaagccacttcttgtgaagtacaaatgtactgttattactagaaaatttgataccgctgatggttttgaaatttatgcatacatggtattcaaagaccagaaatatattcgttgtgatgttcctggtgaagctaaatatgattttgatcgtgacctaaatagcaataaaaaggtctctaaaactcaacaatatgcttcttatcagagctatgcaaaaaaatatgctcttggcaatttgttaatgattgatgattcgcagaatgacctagatacacacacgaataacaatattaaaaacgagcgtcaacgcgacaatactcagaaataccaaaaccaatcaaataacggttatgtggccacaaaagctgactgtgataaggcgcttaaacaaatcaaagatttgccattagacacgcctttaactcaggcatcttatttctttgatggtattcgcaatcaacttcctgagtttgatgaaattctttttgctgcatgcaatgaaaagtatttggtgattcaacagcatttagaaagtttgagtcagaaacaacaagaagcggttcaatctaatggtactgctcagcaacaaaaacagcaggctcaacaacaacgtggcaacaccacccaagcccaaaatccaccaaacgcacctaaaactggttgtatctcaaataagcaacgcgaccagctgcaggcgtttattgatgagcgcggtctagacgttaagtatgtctgtgaatttctaggtatcgacaccttggcagatattcaagctgaaaaaatagaactggccaaagcagaaattgacaaactggcgaaacaggaaattaaagcatga

SEQ ID NO: 50860 - DNA, 321 bp, Acinetobacter baumannii
atgaaaaaacgctataccacccctttccgcgaatttattactcgcgatgacaatggtcgttatcacgttcgtttaggtccacaagttttctctaccaacttaaaacttgatgacattcgtattgaaggtgaaaacggcagcacacctgtaaccgaaggcctacttaagcaaaggccatggatccttcgcaatcttgaacaggaagttaaagaacagcgcaaaaaagaacgtgaagcaattttttcaaaggactgctttaagcgtacgccatacagcgcaaaccaaaaaatcgcatataaaaatgcgcgttataacggataa

SEQ ID NO: 50861 - DNA, 189 bp, Acinetobacter baumannii
atgaaacaaaacactattcagagtcaaacgactgcccgattatttcagcaccctaccgctgaagaacagcgcccttctcgtttagcaaccattaaagccaatgcaattgactttattaagtttattgccctttcgatcgtgctttggatcgttatctcaaacttagtagtttggatgtttggtggctaa

SEQ ID NO: 50862 - DNA, 777 bp, Acinetobacter baumannii
atggatatttcagcaatacgcaaagccaaccttataaagttgcttgagaaatacagtactcaaaaagagtttgcggagttagtggatacaccgacctcctatatcactcaaattactcagggtactcttggtaaaaatggcaaaccggttagtctggggaatactgtcgccagaagaattgaaaagatgctaaatcttgaacatggctttatggatgttgaccactcaactgatcataataatattgttccttttaatcctcaggtaaacccaaagtcagatgacttgcgtatatctccagtcgaatttaaatcatcatttgaaaataaaaatacaattaagattcctgtgcataaaaatgttagagcttcctgtggggatggtgtggctaatttcctagaagacgtaactgattaccttgaagttgatccaaatttcttaagattaatgggtataaatattaagcctgaaaggcttaggattatttactcaactgaatacagtatgtggcctactgtagtacctgatagtcctttatttgttgatacaacaccagttgatacttctgcaatgattagcggtgatgtttatgtttttatgcataacagcttattgcgaatgaaacgtgtgtttattagttatggtgacgagaagactgtacgcctacaaagcgacaatccagataagaaaaagtatcccgatgaaatcatcaccagagaacaattaaatgaactcgtttttttaggtagattggaactttcgctagttaagccttaa

SEQ ID NO: 50863 - DNA, 249 bp, Acinetobacter baumannii
atgacttctgttcaagaaacagcacgtatcaaaaatcaagtaagcagccttttggcatacatgaaaaaacttggctcagattctgaggttcaggcttttgcagaaaaatgtggaacaaccaaagggaacttattgcaaattgcgtacggcggaagcgtttcacccatcttgtcaaagaaaatctcaaaccaaagtggtggggaggttttactttccgatctaagaccagacattttttctgaaacataa

SEQ ID NO: 50864 - DNA, 315 bp, Acinetobacter baumannii
atgcaaaactttaaaacgcattcaaaaccaagcaaaaaattacttgtaccaatgtcaacaagagtaccagttgaggtgcaagaacttgtagatgaattggtgggatcacatgagagagggagagctaaatggataagggaggccataaatttaaaacttgaagttgacttgggtcaatcatcaattgatgagctcaaaaaatcaaagaatacaatgaattcaagtgaatacctgagtgtattcaaaagtattttttctttattccatacaagcaaaaagcccgatgtgcgagatcgagctttaggtgttcattaa

SEQ ID NO: 50865 - DNA, 327 bp, Acinetobacter baumannii
atgtctactgtatcaaatcagatgaataaagacaaattgttagagttaaagcgccagcaaagttaccagtcctggcatgggccagctttaaaaacgcttgccgatttattgaaagaacgcaaagcgaacttaaagaaacgtaaccatgatgaaaaccaagcagcggtaacacgtgatgagtttatgcaaggcctagttaatgatcatggtgtacacggcataaatctttatcacgcgggtgtaattatctcgagtctgtatagggctaaaaaaattcgatatttgggtagcttcatccaaattattgaaggggatggtggcgcgtga

SEQ ID NO: 50866 - DNA, 855 bp, Acinetobacter baumannii
gtgatcccacaagaactaattaatgaaattaggcaaaatgccctttttgttataaatcatagcggtggaaaagatagccaagccatgatgataaaactacttgagtttgttcctaaggagcaaattcttgtagttcatgcaagtcttggttttatggaatggccaggagcattagagcttgcacagagtcaagctgctgcagctggcgttgattttattgtggccaaagcaagtaaaacatttcttgatatggttctgaaacgattttctgaacgccctgaggttccttcatttccttcacctaagtaccgccaatgcaccagtgacttaaaaagagatcctatcaagcgagaggtacgccgttacgcaaaggctaatgatttcaatcgaatagtaaattgtgttggtttgcgtgctgaggaatctagccatcgtgcaaagcaaatgatctttaaacctgcagctgagaatggtaaagcaggtcgcacctggcatgactatcttccgatacattctcttacaaccaatgaggtttttcagaccattaaaaatgctggtcaatcacctcattgggcgtaccaggataatgatcgtttaagttgtatcacttgcattatggcaagcgcgagagacttaattaatggtgcaacaaaaaatcctgaattctatgcattgatgtgtctggtagaacaaattactggatatgcaatgcacgctagtttgcggttccttcctgatctaaccggtatacatcctaattattcacttttaagcgaataccaagatctagtttcaaagttttcaaatacgcgctctaacagaaaacgtatacaaatgctggaggttgcagcatga

SEQ ID NO: 50867 - DNA, 1104 bp, Acinetobacter baumannii
atgagtaagtatgtccctaattcattccaagttgcgaacgcttttgtagatgaagcaatgagtaaaatctctgatgcttcagtaaaaatctatttgattattaaccgtaaaacacgtggctgggcaaaagaatgtgatgcgctttcacttacgcaactagaagaactgtcagggaaaagtcatccaacagtcgttagatgtacaaaagagcttgttaaagttggtttagtaagaaaacatgagcaatctgtatatgggaatgtttactcattaatagacaattattttgttggtgagcatgtaaacttcccaaacaagagttcagtacttgttcagtcttttagcttatttaatgggcagctagttaaaatttttaactaccaaaagcctgtgtctaaaaaatcagttaagagcaaaaagagtaaaaatctgtgtttaaattttccacaaaaatctcggttgctagttaaaaattttaactaccttgaaaatactagccagttaaattttttaactactgctagtaaaaattttttacccctactagttaaaatttttaacacacaaaacacactatcaaaaccaacttatcaaaataaaaaaaatacatggtttgttttagaaaatttgaagtttgaaatttgttctatcaatccgtcaattgatacggatgagattttcaaggcctcttggtttgagagagagttaaaagcattcaaaggttttaacgaaggtcgcaatcactctgattacgatatggttcgattctttgctgagtggatgcttaaagcacgcgctaaatacgccaagatgaaaacaccggcacctcgccaaaacaattattcaaatggtcagtcagctaaaccagctaatcaaattcctgaagtaattactttcgcatctgaaaaacaactattcgcgttcgcacgccgtttagtaaaccatcctgatttcaaagatacattttgccataccggtgaatcatggatggatgctggaaagcgtatggctcaaaagttggtagatcctcaggaacaaaaaccatttattccgtatttgatcgagatgggttttaaaaactcatccaaggagacggctgcatga

SEQ ID NO: 50868 - DNA, 459 bp, Acinetobacter baumannii
atgattactctaaataaaactaccggcattcaaaaattaaaagagattcttcaagaatttgattcttgtatgtacatcgaacgtgacaatttttttgacaagcattatgacctagttaaaagcgaaagtgatattgagcaaattcgtattgcagtcaaagcagctgaattaaagaggggtacacgtgtcaaagtaaatttcacacatgtaccagacaagggtcaaaacaaaattcattttgttggcaatggtactgtcgatctgtttgaagataaccgggtatttggtcgtttagatgatggccgacctttttgctgtttagtctcagatatagaaattttggtttcagaaaaattagaaaaggaagatggctacgaagaatctaaggcagtcaataaagtctatttttttctttgtttggtcttgggctgtgcagtagttaaggggtgtggcctatga

SEQ ID NO: 50869 - DNA, 399 bp, Acinetobacter baumannii
atgaagttaactaaacaacaacgggcagagttaaaacaaaaatttggcggccattgtgcgtattgcggtgaaatgctcggtgataaatggcatgcggatcatatcgaagctgtgaaacgagatttaattcatgttggcggtggcaagttgattactggagaaatgactagaccgcaaaacgacactttggaaaacatgaatccagcgtgtgttccttgtaatacaaacaagtcgtctatgcccttggaagggtggcggaggatgctcacacattatcgtgatgttcagttgttacgagatagcacacatgctcgtcatttactacgttttgggctgattgaaatcaaatctgagcctgtgaagtttttctttgagagttataaagagggccagtcatga

SEQ ID NO: 50870 - DNA, 183 bp, Acinetobacter baumannii
atgaataaaccattagaaacttttgatatagacgcagcaaaggctcgctacgaaaaattacgaggccgatataaccggagtgggctatctaatactgattacaacgagctacttcaattagaaaaggcaatcgagcaagcaaagaaagttaatgaaggagcgccgattgatgagcgaaaataa

SEQ ID NO: 50871 - DNA, 402 bp, Acinetobacter baumannii
atgagcgaaaataagttatcaccaagacagttggtactcattcgacgggcagctgaagatgctatacatgcttgcaatagacattacggcccatttgttgactatgttgctcacccattaaatatcatttcattggttgatatggcgcaagaaagcctacaccagcaagagctaataaaacaaaaggatacagtaataaaatttgctaacagtatggcgaatttagatcaacagaagttcaaggaattacaagaacggataaatcttgccctgcaacaaatacaaggcaatttgcaatatgttgagcaggataagagagaaaactttgaatttctgcaaatggctatgattcgagcatttaaagaattagagaaagtgctcaatggtggtgagcctaaatga

SEQ ID NO: 50872 - DNA, 768 bp, Acinetobacter baumannii
atgaaacttaaaacagtaacgatcgacggtaaagtttatgcggaagtagacggcgataagccgatctatattcatgatgacggcaaagaaatgccacatgatgcacctcattcggtagcaacaattgcacgcttaaacaatgaagttaaaacacatcgtgaagccaaagaagcagctgaaaaagcattaaaagcttttgaaggaattgaagaccctgcggcagctaaaaaggccttacaaacaatccaaaatctcgatgataaaaagctggtggatgccggtgaagttgagaaagttaaagctgaagctatcaaagcagttgaagaaaaatatgccccgattgttgagcaacgtgatgctcttgaggcctcattgcataaagagctaatcggcggtggttttgctcgttctaagtacattcaagacaacattgcagtacctgtggatatggtgcaagcgacctttggtcatcacttcaaaatcgaagagggcaaggtggttgcatatgaccagaacggcgaaaagatttattcacgtgtacgcccaggtgaacttgcaaatgttgatgaagctttagagtcattggttggtggataccagcataaagacttaattcttaaaggtggtaaagggactggtggaggtttccaaagcgggggcaaaggtggagcacctactggaatgaaacgcagtgaaatgtctgtttctcagaaagcagattacatcaaagaacatggcaatgatgccttcctaaaactaccgaactaa

SEQ ID NO: 50873 - DNA, 171 bp, Acinetobacter baumannii
ttgcagcaagatcgtgaccgtttgttacaaaaaaatgaacttgctaaagcaaaagttgaagccatcattcaacgtttagcaattttaggtactgctcaagatcaacatgcgcaagaaattcagcaacttgctcatccaaatgctgaagctggtgaggagacacaatcatga

SEQ ID NO: 50874 - DNA, 1341 bp, Acinetobacter baumannii
gtgaaaatcactgtatttggtattggctatgtcggtcttgttcaggctgcggttttggcagaagtgggtcataaggtctcgtgtgtagatatagatgagaagaaaattgaaaatttaaaaaatggcatcattccaatttatgagccaggcttaactgacttggttgtgaagaattatgaaaatggtcgtttaaactttacaattgatgcagccgagggcgtggcacacggagatatcatttttattgctgtaggtacgccacctgatgaggatggttcagctgatttgaaatatgtgcttaatgttgcaaaaacaatcgctgaacacatgaatgaacgaaaaattattattaataaatctactgtaccagttggaactgcggataaagttgatcaagcggttagagatatattgttagcaagaaataatacccatcttcattatgatattgtatctaaccctgagttcttaaaagaaggaagtgccgttaaagattgcatgagcccgaaccgtattgttattggtagtaatagctcgtatgttgaggagaaaatgagagagctatatgagccatttaacaggaatcatgacaaaatgatttttatggatatccgttctgcagagctaacaaagtatgctgctaattgtatgctggcgactaaaattagctttatgaatgagattgctaacttagcagaacttttgggtgccgatattgaaaacgtgcgaaaaggcattggttctgatgagcgtattggataccactttatttacccaggatgcggatatggtggatcttgttttccgaaagatgttcaagcattgattcgaacagctgatcagattggttttgatgctacgttattacagtctgtggaaaaagtaaattttaatcaaaaacaaaaaatcccttcattattaaataagcattttaatggtaatttgaatggtaaaacttttgcattatggggtttatctttcaaaccaaataccgatgatatgcgtgaagctccaagccgtgtagtgatggagtatatttgggaaaatggtgggcagattcaagcgtatgatcctgaagcaatgcaagaaacattacgaatttatggtcaacgtacagatttaatcttagtcaactcaaaagaagaggcattgaaaggtgctgatgcattgatcatttgcacagagtggcaaagctttaaagctccagattttgatgtgattaagaagttattaaaagaagcaactatatttgatggacgaaatttatataatccaatcaaacttaaagagctaggatatgcttattatgcgatgggtagaggcgatagcgtagtaggataa

SEQ ID NO: 50875 - DNA, 1254 bp, Acinetobacter baumannii
atgagaatcttatattttcaccaatactttaatacacctgatatgtctggtggtacacgctcatatgaaatggctaggcgtttagttgcagcaggtcatgaagtgcatattattacgtcatggttaaaagaaactgatgagaaaacttggtttactacagttgaagctggtattcatgttcattggtttcctaatttctataataacaaaatgtcttatacggatagggtgaaggctttttttagatttgcataccatgcaactaaaaagggtaagagcctagacgcagatttagtatttgccaccagtacacctttgactattgctattcctgcagtttttacagcccgagctttgaaagtcccaatggtgttcgaggttcgggatctatggcctgagttaccaattgcgatgggggctttaaataataaagttgcccagaagttggcttatcaattagaggattgggcgtataagaattcaaaagctattgttgcattatcccctggaatgaaagagggcatagtaaagacaggatatccaaaagcaaaagttgcagtgataccaaatagctcagatttagaattgttcaaagtcgaggacaggagagttgaggagttccgaaagtctcatgaatggttacaggatcggccattgattgtctatacaggtacttttgggcatattaatggcgttggttacttgatagagatagctgcgaaattaaaaactctgaatccagaaatacgaatcttattagttggtgatggagttgaatatgaaaaagttgagagacaggcagctcagttaaatgtcttgaaacaaaatttatttatgatgaagcaattacctaaaaaagaaattccagtaattttaaatgcagccactttaagtacagctttatttcttgataaacctgaaatgcgggcaaattcagccaataaattttttgatactttagctgcgggtacgcccatacttattaactatggtggttggatggttgatttaatcgaaaatcatcaatgtggtttagtaacttggcaattatctgtagatgaggctgctcaagctatcgttgactttatttctgatcctgaaaagcttaaaaaagctggtcaacaagcaagaaatttagcagaaacccagtttaatcgggataagttagctgatcagcttaatcaagttttactaagtagtattaaccagctagttaaatcccctgaaagtataactcgagaatactatgattaa

SEQ ID NO: 50876 - DNA, 651 bp, Acinetobacter baumannii
atgacaatgattattggtatttatggtgctagcggttttggtaaggaagttatgcctttagtgcgtcagcagtttccaaccttaagtaaagaacaattcgcttttattgatgatggccaatctggaacgactttaaatggatacccagtactatcctatctcgactttatcagtaaacctgctgatcataaagctgtaacaatcgctatagcaaatagtgtggttcgtgagaagttagttagccttttagaaaaagatggtgtgcaacatcttgctgttcaatctacgaatacagtaattcttgatgaggttgagataggggaaggaagcttactttgtccctttacttgtttaacttctaatataaaaattggaaagtttttccacgctaatatttatagttatgtggctcatgactgtgtaataggagattatgttacattcgcgcctggcgctaagtgtaacggtaatattcatattgaagatcatgcctacattggtactggagcagttattaaacagggcacacctgataagcctttagtaattggtaaaggtgctattgttggtatgggcgccgtggtaaccaaaagtgttcctgctggcgtaactgttgtaggtaatcctgcaagaattttagaaagaaagtaa

SEQ ID NO: 50877 - DNA, 210 bp, Acinetobacter baumannii
atggccaaaaactggatgttcaaaggttttcttggagatgctacaccggatgatgaaatacgtgcttgtataaatcaaggcaagtttatgatcgaaattgcagaaaaaataaaaaataatgagttgttaactgatagggaaagggagtgggctgtaggtattgtgaaggctagaggtaaggaccaaataatagacctcttgcgaaagtaa

SEQ ID NO: 50878 - DNA, 369 bp, Acinetobacter baumannii
atgggcttacgtgacgaaattcaggcagatattgctgaagcatttaatgaggatctggcggatgcggtccaaacatttacatgtgacagggttgttagtaccaactggaaccctaaaacaaacacctctgaaaatgtcattgagcattatgaggggcgtggcgttctgtttggctcatacaatcaatatgaaatacaaactctcggagtactggccacagataaaaaggcaactgtgctgcagaatgaagttaccaaagagccgatgattgatgacgaatggagtacggcgcaaggtacatatcgcatcatgcatatcaaacaagatccaatcagtgcaagctggaaatgtcagcttcgaaaagtgtag

SEQ ID NO: 50879 - DNA, 405 bp, Acinetobacter baumannii
atggttaataccgaatatgttcaagagtggtacatcacaccttttcagcatgtgcaatacacgcttgctagaaatcagcttcacatggatttgttatttgaagatatggatgaagctgatcaatttttggatatgggagcggatgcacaggttagtactttttctgatggtgcatatgcaatcgtccaaattggtgatacggcggataaagacaaaattcaagtatatggattgcttttacatgaagcggttcacgtttggcaaatagtaaagaagcgaatgggtgaaagtgaaccaagtgttgagtttgaagcatattcaattcaagcgatcgctcaagacctatttgaaatgtacgaagcaagcgaggtgagcaatgggatggaaggggaaaaagccgactag

SEQ ID NO: 50880 - DNA, 402 bp, Acinetobacter baumannii
atgaaaaagattattttattgggtttagcttcaattcttggcggatgtgcagccacaacggatatgatgaacaatcagtatatgtctgttatacccactactaccgatctaagtggcttttggtctggcaataatggtccatatgcggtgacttactcattcaacaaagacggcactggcttaatgtgttctagttggaatggtaaagattctcttgaaaagttaaaaatacatggtgatgaaatcattttacaatcaggtttaaagcaaacaattaagtccaaaaccgaaaccaagttagaacttaatgttaaatattatggtggtggtagttatcaatacagcccagatcctaagctaatcaatgcctcaccatactgtgagaaagcactaagaaattag

SEQ ID NO: 50881 - DNA, 318 bp, Acinetobacter baumannii
atgactcaagcagaaaaagtaactgagcttactccttatcttgagtactggagcagtggcatctatatgtttaagtgcccgggttgtaaatatttacatccatttcatgtgaaagaaggtgcacatcataatggcagtacttggggttttaatggcgatataaataagccaacgtttacaccttctttacttgttaatgaccattgcccagcgagtcgctgtcatttgtttttgactgatggaaagattcaattcttatcagattgtcatcatgagctcgctggacaaactgtcgacatggtaccgatagatgtttaa

SEQ ID NO: 50882 - DNA, 231 bp, Acinetobacter baumannii
atgggtttcttaagtaaattatttggcacaaagaaagagccgacaccaacaccttcggatcaacagctcatttgcagagttggacctaatgctactgcgacggcggtaacctctttgcaaacaactttgcctcctaattataaagcggtgacgtatgagtctccatttaggaaaggcgctttaaacgttatgtttgtcaaagttgagaatgaaactaataaacaagattag

SEQ ID NO: 50883 - DNA, 330 bp, Acinetobacter baumannii
atgcttactgtatttatagttttggttgccttgtttgttatagctttaatggttaatacaaatattgaaagaaataaggcagcaagacttcaccaactttcactgaagtcatctgaggctttggcaatggcatctatgtataagatgagacttgccgccatgtctcctgaagaggcttttattgaaaccttagctgatgaagagcgtgaaaaatatttgagccttacaacggtgcttgaacgattaagctttacagttgatattgccgaaaaccgaattaaaaaacaaagtaatgcaattcagcagctcaacaaatcattaaatgcataa

SEQ ID NO: 50884 - DNA, 192 bp, Acinetobacter baumannii
atgacgagcgaattaattaaaatttacaaccatgcagattctcgtattgctgatctactggctgaaatagacaaaaagggagaggtcacaaaaatctacgacctcaatggtaacgagctaaaaattaattttctgcgagatgaagtttactataataaagcttggtggcattttcagaaaaaacaaaaataa

SEQ ID NO: 50885 - DNA, 1188 bp, Acinetobacter baumannii
ttgaaagatttaagccatataaaagctgtattggtccacgctcaattcgtttggggtgagccccttgaaaatgttatttcagaatttgagaaagcattaatcggcttaaccaaggcccgaatagttacaaagagcaaattacgtgaccgcctgccaacagatgaagaattgcaagccttgacgacttttttttataaaacatggaagcgtaagaaaaaatctgtcccaatgcatcttattatgtggttcgcgatttactcgggtagacgtgaagatgagatgtgtactctacgtttgacggactttgatcgggcaaattcacaatggctggtacgtgatgcaaagcatcccgatggatctgaaggtaatcacaaatatgcccactttgagcctaaggcaattgagctcgcaaataaatttttagagcatgatacccgtaaacgaatcttagaacttggttattcagatcagttacttattccggttaattcaagaacagtctctgtttattttacacgtgcttgtaatgcgctagaaattgaggatttacgctttcatgatttacggcatgaagctgctacaagatatgcggaagacgggttttcgattccaaaactacaaacgatcaccttgcatgaatcatggaatactttaaaacggtatgtgaatctgaaaaaacgtggacgtcgattagattttgctgaagctatgagtgtagccgaagctgattataataatcactataaggaatggaataagaaacaacgggtaatctcagaaattgacacgtttgaggcctttgaagtttcggaaaatttagaaattgatgttccatacaattttatcaaaactcaactggaaaaatttatagagacacataaacaaagtaagtacttcatccgaaaacatgttaagaaactaaatacgcccttcccttttgcatggaacaaagaaaagcaagagttctatatcacagagattcaaattgcctgggaggactggtttgttgaacatggtgaagtagactggagtgaattaccacctgaagcttcacatttcagctttaagaaaaataaagttattcggttgtttaaaaaccgagtacttgaatttgagcatgaattaaaagcgtggttagatatttctgataactattattttgatgagaactatcatattgaaaagtaa

SEQ ID NO: 50886 - DNA, 381 bp, Acinetobacter baumannii
gtggtttcagttaagaaaatctacacttattacaagcagcaaaatattccaactcaagtcatgggtgcgagcttccgtagcatcgaccaggtgcttggccttgcaggatgtgatttgcttacgatctctccaagcttgctaacgcagcttgaacaagatacgcgtacagtcgatgcagcacttgatgcaaacaaagcaaaacaggcagaagcgattgttagaccagctcaagatgagcaaagttttaaagatgaacttaaccatgacttaatggcattccaacttttacaaggtggtgttgatggctttattaaagcgcgagatcaattaagtcttttattacgtcaatcttttggaattgatgcagaaattaaatcttaa

SEQ ID NO: 50887 - DNA, 795 bp, Acinetobacter baumannii
gtgcaatatctgtttttacctcttcaatttattggcaaggctgtttcggcagccttgtttggtattttgcttctcatcgcttttgccctaactgcgtcgatgggaagccatgaatatatgggtttttatcgctatgattatttactcatatatgcactgattattcagatatgtctcttatatttaaaacttgaatcatgggcagaagccaaagttattgctttatttcatatcatggcgatggtcatggaaatattcttaacacatcctgcgattgcatcctggcaatatcctcagcctgcggtatttaaaattttgactgtgcctttatttgcaggctttatgtattcggctgtaggtagtttttttgcacgctcaatacgcctgctgcaagtttcatttgaaaaacttccgagtttcggaagtatgcttttactggcatttttctcatatataaactttatgagtaaattttttgtacccgatattcgctatattttatttgccatcagtgtttttattttttggaaaacaaaactttatttccaattaaatgagcataaatttaaaatcccgatgttgcctgtattgtttacactcgcttttctgatctggattgctgaaaatattagtaccttttataaaatttggctttatccaagtcaggtagaggcttggcatatggtggggtggggtaaacttggatcatggtatttattattgcttttgagtttagtgttagtacttaaaatattaggtcatcgagataatcaaggtaattggaatttaagataa

SEQ ID NO: 50888 - DNA, 285 bp, Acinetobacter baumannii
atgagcaaagttattggtgaagttaatttgagccctagcagtattgaaggtactccggatcaggtagctgttcatatttttgaaaaaatcatttgtccaagtactgaagagcttctcaaaaacaatccggaagctgcaaaagtttttgcatatcacatttttggtttagcactgtctcaactagcagagtttcattcaaccaaaagtctagataaagctgtaaccgttactcttcacaaccttttgcgtcaattgaagaaagaacgtaatgagttgaggagctaa

SEQ ID NO: 50889 - DNA, 210 bp, Acinetobacter baumannii; identical to SEQ ID NO: 46205

SEQ ID NO: 50890 - DNA, 1596 bp, Acinetobacter baumannii
atgaaagtagaaggttcacattatgcaaaagatggaatattaaatgaaacagttaatcagattatgagtaatttaaaaaaggttggaaaacctatagttgaaagcatatctactacatcgaataaagatgaattgaaaaataagcaaccaccactcaaaatacctgaagaaaaaatagagcaaaagcgtaccgataatggtaatagtacccatataattgctgcacaatttacagaagataactttttattaaagccagttaataataaatatcgagcttatattgtgaatgcagctaaaagacatggtttcacgccccactctttagcagctgttattgaagctgaagcagcaaaaataaaaaagacaggtgaatggaatactaatagtaaagcaaactcgagtactgcagcaggattgacccaattcttagatgaaacatggttagctatgtgtaaggataagagttcattagttgggcaatatgtaatgaataatcctaaactaactatacagcagaaattaaatttaagatttaatgcggaaatggctattgatgctgccgcagcctatgcaattagtaattttaaatcatctggtttgccctatcaaaaactaacagaaccaagttcaatcgctaagtttgcttatttgttacatcatgaaggagctacaggaggtaaaaattttgtactaaacactttaagtcaggaacgtgcaaaaaaattactttttactcaatttggaaagaatggcgctaagcaagctgcagattttttaaaccggtataaaggtgatgcaaaggctgcttatggagcatggctgagaaattatattgatgggcatataaatatttatcaatatgttgtagataagagcaagacttctggaataaacttaagtacggatgaaactataaagttattgaaaggacaaacaatttccactcctgctcctaaaatatcaactaccactaataatcaacaagtgacaaatgtcagtactattgaaaaatctgaatctaaaattagaattaatacttcccaagccccaacaaataatgttggaggagataataagtggcataaccctttagcagattgcaaattaagaacagcaggtttagcgaatgctaaaggtgcaacgtttggtaaagtaagaaataatggtactaagaatcaccagggtgttgatttacaagctaatccaggtacgaaaatatatgcagtctgcggtggtgttattgcatttgctggggcaactggtggtgcatatggtaaagtaattgtcttaaaagttgatataaacgatttacctgaaaagcaaaagaaatatgctcaaactaaacttacaaaaaataaatatgtctacttcttttatgctcatttatcagttattgatgtagataaaggtgatccagttgatactggcgaagtaattggaaaaactggtgcaacagggaatgctaataaaatgaccactatatccaaaggtgcccatcttcattttgaagccagaagcgctcccttattaggagtagggttagatggaagatttgacccaatcccatttataaatgcgaatttaccatattaa

SEQ ID NO: 50891 - DNA, 1197 bp, Acinetobacter baumannii
atgacacaatctgtttgcatattgggtgtaaccggttctattggacgaagtaccttaaaaattttaggtcaacatccagataagtattcagtctttgcagtttcggcgcatagtcgaatttctgaacttgttgaaatctgcaaacagtttcgacctaaagttgttgttgttcctgaacagaaaatagttgaactaaaaacactatttgctcagcaaaatatatcggatattgatgttttagctgggcaagagggtttagtcgatatcgcatctcatactgatgtggatattgttatggcggcaattgtaggggcagctgggctgttgccaactttagcggctgttaaggcaggtaaaagagtactacttgccaacaaagaagcattagttatgtctggtgaaatcatgatgcaagctgctcgtgatcatcaggcattgttattgccagttgattcggaacataatgcaattttccaatcattgcctcataattatttacaagcagatagaacagggcaaccacagctaggtgtatctaaaatattgcttacagcatctggtggtccctttttaaatcactccttagaacaattgactcatgtaacgccgcaacaagcatgtaaacatccaaactggtcaatgggacaaaaaatttcggttgactcagctactcttatgaataaagggttagagttaatagaggcttgtcatttattttcaatatctgaacattttgttacagttgttgttcatccacaaagtatcattcactctatggtgcagtatgttgatggttcaacattagcacaaatgggtaacccggatatgtgtactccgattgcacatgcattggcatggcctgagcgtttacaaactaatgtacctgctttagatttatttgagtattctcaacttaattttcaggcaccagatacccaaaaatttcctgcattaaatttggctagacaagcaatgcgtgcgggaggtttggcaccaaccattttgaatgcagctaatgaaattgcagttgaagcattcttaatggaaaggattggatttacaagtattccgcaagtggtagagcatactttggaaaaattagagaatgcagcggctgaaagcatcgagtgcattttagataaagataaagtggctcgatctgtagctcagcaatatatatcaagtattggaggctga

SEQ ID NO: 50892 - DNA, 399 bp, Acinetobacter baumannii; identical to SEQ ID NO: 49716

SEQ ID NO: 50893 - DNA, 918 bp, Acinetobacter baumannii; identical to SEQ ID NO: 46092

SEQ ID NO: 50894 - DNA, 927 bp, Acinetobacter baumannii; identical to SEQ ID NO: 46217

SEQ ID NO: 50895 - DNA, 1110 bp, Acinetobacter baumannii
atgatcaacgatgatcaaaacaaaacgacttctcttagtttagaacaaattcgcgaagatattgatagcgtagatcaacagattcaagagttattaaatcgccgcgcaagccttgctgaagctgttgcgaaagctaaatttgcttctgaagagaatcctttgttttatcgtcctgaacgtgaagcacaagttttacgtaaagttatggagcgcaatcaagggcctttatctgacgtaactatggcccgtttgttccgtgaaattatgtctgcttgccttgctttagaagctccgcaaagtattgcatttttaggcccagaaggtacttttactcaatctgccgtacttaaacattttggtaaagatgcggttgttcgtccgctaccaactattgatgaagtattccgtgaagtagaagcgggtagtgcgcattacggtgtagttccggttgaaaactcatctgaaggtatcgtaaaccatactttagattgttttaaaacttcgaatttaaatgtgattggtgaagttgaattgcgtattcatcatcaattccttgtttctgaaaatacacgtaaagatagtattaagcagatttatgcgcatcagcaaactttggctcaatgtcgtcagtggttagacgcacattatccgggtgttgagcgtgttgccttaaactcaaatgcagaagctgcacgccgtattcgcaacgaatggcactcagcagcgattgcgtctgatattgcagcaggcatgtataaccttgaaatcttgcatagcaatattgaagataatccggaaaatactactcgtttcttagtgattggccgtgaaaaaattccacaaagtggcaatgacaaaacatcgttattaatttcagcgcatgaccgtgcaggtgctttattagaaattttagcgccgtttgcaaaacataatatcagcttaacgagcattgaaactcgcccagcactacctgaaaaatgggcatatgtattctttattgacttagaaggtcatatcgatcaggaaaatgtggctgcggcaatcaatgagattcgtccaatggtaaaagaacttcgtattttaggttcttatcctgctgccgttctttaa

SEQ ID NO: 50896 - DNA, 1209 bp, Acinetobacter baumannii
atgagcgtgacactcggtaccccacttcaatcttctgcatttaaagttttattgttaggttcaggagagcttggcaaagaagttgtaatttccctacaacgccttggtgtagaagtacatgcagccgaccgttatgatcatgctccagctatgcaagtagcacatttttcttatgtgctaaacatggcagatccagcccaattaaaacaactcattgaaaaagttaaaccaaatttaattgttccagaaattgaagcgattgcgacagaagttttactggaaattgaagcaaataaaactgcaacagtcatcccatctgctaaagctgtaaacctgaccatgaaccgtgaaggtattcgccgtcttgctgctgaagaacttggtttaccaacatctgcttatcgttttgctgatacgctcgaaagcttccgcgctgcttgcgatgacattggttatccaaactttgtaaaaccggtcatgtcttcttctggtaaaggacaatctcgtgtaaaaagtttcgatgaagtcgatgctgcatgggaatatgcaatgcaaggtggccgtgttaaccaaggcactgttattattgaatctcaaattgattttgactttgaaattacactccttaccgttcgcgctaaaaaccctgaaacaggtgaaattgaaacgcactactgtgacccaattggtcatcgccaagatgcaggcgactatgtagaaagctggcaaccacaaccaatgactcctgcagcactcgaggaagccaaacgcattgcaaataaagtgactacagcacttggtggctgtggtatttttggtgtagaactgtttattaaaggcgacaaggtttggtttagtgaggtttcacctcgtccacatgatacaggcctcgtcactttagcatctcaatttcaaagtgaatttgaattacatgcacgtgcaattttaggcttacctgtaaatacagcacgtcacagtgttgccgcaagtgcggtaatttatgctggagttgatgctaacaatttaagttatagcaatctgaatgtggctttagctcatccagataccgacttacgtttgtttggtaaaccagaaggtttcaaacgtcgtcgtatgggtgtggcaactgctcgcgctgaaaatactgatcttgcccgtactttagcgaaagaaaccgctgatcaagtaagcgttcaaactaacttttaa

SEQ ID NO: 50897 - DNA, 597 bp, Acinetobacter baumannii
atgatcgcattcaatcacgttgttccggtacttaatctgtcggtgttcaacgtcagacgggcaccggccttcgcgtttgagcagagcaagcgcgcgaccataggcgggcgctttatccgtgttgatgaatcgcgggatctgccacttcttcacgttgttgaggattttacccagaaaccggtatgcagctttgctgttacgacgggaggagagataaaaatcgacagtgcggccccggctgtcgacggcccggtacagatacgcccagcggccattgaccttcacgtaggtttcatccatgtgccacgggcaaagatcggaagggttacgccagtaccagcgcagccgtttttccatttcaggcgcataacgctgaacccagcggtaaatcgtggagtgatcgacattcactccgcgttcagccagcatctcctgcagctcacggtaactgatgccgtatttgcagtaccagcgtacggcccacagaatgatgtcacgctgaaaatgccggcctttgaatgggttcatgtgcagctccatcagcaaaaggggatgataagtttatcaccaccgactatttgcaacagtgccacctaa

SEQ ID NO: 50898 - DNA, 2442 bp, Acinetobacter baumannii; identical to SEQ ID NO: 45909

SEQ ID NO: 50899 - DNA, 609 bp, Acinetobacter baumannii
  misc_feature (557)..(566): n is a, c, g, or t
gtgcttatttttcatggaaaacctgttcatggagctatcttcgatatggatgggacaatgtttgatactgaacggttgcggtttcaaacattgcaacaggcatctcaagaactcattgggcaggagttttcacacgaatatttaatgcaatgtttggggttaagtgcgactacagcggaaaagcttgcacaacgtttatacggagtagatgttccatataaggaaattcgaaaacgtgccgatgagatggaactagaacatattcgaaaacacggcgtgcctattaaaaaaggtttggttcaagttctagagcgtttaagaaaatctggtttaagaatggctgtggctacttcaagccgtagagcaattgccgaagaatatttaattaatgcaaatgtttataaattttttgatgtcattacttgtggggatgaagtagaacaagggaagccacatccagaaatctttttaaaagcggctagtcaacttcatttagacgctaaccagtgtcttatgtttgaagattcggaaaatggtttaacttcagcacatacatnnnnnnnnnncacatacatcgaaaggtttaacgattttattaaaagatattaa

SEQ ID NO: 50900 - DNA, 291 bp, Acinetobacter baumannii
atgcaaacagcaattgtccgacatattttagtcaaagataaagacttagccgaacagctgaaaaagaagctacaaagtggtgctgactttgccaaacttgccaagcaatactccacctgtaattcggcaaaacgtggtggtgaacttggtgaagtcaaaaaagggcaattggtgcctgtcattgacaaagtagtttttacggctgctgaacgtgtattacaaggtccaatcaaaagccagtttggctatcatctcttagaagttaaattcagaatgactggcttacgttga

SEQ ID NO: 50901 - DNA, 825 bp, Acinetobacter baumannii
atgcctgagttacccgaagtcgaaaccactaaaaccagtttatttcccttattgaatcaaaaagttctaagtgttgaagtacgcaatcctagcttacgctggcctataccagataatgttcagaaacttgttgggcaacgtctcattgggttaaatcgacgttcaaaatatattttggcagagtttgaacaagatcaaatgctctggcatttaggaatgtcaggtagttttcgcctgtgtcaaccaaacgatgaattgagaaaacacgatcatctcattattcaatttgaagatcagcagttacgttaccatgacccacgtcgttttggctgtattctttggcttaatcctgaaactcaaggcaaactcatcgatactttagggccagagcctttaagtactgactttcatgcagaatatttagcttttaaactcaagaataaatctgtcggcataaaaattgcactcatggataatcatgtagtggttggtgttggcaatatctatgcaactgaaagtttgtttaatgttggcattcatccagcacagcccgctggtgatttaaccatgcaacagattgagaaactggttgttgagattaagcgaattttgaagtcagcaattgatttaggtggctcgactttacgagactacagcaatgccatgggtgaaaatggttattttcaacagactttactcgcttatggtcgtgccggtgaaatgtgtgttaactgtgaaaccacattagaaaacttaaaactcggtcagcgtgccagcgtattttgcccacagtgccaaccacttaaaaagctgagaaagccttaa

SEQ ID NO: 50902 - DNA, 339 bp, Acinetobacter baumannii
atgaatgcattaagcacagaagtattaggtgacggttcacaagtaaccggtcttaaatataaagaccgtacaactgatgaagagcatgtggtagagcttgcagggatctttgtacagattggtttacttccaaacactgactttttaaaagacagtgaggttgagttaaccaaccgtggtgagatcattgtcaatgaccgcaacgaaaccaatgtaaaaggtgtatttgctgcgggtgactgtaccactgtaccttacaagcaaatcattattgctacaggtgaaggcgctaaagcatcactctctgcgtttgattacatcatccgttctgggcaataa

SEQ ID NO: 50903 - DNA, 1251 bp, Acinetobacter baumannii
atggctccaattgatatcctgtttttatttggctttttaggtatttggattccacaagcattttgggcatggttaagctatcaagcgtggaagtattccaaaacggctgaaaaagagctgcaaaacttaccaataccagaaagatggccagtcttaagtgttttgatccctgcttataatgaaggcgttgtgattgaggacactttgcatgccattgctcaacaggactatccggcaaagtcttatgaagtcttactgatcaatgatggctccaaagacaacacccttgaaatcgcagaaaacctcgcaaaaatttatccttgcataaaaattgtcaatgtacccaaagggatgggtggtaaaggtaaatcaagaacgcttaataatggtcttccccatgccaaaggtgagttaattgttgtttacgacgccgatagcacccctgaacccgattgcgtccgattacttgcccaaaccttgttagccgataaaaagctagtcgcggtaaatggcaaagtcagaacccgtaactggcaagatagtattttgactcgttttattgcgattgaattcatctttttccaatggatctttcaaggtggacgctggcaacgttttgaactatcaacattaatgggaacaaattatgtcatctggcgcgatgctctagagactttgggcggttttgatgaaaaatcgctagtcgatgatacagaaatgagtttccgaatttttatcggacaaaaacgaattaaatgggttccctatgcaatcggttggcaacaggaccctccttcgttaagtgtattcgttaaacagcgctcacgctggactcaaggtaatttttatgtaacacgcaaatatttacctgtagcactcagaaccccattcccaatcggaattgaaattctaaataacattatgtgctatatcctttttgtaccggctttattctggagtcatattaccttaacgcttggcttacttgatattgcaggtatttcagttcctggtccatttacactactgtggggactctcattttgtctctatgtagcacaaatgtggtttacgctttctttagaaaaagttaaaccagaactctatttttattctgtcttatcttacgtaagttactcacaaatcttcttatttattgtgtttaaagccgcattcgacatgctaaaaaataaaatacagggcaactcccttcaatggtacaaaacggaacgtagcaaggagaaaaaataa

SEQ ID NO: 50904 - DNA, 1146 bp, Acinetobacter baumannii
gtgtatgccaatatcgaaataggcgtaaatgaattaaaaagagataaaaatgtacaagactatttaaatcggcatggcaaagaactatttttattccatgaccgtactatttttcctttacgttcaatccgtaaccaatcacaacaaccatatcaagtatttagtgcattcaaaaaagcttgttatacaaagctcgacacaagcggtttatctcaatgttatccggtccctaataaacaaaatgaagtaccactagattttttacaggggaaaaatattgatttagacgaaattgaaaaactattttgctcatctctctcaaaagaacagcaagatttatggcctgttggcgaacaatacgcattagaacaattagatcaatttattgaagaatcggtttgtcactataaagtcgagcgcgattttcctcatatacaagctacaagtaagctttcaccttatttaaatattggtattttatctattcgacagtgtttacaagcactctttcgcaatcaacatggcaactttcacttagtcaatgaaggccaacaaacatggttagacgaacttctttggagagagttctaccaacatattttatttgattttccgcatgtttctaaacacatcccgtttaagaaagatactcagaagattaaatggaaccataatccagaacatttaaccgcatggcaaacgggtcaaaccggtattcctattgttgatgctgggatgcgacaacttttacaaacaggctggatgcataatcgagtacgtatgattacggccatgtttttatgtaaaaatcttttgattgattggcgcattggtgaacaatggtttatgcaacatttaattgatggtgacctcgccgcaaataatggcggttggcaatggtgtgcctcaacaggaacagatgccgtaccttattttcggattttcaacccaattgctcaatcaaagaagtttgatccggagggtgaatatattcgccaatggataaaagaattgactcatttggacaataaaacgattcatgacccctactcaagcaaaaccgatcttggtttaaattatccaaaacccatagtagatttaaaagaaacacgccttaaagcaattgaaactttcaagaatatttag

SEQ ID NO: 50905 - DNA, 2277 bp, Acinetobacter baumannii
atggctttattgaatcatcaacgtccactttgggcattacttgcagcagccccattgattgcgacagtaagtagcagtgcctatgcccaaacatggaagatcaatttacgtgatgctgacttaactgcctttattaatgaagttgcagacattacaggaaagaacttcgctgtagatccgagagtacgtggtaatgtcacggttatttctaataagccattaaataaagatgaagtttatgacctatttcttggggtcttaaatgtaaacggggtggttgcaattccttctggtaataccattaagcttgtaccggatagcaatgttaaaaactcgggaattccttatgattctagaaatagggtccgtggtgatcaaatcgttacacgtgtgatttggctggaaaatactaatccaaatgacttaattccagcactccgtcccttaatgccacaatttgcacatatggcggcaattgcaggaaccaatgcacttattgtttctgatagagctgcgaatatttatcaacttgaaaatattattcgtaacttggatggaactgggcaaaatgatattgaagcgatcacgcttcagtcgagccaagcagaagaaattattacccagcttgaagcgatgagcgcaacaggcgcatctaaagattttagtggtgcccgtattcgtattattgctgataatcggacaaaccgtattttaataaaaggtgatccgcaaacacgtaaacgtattcgtcatatgattgagatgctggatgtaccttcggcagatcgtttaggtggcttaaaagttttccgtttgaagtatgccagtgctaaaaacttgtctgaaattttgcaaggcttagtcacaggacaggcagtatcttcatcgaataatagtaataattcatctaactcatcgaatccgattaatagtttaattggtaataaccagaattctggttcaaatacatcgggttcaaatggtgcctcaatttcaactcctgcaattaacctaaacggtaattcgaacagtagtaatcagaataatatcaccagctttaatcaaaacggtgtgagtattattgcagataatgctcagaactcattagtagttaaagctgatccccaattaatgcgtgaaattgaatcagcgattcaacaactagatgttcgtcgtcaacaagtgcttattgaggccgcaattattgaagtctctggagatgatgcagatcaacttggaattcaatgggcactcggtgatttatctagtgggattggtttacttagctttagtaatgtaggggcgagtttatcttctatcgctgctggttatttatcgggtggttcggctggagctgcatctgctatcgctaatggagctaataaaggtaatggtgcaactttaggattgggcaattttgataattctcgtaaggcatatggtgcactaattcaggctctcaaaaccaatactaaatcaaacttactttcgacaccgtccattgtgacgatggataatgaagaagcttatattgttgtaggtcagaacgttccatttgtcacagggtcggttactaccaatagtacaggtatcaatccctatacaactgttgagcgtaaagatgtcggtgtgaccttgaaagttgttccacatatcggtgaagggggtactgttcgtttagaagtagagcaagaagtttctgctgttcaagatagccgtgggcaagcagctgacttggtgacaagtaaacgcgctattaaaacagctgttttagccgagcatgggcagactgtggtgctaggtggtttggtgtcggatgacacttcgctttcaagacaaggtatacctggtttaagtagtattccttatgttgggcgattgttccgatcagataacagaagcaatgtaaaacgtaaccttctcgtttttattcacccaacaattgtgggcgatgcaaatgatgtacgccgtttatctcagcagcgctataatcaactttatagcttgcaattggctatggataaaaatggcaactttgcaaaattacctgagcaagttgatgatatttataaccaaaaaatgaccccgccgagtattgcctccaagccaaaaaattaccaacaggttccatcaggtggtaaaagttcgaccataactacgccggtagctgtagaacctaccgtccaaaagcaaaccctacagttgcctgatcctgaaattaatcgtactaaaaatacagtaacaacaacgacactgcgtccaagcacagcgccgtag

SEQ ID NO: 50906 - DNA, 504 bp, Acinetobacter baumannii
atgaataaattaaataaattaatgttagggttaggcctgacagtagcttcagtagcagctaatgcagctggttatggggtaattgatcttgctaaagttgttgaaagtagtacttatttgaaacagcaaaatgcaagcttaaaccagtctgtgaaaccaactacaactaagcttgagcaattaggtaaagagttagaagggcttcaacgtcaagcgcagactcaaggccaaaaaatgaaagaagatgagattaaaaaattacaatctcagtatcaatcgaaattaaatgagtttaattcaacacagcaaggcttacagtcaagagttcaaacgagcttacaaagtatgaatacaacttttgagactagagttaagcaagctgctgagcaattacgaaaagaaaataatcttgactttattttgaataaaaattcgactgttgcctatgacgctaagtatgatttaactgataaaatgatacaaaaggttaattcaatgaaataa

SEQ ID NO: 50907 - DNA, 768 bp, Acinetobacter baumannii
atgaaacttaaaacagtaacaatcgacggtaaagtttatgcggaagtagacggtgataagccgatctatattcatgatgatggcaaagaaatgccacatgatgcacctcattcggtagcaacaattgcacgcttaaacaatgaagctaaaacacatcgtgaagccaaagaagcagccgaaaaagcattaaaagcttttgaaggaattgaagacccagcggcagctaaaaaggcattacaaacaatccaaaatctcgacgataaaaagctggtggatgccggtgaagttgagaaagttaaagctgaagctatcaaagcagttgaagaaaaatatgctccgattgttgagcaacgtgatgctctagaagcctctttacataaagaacttatcggcggtggttttgctcgttctaagtacattcaagacaacattgcagtacctgtggatatggtgcaagcgacctttggtcatcacttcaaaatcgaagaaggcaaggtggttgcatacgatcagaacggtgaaaagatttattcacgtgtacgtcccggtgaacttgcaaatgttgatgaagctttagagtcattggttggtggataccagcataaagacttaattcttaaaggtggtaaaggaactggtggcggttttcaaggtgggggcaaaggtagagcgcctacaggaatgaaacgcagtgaaatgtctgtttctcaaagagctgaatacatcaaagaacatggccaagaatcattcctaaaactaccaaactaa

SEQ ID NO: 50908 - DNA, 321 bp, Acinetobacter baumannii
  misc_feature (288)..(297): n is a, c, g, or t
atgaacattaaagcactcttacttataacaagcgctatttttatttcagcctgctcaccttatatagtgactgctaatccaaatcacagcgcttcaaaatctgatgtaaaagcagagaaaattaaaaatttatttaacgaagcacacactacgggtgttttagttatccaacaaggccaaactcaacaaagctatggtaatgatcttgctcgtgcttcgaccgagtatgtacctgcttcgaccttcaaaatgcttaatgctttgatcggccttgagcaccataaggcnnnnnnnnnnggcaaccaccacagaagtatttaa

SEQ ID NO: 50909 - DNA, 516 bp, Acinetobacter baumannii
atgctggctgtcgattcagagattgatcaagatcttattgatgaaaaatcatggatggtcaaagattatattccggctgaatttgctgcaagctgcctccttgcggacccatcattaaaaatcgaagaactcgaaccggctaaaaacttaaaaattgtggtgggccaagaaaaagcagccaaagttcttcatacgctgaacttaaatgaattaccgcagtatgagggagatgagccatacgtacttattctttcagaccagacagatataaaaacagcgaagcaattacagcagcagtttgcacaaacatctgttgaaccacatcactatatttatgtgaaatcttcattggggcatacccagcatttagttgatatttatggctttatgcttagtatgcattttcctgaacatatcgttccttttgtctttggagaaaatacagtgtcagcacatacatttgtgcagagtgtcactgaaaattcagaagatgatgcgatggtgttgaatagctaa

SEQ ID NO: 50910 - DNA, 687 bp, Acinetobacter baumannii
atggttgatacatgggcaactgtaggttcatgtgctcaaatcgataaaaaccaattaattccagtaggcgctcgtgctgaagtaggtactacaggttacggtggtgctttgttatggcaagcaaacccatatgtaggtttagcattgggttataacggcggtgacatttcttggtctgatgatgtaaaagtcaatggatcaacttatgaccttgatatggataataacaacgtttatttaaatgctgagattcgtccatggggtgcaagcactaaccgttgggctcaaggcttatatgtagctgctggggcggcttaccttgataacgattatgatttaactcgtaacgttgatgcgactcgttcattccgtgtaaataaccaagactttattgcgggtgccgatggtgtcaaaattaacggtcaaatgtcatataaaaatgatattgctccatacttaggttttggttttgcacctaaaatcaataaaaactggggcgtattcggtgaagtaggcgcttactatactggtaacccaacagttaagcttgtttcgtcaggttctgcagttacaactggtgatcaatcacttgaagaggcagtaaatgcggaagctcgtaaaattgctaacgatgataaatacaaatggttgccagttggtaaagttggtgtgaacttcttctggtaa

SEQ ID NO: 50911 - DNA, 678 bp, Acinetobacter baumannii
gtgttccaaggcggcgcatcggcaagtgttcaatctagtttgccaccgccaccaaaacgtgtacaaggtgtacttgagttatttcatgaatatgcacatggtgagtttgtaaaaggtggaagttatagggttgtcgataacttcggaaaagaggttactggcaagctggatgataagggatttgcaaaagtttctggcttagcaacaggtgcagtaaaagtcttcttcgaatcagatcaccgtgatccttgggatactgcaagtgactttaaacgtccagttgagtggccaaataagaatgatgcggatagtgagcaatcagattcattaattgcacaaatgagtaaaacagcccagtccaaacttggtgaattatctaaacaattaaccaatcctacgaatattatgaaaaatattcaaactgcacaaagcataaaatctgaaggagcaaaggctttaatgccaatgttaaaaactcaggcgcagggattagtaactgatcaagtgaagagctttttaccaatttcagaagcaggtcaaaaaatagggaacaacattgaacttacatctattcaaaaaatgaatgatttcaataaatcaggctctattgatggcaatagtttggtcaataatacgcttcatcaatatttgcaaagcccttttaaaaagaattcatag

SEQ ID NO: 50912 - DNA, 4908 bp, Acinetobacter baumannii; identical to SEQ ID NO: 45835

SEQ ID NO: 50913 - DNA, 1614 bp, Acinetobacter baumannii
atgtctcatcaatcagacttaatcagccaagatattctggcgtatttaaaacaacatgaacaaaaagaccttctacgctttttgacttgcggtaacgtagatgatggtaaaagtaccttaattggtcgtttactttacgattcaaaattgatttatgaagatcaattgcaagctgtaacacgtgacagtaagaaagtgggcacaacaggtgatgcaccggacttggcattacttgtagatggtttgcaggctgagcgtgagcagggtattactattgatgttgcttatcgctatttttcgactgaaaagcgtaagtttattattgctgatacaccaggccatgaacaatatactcgtaacatggcaacaggtgcatcgactgctgatcttgcaattatcctgatcgatgcgcgctatggtgtacaaactcaaactcgtcgtcatacgtttattgcgagtttgcttggaattaaaaatattgttgttgccattaataaaatggacttggttgaatattcatctgaacgttttaatgaaattcaggttgaatatgatgcgttcgtgagccaattgggtgatcgccgtccagccaatattttatttgttccaatttctgctttaaatggcgataacgttgtaaatccatcagctcatactccttggtacaaggggcaaaccttaatgagtattcttgagtctgtggaaatcaaccgcgagtcaagtaaacatgaattccgtttccctgttcaatatgtaaaccgtccaaatctcgacttccgtggctttgcgggtacagttgcattaggtgaaattaaagttggtgacgagattgtggcgttgccttctggtaagcgttctacagttaaggaaattgttacttttgacggtaaccttgagcaggcagttgcgggtcaagcagtcaccttaacgttaaatgatgaaattgatattagtcgcggtaatgtcttagtacgtgcaggcgagcaaccattaatttcaagaagtgttcgtgcttcagtggtatggatgaatgaacacccacttgtaaaaggtaagttgtacaatattaagattggtacacaaactgttccagcaaaagtaactaatattaactatcgtgtaaatgtgaatacgctcgaacacactcaagtagaagagcttgagttaaatgcgattgcagatgttgtggttgagtttgatgctccagtcgtgtttgaccgttatcaagattcacgttacacaggttcatttatttttattgaccgtttaagtaacgtaactgttggcgcgggcatggtagaagccgcggtagagtggacggctcatagtaatcctgttactgctgaagatcgtgctgctcgtttaggtcaaaaacctgctgttattggtgtttctgcacagttaattgaaaaagctcaagctttagaaagtttgctgattcagcaaggtgtagttgcgatcgcgaaaacaagcttaacagctgagcaattggttctattacgtgagacgggtgttgtcattatcacaacttctgtggatggtatagatacagaggtaactgctgaaacgattgaagaagcagtagagaaaattgtggaattagttcgtctttaa

SEQ ID NO: 50914 - DNA, 1011 bp, Acinetobacter baumannii
ttgtcataccatcatcttaactttgaagatcgtactgcattaatgcttgagtcaagaaaagaaggcttttcagccagaaaatttgctgaacttattaaaagacatcctagtacgatctatcgtgagcttaaaagaaatagcatcaatgacgtttatcaagctcaatatgcttctgataacacttttgctagacgtagacgtggtcacagaaaactcaaaatcgattcaatcctctggaaatttattgttgaagcgatccgttgtttatggtctcctcagcaaatagcaaagcgtttaaagacatttcctgatttggatcaaacaatgaatgtaagccatacaacgatttattcaacgatacgagcattacccaagggtgagttgaaaaaagacttattatccggtctacgtcatgaaaataaaaagcgaaaagctaacggtgaacctaaaaaagattctatattacaggatattaaaactattcatgagcgcccagccgaagttcaagaaagaaaaataccgggtcattgggaagctgatttaattaaaggtaaagacaataaaagttcgatagcaacacttattgaacgaaatacacggctctgtatcttggcaacattacctgatgcaaaggcagaatcagtgcgcaaggctttaactgaagctctgaaatatttacctgcagaactgcgtaaaacgttgacctatgaccgtggacgtgagatgtcagaacataaaatactcgaagaagatttaggcatagatgtatatttctgtgacccacattcaccctggcaaaaaggcacatgcgaaaatatgaatggtttaattaggcaatatttacctaaagggattgatttaaatcaggcagatcagcattatttaaatcaagttgccatgtcactgaatactcgtcctagaaaggcgttagattggcttacaccattagagaaatttgctcagcttgttgattatcatatggcttttgaaactgtcgcacctcatgtttga

SEQ ID NO: 50915 - DNA, 1011 bp, Acinetobacter baumannii
ttgtcataccatcatcttaactttgaagatcgtactgcattaatgcttgagtcaagaaaagaaggcttttcagccagaaaatttgctgaacttattaaaagacatcctagtacgatctatcgtgagcttaaaagaaatagcatcaatgacgtttatcaagctcaatatgcttctgataacacttttgctagacgtagacgtggtcacagaaaactcaaaatcgattcaatcctctggaaatttattgttgaagcgatccgttgtttatggtctcctcagcaaatagcaaagcgtttaaagacatttcctgatttggatcaaacaatgaatgtaagccatacaacgatttattcaacgatacgagcattacccaagggtgagttgaaaaaagacttattatcctgtctacgtcatgaaaataaaaagcgaaaagctaacggtgaacctaaaaaagattctatattacaggatattaaaactattcatgagcgcccagccgaagttcaagaaagaaaaataccgggtcattgggaagctgatttaattaaaggtaaagacaataaaagttcgatagcaacacttattgaacgaaatacacggctctgtatcttggcaacattacctgatgcaaaggcagaatcagtgcgcaaggctttaactgaagctctgaaatatttacctgcagaactgcgtaaaacgttgacctatgaccgtggacgtgagatgtcagaacataaaatactcgaagaagatttaggcatagatgtatatttctgtgacccacattcaccctggcaaaaaggcacatgcgaaaatatgaatggtttaattaggcaatatttacctaaagggattgatttaaatcaggcagatcagcattatttaaatcaagttgccatgtcactgaatactcgtcctagaaaggcgttagattggcttacaccattagagaaatttgctcagcttgttgattatcatatggcttttgaaactgtcgcacctcatgtttga

SEQ ID NO: 50916 - DNA, 729 bp, Acinetobacter baumannii
atggaattgcccaatattattcaacaatttatcggaaacagcgttttagagccaaataaaattggtcagtcgccatcggatgtttattcttttaatcgaaataatgaaactttttttcttaagcgatctagcactttatatacagagaccacatacagtgtctctcgtgaagcgaaaatgttgagttggctctctgagaaattaaaggtgcctgaactcatcatgacttttcaggatgagcagtttgaattcatgatcactaaagcgatcaatgcaaaaccaatttcagcgctttttttaacagaccaagaattgcttgctatctataaggaggcactcaatctgttaaattcaattgctattattgattgtccatttatttcaaacattgatcatcggttaaaagagtcaaaattttttattgataaccaactccttgacgatatagatcaagatgatttggacactgaattatggggagaccataaaacttacctaagtctatggaatgagttaaccgagactcgtgttgaagaatttgatacctctttaatttgtttaagtttaatgtgtgcagttggaattaaagcttcatttattttttttacaaccacactttcaataaacaaaatcgtaagtatcatttttttgatactatttacaattttttcattaatccatattctcactaatgtttacgtttctttcgtaaaaagaaaatacggatag

SEQ ID NO: 50917 - DNA, 642 bp, Acinetobacter baumannii
atgggaaaagttgaaaaaatatatgaaaatataaaaactcagaatgaaaatcttcaggaagaagttcatctatttttccatttgcttatggcaagtgattttgaagaaataacagaatcaaggtttacttcagttttcataattaaaatgttctatgcattctttaggggcgctaacttagacatgattttatgtgaaataaaaaacttggaaaaacttgatttaaattataaaagaatgaagccagctacacagtttaagaaaaaacctttaaagaatttatggcataaacactttgagcaaattggattaagctcaatgtctttaaatattaaaagtcagatcaattcaaatcctaatttttataaggattttataaatatttataatgatcccaacttaactttaaatgaaaaagcttcaaagttggcttacttcagttctagtaagcaatatttagatcgtattgaaaacggaaagctaacaggtgaatggatcatttaccatgttcacaatcaaaaaaattattatcttaatatcggaaaacataatgatggtgatgcagtacttgcagaggaaattagagaaatagctttgtttgagtttccacaatttagaggcgaaataccactttttgaatag

SEQ ID NO: 50918 - DNA, 171 bp, Acinetobacter baumannii
atgacttggactgcacatgaggtgtatgacagctttcaggttgtacctgatgatgatttaaaacctcattcattttttcactgtgaatgccatcccaaatatgtggatggcatttttgttcataactcatttgatggtagagaggccacagaaacgcctttgccaagttga

SEQ ID NO: 50919 - DNA, 444 bp, Acinetobacter baumannii
atggcctcacgtttaactttatttctcaaaagtacggtggttaagatggcaatgactttagagcaaacaaggcaagctattattgatcgcatgcaaagctttacgggtattgctcaggaacggattcagtatccaaatgcaccaggctttacggtgcctaaagaaggtttgtggtgccgtttaacgatagcaggtgggccgagctttatttcaggcattgctgataagccatgtacacgccgtaccggtaatatcatgatccaatgctttgatcgattacatactggagagaaggccttaacagttctaagcgatgcattgctggctcattttgaatatttctcaatcgaacatctagaatgtttgaatggtcaatctatctatgcgggtaaagatgctgatttcattcagtataatgtcagcattgggtttaaggtgaattga

SEQ ID NO: 50920 - DNA, 993 bp, Acinetobacter baumannii
atggcaaatctagtctttaaatattcttgggatcatcggcctttcccatataactcagctcaaggtaagcgtcagtttatgctaccttttgcttcaggtattccaaacttaacgccaaatttctctcaaattcaaaatattccaacaagtaatccagcatctcgaactgttggggcaaatgccggcaatattatggaagttggagcattcggccttggtggtgttatggccgctggttctagtgcctatgcattaacagagaccgatgcaacagattacccagcagctaatggttttgcttggtctaataatacagcttcagcgtcgatccctgcatattgttgtggattgaccatgacccgaggtgctggagtgcatgctcaggttttggctgcaccaagtagtcatgaaatttactatcgggtaagacacccgaatgttaattcaggtgcatattcactttataaaatgtggactcagaaaaacacgactgtagatggcaatggattcattaaatcagcttcaccaattgttaagttatttaataatcatattgagttgaatacagaagcggaaaagcagccaattaagtttgagttgttaggagtcggcgattacctcattaagggctcactgggttttgctcaagaaggttggtatatcgaagtccctaaagatgccaatgggaacacggtagtagcagttgaatattcaaccttagaaaatggtgatctttctattaaaacttataaacgtaagtttgatgtggaaaaggcagccattgtagctgatctcgaaagtccgctcgatattccagaaggccgctggattgatatccgtctgcatgaagaacctgaaccagaacctgaggttgaagaaactttgagtgaaacaccagtggatttccagcctactaacttatctcaggcagttgctgcagccatgaatggcgtggaaccgccagaaatctcagacacagacgaaacactttaa

SEQ ID NO: 50921 - DNA, 4365 bp, Acinetobacter baumannii
atgggtattactgtaggtgaattacgttcagtagcagctgaaggaaaaatcacttcacaggaaatcgttaaagcacttaaaaatgtccaagatgaagttgatactctttttgctaaaactgacattacaattggtcaatcattaactttacttaataatgaaattactaaatttgtaggagaggctggtaaaggaagcggggcagcacaggctttatcaggatcgattcagttattagcaaataatttgaatttaattgcagacagtgcatttgccataggtattggcttaatgacaaaagctgttttaacaaaaacggttgctgtacaagcgagtattgctgcatcaaccaaacaagtgtttgccacaattgctgaacgtaatgcgaatattgcagcagcaaaagctgaagtggaatctgcgcttgccgaagcacaaagtacgcaggtgacactaacgaacatcaaagctactcatgctcagatcatggcagaaatagaactcgaaaaagttcgtttaaaagcccaaatcactgaacaaggtcgcacggctaccatcacacgaatggctcagctaggacgattacaagctcaagttgcgttagaggttgctgccgcagaaacagctcaatcagcatcatctgcaagattatcagcagccttaacagcgcaatctgttgctacaagtcgtttagctttggcaaagtcagcgcttatggcgatttttagcccaatgggtttagcgattgcagcaacagccgcatctttctatttactaagcagcagttcggatgaagtcaaagagtctcttgcaacacaatctgactcggttagtgatttaacagataagtacataaagttaaatactgtgcaagcattaacagagggtgtgcggttacgcaaagagattgagcagcaaaatgatgcaattgatgatgctagtggagctatcaaacgttttgcttatatccaaaaggaattatttaaattatctggcagtgattatgaagattatcaaaatgccattaagtctattgctacaggtgcaagcgatgcaggtgatctcttaaaaaagatgatttcatctggtcgttttagtcagactcaaattgataaacttattgagttctctagtgcagtagcagaatcaaaaaataagattgagcagggtaatactgctctaaaactcttaaatgctacttctggacaacatgttgaggtaacggccgaatcaattaagcaattaacaattcaaacaaacttaacaaaagtcgctactcaaaatttcactgacatgaaaacacaaatgcttgattcattacgagcacaattggaattcattcggttaaatggtggtagtgaagaacaagttaaatcgttgaataaggtaattcaggcatattctttaaatcaaatttcagcaactgatgctgtgagtaagttcaacagtaccgccaaagttccggttgataacattaagaaattgcaagaatatgccattaaaacggatcagtctaaaattgcgttaaatcaggctaatgctgagctgaagaaacaaaacgacttgcgtaatgagtacctaaaacaacatcaaactgtacttggtgctcaacaaggagaaacaaatgaattaaataaccaagtcgctgcacaagaaaagttaaataaattacgagacaatgccaacaaagataatctgaaaaatgattttcttataaaaaacactaaggcatttggtggtggcgaaaagggtcttgataaggcgcgtgcggcatcagagttttataccgacaataaaattccgatgactagaagtttaactagtcaggaagctgcaatttttgaggcttggtataagaagcagaaggaagccaaggacttacaagaaagtatttctgagtctaccagaaagcaaacaaaagaggttgaaaaacaaaccaaagagtctgccaaacaagctgttctacttgcggggaataatgagcgagagagaaatatgcttcgggtttaccaatccttccgtaatgcaggcttaggcgataaacaagctcgtgtaatgacagctcaagttggacgagagactgattttagaaatgaggcaatgtttggtagtcacaaagatgccaataatggttataccaacacaggatttttatcatggcaaaaaagtcgctcaactaagttaatgcagtctttacaagggcaaggagtcttggataaaaacggtaaaatccagcaaactcaagatgcattggatgcaatggctaaacatgctgtgcaagaggcgatgaccgataaaagttatagtaaatctaaagcagctcttcttaatgacgatttagactatcgaagtttagagagaattgttgccaaaaattttgttggctgggactatgacgggaaaaagcttggcaaagctaaagcttcacagcatttagccaaacaagactcttactataatcagcttagtaaaattttaggggataaccccgaagcagcctcaaaagcaattagtgatctttcgaaattcgaagatgaagcatataaggcacgtgcaaaaactcttgaggaaattaagcagctccaagcaacatatgattcagaaacagttgctagaagcaaaaaacgtgaggaggaaatcaacaaagcaaccattttaggtcaatcaaatttaatcccaaaaattaatgagcgttatgatgctgaagataagttagctcagaagcaatttgattttgaagtaaatggttataagtggactgagaagcaaaagcttgagtacacatatgaaatcaattctttgcgattagttgctgaaggcaaactctctgaagatcaaagaaaggttgctttagatggcctggaattgcaaaagcagcaagagttaggattactaaaacttgctcaggaacagcgtttatttcaggcacgtttatcattgctttcggaaacgcaagccatgcaggaacgttacagactagaacgggaggaaattcttaagaatactaaactttccattaaagagcggcaaaagctaatcgcattctctaaagccaatcaggataaagagactcgcgataaggtgaataacgctgttcaaaactggggtggtattcaggctgatatgaatggtaccagcgagttcttcagacaggatcaggagcggtttagccgtttaaatgctgcaaatgatttagcagatagtcaatttgctgctactgatctgaatgaacaaaactctttaaatggtcttgatgctcaaatggaagcaggactcattaagcaacaggattacgaaaatcagaaaacagctatcattcaagctgctcaggaccaacgtaatcagattgctgctgaacatgcaaagaatgttcaggatattgaagataaatatcagcaagatcgtttgaacacccaaattgcatttggtggccaaatgatgggttcactcacatcgatgtttggttcaatgtttggtgagcagtctaaagcatacaaaataatgttcgctgcagataaagcttatgcgattgcagctgccggtattgcgattcagcaaaatattgcagcagcttcaaaagctggttttcctcttaacattccattaattgctggagctgttgcacagggtgcaagcatcattgcaaacatccgtgcaatcaaagatcaaggctttgctgacggtggttacactggatctggtagaaaatatgaacctgcaggtattgtccataaaggagaggtggtctggtcccaagaagacattaaaagatggggcggagttggtttagttgagaaaatgcgtaagagtgcaaaccctgaagcttttctcaataacaatgcctcggctgatagtgtcatgcgccgtgcaatgatgagttctaatgcctttatagaaagccaaaagcaagctgacatctttaatcaaccggttcaagatactcagattatctataaaggtaatagagacacacctaagttggcgtcttcggcaaattctgacttattccatgatggcaaggtctacttctcatcaaatggtttagttcaggatcgttcaaatctggatgatgttcaggattttactttaggacgtacttcacgccctcaagctgagattatgccttcaattgagcctgcttcaccgacaatcaatttcaaaattgaagtgattaatcaggtgagtggagcgacagttgaagctgaacaactggatgagcaaacagtccggatcattgttacagatgaactggataagcagcttccaagaaaggtaccgaaacttgttagtgatcaaatcggtaatccaaactcaactattagtcggtctttgactgagaatacgacagcaagacggaatcgttaa

SEQ ID NO: 50922 - DNA, 591 bp, Acinetobacter baumannii
atgcaagactttattaaaagtttatttattagaatatttttggggttaatgccagtgactgcttatgcggatcagaagtgctatggagatattattgtatttcagaaatttgatgatcaaatgatatatccttattttatacatccttctagagagaaaaataagaagaatgacacaccaaataagacaatcgtgattcagaaaagaaaacttactcaagaggaattgttagcacaaaagaaaattgacgataatcagttaaaaaaaattgaagaaaagaaaaatattgagaagaaaaagcaacttgatgcagcggtcgcgaaagaaattttagaaaacggtgaaaaaaaatggatggtgcaagttgctttggcacctaatcaaaataaagcaaatatgattcagtcccaattacaggctaaagggtataaagttgttaccagcgcaactacaaaaggaatacgagtcatggtcgaccctgccaatgactacgcaattgcacaaattattcgagaaaaaataattgcagatgatagcttggatttgagatcggcttgggtatttaaatgggcttctctaacagcacagtaa

SEQ ID NO: 50923 - DNA, 1185 bp, Acinetobacter baumannii
ttgtttaagcattctcaaattttgacaaaaacattaattacaacgtctttgcttacattcagcctctcaagtcatgcagcccttacctttggcaatgctgaagaaggtcaacttaaagtaagcggtactgttcgagccaaatatgtttatgatttcgactctgaaccgtctaccagtaaattttcctttaatgacgcggtcttatggctggactacaactccccaaaatggattggccgcctagattatcgggtttatgaatattatggacgtttaggcgatgccaattggctcaccgatgcgtggttgggttataaaattaatgacaacagtaaaattattgctggcttaaaccccgttccttttggcttgggtcgcttttggggaaatacttattatttaggcattgccaatagtgccggttgggaagatgtacacaaccttggggtgaaatatgatttcaatgatggaaccaatgaagcacaactcgccttttatcctaccgatggtggcacctatagaggtaaaagcaaagactcgagtcgatttagtatcaaccctgtcaatgcagatgactctgtaccgcaaggcaccaataccaaagaaaagaactcaattgttgttcgcggtgctcatacctttaaaaatgtcctaggccaagaaaatttctctactcaacttggcgcctccgcatggtattccaccattgaaaataagcgttcagggcaagatggcgatcgccaagtttattcggtttttagcaataccaattacaaccaatggaatttacagcttttggctggttatcaagacattgataatgccgacacccaatataaagatcatctgactttgggcggtttcgattattcatttaactcagcaaccaaaggtcagatttattcagcagaactgagctatttatttcctcagcagtttggcccaattacctctgttcgtccgtacttgaactatagttcttatcgaaaagagcaagatggctttaaaaactccacccgttttattcccggcattgcgtttaactatcaaaaattgacagtacaagcggagttgctgatgggtaaacacgatccatatctaggagacagtgaaggccttgcggctggcggaagcaatgataaatggaataaaaaagcgtttgtaatttttgcttattacttctaa

SEQ ID NO: 50924 - DNA, 651 bp, Acinetobacter baumannii
atgaataaaagatttttaagtgcatatatccttatttctttaaccttacatgggtgccagagcctagatactaaaaatagtcttttgagccaccagatattggctgaaatgagcaaatcgaatcaattggatactttatctcctcaagaaattagagccaataagttagctgatttgaacactagatttaaaaatatggagatcgatttacagagagctattacatattccgtttatttacagaaacaaaattatgctaaaaggaaaagaattggtgcatttgggagctttttaggcgtagttgcaactactttaaatgcagcttcaaaagctaacatagtcacttccaccgcattcactggactacaaacagtaactatgggctatattacaaatgacaatactcagtatatagatcctcactcatatgaagaaatgcaaaaaataagaaatagtctaagagaatcttttatagcttatcagacaaactataaaagtttgcttacaactaaccttaacaacaatgattgggacaaattatatttggagacagtaatgcttttggaaaaaataaaatttgatatgaatattattttacctcctgaagattttactgacaaaagaaatcaattaaatggtagtaatgaataa

SEQ ID NO: 50925 - DNA, 525 bp, Acinetobacter baumannii
atgaaaaaaatattggctgctggattaatcggttttgggttagttgggtgtgctaccacacctcagcaaccatcagaacctgtaaaatttgaaaaggtttatcaaatagatgggttaaagcaagggcaaatttatgatggagcacgtcaatggtttgctacagcttttcgctcggcaaatgcagtaattcagtatgaggataagactacgggttcaattattggcaaaggtaatatgccataccgttgttctgggtttgctgattgtatgactgttacggctggtgatcgagtggatttcacagtgcgtgtagatacaaaagatgggaaaatgaaagtgagttacgataatcttactcactataaaccagcacaggtaattagtggagttcgatataatgaaactaatagacctattactgaagactatccatcagctaaaataattatggatgaattaaataaatcatccgatcaaatggctgaaaagattaaaactcaacaaaaaattaatgccgattggtaa

SEQ ID NO: 50926 - DNA, 258 bp, Acinetobacter baumannii
atggctagaacagaccctcaaattaacattagagttcctgctgaacttaaaaagaaactagaaacattggctttagagaacaatcgatctcttaatgcggaagtagttacacgccttgaaagtagttttgataatgaatgcttggatttatacaagattcctctagagaaattaatgtctgttgttatggaaaggtttggcgagaactctataagtctcacctttgaagaaacacaacgcattaaaaaagcaccctag

SEQ ID NO: 50927 - DNA, 174 bp, Acinetobacter baumannii
atggggctgattatggcacgcaaagatcctcaaataaactttcggttacctgagaaaattttagagcagctaaaagaggaaacccaaaaggagcatagaactttaacagcacaactaaatatgattattggagattggttagaaggcagaaagccaaaagaagtgaaagcatga

SEQ ID NO: 50928 - DNA, 2097 bp, Acinetobacter baumannii
atgttggaacaattttccaaatcgccctctctcctttcggttactgattacgaagaacatatctggatgttgcaattacaacagcctgaacaagttaaccgacgttttaatctatggaaacttaatcaagatttagacattcaactgctcattaaagcaattcaagacatcattaaaactacacctgacttaaatgtccgctatacatttagtgtcgaaggtgatttatacaaatatccatttgatgaccattcagcttgcctagaagtaaaaaagagtaatacagaacacgtatttgagcaggtaaataccttaaaagcacaagcatggaatgcagaatttcatccccctttttttacaagtcttgtagaaactgaacaagactattttcttattttagcgctccacccgattctcgatgaaagctatcaaaagtcagattttattcagactatacaaaatcgatatcaacaatattcaccacataatatgccattggtgctgacagaaattgatatatcaaatcaactcgatgcaaattctacaaaagcgtcagaacaatctaaccaaaattatgtgtcagaaattattttagaagagtttcgaaatacgctcgctgaaccagaaatgagtcaacatgatgacttttttgattttggcggccattcactattagcaacgcgaattattgggaacctactcaataaacatggaattgagattcaatttaatgatttctttaaatctccatctgctgctgatttagctcaatacgctttagttaaatctgcaaaaactgaaaaaactaccttacaaagtgtcgatcaagccccgcttactttagctcaagatttcctgtggcaagcttattccgcgttcgattttagcccaatttataacttaccatttgccgtagaattccttgaagaaattaatgaagatgttttctttcaagcgtttacagatattgttgagcgccatgcaggtttacgcacaatttttaatagcgccaatggtcaaacctatcaacaggttattcctacatctgaacttcaacaattcaaatggttttggaacagtgccgaaagtaaagatgcaacgcttgcaagtgaagcttcatataaatttgatttaacccgtgaacttcccctaagaattcgtttaattcgaaatgctaaaggtcgccaaactttatcgtttttagttcatcacatggtgattgatgaatggtctttaaatacgattatggctgaccttgcgcatgcttatcttgctcgctcaaatgctcaagccccaaactggaaggcacctgcccaatccattcttgatttttctttactccagcaaaaacaaggtatcaaccaagaccatctaaattattggactaacctattaagaggagcaaccaaaggactaaaccttcctgtttcggaacatgaattaaatgctgaaaaggaaaaacctccagtccaatggctcgaacttaaatttgcaccagaaatgcatgaaaagcttctcgcattttcgagacaacacagctcttctattttcacggttctctatactgctatcgcccatgcattacagcaacaaggtaatttaaaagatattgtgattggtacttctgcctctggacgaactgatcctgagttctttgatacggtgggttactttacgaccatggtggcgcatcgcacacagtttagcccttcagattcattccaatcattgctccacaatatcagcacaatgattaatacctcgatggcctatgcagatattccaatcaaccatattcaaaatgcgttagggatgcgtgccgatgaagggctattatttgatgtgtttattcatatccattcaaataacgctttaaacggcgcgctcaaaacacctcagggacaaaaccttccttatcgtcagattttgccggaacgtgatgaatcgatgttcgggttacattttgaaattatggaaaatgtgattgatggacaacatcagttaagcatgattattacttatcaagcccaccgcttcccgactgcaacagtgcaaagtatctgtgaaaaaattaaggcaaccttagctcaaatctag

SEQ ID NO: 50929 - DNA, 951 bp, Acinetobacter baumannii
atggaaggaattaaaacaatcggtgtagttggtgtcggtgtcattggtgcaagctggacagcattatttttatataaaggctttaaggtaaaggtgtatgacccttacccaatagacgaagaattatttaaaaagagaatacaggcaaatcttagtgatttgctcgctttagatcagcaaacagattcaagtcatcatttacaagatattttcctaaatttagagctttacaacaacttaaaagatgcggtgattgatgccgattttattcaagaaaatgcaccggagaggttagatttaaagcaaaatttatatcaagaaatcacttcatattgccctgaaaaaacattaattgcttcaagttcttcaggcttaaaagtttctgactttcaaaaagatgcaactcatcccgagcgtatttttttaggtcatccatttaacccacctcatctattacctttggttgaaattgtgggtggaaaattaacagatccgcaaattttaaagacagcttccgagttttatcaaagtttgggtaagcatccgattgttttaaaaaaagaagttaaagggcatgtagcaaatcgtttacaagctgctttgtggcgagaggcattttcactggttaaagaaggggtgtgttcggcagaagatgttgatatagcaatcaccagtgggcctgggctgagatgggctttatttggcccctacataaatatggaacttgccaatcagaaggggtttaaagaggcaattcaccatttaggaccacctatgaccgaatggtggaatgatatgcaaaattttcagcactctgaagaaactactgagttgctagaagaacaaactaaagaacttttaacacattataaagatgtcgatttatctcagaaaagggataaaggactagtcgatattttaaaattgagacaacaattagagttggattaa

SEQ ID NO: 50930 - DNA, 198 bp, Acinetobacter baumannii
atgctgttaaaagttggtgaattggctaagcaaacaggacttactgtccgtgctcttcatcactatgacgatatcggtttacttcagccttcggcccgttccgatgctggttatcgactatacacccctaaagacatcactcgtttgcatcaaattcaagcattacgagggctgggtatgtcgctagccgaaatctaa

SEQ ID NO: 50931 - DNA, 666 bp, Acinetobacter baumannii
atgctggagcttatagcaatgtacgagaaatactttacgcaagaagaacttgaaaagcttacatttttacaatcaggtactaaaacccaccaagaatggcaagagttaactcaagctgtaaatacggtatttaatgctggagaatcatctagcagtgaaaccgctcaaaagctcgcccataagtggatgaaaacacttgagcagaatacgcgcaccaatccagaatggcttgttaaattaaataacatcaattctgcagaacctgaatttcaggaaaaattaggattaatgccagaagttgttgagtttttacttaaggccttttcagagagtaagctgagtatttttgctcgttatttatctgataatgagtttgcttttttaaaggaaaattatgttcgcgaaatgaaaaaatggcctcaactattagtcgatattgagaaattgattgacgctgaggttaaaccgaatagtgaaggagcaaagcgtttggcacagcaatggctctctatgctacaaggttatactggcgaaaatccaagcactcaagaaaagattcgtacagcaatgcaaaatgaaccaagccttgctgacggtacttggcttaaaccggttaccctacactttctagaaaaagcagtagcagcattcaagcatactacttag

SEQ ID NO: 50932 - DNA, 702 bp, Acinetobacter baumannii
atggcttttccacatcatacagagcatcatgccattcaacgctcaggttggctaagagcctcagtattaggcgctaatgatggcattatttcagtgactagcttaattatggggatggctgcaagtggggcaagctcacatactctatttatcacttgtattgccgggctcatttcaggcgcaacctcaatggctgccggagaatatatttcggttaaatctcaagaagatattgaaaaatcagatttagctattgaggcaaaagaattaaaaaaataccctcaaaaagaattggatgaattaactcaaatctatatttctaggggactttcaaaagaactagcaaaggaggtggctattcagcttacaactcatgatgctttgggtgcacatgcccgagatgaaatcggtattcatgaaaatacggcggcaaaaccaattcaagcagcactctcctcagcagcatcattttcatttggggcatttttccctatgcttgccattttgtttagcccagagcatttaattatgccaagtgtgcttattacaggtatcgcggcattagcaattttaggtgccctttcgagttattttgcaggcacttctaaaatcaaaggtagtttacgtattaccttatggggtattttagcgatggctttttcaagctggattggttccttatttaatgtcactcctttataa

SEQ ID NO: 50933 - DNA, 561 bp, Acinetobacter baumannii; identical to SEQ ID NO: 15275

SEQ ID NO: 50934 - DNA, 534 bp, Acinetobacter baumannii
atgttacgcagcagcaacgatgttacgcagcagggcagtcgccctaaaacaaagttaggtggctcaagtatgggcatcattcgcacatgtaggctcggccctgaccaagtcaaatccatgagggctgctcttgatcttttcggtcgtgagttcggagacgtagccacctactcccaacatcagccggactccgattacctcgggaacttgctccgtagtaagacattcatcgcgcttgctgccttcgaccaagaagcggttgttggcgctctcgcggcttacgttctgccaaagtttgagcaggcgcgtagtgagatctatatctatgatctcgcagtctccggcgagcaccggaggcaaggcattgccaccgcgctcatcaatctcctcaagcatgaggccaacgcgcttggtgcttatgtgatctacgtgcaagcagattacggtgacgatcccgcagtggctctctatacaaagttgggcatacgggaagaagtgatgcactttgatatcgacccaagtaccgccacctaa

SEQ ID NO: 50935 - DNA, 2157 bp, Acinetobacter baumannii; identical to SEQ ID NO: 46110

SEQ ID NO: 50936 - DNA, 1188 bp, Acinetobacter baumannii
atgaaccagtctgatgatttagaataccaacttgatactttagccattcgtaccggacacactcgtagttttgaaggtgagcatggtgaaccaatttttttgacttcatcttttgtatatgaaaacgctgctgaagcagctgcaaaattttctggtcaggttcaaggaaatatctattctcgttttactaatccgactgtatcgatgttcgaaaaacgtttagcagctttagatggggctgaacgtgccgtggctacaagctcaggtatgggagcaattctatcaattgcgatggcgtatctaaaagcaggtgatcatgttatttgctcaagagcagtttttggttctattgttgctttatttgaaaagtacattgccaagtttggtgtagatatcacatttgtggatctaagcgatttaaatgcatggaaaaatgcagtacgtccagaaactaaactattatttgttgagtcaccatctaatccattagctgaaatcgcagatatccaagcacttgcagatattgcgcatgcaaatggcgcattacttgctgttgacaatagtttctgtacacctgttttacagcaaccgttaaagttgggtgcagatctcgtgatttactctgcgactaaatatttagatggccaaggccgtgcgttaggtggtgcagtggtaggtaaccatcaactcctagaagaagtttttagcgtagtgcgtactttagggccatctatgagtccgtttaatgcatggattttcttaaaaggattagaaactttacgtttacgtatgaaagcgcactgtgaaaatgctcaaaaacttgccgagtggttgtctacccatgaaaaagtagaaaaggtctattatggcgggcttccaactcatgaaggtcatgaacttgcagcaaaacagcaaaatggctttggcgggattgtttcttttgtagttaaaggtgagcgtgaaggcgcgtggaaggttattgataatactaagtttatctcgattactggtaatctaggtgatgtgaaatcgacgattacccatccagcaaccacaactcatggcaaactttctgttgaagcaaaagaagctgctggtattcaagaaggcttaatccgcgtttcggttggcttagaagatattaacgatattattggtgatatctcacgtggattagatttgatctaa

SEQ ID NO: 50937 - DNA, 1782 bp, Acinetobacter baumannii
atgacgactttaaacatactatttaagacaacatctttatgtctggcaatggccttattggtaggctgtaatgataatgatgacaatgattcaagcacaccagcaccgcgaagtaaccaaactgtaaatattttagctttcaatgactttcacggaaatttagaaccacctaaacgttacgttgaagcagcgaatccaaatgatgcatctcaaactgtacgtattcctgtcggtggtgtgagttactttgcagatgcaattaagaaacttaaagctcaaaatcccaataatgctgttgtgtcagcaggtgacttaattagtgcttccccactcacttcttcgttatttctagatgagcctactattgaagtcatgaatgatattcaaattgacttcaatgcggttggaaatcatgagtttgaccgtggtacagatgaattgcgtcgtttacaaaatggcggttgtcaacaatataccagcactgccccatgccaaattaataaaaactttagcggcgcaaaattcaatttccttgcagctaacgtggcaatgaaaaatgatacaagtaaaacgatttttcctgcctataaagtcaaaacttatggcgggattcctgtagcttttattggtttaacactcaaagcgactccaagtattgtttcagcggtgggtattaaagatgttgaattccgtgatgaagcagatacggtaaatgctttaattcctgaactccaaaaacaaggtattgaagcgattgtcgtcgttgtccatgaaggtgcagcgccaagtacgaaactcaatcaaaaaacatgtgatggcttaagtggaccaattttaggtattttagatcggttaaatccggcagttgatattgttgtttcggggcatacacatcagtcttatatttgtgattatgcaaccaagaatccagctaaaccatttttactaacctcagctggccaatatggcactcttattaccgatattaaggtggagttggatggtaaaactggcgatatcattaaaaaggatgctaaacaaattccggttcaaagtgaggcctatacttcgggtacaaccactgtaagtctgacagacctctatcaaaaatttagtaagacaccaagtatcgaagcgattttagataaataccgtcaagcagtaaccacaatttctgggcgtgttgttggaacttctactgccgttgtgagccgtacgcaagtcgaaagtggtgaaagcccactaggtgatatgattgccgatgcgcagcaagctgccgctcttcaagcaagtaatcaaggttcggattttacgttaatgaacccgggtggtgtacgtgctgacctactgattaacagcaataaccagattacgtttggtgatatttttgcagttcaacctttcggtaactcgattgtgactttgagcttaaccggtaaacagattagagatgtgcttgaacaacaatggtctggtgcaaatgcaaattcgcctagaattttacagccgtctaaagagttgagttatcaatatgcggcaaatacatctgtttcaccacgagcaagtaacatcatggttgctggttcaccattagttgacactaaagtatatcgcgtgacggtaaatagtttcttggcagatggtggtgacaactttacggtattaaaagaaggccaaaaccgtgtcggtggtggtcaagatatcgatgcgcttgaaagctatgttgctaagaactcaccgttaattattccggctacgactcgtattaaagtcattaaataa

SEQ ID NO: 50938 - DNA, 321 bp, Acinetobacter baumannii
atgcaaactaatttatcaaaccaaactaacaaaggcaatcagcaagtgctgaagcgtcagcaaattattcaatcttggtatgaaccggctcttaaaactttagagggtttactggaaaagcgtaagcaaaatttgaaacgccaaaaacgtgatgaaaaaaatgcagctgtaactcgtgatgagtttatgcaagccctttcagaacagcacagaatgccaattttccatgctggacaaatcatttcaagcttatatcaagctaaacggatacggtacttaggtagcacttttattcagtttaatgaaggcggtgatgcatga

SEQ ID NO: 50939 - DNA, 291 bp, Acinetobacter baumannii
atgaacacgaataatctatcaaatcaagaacaaataatccagagctggtttgaaccggctctccacacacttaaagcattaatcaaaaagtgtgaagaaaacctagagcgaatcaaagctgatactaaaaatgcagctgtaaagcgagatgaatttaaagaggttttagtgcgtcagcatcgtattacgtacaaccatgctgaggaaattattagtagccttagccgtgctgatcgtattcgcttcttgggtagcacatacattcagattaaagaaggcggtgaagcatga

SEQ ID NO: 50940 - DNA, 1047 bp, Acinetobacter baumannii
atgaataaaattttatttggtgattgccgcgcattgatgaaacaaatgattgaggaagggctaaaagctcaaacatgcgtaacttcaccaccatattttggtttacgtgattacggtgttgatggtcaattaggcttagaaaataccgttgatgaatacgttcaaaacatggttgaagtttttcgtttagtgcgagagctgctccatgaagatggcacactttggctaaaccttggtgacagttatgcgggttctggtcggggcatgacacgtacaggtttaaacgacggtaagaatccaaaaactaaaggactagttcttcctaagcaaaatgcagcccaatcaaatttaaagccgaaagatctaattggtattccatggaaagtagcttttgctctacaagctgatggttggtatttgcgccaagatattatctggcataaaccgaacccaatgcctgaaagtattactgatcgttgtaccaaagcacatgagtatattttcttattcagtaaatcacgtagatattattttgaccacgtagcaattaaagaaccggttgcagaaagctcaatcaaaagactttcccaaaatcttgatcaacaacatggcagtactcgtgccgtgatgaaacataacggtccaatgaaagccgtttactcgagatcttcgcgcgatagttttaaacgcaaaaatagtaagagagctgctgttattccaaatcaagcatatggaactcatagatcagaaagatcagaaagcgagtatgacttacttactcgtaataagcgcagtgtttggcaagtttctacaaagccatacaagggtgctcatttcgcaacatttccaatggacttaatcgagccatgtgtattagcaggatctcgagtcaatgatgttgtatttgacccattcatgggatccggaacaacagcagctgtagcactaatgcataaccgtaattatttagggtgtgaattgaatcctcaatattacgaattgcagcaagaacgctttgagaaagtattaaaagagagggccgcatga

SEQ ID NO: 50941 - DNA, 930 bp, Acinetobacter baumannii
atgaataaatcaatggtgtatgcctatactggtgttgtaatcacaatgctgttttggggctcggcatttaatgcgatgtcttatgtgattcaatatatgccacctctttcagcagcagctgaacgttttacaattgcaagccttggcctatttattctttttacagctataggaaagctacattgggtcgcattacggcaaaatttagctatctatcttattattggaattataggtattgccggttttaacctaggctgtttctatggtttacaaaccacctcagcagtcaatggcgctttaatcatggccacaacacctttaattactttgctgttaacaattttacttgatggagaaaaactgacgcttaataagtctattggtgttgtatttggcttaagtggtgtactttttgttattagtcatggccatatttcaacgctactacacttaaaaatagcaatcggtgacttattcatcttactaggtggtgtcagtttttgtttagcgaatgtgctatcacgccgttatgtaaaaaatgctacacctttagagaccacaaccttttccatgatgttcggtgctttgactttaatcatattaagtgtaatttttgagcatccttctcaagcaattgctatggcgcctatcactgcacacttagctatgggatacgtcattatttgttctaccatgattgcttatttattttggtttaatggtattcaaaaactaggtgcaggccgagcatcaatcttttttaactttgttccggtttttagtatgttagttgccttgttagctggtcaatcacttaatatctggcaacttataggcacagctttagtcatgcttggcgtgatgagtagtggaggatttattcagattaaacgtcctgcacttatagctaagccttgcacaaagtaa

SEQ ID NO: 50942 - DNA, 753 bp, Acinetobacter baumannii; identical to SEQ ID NO: 46211

SEQ ID NO: 50943 - DNA, 402 bp, Acinetobacter baumannii
atgtcatcagtcagcattgctgaataccgcaagttatttccgataaagaaaaataaaaagcggcgttcagcaaagcaagttgccagacaaccaagtgtgggtgaaatggttctggcaacgcatttaagagcatgcaagatcggttttgaacaggaatataagttccatccaaaacgcaaatggagagctgattttctgattattggtacaaaaattttgattgaggttgaaggcgggatctggagcggaggccgtcacacaagaggtaagggctatttaggggatatggagaaatacaactccgcagcaatgatgggttttacagttttacggttcagcacagagcaagtgaaatccggtatggcattaaagcaaattgaattattaattaagggtaaatag

SEQ ID NO: 50944 - DNA, 216 bp, Acinetobacter baumannii
atgagtgagtttgagggtaaatctggaaagtgggcttgggagattcaaaaagaacaacaagcgaatttagttgagctaagaagttcaattgaaaacctagttcaaaagtataaacacgatgctcatgcttcaagcctttttggcgatcaagataaagcacgagtttataactgctttgctaatcagttgaaaaatttgctgaaaggtggtgcttga

SEQ ID NO: 50945 - DNA, 1071 bp, Acinetobacter baumannii
atgacagttttcttcaaaaaggcagaacgcaaaaatgcgaaattgcgcttagctcttgctgggcctactggatcaggtaaaacattcacggcattagtattagctaaaggtatcggaggccgtattgctgttgcggatactgaaaatagtagtgctgaactatatgaagatttggttgaatttgaacatgccaatattcaaccaccatatacaccagaaaagtttattcaggtaattaaagcagctgagcaagcaaattttgacaccctcattttagacagtattactcatgagtggtctggtgtgggtgggtgtcttgaaattgttgatcaactggccgctggaccattcaaaggtaactcttggggtgcatggagccaagtaactccacgccaccgaaaattcattgatgcaatgttgcagtcaagtatcaacatcattgtgaccatgcgatcaaaaatggaaaccatacagaccaacgataacggcaaaaagaaagttgaaaaagttggtatgaaggtcgaacaacgtgatggtatcgaatatgagtttacgactgttctagatttaactcatgacaatattgctatagcaacaaaggaccgttcccgtttatttctagatcctcgccagttaggtgaacatgacggtgttttactaaaacaatggctactttctggatctgcaaatgcttgtattaatggaaatcaatatttagaacttgagcatttaatgttgcaagcgggaattgatattggaaattactgtgcaaaacgcggtctaaatagcctgcatgatgtaaaacagcaaatttatgaagagacttgtgaaagcattaaaaaaatcattcaacgtaatcatctcgctcaacaagagaacgagcaacaactcatcaagcagcaagaacagactttagaaaacgagtatcaactcgctttgaaacacatcgagtctgcaattcgtctaagcgacttagattacccggctaattacttcaagggaactaagtatgaacaaaacattttaaacgcatgtacagctaaatcagatatggaaggatggtcagcatga

SEQ ID NO: 50946 - DNA, 564 bp, Acinetobacter baumannii
atgccaaatttagttctcccaacacgtgccttatacgtcgtaaataaagcaattgatctgtttcaccaccgggggttccaccttattggcgtcgacagaatagtgaaagaatcagagattacaaaagcgactttttataattattttcactctaaagaacgactcattgaaatttgcttgatggtgcaaaaagaaaagctccaagaacaagtagtcgcaatggttgagtatgatttaagtacttccgcaatcgataaactcaaaaagctttactttctacataccgatttagaagggccgtattacttattatttaaagccgtttttgaaattaaaaatagctatcccaacgcttatcaatccgcagtgcgctatagaacatggctaaaaaatgagatttatagccagcttagaacactaaaacccgatgtctcttttaccgatgccaaactatttttatatatggtggaaggcacaatcattcagcttttaagctctggtggggtaagcgagcgggagggtgtgtttgagtgttttttacgagggctaactacatgcaaatga

SEQ ID NO: 50947 - DNA, 687 bp, Acinetobacter baumannii
atgaatgcttatttgcatcgtagtgaagatcgtggtcatgttaaagcaggctggttagagtcttatcatagcttttcgtttggtagctggtataaccctaaatatatgggggtaagtgcacttcgagtcattaatgatgaccgaatcgatgcccacaacggtttcggcactcactcgcatgacaatatggaaattttaacctgtgtacttgatggtgcaatttcacaccgtgacaccatgggaaatgaaggccagattaaagcaggtgaatggcaacttatgagtgccggtacaggtgttgctcatagtgagattaataacaccgatacgccagtgcacttattacaaatctggattattcctgatgtaaaagaagccgagccaaattatcagcaaattagtttggacccacgtaatcaaccgaacgaatggcatttgattgcaggccctgacgcaaatgcaccaatgcatattcgccaagatgcacaggtaaaatctgctgtacttgaaaaaggtcgtgaactgccagttgagacttcaaaacgagtaaattacgttcatgtaatttcaggtgaagttcgtattggtgagtacgaagtgaaagcgggtgatgctctggtctttgaagataatgccgtgattcatgcaaatgaagacagccaatttatctggtttgatttaccttaa

SEQ ID NO: 50948 - DNA, 234 bp, Acinetobacter baumannii
ttgcttaataaccaaggtaaagctggatatgcagatttagaggttgatggtgtttatggctcagcaacgctaggtgcccttaaaacatacttgtcaaaacgtgggaaagaaggtgagaaggttctggtgcgagtgctcaatattatgcaagggcaacgctacattgaaatctgtgagcgtaatccaaagcaggaacagtttttctatggctggattgctaaccggatcggctag

SEQ ID NO: 50949 - DNA, 675 bp, Acinetobacter baumannii
ttgttttctgaaatattatggaaacttggctcagggaaagggcaatacaatttacgtgaaagtattcttgcagatattgccatcttgttgcgggctgatttcgcggcatcttatatttgggattcaacccataacttatcgagagaaggcgttatatggaaaatcgacccaaaagccatgaaggactatgagtgtgtttggcaatttaatgatccgattacggcacagcttcgcaaacgtcaaaaaccaacctttgtaaatgaagtcatgcctctcgcagacctaaaaaaaacaccgtattacaatgagtttttaagagcctatggtttatatcacggcataaatatttattttgtccgaaatggtatggatattggtgatttacgtatttggcgtgcgaaagacgccgacacgtttggtgaacgtgaaaaaagaatattaaacctgcttgaaccttattttactcaagccttaccccttgatttatcaacccaatacggtttgacttcgcgtgaacaagaagtggttcgcttggtatctaaaggtttaagtgataaagatgtggccaatttactggatattagctttactacattaagaactcatttgaacaattctatgagaaaaatcggctgtaataatctcactgaaatggccttgctcattcgacattaa

SEQ ID NO: 50950 - DNA, 960 bp, Acinetobacter baumannii
atgatctcgaccacagttaaaaaatcactaaacaaaattaaattttaccgtgaaatcgagttaccggattttgctagtaaaaaatccatcccaatccgtcatttaaatatcggatttgaaggtaaagagattgatgttgaattctatatgaacaatcaatttgccacgatgttttttgctacgctttcagtatttctgacttatggtgaagatctggtgattgaaacagctcgtcatcaccgtgaatttattcaagatccagttttaaaacagcgtgttacttcattgattggacaagaggcgattcattctaagttacacaatgaatataacgatgcacttaaagatgttgaataccctgttgatttataccgtttcttgggcgaaaacttctttaaatatgtgtttttgaaatttccgcaaccgcttaaattatcgatgatggctggtattgagcattttactgcggtacttgccgaatacatgatgaagcacgaaaagaatttctactattcagatgatgccaaaagccgtgctttatggatgtggcatatgcttgaagaatccgagcataaagatattgcctatgatgtatatcaattactcaatggtagctacccactacgagcttctggcttcttcttagcattcttcactattttaggtctaatccctgcgactaccttgtttattccggttttaagaaaaccgcaggaaatgttgactagaaaattctggaaagacgcgcgccgtggtgtaggacttatttttggtccaaaagatggtgtattcggtagcaccattggccagattttcgattatttacgtcctgacttccacccaaatgatcatgacaccactgaatatctagagtactacaaagacaaattactcaaagaaggcggcgcgattgcaccttactttgtgaaggaatttaccccacctgtacgcttgtcttaa

SEQ ID NO: 50951 - DNA, 444 bp, Acinetobacter baumannii; identical to SEQ ID NO: 46179

SEQ ID NO: 50952 - DNA, 1965 bp, Acinetobacter baumannii
atgttgaacagtattcatcaagttttagatagtttgggtattagcccgcagaaacgtgctattcatgttcaatttacgtctccgatattgaatgaccaagtatttctgcaaagaattgatggtgtacatgcactcaatgatggtttaaaagcagaacttttatgcctatcgacaaatgcaacgattcaacttaaatcttttattggtgttcaggctgctgtagatattgtgacggagcgaggtgaattaactcgcgttacaggcattattactcatgctcaacagggccaatcagatggaagtctaactttatataagctgaccttagaagatccaaccgcattatggaaatatcgccgtaattcacgtgtatttatgaataaaagcgtggttgagatatgggaaatattatttaaagaatggcaaactaaaaatccgctatttgctgcaagtttaagtttagatttaagcggtctaacacaaacttatgatgtgcgtccttttgtgatgcaacataacgaaagtgactggaatttccttacacgcttacttcgtagtgaaaatatcagttggctcattgatgaagctcagcatattgttccaagtacagatacatctattcaagctcagaaactcaggttaattgatgccaatagtcaatatcagcctttagaccgtaaaacgattcgttaccaccgtagtagtgcggtcgaacaatatgacagtatgactcgcttaactgccgagcgttctcttcaacccaatgttatgcatatacaacgttggcaagcagaaatattagatcaagaagaagggattggaagtgttcaaagtaagcatcagcatagtgaacattatgacaatgctacacttggcttggagcaagcttggaactattcgcctgcatggattggtgacttaaagggtgaggatggggttactaaatctggaaatcaacaagttgaacgattaaaccagaacctccacaattactacgaggcacaggcgaaacgctttattgcacaaacaacagtccgcgatgcctatgtgggttactatttcgaattaaatgaacacccagaaatagaccagcatgaaagctcagataaaagctttttgattgtttctaaaaacttctttaatcagaataatttacctaaagatttaaatgatcaaatcaatggtttattggcgcaaagtaactgggcaattcaaaaccccgagaacagtgatgaacgccaagcgaatcaactgattttacaacgtcgtcatattccaacaacaccagcttataacccgcaaattcatagtccagtcactcatccacaacgcgcaaaagtggtgggtcctgaaggtgaagaaatctatgtagatgagtgggggcgtattaaagtccgcttcctatttacgcgtagtgatgaccatagccatgatggtggagcaggaaccaacaacaatgataccgattcagcttggattgacgttctaacgccgtgggctggagaaggttatggtgcgcggtttttaccgcgtatcggtgagatcgtcgttattgacttctttaatggcgatatcgaccgaccgtttgtgatgggtcgaattcatgaggcacagcgccaaccaaccaaatttgataacaaaggaaagcttcctgatactaaaaagctcagtggtatccgttctaaagaagtgtcaggtggtgggtttgggcaactcagatttgatgatacaccgggacaaattagtacccaactccaaagcagtcatggtgcaagccagctaaatctcgggaaattgagccatcctaaagataaagcggaaagtgaagaccgcggagaaggctttgaactgcgtactgaccaatggggagctttacgtgcggggcaaggtttattggtatccactcataaacaggataacgctaaaggagaccacctcgatgccgaagttgcgaaaaagcattag

SEQ ID NO: 50953 - DNA, 1698 bp, Acinetobacter baumannii; identical to SEQ ID NO: 45846

SEQ ID NO: 50954 - DNA, 801 bp, Acinetobacter baumannii; identical to SEQ ID NO: 46083

SEQ ID NO: 50955 - DNA, 1011 bp, Acinetobacter baumannii
atgttagttagtgttgtacttccagcatacaatgccgagttatatctaaaagaggcgattgaaagtgtcttagcacaaagctttgcagattttgagttgattgtaatcaatgatggctctgtagataaaacggaagacatcatcttatcttataatgatagtcgtattgtttatgtcaagaatgagaaaaatctgggtttaattggtactttaaataaaggtatgtccttagttaaaggaaaatatatagctcgtatggatgcagacgatatttgctttcctcaacgtttcgcaaaacaagttgattttcttgagcagaaccaagactatgtgatttgtgggaccgcagcttatcgtttttatgatcatatttcagatggcaaagcctttaatccaccactcaatgatgaaaatatccgagttcgattgttttttaatagtgcatttattcatccttctgtaatgtttcgtgctgatgttattagagaacatcatctatgctttagtgatgattataaatacgcagaagattactttttttggatggatcttctaaaatatggtaaaggttttaatctaaaagaaaaattactttattatagagttgttgaaacgagtcaaacagctgttggtaattctaatgttgaaaaacgcaaagaaattttaggtaatattcataaacgttactttttagattatgaaatcccagtagacttaaaggaaatagaactcaatttttatttaacaaatatcactcgaatgaagttgcttgatttgaagaaatttgattttaatcatattgatatttttttgcgaaaaatagtttttgcactaaggaaagctggtgtggagcagaaagtaataaatgaagaagtggggagagtttattttgcattaatttatacccaaaaaatgaaagttttttcgagtaaagggtttgtaagaaagattaatcctaccttgtttattaatggtgggttgggattcataaaggaccgtattgccagatga

SEQ ID NO: 50956 - DNA, 528 bp, Acinetobacter baumannii
ttggcatgtcgatacttagaggtagataaagttctttttcttcctgatatggctttttgtattaaggatgaaattcttgttaaatcaaagcctactggaaaaaatcttttgatgagccgtatagatgtagaggctgtgcctgtcgataaaaaatacatagatcaagtggatttacagtctgactggccaacttttgaaaaaagtccaatttattgtatttatttaagacttttactagctttgaatagaaaggtgtctaatggcttgcaagataaatcatcttcctatctagttagatatatcaataactttgcaatgaatactgctcgcaaaaggttgattaatactggtattcaatttattaatggttttgatgatgtttatacaacaagattacacggctgtattctttctttattgttggataaaaaaatcattttacttgataactcatatggtaaaaacaaagcatattatgatgcctggttaaaagatagtgataacattaaggtggtggaatcatgttag

SEQ ID NO: 50957 - DNA, 1548 bp, Acinetobacter baumannii
atggtttctggcattttacttcaaaatgttaaatggttttaccttggtttattaacagctattttaggttttttattttatttaatgataggtcgtttcgctcacatacggcttggaaaagataatgaaaaaccagagtttacctttactggctggatttctatgttgttttcaggtggcatgggggtcggactagtattttggtcggcagctgaacctatgtggcactacgctagcaacccttttacaccagggttaagtgatgagtccgctagtatggctatgcaactgacttttttccattggggtttgcatccatgggctatattttgtatcaccgctttagctcttgcttatttctcttatcgtaaaggtcttccatttagtttacgctcaattttatatccaattatcggaaaccgcatttacggacctattggccatacagttgatattttaacaattgttattacagcttttggggttgctcaatcccttagcatgagcgtacttcaaattaattctggacttaatcaagtttttggttttgagaatagtttaagcttacaatttatcatgctgactattttatgtggaatagcaactatttcagtagtcatgggtattaatagaggaatgcaaagactatctgagcttaatatgattttagctattctattgatagctattttacttattattggacctactcgttatttatttaataccttatttgaggctacaggtaactatacacaaaatcttataagcatgagcttatggagtgatgctcaaaaagattctggctggcaaaattggtggacagctttctactggccatggtggatgacatgggggccttttgtaggtatgtttattgctcgtatttctcgtggacgtaccattcgagaacttattgcaggcgtacttattgttcctacacttgtaacagctatatggatgtctgtagtaggaggatcagctctaaaagtagaacaagatgctcgtcatgcttatgaaaaacatgctgctgctttagttaaagctggtgagccagctccagaaccatttacaggtgggccaatagtaaaagcgactcaagctgataatactcgtgcgctttttacaatgtttgataatattgatagtggtacactcggtaaagctcttagtatcattacctgcttattactggcgacattccttattacatcaaccgattgtggtacacatgtattatgttatatggacgcagaaggagctacggaaacaccaattaaaattcggatcgtctggggctcacttattgccattctggctggcgtattactttatgctgggggtttaaaagccattcaatctgcgtctattattgctggctttcccatagctatcttcctggcaattatgagtgttactttatttaaaaatttacgtagagaacctcaagcatgtatgttattaccagaacatgcacggcctaagaatgattcattagaggaaagtccccctgaaaaaagttcacttcaagtaattattgaaaagtaa

SEQ ID NO: 50958 - DNA, 1167 bp, Acinetobacter baumannii
atgcgcgagtacgctgtttttacctcggaatctgtaagcgaaggtcatcccgataaaatggccgaccaaattagcgacgctattttggatgcaatcttaaaagaagacccatacgcacgtgttgcttgtgaaacactggtaaaaacaggcgctgttgtacttgcaggtgaaatcacaacaactgcgaatattgatgtagaagctgttgttcgccaaactgttaacggtatcggctatcaccattcagatttaggctttgatggttcaacttgtgctgtaatcaacatgattggtaaacaatcaccagagattgcacaaggtgtagaccgccaaaaacctgaagaccaaggtgctggagaccaaggtttaatgtttggttatgcaagccgtgaaaccgacgtgcttatgccagcccctatttcttatgctcaccgtttaatggaacgccaagctgaacttcgtcgttctggtgcattaccatggttacgtccagatgcaaaaagtcaggtaacttttgcttatgaaaatggcaaacctgtacgtttagacgcagtagtactttctacacagcatgatcctgaaattactcaaactcagcttaaagaagctgtaattgaagaaattattaaaccgatcattcctgctgaaatgttccatgcagcaactaaattccacattaacccgactggtatgtttgttatcggtggacctgtgggtgactgtggtttaactggccgtaaaatcatcgttgatacttatggcggtatggctcgtcacggcggtggtgcattctctggtaaagatccatctaaagtagaccgctcagctgcgtatgctggtcgttatgtagctaaaaatattgttgctgctggtcttgcggacaaatgtgaaattcaggtgagttatgcaattggtgttgcagagccaacgtctatttcaatcaatacttttggtactgcaaaagtttctgatgagttaattatccagttagtacgtgaacatttcgatttacgtccgtttggtattactcgcatgcttaacttaattcaacctatgtataaacaaacagctgcttacggccactttggtcgtgaaggttcagatactgcatttacatgggaaaaaactgataaagttgaagcacttaaagatgccgcaggcctttaa

SEQ ID NO: 50959 - DNA, 597 bp, Acinetobacter baumannii
gtgtttagtgatagatttgaacaactcgttcaagctttacgtattttgcctagcgttggaccgaagtcggcccaacgtatggctttacatcttttgatgaaaaatcgtgaaggtgcatttgctttagcacatgctctacatgaagcatcaagttatattcatgaatgtagtgtttgccactctttaacagagcacgaaatttgtgatatttgcgcttcaacagaaagagatgatcaattgctttgtgtagttgagtccccggcagatgttatggcaatcgagcaaagtggtagttttcgtggcaaataccatgtgttgggtggacacctttctccattagatggaatcgggccagaagaaataggcattccttatctaatccaacggttaagccaaggtacgatcgaagaagtcattttggcaactaatgctactgtggaaggtcaggcgacagcgcattatttggttgaagcgacgaagcatttacctattcacatgacacgtattgcgcaaggcgtaccacaaggtggcgagcttgaatatgtggatagtcataccttaagtcaggctgttcataaccgtatgcgtatgaaataa

SEQ ID NO: 50960 - DNA, 840 bp, Acinetobacter baumannii; identical to SEQ ID NO: 49428

SEQ ID NO: 50961 - DNA, 537 bp, Acinetobacter baumannii
atgaaaaaatttatttttattgcggctagctctctttttaatattgcagcagcacaagcagctgatggtacgatcactattaatggtttagtaactgataatacgtgtacgattgatactggtgataaaaatctcactgtaaatttaccaacagtatcatctcaatctttgaaaaatgcgggcgatgttgctggtcgtacaccttttcaaatcaatttaacgaattgtgcttcagttggtaaagtcgcgacttattttgaaccaggcgcaacagttgattttaatactggtcgactattgaaccaagctacctctggtgcagctgccaatgtcaacatccaattattgggtagcaacaatgcagtaattcctgtaattgcgaaaggtgcttctggtgcacaagataactcacaatgggtaaatgtttctgctggagggaatgccgatcttaattattatgctgaatattatgcaactggagcatctacagcaggtactgtaacgtcacaagtgaaatacacgattatttatcaataa

SEQ ID NO: 50962 - DNA, 1245 bp, Acinetobacter baumannii; identical to SEQ ID NO: 46209

SEQ ID NO: 50963 - DNA, 882 bp, Acinetobacter baumannii
atgacgcttaaacaactaaaagcttttttggcccttgcgcgtacactcaactatgccaatgcttctttagagttacatctcagccaatctgctttaagtctcaccatcaaaagcttagaggaagagttaggcggtaaactgtttaaccgtaatacacgccgagttgagcttactcaagaaggtaaatcactcattccatatgcaaaaaaattactcgccaattgggatgaaatggaaaacgatgttaaacaacgctttaaactcaatcgtggaacattaagtattgcctcaatgccctttgtgacccatgcaattttgccagaggtgattcatcaatttttagcagtccatcccaatcttaatttttcaattcacgatattccaaatgagaccattatagaaaaagtacaagatggtatttttgagcttggtatttgttttgaacctgatctcaccgaaggtttagagtttaaaccgttgtttgaagaagacttcttagctctattacctaagagtcacccactcgctcaatcatcttctattacatggcatgagctttgttcaaatccatttgtaaccttgcaaaaaccctcaattgttcgatatttagttgagcaaaattgtttgcgaaataatataacgctcgatttaaaagttgaatgccaccaaatttcatctctttcaagtttcgttgcttatggaattggggtaagtgcaattccaaggcattttgctaaacacattgataaagaacataacgtactgattgatttaaaagacgaagccattcataaaacagtaggaattgtttataaaaagaactttgaaatttcaaatatttctgctcaatttattgaggcactggttcaatataaattttaa

SEQ ID NO: 50964 - DNA, 783 bp, Acinetobacter baumannii
ttggcacagctcgatttagcaaaacaacttgccgagtactctaacgacattcaaatttgcacaactgttcaggatatccagcactgcctaacacagcaaaagttagccattgtattgcatatggaaggtgctgaagcattacaacataatccagatttactcgatgtattttatgatgctgggcttcgtagcatcggtccactttggaatagaccaagtcgttttggacatggtttaaatgccaagtttccgcattcacctgataccggagcagggcttacaaacgaaggtaaagcatttataaagcgctgtgctgataaaaaaatggtgattgatgtttcccatatgaatgaacgagctttttgggatacagctaacattcttcagcagccaattgtcgcaactcactcaaatgttcatgctttatgtccacaagccagaaacttaacagataaccaacttaaagcaattaaggactctaaaggcatagtcgggttaaattttgatgtcgcatttttgcgtaaagacgggcagcgtgatgcaaacacatccattgaggtaattttagaacatcttgaatatttaatagatcaaatgggagaaaatcatgtcggttttggttctgactttgatggagcactgattagtcatgaaattgaagatgtaaggggactacacctactgattgaagcaatgcaaaagcgacattattcgaatgagattatagaaaaaatttgtttttctaactggctaaccgtgctcaatcgcatcctaagtaaataa

SEQ ID NO: 50965 - DNA, 861 bp, Acinetobacter baumannii
atgatgattgagacaaactccaagcaaggcatggcatttgcagccgcatttttatctttagtttctgtacagatcggcgcagcaatagcaaaagtcctttttccgattcttactgctgaaggagtcaccttaactcgacttgccttatcggcctgtttcttatggatagtctttaaaccatggcgacagtggaataaacagaccaattggaaaaatctaattatttatggatcaatcctcactttaatgaatactttggtctataaagcattttcttacatgtctgtggggatcgctatttccattgaagtgttaggaccacttacggttgctattttaatgtctaaaaataaattagattatttttggggaggattatcaattattggtttgcttcttttacctatgggcaatgcaaataataactttagttttattggcatgacgtatgctttattagctgcagtgggttgggggctgtatgtgatttatggctcaaaagttgcacaaggtggtggtagctctgttgcgaccggaatgtttatagcggctttatttgcaacacctttaggtgcatctcactttatccatatttttgatagttataagattctttttacatgtttacttatggcgatgctcgcgagtgctattccatttatattagatatgattgccatgaaaaaactgcatcctcgagtttttgggattttactaagtgcgtcacccgcagtgagcgctttggctggatggctaattttaaatgaacgattaaatagttttcaggttctaggcataacaattattatggcatcgtgtgcaggttgttcttatttttcttataaacgtaataaggtataa

SEQ ID NO: 50966 - DNA, 363 bp, Acinetobacter baumannii; identical to SEQ ID NO: 48656

SEQ ID NO: 50967 - DNA, 198 bp, Acinetobacter baumannii
atggaacgattaaaaatcaatggtcgtaaacctgcaccagtacaaaaacttcaggcaaaagaaaaagagcctgagcttgcaaaggaattaggtccagatcctttcgataatccgcacgaatacgcagagatgtgccgccgtgaaggtatgcctattccaagaaatattctgcagttaattgaaggggcgaatgcatga

SEQ ID NO: 50968 - DNA, 399 bp, Acinetobacter baumannii
atgaaatatcagaaattaaatcgtttttcagattctgaattccagcgcttggttggtgtacctcgagcagtttttagtgaaatggtcgaagttttaaaagaagcagaatcacttaaaaagaaattagggcgtcctcatactttagctatagaggatcaattattattaacactcaattacttacggagctacaacacccaattggaattggcggcaaattaccatatcgctgaaagtaatgtgaatcgaactattaaaaaggttgaagatgcattaatgaaatcaagacgttttaccctgccaaaacgaagcattaccacagcagacgaacaatttaactgggtaattattgatgcgacagaatgtttaatagaacgcccgaaaaaaaaatcagagtaa

SEQ ID NO: 50969 - DNA, 729 bp, Acinetobacter baumannii
atgcttattcttggcagcgttaaacagcttacccaggatgcggtcgtgcaggtcgatgatttcgtcggtgacggtggccatgccctcggtggccagcgccacgagagtggcgtagcgccgttgcggctcgaatttggccaggtcggcgggtgtcatctggccgccctcgcgggcaatcttgagcaggcggttctggtgaaccagccgctcgatgccggtaggcagatcgagtgcctgccatgccttgaggcgttcgatgtgttccagcatatgccgcgaatttggcttggccggagactggcgcaaccaagccaaccaggtcgtcttgccgttgtcccggcgcttgagcagatcgtcgaggcggcggcgatgcgcgtccgccagtggttcggccaaggcgtcgtagatgcgccggttagcacgggtgatcgcctcggcactcgcccgctcgacggcgttgagggcgggcagaatgaccgactgccgccgcaggtgcccgatcaaggcgctggccagcacgatgcctttgtcggtttgcatcgccagctcggtcagcatctggacggcctgccggtaatggctcatggtgaagggccggaaaccgaacacggtttgcagctcgctcaggtgctcgcgccgggtctgctcccgctggccgtactcgttccagctttcgacgccgaccttgagctggtcggcgaccagcttcaacaagggcgggaacggtag

SEQ ID NO: 50970 - DNA, 570 bp, Acinetobacter baumannii; identical to SEQ ID NO: 13730

SEQ ID NO: 50971 - DNA, 177 bp, Acinetobacter baumannii
atgaactacgcactcaccacaagtgatgatgtagccaaactcacacttaaccgccttgatcaggatgagctttataccatccctcaaatcgatgcgaagttgttctggctgatgaaacgtgcatcaccaagtttgtataccaagttccttggtacctcttacaaattatttaaataa

SEQ ID NO: 50972 - DNA, 258 bp, Acinetobacter baumannii; identical to SEQ ID NO: 49182

SEQ ID NO: 50973 - DNA, 411 bp, Acinetobacter baumannii
atgcttgaagaatctgagcataaagatattgcttatgacgtctatcaggttttaaacggtaattatccgttacgggcaacgggctttttaatggctttcattaccattttagggcttattccaacagcaactttatttgtacctctactgcgtaagccaaaagaactgttgaccagaaaattttggaaagatgcacgtcgtggcgtcaacttaatttttagtccaaaagatggcgtatttggtagcaccattggtcagatttttgattacttacgtccagacttccatccaaatgatcatgacacgaccgaatatctggagtactacaaaaagaaattacttaacgagggcggtgcaattgcgccttactttgtgaaggaatttacaccaccagttcgtgcagtttcataa

SEQ ID NO: 50974 - DNA, 513 bp, Acinetobacter baumannii
atgaacgtacgcacttgcactgaatctgacgtcgcctctatcgcagtcgtatttactgagtctattcatgtacttggagcgtctcactatgacgcttcgcaaaggaatgcgtgggcaccgcgtcccgcagatatagaggcttggtcagctcgcttatctggcctacagactcttctagcaattgagggagatgcggttatcgggttcatctcttacgagcttagcggccacatcgagtttctttacaccgcaccgggttccgagcgtcggggcgtcgcgtctgttctgtaccgtgaggttgagaaagccctcccaggtgtttcgctcttcacagaagccagtctggtcgccaagccctttttcctgcggcatggtttcagtgtagttgaggagcaaaatgtctcccgtggaggcgtcatgttccgtaggtatgcaatgcgcaaggcagttgtcgcccaacatggcgctcaagccgaccggccagccctgcgggctgtccgtcggcttagctag

SEQ ID NO: 50975 - DNA, 438 bp, Acinetobacter baumannii
atggaaactctaatatatgaagtagaaattaatgctcctatagaaaaagtatgggacgtactctggaatagtgagacctataatgcatggacgaaattctttgctccagattcttcaatgcgcacagattggaaagtcggtggtaaaacatattttctagatggagaaggaaatggaatggtttcgaccattgaagaaatgaaaaagcctgaagtactaatttttaaacatttaggaatgattaaagacgggaaagaagacttggaaagtgaagaggtgaaaagctggagtggttcgctagaaaaatattttttaagtcaaaatggggatactacaacggtaaaagtagaattagccaccttacctgagtatatcggtatgttaaaaagtggcttcgttcaaggctttgaagctgtaaaacaaatggctgaaaaataa

SEQ ID NO: 50976 - DNA, 162 bp, Acinetobacter baumannii; identical to SEQ ID NO: 46255

SEQ ID NO: 50977 - DNA, 318 bp, Acinetobacter baumannii
atgaaatttaaaatattattattaagttttattgccaccggttgctatgctaatgaaagtacagctgatccggatatttgtaatatcgtaaaaaaggtcgcttataacgtgatggaagcacgacagcaaaaagtaccagcacaagatttacaacaaattgccgatgggctagcagatgaaaaagccaagcagctttatcaagacttaattagctcagcttatgctgccaaagtatttaagacaagtttctttaaacgccaagcaattgaagatttccaagcaggatggtatgaggaatgtttacgtagaaatgaataa

SEQ ID NO: 50978 - DNA, 408 bp, Acinetobacter baumannii
ttgattagagataaaggactgcaatacgcgaaggaaatcgtagattcagcacccgataacgcaactgaatggaacgagggttatgagttccaatgtggtcaaagtgtagaaatcagcccagcagatcgtgagaagtattttgtagatttggttgagcttaaacgtctggtggagtctttgaaaatcatcagcgatttaggtggagttgagaagctaacgcctgcattcattacgacagataagcatgttggttacacgcatgttcgcatggtgggaaatgggagattgagctttcttgatgatttttgcgacttcattccagatggttccatttcaattaagcgtgtgatgactgctatccgcgaccacgaatcaatatacggaggcggtgaatctcatgccaactag

SEQ ID NO: 50979 - DNA, 198 bp, Acinetobacter baumannii
atggaaagattaaaaatcaatggtcgtaaacctgcaccagttcaaaaacttgaggcaaaagaaaaagagcctgagcttataaaagagttgggccctgatcctttcgataatccacacgaatacgcagagatgtgccgtcgggagggtatgccaatccctagaaatattcttcagctaattgatggggcgaatgtatga

SEQ ID NO: 50980 - DNA, 282 bp, Acinetobacter baumannii
gtgatcgacattgatgaaactaatcattgggaaaatagtgatcaaattactctgcgacaaagtgaaggtgccttgattgttttaagaataaattatgagtctgaaaagaaagaatcatatagtgtcagtctagaggttgatgagcttgattcttatggtgaatgttatctaaatgattctatttggacgttgtatggctgtgaaaaagatattcttgaaagaattgtaaaacaggattggagccttaagaatttaggttcttataaccattattttaaatag

SEQ ID NO: 50981 - DNA, 1143 bp, Acinetobacter baumannii; identical to SEQ ID NO: 50755

SEQ ID NO: 50982 - DNA, 219 bp, Acinetobacter baumannii
atggcggaagtagaacagcagcccacttcggcacctagctctcctaagaagcgacgtattttgcgtagcttcttgctgacaatcttgatcatacttttattacttgttgcttccatcattattatgatgtcgactgaccgtggaagtcgttttttattagatcgtgttttacaagctcagcaagtcattaaatacgagtatgaggggggtaattcttaa

SEQ ID NO: 50983 - DNA, 2340 bp, Acinetobacter baumannii; identical to SEQ ID NO: 45763

SEQ ID NO: 50984 - DNA, 762 bp, Acinetobacter baumannii
atgtcaattgaaaaatttagcgtagaaaaagttttatctgttcatcgttggaccccaacacttttcagttttaccatgacgcgtccttcgcattttaaatttacggcagggcaatttgcgcgtattggtttaaaggtaggagatgagctggttgtccgtgcgtattcggtggtgtcttctccgtttgatgaaacgctagagtttttctcaattgtagtaccagacggtgccttcacctcgaatctacagcatttgaaagtcggtgatgagctttatttggaaaaaattccatatggttacctgacgttggcacgctatcaacagcctttaccgcatgatctgtggttactggcaacaggtacaggcttggctccatttttgtcgatgctacaagactttgaaacttggtctaattaccagaaaattaacttggtttacagtgttcgtactgcggctgagctggcttatgttgaccgtattcaagagattgctgaaacttttggggaaggacatttaggttttaaatttattcctatcattacccgagatccatctgcaccgttacatgaacgcttacccgtgttaatcgaaaatggtgagctagaaaaagtagcaggcttagaactcagcccagcatcaagtcatgtcatgctttgtggaaacccacaaatggttgatgatacgaaagaggctctaaaacgccgtggtcttacaatgaatcgtcgtggtgaaggaaatattgcggtagaaaattactggtaa

SEQ ID NO: 50985 - DNA, 633 bp, Acinetobacter baumannii
atgctagatctctctcaaattttggcatttggattcatttgtctggcgatggtactcacccctggcccaaacatgatttatcttatctctcgttccattagtcagggcaaaatcgcaggatttatttctctcggtggcgttgccgttggttttgtattttacatgctctgcgcatcttttggaattacagcacttgttgttgcagtaccttatgcatatgacactattcgtattgccggtgcaatgtacttactttggttagcatggaaagctttacgtcccaatgccgcacctatttttaatattaaagatttggcggttgactcaccattaaagttatttttaatgggctttttgactaatttacttaatcctaaaattgcgattatgtatttatctttattacctcagtttattcacccacaacaaggcagtattttagcgcagtctatccaactcgggactatacaaatttttgtaagcgtttcagtaaatgcgctgattgtattttctgctggtagcattgctctttttctacagaaaaaaccactttgggccagcattcaacgctgggtcatgggaacagtattagccggtcttgcggttcgtattcttctagaacaccgtcgataa

SEQ ID NO: 50986 - DNA, 387 bp, Acinetobacter baumannii
  misc_feature (335)..(344): n is a, c, g, or t
atgtacaaatataaaaaagtgagtgatgaccttactcttcaaattcagaatggcaggcaacctgtgggttctcggttgccatcaattcgagactgtgcccaacattatcaagttagtattaataccgtaaaagaagcttatcggaagcttgaagaccaaggtttaatttcagttcgcccacagtctggctactatgtttgtcatgcaccttcaaacttgccagatcttgaggagcgttatatcagtgaagaaaaagtgcccctttcaggaattagctgttttctcgcgcaaattgttaaaaagcagatggaccccgactatatcaatttggcccnnnnnnnnnngcttgcccatctggtgaaaacttctacccgattgaacgcttaa

SEQ ID NO: 50987 - DNA, 1479 bp, Acinetobacter baumannii
atgcaaaaaaaatggttaatcctcacaattatcgtcctcatttatttacctgttacgattgatgcaacggtgatgcatgttgcaacaccatctttaagtgcagcattgaatttaactgccaatcagcttttatggattattgatatttattcgctgattatggcgggtttgattttaccgatgggtgcactcggtgatcgtattggctttaaaaaattattatttattggaaccgcagtttttggtgttggttctttagctgcggctttttctccaactgcctatgccttaattgcttctcgtgctgtcttaggtctaggggcagctatgcttattcctgccactttatcaggtatccgtaatgcttttaccgaagaaaaacagagaaattttgcacttggtctttggtctacagtaggtggaggtggagcagcttttggtccactagttggtggttttgtattagagcatttccactggggagctgtattcctcattaatatcccgatcattttagtggttctagttatgatcgtgatgatcattcctaaacaacaagagaaaactgatcagccaattaacttagggcaagctttagttttggttgtagcaattttaagcctcatctattcaatcaaatcggctatgtataacttctcggtgctcacggttgtgatgtttgtggtgggtataagcacattaattcacttcattcgaagccaaaaaagagctacgacaccaatgattgatctggaattgtttaaacatcctgtgatttctaccagtattgttatggcagttgtgtccatgattgctttggttggctttgaattattactgtctcaagagttgcagtttgtacacgggttttctccattacaggcggcgatgtttattattccatttatgattgcaattagtttaggtggtccattagcaggtatttgtttaaataaatggggtttacgtagagtatcgagcctaggtattttagtgagcgcgctcagtttatgggggcttgctcagctcaacttttcaaccgaccactttttagcatggacgtgtatggtctttttgggctttagtattgagattgccttactggcctcaactgctgccattatgtcatctgtgccccctcaaaaggcgagtgcagcaggtgctattgagggaatggcctatgaacttggcgctggtttgggcgttgctatatttgggttaatgttgtcttggttttatagccgctcaattattttgccagccgagcttccgtcaaacttaattgaaaaagcgagtatctcgattggagaaaccatgcaattagcctctaatcttgaaaatcctttaggagggcaattagttgtagtggcgcagcaagcttttagctatgcacatagttgggtacttaccatctcagcgatctgtttcttccttttaactgtatttgtctggtttagttttccgaagaaagtaaattaa

SEQ ID NO: 50988 - DNA, 312 bp, Acinetobacter baumannii
  misc_feature (55)..(64): n is a, c, g, or t
atgctagtaaattttttaaaattcaaagagatatgtaataatattacactattannnnnnnnnncctttagagataggtttgtgcaacaaagccaattaacgagtaaatttggaattcacgtaggagatgtattaggagatggctttgaaaaagttcatttatatgttgaagctattgaatctttaatggaaaatgaagaacagagacagcttttagcaatacaagctagaaaatatattgaggaatatcataatgtagcagattttactaaaaaattaagaaatatcttgtttcatgaagtaaagttttaa

SEQ ID NO: 50989 - DNA, 1272 bp, Acinetobacter baumannii
atgatcgaccctaagttactcagaaataatattgaagtcgttaatgcagctttggcaaaacgtggtgttcagttagatgttcaagaatgggcatctttagagactcgccgtaaagacttgcaatcaaaaactgaaaagttacaggcagagcgaaatgccggtgctaaacaagtgggtcagattaaaaaatccggtggtgatgcttctgaaatcatggcacgtatgcaagccattggtgatgaaattaaagctgccgaagttgctttatcagagctacaaaacgagattgagcaaaaagcgcttagcattcctaacttgccggacgaatctgtgccagctggtaaagatgaaaatgataacgttgaaatctcaaaatggggtacacctcgtcagttcgattttgaaatcaaagatcatactgatttaggcgagtggatgggcggactagagtttgaaactgccactaaactcacaggctcacgttttagtgtgttgaaggggcctttagcgcgtctacaacgtgctttaactcagtttatgctcgatacccatactttaaagaatggttataccgaagcgtatgtgccttatttggtaaatgctgattcattacgtgggacaggtcagttaccaaaatttgaagaagatttatttaaacttcaaggtgaaaaagaatactacctcatccctacagcagaagttccagtcactaactttgtccgtgatgaaattattgatgcagatcgcttaccattaaaatatgcggctcatactccatgtttccgtagtgaagcaggttcttatggtcgtgatacacgtggtttaattcgtcagcaccaatttgacaaagttgaaatggtgcaaatcgttaagcctgaaacatctatgcaggcacttgaagagcttactgcacatgctgagggcattttacaggcacttggtttgccttaccgcaaaattttgctctgtggtggtgatatggggttcggggcgactaaaacttatgatttagaagtttgggttccaagtcaaaatacttaccgtgaaatttcaagctgctctaatatgggtgatttccaggcacgtcgtatgaaagcacgctaccgtatggatcagaagaagaccgaattggtgcacactctaaatggttcaggccttgctgtagggcgtactttacttgcagtaatggaaaactaccaacgcaaagacggttcaattgagattccagaagtattacgcccatatatgggtggtgcaacgtttattgattaa

SEQ ID NO: 50990 - DNA, 1386 bp, Acinetobacter baumannii
ttgacaaacttatctgggactaaaccaacagctaaacttcaaaagaatcttgtgctttggcacatcattattattggtttagcttatattcagccattaactttatttgatacttttggtttagtatcagaacgaagtggtggtcatgtacctacttcttatatctttgccttagttgcaattttattgacgtcgatcagttatggacacatgatcaaacgctatccttcttcaggatcagcatatacctacgcccaaaagtcaattcaccctaatgttggttttatggtgggttggtcatcttggctagactatttactttcaccactcgtcaatatcattttggccgatatttatttaagagctttgtttccagaagtaaataattggctatgggttattggcttaactgcattaatgactgtgattaacttatttggcgcacgctttgtcgcgcgttttaacagtacaattgtagttattcaacttggtgttattttttactttgtttatcaagtatatattctccttacccaaggcgtatatgctgatggtacgcttaatcccgataaagccgaattatggtcattaactcctttttggaatgatatgacttctattagtgctttgattggtggtgcaacagtactgtgcttttcttttacaggttttgatgctttatcttcacttgcagaagaaactaaagatgctgaaaaaacgcttccaaaagcgattttctcaacagcattgcttgcaggtattatttttatcgtaagcacttactttatccagttgtatttccctagcaatccaaacatctattttaaaccgttagatgaatcacaacctgttatggttgcagcaattggcagcattgcatttaaaacattagttttatattttgctgtagttgcagtaatggcatccggtatttcagcacatgctggtgtatctcgcttaatgtatgtaatgggtcgtgatggggttattaataaaaagttgtttggtcatattagcccaagattgcatactccgacttacaacattcttattgttggtgtggttgcattatctgctggctttttagaccttgaacatattgttaacttaattagtttcggggccttaactgcttttagttttgtaaacttctcggtgatttcgcgctacgcgctgagagatggtaaaaacaaatctatcaaagatattattaattacattattgtaccaacgcttggctttgctagtgtgttcttaatgtggttagaaattgacaagcttgctttgcaaattggcttagcttgggcagtgtttggggtaggttatcttgcctataaaaccaaaggctttaaatataatgctcctcaacataatgagcatgaataa

SEQ ID NO: 50991 - DNA, 2007 bp, Acinetobacter baumannii
atgtttgttagaaaaagaaactcagcgctcttcacggtcatactcctcggttcaatcctgagtggatgtcaggtcgtcaatgttaagcaacaagctctcaacgttactattgcaaatgagcgtaatagtattcttacccaagataaactaagtgaagcgagtcttaatgttttgtccatgtcagggcaagaagctaaggcctgtacagactcccctgacacttgtgttaatcaacttaaaaatctgccccaaattttagatgaacagctgttatcggctgcgagtgaaatgtatctcgcaaaagcaatggctttgtcagattcttctgaatgtaaaattagtcgtttcactaaacataagccaactgaagaacaaaaagttattcaaaataaatatgatgaatgcttagatcaacagttaagtctactcgataagagtatccgttatagctatgcttatctgttttctacaaaacgtcagccgactgatcgtatttttgataatagacaagttcagatacgcgacttctataatcaagcgattgccaaaatggtcagtgtgtatgatttaagatatccacaaaaaaatgtggtagagccacaaatccatattggtaagagtgtatattcaattgattttgagtttcatagacaattatctggccaaaaattagaaaaattaatttcaagttataacttaaatttctcaggtttaagaacaatcaaccgtcgtgatggtttcggttccgaatttgtagctgtcttcccaagttcaggcaaagaagacattaatgaatacattttagatccacttaattacagctataaaaatggtgtaaatccaaatattcaccatgcacgttatttagcggcaactattgttgcagagcctaaacatgctaaaaccattcaagaaattattaatgacccagaatttgtgattcgggtctatgatccttatcgaactgataatattaatgtcgctggtaagcaatatcctttagctgcaaacttctcagctccttatggtctgtggttagctgaaaacaacctaggtgtagcggcttatttaagcttgattgatcgtgatcagcacttaaccatgccgcatttatatatgcttgaaccttataatccaaacaaaaaaattattgtgttggtccatggtttagcaagtagccccgaggcatggattgcgctcaccaacgatgtcatgggtgatactgttttaagagataactatcaagtttggcaagttttctactcgaccaatatgccaattctggaaagccggttccagatttatgcccttttgaaacaagcattcggttcgttaaacccaagtgatcctgctgcgcatgatgcggtgcttgtaggtcatagtatgggaggaattattagccgtttacttgtaagtgatgctgatattactaaacctgccttggagatgatgacgatccgtcagcaaaaccgttttaagaaacatcctatggtgactgaacggttgcaaatgcattcaattagtaactttgatcgtgcaattttcttggcatcgccacaccgaggtactgattatgcagatcgttggttcacattagctgctcgtaaaattatccgcttaccgggtgcttttttatcagctgttgcaacttcgctcaccacagaaaatttagatattaaagatttcttgaataatattgataatggcctgattcaaaatggaccaagcgacttaagccatcaatctaaatttatggaactcactgagaatattaatccccatcaagggttaatcttccactcaattatgggcaacattaccaaaagtgatgatccaaatgtgattaccgatggtattgttccttataaaagtgctcacttagaaggtgctaaatctgagaaagttctaccgggtggacactctattcagttaacaccacaagccgtattagaactacgtcgtattttacgagagcatttagttgaacatggtttgtataaaccataa

SEQ ID NO: 50992 - DNA, 3564 bp, Acinetobacter baumannii
atgcagtttgttcatctcggtatttacacagaattttcgattacagagtcgattgttcgcatacccgacttggtcaagactgcggtaaaggatgaaatgcctgcgctggcacttaccgacttatccaaccttcatgctgctgtaaaattttataactcttgccttaagaaaggcattaagcctattttgggtagtacaattcgtcttaatgatgcccaacatcgtgcaactttgcttgcaatgagtgatattggatggaaaggactgaccgaaattgtttcgcgtggatttattgaaggtcaacaactcagtatcccttgtgtacaaaaagaatgggtcctagagcagcatcaagatattattgttttacttggccaacatagtgatgttgggcaaatgctttgctcatctaacccgcaaaaagcagaacctttacttgaagagtggattgaaaagtttggtaatcgtgtttatctagccttaacacgtactgatcgtcctggcgaagaagactttattcaagaagctgccaaacttgcagctaaatataatgttggtgttgttgcacacaacgatgtgcactttattgaaaaagaagatttcgaagcgcacgaagctcgtgtatgtattgcagatggttatgttttagcagatgatcgacgtccgcgcttatatagcccagagcagtatttcaaaacttctgatgaaatgattgagctgttctcagatattcctagtgctattgaaaacacctatcaaatcgctaaacgctgtaatgtcactttaaagctcggtacttactttttacctgagtatccaattcctgatggttttaccatcgatacctattttgagcacttatcaaaagaaggcttagaagagcgcttaaattacctttaccctgtcgaaaagcgtggtgaagactggcccgaaattcgtaaaccatatgatgaacgaatagattatgaagtcggaatcatcctgaaaatgggattccctggttacttcctgattgtcatggacttcattcaatgggcgaaaaacaatggtgtccctgttggaccgggccgtggttcaggtgcaggttcattagtagcttatagcttaaaaattacagatcttgatccacttcgttacgacctactcttcgaacgtttcttaaacccggaacgtgtatcgatgcccgactttgacgtcgatttctgtatcgcaggtcgtgaccgtgtgatcgattatgtatcacgtacttatggccgtgaagcggtgtctcagattgcaacgttcggtacgatggctgcaaaaggtgcgattcgtgacgttgcccgcgttttagggaagtcttatggtctagctgaccgtatttcaaaaatggttccaactaagccacttggtgtggatttggcaactgcaattgaaatggaacctcagcttaaagatattgttaccaacccttccaacccagataatgatgatgccagcgaaatttgggaaatggcattaaagttagaaggtattaccagaaatacaggtaaacatgccggtggtgttgttattgcacccggtaaaattaccgacttctctgctgtgctttgtgacgcagacggtactaaccgcgtagcacagtatgataaagatgatgtagaagctgcaggtctcgtaaaattcgacttcttgggcttacgtaacttaaccgttattgaagatgctattcaaaatattaataaaaaccgcgatagcaatgaccctttaaacatttcacacgtccctcttgacgaccctaaagcttattctgtctttgctgatgcaaatacaaccgcggtattccagtttgaatccgtcggtatgaaacgaatgcttaaagaagcgcgtccaagtaaattcgaagaaattattgcgttcgtatctttatatcgtccgggtccgatggatctgatcccagactttattcaccgtatgcatggtggagaatttgagtatcttcatccattgctagaaggtgtattagaaccaacctacgggattatggtttaccaagaacaggtaatgcaaactgcacagatttgtgcaggttacacactcggtggcgctgacttgctccgccgtgcgatgggtaaaaagaaacctgaagaaatggtgaaacagcgccaaatcttccttgagggtgctggacaaaaaggtattgatgaaagcacagctaaccatatcttcgactatatggaaaagttcgcaggctatggttttaacaaatcgcacgccgcagcctatgcacttgttgcataccatacagcatggttaaaagcccactatcctgccgaatttatggcagcagtaatgtcatcggaaatgcagaacactgacagtgtcgtatttttgattgatgactgccgaaataacggactcgaggtcttaccgccatcagtcaatatgtcgacttatcatttccatgcgagtgatgataaaaccattgtttatggtttaggggcaattaaaggtgttggtgaacaggcaatgcagtctgttattgactcacgtcgccaacaagggccttatactgacctatttgatttctgccatcgtattgatttgaaaaaaatcaataaacgaaccttagaagcacttatccgtgctggtgcgcttgattgtttaggtattgaacgttcaagtctaatggctcaattgccagaagctgtacaagctgccgaacaagcacgtagtaaccgtgaaagcggtattatggacttatttggtgaagttgaagaagttcaacgtaaaccagctaaacctgttaagccatggagtgatgaagttcgtctcaaaggcgaaaaagatacacttggactatatttaacaggtcacccaattgatgtttatcgtcaagaactcaaagcgtttattcctgcaaaacttaatgaaattaccgcaactcgtcgcggtgtaacgactgtttatgcaggacttgtccttgatgtagcgaatttcccaaaccgtgttgttattgtgcttgacgacggaacagcacgtattgaagtcagttgtaaccacgaacgtttccaacgctttaaagatattattcaagttgagcgcgtagtcgtctttgaaggcgagatctatgagcgtgaaggttttgatcgtccaatgggacgcttgaacaaagcgtttagcttaaatgaaatcagacaaaaacgcgccaatagtattcaaatcaaattaacccatgatctattgcaaccaagtttggcaaaagatctacaaaatatattattgccttattgtaatgtcgatatgcatcagcatattgcaatacagttacagattgaccaaccatatgctcaggctgagcttcagcttggcccacaatggaaagtcgctcctttagatgaacttcttgccaaactaagagattactttggtaaggataatattcatattgaatatcaggtaaaatctaaggcagctaaagcagcagaacctgttcgtccacaacctgttgcctcacctcctgtggacatgactattgatgatgcattggattcataccaaagcgaagtttctcaatattcgtaa

SEQ ID NO: 50993 - DNA, 630 bp, Acinetobacter baumannii
gtgaataagggatatcccataactgatctggtcattctggcgggtggacaagcccgccgtatgaatggtttaaataagctgttgcagcaattcgatggcgatacgcaacttcttaagattcaccaaaagctaaaatcttcagtatctgaaatttgggtaaatagtcatcgagactattcaatctatcaaagtattgtgcctgatattaaatgttttcaagatgatgcttccggttttttcggcccgcttatggggatgaaaagtgcatggtctcatgtacgagcagattatgttttgtttattccttgtgatgtgacctacatacctacgcaagtcgttgcgaaattacacagcgcacttcgcaaaaataaacaggctcaggctgcttacgtttcaattaacggagatgctttatacccattttgtttgttaaaacgtgaaagtctagaagttttagagcagcaaattgataagcaacaattgagtttaaaaaattgctttaaacttttacatgcacaagtagccatttttcaaaagcagaacttatttttccatagcattaattctttagatgaacttcaacaatacaaacaaattaaagcatttaaagagattttttcgacaaattag

SEQ ID NO: 50994 - DNA, 306 bp, Acinetobacter baumannii; identical to SEQ ID NO: 49717

SEQ ID NO: 50995 - DNA, 807 bp, Acinetobacter baumannii; identical to SEQ ID NO: 45907

SEQ ID NO: 50996 - DNA, 126 bp, Acinetobacter baumannii
atgaaatattgggtttacttttatatcgagcatacaattaaatatggtgaacctttctataaagaatctgggtggtctttgggttttaagaataattatattgttgtaagtttgatgcatagctga

SEQ ID NO: 50997 - DNA, 2196 bp, Acinetobacter baumannii
atgcaagaatatcaagaaaaaagatctggattaggtctgctgggttatatctggaatgaatggatctcaacattcattatcctcattttactattgatgacgctcataattggtaccggggaaatgatccacggtcaattattacgtatcggggaacgtctttatggtgaccctgctacaggcatgcaatattcattcttgcgtgctgagcctgaaaagccgacttgtgatcgacatccgaatattgatgctcaagtaaaagagcagatgaaagcaaatgcatctgatgattttgcgagcttctttggtgctgcatcggaaagtgatgtccgtgcatccttactggcagcacagcagcaatgtgaagaaaaatatcaggcttatgacaaaactattaaatatatcgaagcaaacccgggagtacgtacttatcgtgcgatcgaaacaggtttctttggtatttttaaattcggtacagagaaccgtgccattttactggtctttatggtactgatttcagcgattactgcatcattgaaataccaccatattggcttgcgtaatccagcaacaaaaatagattacaaagtgtattctctatttatgttgattggtaatgcgctactgagcttctcggtcattagccagtatcgttcagtcattaattcaggggtaacacctacttatgaaacagtaacgatttactggatatggatgattctgtttgttgttctgaccttaattagtctgtatcaactatttgtttcacctccaccaaaacgtgaaggcggtaatataggtttagccttactttctgtacctttatatgcttatatggcactaattacaggtattgtattcacgttctttatggattatccaatggggcaagggatttaccttggtttattggttgagttctcgggtatcttcttaaatcttgccttatttatttgggcgggtatgttactcacgcaaacccgtgttatggacttgttcttaaatgtacttcgtccatggaacttggcgccagaaaccttaacttggttaattctgattgctgctgctgtaccgactgcttataccggtgcttcggggattttcgttatcgcggctggtgcgattatttataaggaagtttggaacgcaggcgctcgccgtcaatatgcattagctgtatctgcaatgtctggctccctaggggtggttgtacgtccatgtctcttggtcgttctaattgcgatgttggatagtcgtcatgttacatctgatgaattattcggacatggtatttatgtcttctggctaacagcatttattttcttgggtgtatcccttttattggcagaagaaaagttccgtgtgaactcgccaaaagtggcactaccaggtatggcacgagctttcgtaccagttattccatatatcttaattactgtagttgtccttgcattttataaatatgcattagatacaggaatgaatgaatttactgcaccagtgattctgccactcgtgcttattgcgatgattctgtacgataaaatggttatgcctaaagaggcaccagctttaaatattcatgaggcgattgttcgtgagcatgaaaagaaatcaccgttcttacagactcatgatccgcatagttcacagttccgtcttggttttagtggtgctttacgttttgcgacatcagaaacagtggggcatatcggtgccttaattattttgatggcattgtctgcaagtgtaggtggtttaattgaacgctctgaagtggtcgaattattaccaactcatttaggtagtatctatatatcactggcatgtattgcactgttacttgcaattattggtatgtgtacagatccatttggtgccgtaattttagtggcagcaactattgctcctgtagcttacgaaaatggtattcatccaattcacttctggatgattgtattggtcgcattcgaatttggttatgtaacgccgccagttgccttgaaccatctattaacgcggttatccgttggtgatgatgaggtgaatgctgccgatgcagaagccaaagagaagtacacaagtttctactaccgatatgaacgctggttattaccaattattgtcttgttctcatcattggtattggtaacttatgcaccactaatactgaaattatttggttggtataagtaa

SEQ ID NO: 50998 - DNA, 2079 bp, Acinetobacter baumannii
ttgaccgcacctttaaaacgccaaccagatggttcatttaaagaaattagttgggatgtagcgatacaagaaattgccgatcaattggttcagattagagataaatttggcggtactgcttttgcttcggttgggggcggtggacagggtaaccacctcggtgcagcttatggccgacaacttttattggctatgaaaagttattatgcatataactcacttgcccaagaaaaaacaggtgatttctggctcaatggacgtttattcggtagtcaggcttgccatactacagaagatgttgaacatgcagattacgtactttttattggaacgaacccgtttcaggcacatggtattcccaacgcacgagacacgctaaaacatattaagaaagatccgaaccgaaccatggtggtgttcgacccgcgtgttaccgaaacggcaaaacaagcagacattcacgtgcagctaaaaccgggaactgatgcttttttaatgtcggccatgattgcgatcattattaaagaaaagctttatgatgcagcgtttattgagcagcatacacatgggtttgaagaagtaaaagctgcatttaaccatgtcccgattgaagactatattgctaaagctgatgtacctgtcgatttgatttatcacgttgttcgagatttttcaaaggcaaaaagaggctgtgtacgtatcgatttaggtattcaacatactttgaatacaacattaaatggttatttagaaaagcttttatacttgctgacagggaactttggaaaacagggtaccaataatttgcataccatgtttattccaattttgaccgatacggatgaaagaaaaccaaaatatcgacgtagcgtttatcataaaatgttcccgatttccgggtttttcccgcctaatattttacccgatgaaatcctaaaagcaggggaaaagcgaattcgtgctgtgtttgtagatagttgtaatccactattaacctatcctgatacaccagcttttgaggaagcatttaaagccttagatttgttggtggtagttgatgttgcgatgacagaaaccgcgagactcgccgactatattttgcctgctcatactcagtttgaaaaatgggaatttactggttttaacttggaatttcctaagaatggttttcacctgcgtcatcccgtattggctgctcaagcaaacactttaccggaagccgaaatttatactcgattactggaagctatgaatgctattccgaagagtttcccagttttagaaaaaatagctgcggtcgactcgaaaaaaactgcctacttaccctacttgtcggcgttaggaattaccttggcacgacataaaaaatatatcccttttgctgcctctattatttatcgaactcttggcaaacgacttggcaattcagcagattcagttgcttttttattgccgctatctattcaatatgctgttttacataccaaagcagtacgccgtgcaggttataaaggtaatccattaacacaaggtgtcaaactatttgagcagatattaaagcaacgttcaggtatggttttatcgcaacatgaatatgacgaagtctggaaactggtagcttataaagataagaaaatacgtcttgcaattcccgagatgttaagtgaactcgcaagcttgaaaagccataacgttaatgttgaagagtttcctttcatccttttgtcaggtgaacgccgtagttacaatgccaaccaaatttaccgtgtccctgcttggcgaaaagtagatgcagagggtgcattgcgtattcatcccgaagacgcaagacacttaaatgtagatgcaggagggcagcttaaatgtatctcagcgcatggagaaattcaggtagctattgagttggatgatgggatgagaagaggtgtcgtatcacttccacatggctatggtatgcgatttcaaaatggagaaccgattgggccacaattaaacttacttatttctgctgaacattgtgatccattgtcgaaaacgccataccataaatatgtacccatccgtttagaaaagtgttag

SEQ ID NO: 50999 - DNA, 960 bp, Acinetobacter baumannii
atgaactatcaattactcaaaacatttagccgccaacccattcaatttgggcgttttcttgctcgtctgttagcaggacttgtaaatactctaaaaattactagaacatcaaaaagtattgagcttaacttaagaattgcgcttccgtatttaacacctcagcagcgtatagcgattacagaaaaagctgtaagaaacgaattaacttcatattttgagtttttaagtatttggggctcatcaaatagtaaaaatatctcacgcattcaccgtattgaaggtgaacatttttttcatgaagcattggctgcaaaaaaaggtgtagttcttattgttccacattttggtacgtgggaagtcatgaatgcatggtgtgctcaattcacatcaatgaccattttatataaacccgttaaaaatgctgatgcagaccgttttgtgcgagaagcccgtagccgtgaacaagcgaatctcgtccctaccgatgaaagcggtgtaagacaaatttttaaagcattaaagcaaggtgaaacgacagtaattttgccggatcatacccctaatgtgggtggagatatggtgaactattttggcgttccacttgcttcaagtaatttaagtgcaaaactcatccagaaaactaaagcaaaagctctgtttctttatgcaatccgtaatgaaaacgatggctttaccatgcatatcgagccaatggatgagaaaatctatgaaggcactgcggacgatggaacgtatgtcatccatcaagcgattgagcaactcatttatcaatatccagaacactatcactggagctataaacgttttaaagcgaaccctgctttagacaatatctataatatcgatccgacagaagcacttaaaattgtagataggctcaaagcagaagctttaaaaacctctactcaaccagagcctatccaaacgtcggtcatgtaa

SEQ ID NO: 51000 - DNA, 600 bp, Acinetobacter baumannii
atggcttttacaattgcatcacccgttacttttgaagaagaaattaaaaaaagtagatttcaggcgattgctgcgccagtagaaaatgaacagcaagtgaaagagtttttagaattaaataaagatatctcgaccacacatcaatgttgggcatggaaaattgggcataacgttcgctttaatgatgatggggaaccatctggtacagcgggacgtccaattctggcaactattgaaggaaatgacctgactaatattattgtcatggtgaatcgctggtatggcggtataaaactgggaactggtgggcttgttcgggcatatggtggttgtgccggacaatcattattgttagctgaacgtattgaactgattgccaagaaaacgattcatttttcttgtcattttaatgaatgggccatctttcagtatgagctgacacagcagcaaattgaatatcaggaaagttatactgcaacaggtgtcgatatcgaagcgagattacaggttcaccaaattgaaccactcgctctaaaactacgagatgtgactcgtggtcgcgaagaattaaaagttgaggaggaattgactgatgactga

SEQ ID NO: 51001 - DNA, 1191 bp, Acinetobacter baumannii; identical to SEQ ID NO: 49895

SEQ ID NO: 51002 - DNA, 1326 bp, Acinetobacter baumannii
atgagttctgatatccaaaatatttctattgagcagagtgttcttgttgcactcatgacaacaagcaactcacttgaagtagttgcaaacgatttgactgaggaacatttcttcgctggacgacacaaaatcatttatcgcgccattgttgagttatcaaatgctgatatgccgtatgacgcagtattcgttggcaagcatctacaagaaagaaatctgcttaacgatatcggcggtgaagaatatttaattcaacttaatagcgctattggtagtgtccatcaccttgaatactttgtcgcagaattaactaagttaaaaaaccatcgtgaagttgaaggtattggtttagctattgctggacgcgctaaagacttaacagtaagtgacatttaccttgaagctgagaacctattcagcacttcaagcagcaccttagaggctaagcagactagtttcgatttcaatcaagcactagaaaaaactcttgaaagattcgaaaagaaaattgctcaaaaagaagataaggggttcattggtgttcagttcaatattccacatttagataatcttcttgggactatcgagaaaggacatttttgcgttattggtggtcgtccgggtagtggcaagtcaacactcgcgcagatgtgtgcaatgcaaactgctaagcgctacaacatgcctgttttatttatctctgctgagatggacacaccaaccctaaccaaccgcatgatctcagcattagggcatatcccatataacaatctgcacaatggggaaatttatgacgggatgtttgaaaagcttactggcacgatagctcagttccgcaaccttccaatttttattgaagagaagcagaagccaaccatttctgaaatccaaagctatgcgcgtaaagcaaaacgcaaatataaggctctaggctgcatcattgtggactacttgggtttaatccgtgacccatctaaaaaagatcgtgttcaagaagttgcatcaattagccgtgatttaaaagctatggctaaagagttcgattgtccagtaattgcattagctcaacttaaccgagctgcagaaggacacaagcctgttgcaagtgacctcaaagactcaggtcaaatcgagcaagatgctgaccagatcattatggttcatccaattctcgaaaaagagacaaatgcacctacaggtgtaactgaattaatcattgctaaaaaccgtcacgggaagcgcggatctgtaaaggttcaggatcgcttagatatttgtcgtttcgtaggcatgtcatttccagtggaagagagaggtgcagcgtga

SEQ ID NO: 51003 - DNA, 177 bp, Acinetobacter baumannii
atgatcgaatttgcagattacacctcaatgatgaagctgcgtagagcgtacaacctcggtactcgtaatgaagaaacaagagcagcagcgaacctctatgagaaattaagaaagctgaaaatgctagaccagcttaagcaggaagccatgactaaacgttacaaggaggcggtatga

SEQ ID NO: 51004 - DNA, 372 bp, Acinetobacter baumannii
atggataagttcgaagaagatctgagagaaatattagctcagtcgaaacacaaaagttcaggtgctgaaagatttgtccaggctagtttggctgaaaataaataccctaaagactttctaatatatttcataaacagcgagtgtttcggtgactatgagtcagagcttccagcttatgaagcatggcagcaccagcaagcgaaagtggaggagctgcaaaccctgtacacccagcaaggcataaacatgtttaagctgcaaaagcgggtggatgcagtaattatcgaaattgaaaatatgtatttatcaggtgccattggttttgacacggttaagaagttagagcaagcgctcaagggggaaggacagtga

SEQ ID NO: 51005 - DNA, 303 bp, Acinetobacter baumannii
gtgaactttgataatgaaatgattaaaggtatttctcaaagtgagtttgaaaaagcttttgcaaagcagatgatgaaagatcgagtttctgatcagatgcaaaaagatatggaagctcttcaaaaacttaacagtggcaattatgtgattgtgccaaaagagccaactcaaagaatgctaaacgctggtcatgtcgcaatgaatcctatcaaagggtcagacgtccattcagggactaatcagaagcgtcgtgagtgctacaaggcaatgttaagggcttatcaggagtacggtgaccaatga

SEQ ID NO: 51006 - DNA, 453 bp, Acinetobacter baumannii
atgaccacattcaaagaggctcaaatcatcattggcattgatcctgacttggaaaagtcgggagttgccattctagggaatgatcttcaactcaaaaatctgacttttcctgaaactgttgagctattcagaaatgagcaagacagcatcaaaaaggttgtgatcgaagcaggctgggaaaataagaaggctaacttccgagtaggtggtggtcactcaagacaagtgaatgagcagattgctagacgtgttgggatgaaccatgcgactggcatcttgttggcagaaatagctcaggctttaggcttagcggttttattagtgaagcctactaaatcaaagctcaatgcagagcagtttaacaagattacaggttggcaagggcgtacgaatcaagagcagcgtgacgcaggcatgttgatttggggaatgaacggaaagaaggtgacgtga

SEQ ID NO: 51007 - DNA, 294 bp, Acinetobacter baumannii
atggtcttttacgaagttgggacatacgaacaacacgaagaaggttttcatgctttctttcgcactcgatatgaagataaagctgaacaagtcaaagcatgggcagaggagtaccaagctaagacacctgaatggcctacaggtgagactgatgaaaagcagattcaatatatggatctggtgcgcaagcttgatgatgaatttgcggaactgatcggcaagaagttcccaatatcaaactattcaaaagaaatgtactcaatacttataaacaaagcagaattagacgattaa

SEQ ID NO: 51008 - DNA, 270 bp, Acinetobacter baumannii
atgaaatcaaaggtagatgtagatgcattaaagctcacactccaatggcaaggattctttctaaagggttggttcgaagatcagtggtgtgacctcaaagactatgcagaagcttctttaaagctgcttctaatcatcctgagaattttattttctcccattctcattatttatgtcatttggcagaccagagaaatgtatgaacagatagcgagcggagaagccaacagagaaaaagtcagaaatcacatcaagaaatacggcaagtaa

SEQ ID NO: 51009 - DNA, 462 bp, Acinetobacter baumannii
atgaatgcggcagtgaatacacaattgaaaagaaaacatttctcagtggcaatcaactggcatgagaagccaattgaatggcatttagagcaatatgggtcatggttattgttggatgatcattattttagtcttggtgaatcaagtgtactaggtcatttgattgatactgctaatggtgttgtagttgatcgtcgtcaacgtgttgccccactatgtaaaatcaatgatgagcatgccgatgcagtggcagatatgcttactcacttaatgcagaatgaaacaactaaaacaaagcaatggatgagaattgtcataatgttttatgttgaattcaagtcagaggagacaattgctaagaagcttggagtgtctgaattctcagtagctcgcgacaaaatgttaggcatggttcgcttggctactaaatatcaattcaaaagtcgcataataggagcttga

SEQ ID NO: 51010 - DNA, 246 bp, Acinetobacter baumannii
atgaatcgaaaacaaaagaaagcaaaacgattggttgccaaggcacatacaaaaaagcaagctcagatctatatgactcctaaagagaagcaagacatttatgagtggaacactgctcacaatgaactgcatgaagaattcatggaaggttttgaagagcttcagttcattaagggttttaaggtcggcatttggcttgcattctgtgctgcaataatttggatattctggcatttcttggggtga

SEQ ID NO: 51011 - DNA, 276 bp, Acinetobacter baumannii
atgcgttcgacaaagaggctaaacgaaataagagcgctaccctgcgttagatgcggctatcctcactcacaggctgctcattctaatttcagtgaacatggtaaaggcaaggggattaaagcagatgataaatacactattccattgtgccataactgccatcaatggtttgaccagtatcgagggatgggacttgtagaatcaaaagaatggttcgacaagatgttagaaaaaacagagcggatgcttaatcttaaagatgataaggtgttttga

SEQ ID NO: 51012 - DNA, 204 bp, Acinetobacter baumannii
atgtttgttcagcataaatccgaatacattaatttaaatcatgtggtaaaagtgaaaaaggctacatcagaaaacaataaatttgctcatagagatttttataagttagttttaactttaacctccaatgacatcctagatctagagtttaattctgaggaagagctagatcggttcttggaaaagttggaaattgtgaagtag

SEQ ID NO: 51013 - DNA, 642 bp, Acinetobacter baumannii
atgaaaaacgaagttggctttcatgttcctgttcgtccaatgcctccagaatggctttttgaaatggatacaccaaactttgcaccagctccagaaatatgggaatggattaaacaagtatttctagatccaaaatcgaaattatttaatcctgatcacatgcacttacgttcatttcgatatcccgatattgctgtgatgtgggctagatctggctttaaaaagcagggacgtcaggttattggtactactgaaaaagtcatgatcaatgctggtggttggaagaaagaacgacaagaagaacaattcatccagtggtttgaatatgtccctgaatatctcattacttttgatgcttcatattctcgtatagctagtgatgtgaacttttgtgctttggttgaacatgagctttatcacattggagtgatgagagacgaggacggcgaaatcatttatagcgatagtacggggctgcctaagcattacttagctggtcatgatgtagaagaatttgttggcgtggttaaacggtggggaccaagtaagaatgttaagcgacttattgaagtcgcaaaaaatccgccgtttgtttcgaatcttgatatttcaaaatgctgcggaaactgcgtaatcaactga

SEQ ID NO: 51014 - DNA, 264 bp, Acinetobacter baumannii
atgaataatttcagagaagttattgataaagcggtagaagaaagccgtttgcaaattgcgcattctgctggtcaccttgcggttgctcatgagtcattcgcaaatgactaccttcttaatgtagcaaaccatgccctttatatgcttggtacaaccattagttcagaagattttgaaaaggaactcgaaggcttaaaggcacacttaattgaatctctaaagggcttcaatggtggcaatgacaaggagccctctcatggataa

SEQ ID NO: 51015 - DNA, 621 bp, Acinetobacter baumannii
atggataactacaaaatcaaagttaatgatgaagctgagagcaaagaggctcaggagttgttttttgagttgggttacagctggctttgttgtggaaaatactataaccggattggcaactatacgtttattacggcctacccagatgaaatgttattaagaatgggctggggtggagatgctgataaagaaataactctacctcaactacgcgaccttgttgtgttgaagcgtaatgatgtgaatgatgcgacgcatactggtactggtgacagtaagtattacgtagacagtaatggtgactcatatattcacaacagcattatttggactgagtggaaattagatatttcaatacttaagccaatcacccaaacgcaagacccagccttgattagcggtgcggatgcgttgcgagctttggcggatgggaagagtgttgagtacctttattgtgatgaagagtggatagacgctagcgaattacaagcaaagcatttcaatagtgattgtttcaccttccgtattaaaaagcgcctgattcaaatagatgggaatgagtacaccaaagaaggtgcttatgcctacctagataagttctacggaggctcaacccaatga

SEQ ID NO: 51016 - DNA, 231 bp, Acinetobacter baumannii
atgggaactaaatacgattggtcgaacgtccctaaagaggttaattggattgcgactgatgttattggctatgccttcggctggaccaatcaaccccacttccatagttcaggccaaaaacgatggaatgatgaagactgttatttgcacttccatatttttccagaacttaacccgtacaaaggcgattggaaggactcacttgaacaacgcccagcagaaaagaattag

SEQ ID NO: 51017 - DNA, 852 bp, Acinetobacter baumannii
atgaatgcgccagttttggtacataacatgtcgaatgcagcgtatcacgctcattcggctgttagtagttcacagcttaaaaccattctgcgttctcctgcacacttctttgctgagcacatgagtggtaaggaacacaagcagactcctgcaatggcacttggtactgcggttcatgttctatttcttgaaccagaagtttttaacgatgaagttgcaatcgaaccaatcgttaataagcgaacaaatgcaggtaaagaagcaatagcaaagttcttacaggacaatgcaaacaaggcaatcattaccgaagaacaatatcaagcagccgcgaaagctgcggaagcaatgaaacgccaccctatgtacaacatgattttatcgggtggtattcgtgaagcttcgatcttttttgatgatgaagaaacaggtcttgaatgtcgtattcgccctgattggcatgtagcacctgaaacaagtgaatatttccctaacgggttaattgtagacatcaaaaagacaacggatgcgcgtgcaaatgcattttcaagaagttgtcaaaactacgattactcactttcagcagctatgtatatcaatggatacaaggcttattacggtgaaaattacaacccttctttcctattttttgcagtagaagaagacgatccgcatgagtcaatcatctattacgcgtcagatgaaatgctgtttattggtgagcaaaaacgccgatctgcaatgctaactctactgcaatgcaaagagtcaaatgagtggcaaggctacacaaaacagattcaaccaattgatttgcctttatgggctaagaaagaatttctaggagaataa

SEQ ID NO: 51018 - DNA, 897 bp, Acinetobacter baumannii
atgaatatgcttgcaacattaaatcaaggcattgttcctcaagctgaaacagcagcaaatgtacttgcagcacaagcaaaggctcaagttgaagcacgttatatgatggctatgcatcgtcctagaaattgggatgctgtgcgtcaagaccttttaaaagaatgtcgtcgcccgtcatttgctgacaacacatctacctactacaaaaagcccgtaggtggtcgatctgtaacaggtttaggaatacgttttgttgaggtcgcaattcgctgtatgacaaatattcttgttgaaacaacaatgatatttgaagatgaacataaggagattcatcgcgtctcagtaactgatcttgagtcaaatacaacatacccacaagacataaaaatcaataaaacagtggaacgcaaggcaattgcgggtcgtgatgttgttagtgagcgcctcaatagtgagggtcaaaaagtatatgaggttgttgccactgaagatgaaatgcttaataagcgaaatgcggcaatttcaaaagctattcgtaatgctggacttcgtatcattccaggtgatctacaggatgaagcagagcatttaattctgcaaacccgtcaaagtggcatcaaagaagatccagagaagtaccgcaaacaaattgtagattcattcaacaccattggtgttaaagctcaaaaccttgttgattatatcggctgccctcttgatcagtgctcacctgcccaaattgacgaattgcgcgctgtctttggtgcaatcaaaaacggtgaaactacatggcaaacagttattgctgagaaaaacgagcaagagttatcagaaggcaaaaaagctccttcaaatgacatcaatgcagtaaatcaagcaattcagcaacaagggtaa

SEQ ID NO: 51019 - DNA, 351 bp, Acinetobacter baumannii
atgacagatttgaataagttaagaagcgagtttgaggctgtaaccgagacatatcactgcatttataacgcagacttagactactactttagtggttcaaaatttgtttcagataaagctgaaattgaagtaaatgcaggttggaaggcatggaagaaagccaaagctcaggcggtgccagagggctacgttttaatgccattagaacctactcaagaaatgcttggcgctgcaaaccttgcaccaatgcctatggtccatattgacagcatatctggtagagaaaagcttcgtatatctactcaatacaaagcaatggttaatgtttgcaaatcgggagctgagggatga

SEQ ID NO: 51020 - DNA, 216 bp, Acinetobacter baumannii
atgagtgaattagaaatacttgaatcagcacccaaagatgctacccattattttcttgtgcctaatggatctggtgaaccttattacgttcttgaaaaagaaaaaaagttctactggtttcacggtcaggatgaaataactaagccacacattttgagttggattaagtcaattgaatcactgaaagaagttaaagcggaaagtaaggagggctaa

SEQ ID NO: 51021 - DNA, 777 bp, Acinetobacter baumannii
  misc_feature (756)..(765): n is a, c, g, or t
atgaagcaaaagaaattgctcaagtatattgtggttgctattttactaggagtattgacgggttggatctgtcatcacttctttaatgaaggcgagcaactgaagcaaatcgcttcttatttcaacatcgtcacagatatctttttacgtctcatcaaaatgattattgccccattggtatttgctacaattgtgtgcggcattgtttcaatgggcaaatcaacttcaattggtagcatcacactcaagtcaatgacttggtttattaccgcttcgtttgtctcacttgccatcggtatgggtttagcaaactttttccaacctggcgcggcgctagacctagcattaccaacagctcaacaacttagtagttcttctctcccaacaactactggttttaccttgcaatcattcttgagtcacgtgttcccacgcagcattgcagaagcaatggcgaacaatgatattttacaagtccttgttttctctattttctttggttcagctcttgcttttgtaaatcagggcaaagaaaaagactcagttatcattcgcttaactgatgaactcagtaaaatcatgtttcgcattactgactacgtaatgatgttcgcaccttttgcagtatttgctgcaatcgcttcagcaattacagtacaaggcttaggcttaattgttgattatggcattttaatcgcagaattctacttcggtctgctattactttgggtcattttgttctctgttggcgcaatnnnnnnnnnnaatcgtacttaa

SEQ ID NO: 51022 - DNA, 576 bp, Acinetobacter baumannii
  misc_feature (11)..(20): n is a, c, g, or t
ttggcgcaatnnnnnnnnnnaatcgtacttaaaaaagatatcttccgtttaggtaaattgatccgtgaacctgtaacacttgcttttgctacagcttcaagtgaatcagcctatcctaaagttatggatgctttaaataagttcggcgtgcctaaaaaagtgactagcttcgttttaccattaggttattcatttaaccttgatggttcgatgatgtacaccacatttgcggtactctttatcgctcaagcttacaatattgatctgagcttcactcaacaaatcttgattttgttaacgcttatggtgacaagtaaaggtattgcgggtgtttcaagagcttctattgtggttatctcggcaacactcacaatgttccatttgcctgaagccggtattctattattacttggtattgatcagttccttgatatgggccgtactgcaacaaacgtagtaggtaatagtattgcgactgcagttgttgccaaacttgaaggcgataaagtggctgatactgaagaattaccagagcctgtattaattaaatcaactcaagaacaaacaatcgcttaa

SEQ ID NO: 51023 - DNA, 243 bp, Acinetobacter baumannii
atgcttacgctttcacaaaagctcccagattattttgaatatattgaaaatgatgttagctactcattacgtcaggttcagtatcctcaagatataccactattacaccgctggatgcatgagccacacgttattcctcagtggcaattaaataaaagcgaaatagaactcaaagtttattttgaaaaaatgctagctgatgatcatcaacgtttaatgattgggttatgccgaaatttatga

SEQ ID NO: 51024 - DNA, 357 bp, Acinetobacter baumannii
  misc_feature (272)..(281): n is a, c, g, or t
gtgaaattcttcctatctctttttacgctgtttagtattttctgtactactcttaccaatgctgctctacttaatattgcttctgaaagtgttgaagccgctgcatggacaattgtagatacccaatctggtcaaattattgctgagcataatagtcatgtacaacgtgcgccagcatctttaaccaaaatgatggtggcctacattgcattaaaagagattaaggctggaaagttaaaactgaacgaagtcattactgcaacaccagtcgnnnnnnnnnngtgcagtgggatgaatcacaaatgtacctcaaagcgggcgagcaaatttcagttgatcagctcttggctggtttaa

SEQ ID NO: 51025 - DNA, 789 bp, Acinetobacter baumannii; identical to SEQ ID NO: 45807

SEQ ID NO: 51026 - DNA, 2025 bp, Acinetobacter baumannii
atgtctggccttcaggaagaatatttacagcatcaaacaaaaattgagcagcttcgcctctcaattcaatatatccgctggtatcttgttagcctaattttactgtgcctaatttcagctattattttcttttgttactttacttcttacattacaaactttatttggtcaattggctttactattttaacgcttacctgtctattatttgtcccaaagctattaacacattatcgtgatattcatttcattaagaaaaccgatttaatgctacaaggcatttgtttgacgtctggaattttaatgggaattaatatcattgttctgcatttttcccttcctgacactttaatatctgtttctgatgttcatatcctcatagcattatttattacctcagcccacattattggtcttacatttttaactcaacaacctcgatatttttatttactctttattccaagtacagtcccactcattattggacagtttactcattctcaaatcacccaactccccttttactttgcttataatttagctttcgtcgcaactttgctttgtgcttatgcaactcagcgtaactatcaaaaaatttctcaactattatttaaaaataaacaacttgttcaagtagcagaacagcatactcaatgggctgaagagttatgtgtacagctccaacaagaagtaaataaatctaaagatattgaagcacagcttcaatttaataatcatttgctcgaacaaaaggttcgggaaaggacatatgacctcactaaaatgaatgagaggcttgaaagccatcatcataatttagcatttgcacatgaaacagcaggtatccgaccgtgggattgggatattgagaaacaaaaattagaaataacgttttttgatcaacaaaaacaaactcaaaatactcctttacacctcaagtcaattttagagcgcattcatcccaatgaccgaaagttatttgatgaacgtttaaaagaacacttggaaggaaaatctgatcacttcaatattaccttccgcattttacgtcgtaatggttcttggcgttggattcatgacgtaggacgtgtcattagccgtgatcctaaaaccaataaagctttacgtatggtcggaatgaccagagatattcatcaggaaaaaaaagatcaagaacatttgagactttctgcgattgtgcttgagcaggcagctgaaggaatttttattctagatgaaaaactcaactatattgaagttaacccctattatgagaaattaactggcttttcaaaatctgaattattaagtcagcagctatttaatatcacaataaatcagaagctacagcaacaacaatttcacgactccattactcaacaacttctaaaaactggcgaatatatgggccaatttgatgaaaagtttacatcgggtaaaagtgtctatttatggcttcatattaatgcagttaaagatgagtacaaccagattattaattatattggttttgcacgtgatttaaccgaccaaaagcgacaagagcagcatttatcttatttaaaaaactatgatagtttgactcacctccctaaccgcttttactattataatcaattacatcaatatcttgttaatccatcttatagttttaaaaatctggctttaatacgtattaatatcgatagatttagagcatttaatgagtttctaaataatgatagtggggatgagttacttaaacaatttgcacagcgactacgactgaccaatatcaatgcaattttagtggcttacttaaacggcgatgattttgcaattatttatgaaatatcacctattcatcccaacattgagcaatattgccaaaatatattacaagctttaaatgcgcctttttatattgatgaacaagaatatttcattacagcttctattggggttgcttgtctgagcatggccggcaaattgatcacctcaacaatcatgccgaacaagcgttgtcggaagcaaaacgtttag

SEQ ID NO: 51027 - DNA, 843 bp, Acinetobacter baumannii
ttgtcggaagcaaaacgtttaggtggcaatactatcagctattactgtaataaaactacaaacccatataaaacagcagacttagaacaagagttgcgtaaagccattcaaaatgatgaatttgtggtgtattaccaaccaaaaattaatttaaatgacaaatcgattaaaggttttgaagcactcattcgctggcagcatcctgaaaaagggttagttatgccgaatatgttcattccttttgctgaacgtagtagccttatttccgatattggtaaagtcgttttagataaagttggcaaacagctacaagaatggaaaaaagcaggctacgccgatgtccgagtttctgtaaatattgttgctcaacaaattcatcgaggtcttttactcagtgatttagacgaagttttagacacatatcatcttgatggttcaaatttagaactagaaatcacggaatctgctttattagataatactgacaatgtaaaaaaattattgcactccattaaagaacgtaatatttcaattgcactagatgattttggcactggatattcatcgctagcttatttaacagaatacccaatcgatgttttaaaaattgaccgggcctttgtttcgaaaatcggtgatcaaaaacaagaagcaattgtgaatgcgatgattgcgatgggtaaaagcatgggattaaaactagttgctgaaggtgtggaaaccgaagaacaagttatttatctacaaaagcagcaatgtgattttttacaaggctttttctttagccgtccacttcatccaaatcagattcttcaatatctacaaacaaatacgcatatttga

SEQ ID NO: 51028 - DNA, 510 bp, Acinetobacter baumannii
  misc_feature (468)..(477): n is a, c, g, or t
gtgcaagcagcgccaactttgtacggcaaactaaacgtttccattaaccaagttgacaacaaaaatttcgatggtaaaagtgacgttaccgaagttaactcaaactcttctcgtattggggtaaaaggtgaagagaagttgactgataagctatctgctgtttatttagctgaatgggcaatttctactgatggttctggttcagatactgaccttagcgcccgtaaccgttttatcggtttaaaaactgaaggcgtcggtacgttaaaagtaggtaaatatgattcttacttcaaaacctctgctggtagtaaccaagacatctttaacgatgacacacgtttagatattacaaatattatgtacggtgaaaaccgcttagataacgtggttggttttgaattagaccctaaattattagctggtttaacattcaatatcatggctcaaactggtgaaagcacttcnnnnnnnnnncttcgattcagtttcgacttctctaggttatga

SEQ ID NO: 51029 - DNA, 339 bp, Acinetobacter baumannii
  misc_feature (316)..(325): n is a, c, g, or t
atgaaaagtaagttaggaattagtaagcaactttttattgccttaactattgtaaatttaagcgttacgctattttctgtagtactgggttatgtcatttataactatgcgattgaaaaaggctggattagtttaagctcatttcaacaagaagattggaccagttttcattttgtagactggatttggttagccactgttatcttttgcggctgtattatttcattagtgattggcatgcgcctcgcaaagcgttttattgtgccaattaacttcttagccgaagcagcaaaaaaaattagtcacggcgacctcnnnnnnnnnngacctctctgctag

SEQ ID NO: 51030 - DNA, 831 bp, Acinetobacter baumannii
atgattttatttggtaagaaagaccagccgagccgaaacgcatatgcggtcgtaaccggggcaggcagtgggattggacgaagctttgcagttgaactggcaaaacgtggtggcagcgtagtctgcgcagatattaatttagaagctgctgaagaaaccgtaaagttaattgaacagttgggacaaaaagcatttgctgtacagtgcgatgttgggcaagcagaacaagtacagactttggctgatcaggcagagcagttgcttgatcatccggtaaccctcatcattaataatgctggcgtaggtctaggtggcaaatttgatgaaatgagtttggaagactggaaatggtgtatgcatgtaaatctgtggggtgttattcatggttgtcatgcatttgtgccaaagttcaaaaaactaggttacggtgcaatcattaatgtggcttctgccgcgtcgtataccgcagcaccagaaatgagtgtctacaatgtaacgaaagcgggtgttttggcattatcagaaaccctttcagccgagcttcgcaaattcaatattaaagtcaatgtactttgcccgactttggtgccaaccaatatcattaaaaatggtcgtattccggggcgttattccaagcttgcagaccatgcactcatgaactatgccatgacgaccagcgatgcagttgcaactttaacattgaatcgattagatcgtgggcagctctacaccacgccacagatcgacgccaaattattctggcttatgaaaaggacatctccaacgctatatgcaaagttccttgggctttcgtatcagttatttaaataa

SEQ ID NO: 51031 - DNA, 2151 bp, Acinetobacter baumannii; identical to SEQ ID NO: 50783

SEQ ID NO: 51032 - DNA, 195 bp, Acinetobacter baumannii
atggtacaaagcgttaggcttaacgacaaagagcaagaagaattaagaaagaaagctgttgaattaaacaaggcattaattgctaaaggtcaacaacctattcgagacagtgagttggttcacattttaattgaaagtggattagatcttgtagaaattagtacagcggtaagttacacatacccaaataagtaa

SEQ ID NO: 51033 - DNA, 3309 bp, Acinetobacter baumannii; identical to SEQ ID NO: 45766

SEQ ID NO: 51034 - DNA, 321 bp, Acinetobacter baumannii
atgtgtataagagacagatataaattagataaaactaaaaatctaatacaaattataggaaataatttagcttcagctgctttttgggtatgccaagaactagaatttcaagacaattcagatgagtttaataacacttataggctctttcatgaaagtattgatatctcaaaaccatcaaacatttctcatcagactacagtaagaatgctaccagtggactcttttgatgatcattcacaagcaatacaaggtatccaagataaaatccataggaataagaatacaatttgcttaacttatgaaaaattccacgattaa

SEQ ID NO: 51035 - DNA, 357 bp, Acinetobacter baumannii
atggcacttttgcaaattgctgaaccgggtcaatccagtgccccacaccaacatcgcattgcgattggtattgacctaggaacaacacactcattagttgcgacagtgttatcaggcaaacctaaagtactcaatgatgttcaaaatagaagattacttccttctatcgttcattatggggacaatacaactcattatggtgaagaagctaaaccgtttatcattgcagatccaaaaaatacaattgtttctgttaaacgatttatgggccgttcaaaggcagatattaaatttcaacacccttatgagttagtaggctcatttaataaacgtaatacatttaaaccggcaagttga

SEQ ID NO: 51036 - DNA, 354 bp, Acinetobacter baumannii; identical to SEQ ID NO: 48622

SEQ ID NO: 51037 - DNA, 1179 bp, Acinetobacter baumannii
atggcaaatcttgtttttaaatttagttgggatcatcggccattcccatataacgcctcacagggcaagcggcagtttatgttgccatttgcgtcaggtattcccaatctggcacccaacttttctcaagtagttggtactgcagctatctctcaaggtggaacgggggcaactacagcggctggtgcacgagctaacctaggcgcagctgcaagtggggtaaatagtgatattagtgagcttaagggacttacaacccctttatcaatttctcagggaggattaggagctgataatgcacagacagctagaatgaatttggggttaggaactgctgctgtactagcgtcaacaacaagtcaatatgatcctacgccgggacgagcactaagagtcggtgattgggggataggggctgaaggttctcgtgtatctgatatggttgctcctcttaataatggtttttttcgaacagatgacactttaacaaatgatactggtaatagtattggtccttatggtctctttttacactgtacccgacgctcaatgggtttatatacaaatggaagtcattcatttcagcttgggaaagctgcctcacattctgccctgaagtatcgatttaataatagtggtacttggtctaattggtttaatttattgactgcacaaaatactacaactgatggaaatggttttattaaagccgcttcaccagtcgttaagcttttccaaagtcatattgagctaaataacgatgctgccaagcaaccgatcacttttgacaaattaggcactggtgactatctgattaagggctctttaggctttgcacaggaaggttggtatatcgaagtacctaaggatgccaacggtaatacggtagtagcagttgaatattcaaccttagaaaatggtgatctttctattaaaacttataaacgtaagtttgatgtggaaaaggcagccattgtagctgatctcgaaaatccacttgatattccagaaggccgctggattgatatccgtctgcatgaagaacctgaaccagagcctgaagagccgttgagtgaaacaccagtggatttccagccgactaacttatctcaggcagttgctgcagccatgaatggcgtggaaccgccagaaatctcagaaacagacgaaacactttaa

SEQ ID NO: 51038 - DNA, 918 bp, Acinetobacter baumannii; identical to SEQ ID NO: 46092

SEQ ID NO: 51039 - DNA, 948 bp, Acinetobacter baumannii; identical to SEQ ID NO: 49931

SEQ ID NO: 51040 - DNA, 990 bp, Acinetobacter baumannii; identical to SEQ ID NO: 46035

SEQ ID NO: 51041 - DNA, 2310 bp, Acinetobacter baumannii
atgaatgtaaacaataagattggggttaaagcacgtaatcacatacgttcaaaacaagtactttttaagatgacaccttgttgtcttgccatatcggctatttttgcacagcaggcttatgcagaaaccgtaactcaaacggctgaggtaagcgaaaatgcaacacaaaaaccagtaacccaattgcaaaagattgtagtaactgcgactcgtacaccaaaaaatattgcagagattgcaggtacagttcaatctattgatcagaaacaaattatccagcaagctacggcgggtcgtaaagttgccgacattcttgcacaacttgtaccatctcttgcatcaagtagtggaacaacaagtaattatggtcagacaatgcgtggacgaaacgtattagtcatgatcgatggcgtttcgcaaacaggttctcgcgatgtttcgcgtcaattaaatagtattagtcctggtatgattgaacgcattgaagtaatttcgggtgcgactagtatttatgggtcaggtgctactggcggtattattaatattattactaaaagagcagatacatctaaaccacttagctttgaaacaaaagtaggcattacatcttcagatacattccgtagtgacggcttagcttatgaagtcggacaatctgtctcatttaataaaggcaatatggatggtttcttaggagctaattttacaagtagagggtctcaatttgatggaaatggcgatagaatttccttaagcccttggcaaggtagtacgatggacactgatactatcgatgtaaatgggcgtttaaatttcaatttaaatgatactcagacattgagctttggtgcccagtactataaagataagcaggatactgactacggaccggattactcttatttaccgacaacctctaagagtaatgatgctacaacgccaacttataaggcaattaaaggtttaaagcttagtaatccattatttaccgagcgttatgctgttaattcacagtatcaaaatcaagactttttaggccaaatactaaatgttgaagcatattatagaaatgaaaaatcacgtttcttcccatatggcctatcaaataaatccgtgacttttgtaaaccagtctcaatcagaaattgaagtagctggattacgttcaactatgcaaaccgatcttaatatcgccaatcgggatatgaaaataacctatggccttgattatgattgggaaaaagataagcaatttgttgatattttagcaactcaatatccttatttagtgtatacgccaacaggccaacgtaaaggttatgggccaaatactgaaattcaaaatattggagcatttgttcaaagcgattatgcagttacggataaattgaacttgcaagcaggtattcgttaccaatatattcaagcggataccgatgcttatattcctagccgagagacaacaatggttccggcaggatcaacacatgatgataagccgttatttaatttaggtgcagtttataaacttacagatgcacagcaggtatatgctaatttctctcagggctttagtttccctgacgtacaacgtatgttgcgcgatgtttctacttataccgtttcaacagcaaatctacagccaattacagtaaatagttatgaactaggttggcgtttgaatcaggatgatggcctaaatctgggattgactggtttttacaatacttcggataaaactgtccaattcaacaatcgtgcagcaaaggttgtagatacagatcaaagagtatacggggcggaagcaactattagttatccatttatggaaaattataaggtcggtggcactttaggatatacccgtggtcagtataaagacgtggcgaataaatggcatgaattaaactcatttacggttgctccagtgaaaggaaccctttttgctgaatgggataataatgaagggtatggtgttcgtgttcagatgcaagctattaaaggaacaaataaagcttataaagatgaccgtgaattagcagcatttgcaacaactcaagatgaagctttccaaaacgctgtaaagaatgatgcgaatagtgctgcgcaaatcaaaggttataccactatggatgtattagcacatttcccggcttggaaaggtcgtgtagattttggtgtttataatgtgtggaaccgtcagtatcgaacagtatttgctcagcaagcagccgtctctaatgctaatccgttgttagcaatccctgcagaaggccgtacttatggtttaagttatacttttaactattaa

SEQ ID NO: 51042 - DNA, 1185 bp, Acinetobacter baumannii
atgaaaagtccattcattttagcaattgtagaaatagatacccatattctagacattatcattattgattcaacaaccaatctcccccttggccgtccttacctaagctgtgcgattgatgtacacacccgagctattgttggttattacatcagtatgcttcctcctagcgcaacaaccaccttagctttattaaagaatatgcttctacgaccatctcagaatttacctggaggtattccctccttaattgttccagataatggagtcgagtttaaaaatacggcactaagccatatctgcaatcatttgaaaatcacaatacagcctgcacaaaataggaacccagataataaaccacatattgaacgttttttcggtacgcttacatttggactaattcaacaattacaaggtacaacattttctaatcccgaagctcgcggcgactatgactcaagaaaacatgcaagtgttaccctagaaaatttgaaatcatatgttgatgaatggattcataatatatatcactgctcaatccactcaatgacgggacgagcaccaatgctattttgggaagatgcttctcaaagttgtccaccattaaccatatcaactgatgaagtagatattattgcccgtcgcccaatcagtagaaaaattcataaaggacaagtcaaatttgaatatttgacctacttttcgcatgcgttagcaacccttgaagcaaatggcttaactgacgttattgttatgattgatgagctcaatttagagcacgtatatatcaaacactcatcaattgatgaagtaatacgagcggactcaacagagcctgattacaccaagaatctctctctgcaagaacatcttgaaattcgcaaggaacttaaactggtatctcaagcagataagcaaagattaggaaaacatcgcgtatggtacgctcgatggaagttatacgaacgcattcaaaaagatgcttgttctaaaaacaagaagttaaagcagttaaaactagagcttcctcaaacacttaagaacctcttagaccaagatatccatacagtgtcccaaccaatagacccgtcagcttcaacatttatctcctcttctgaaatggatcttctaaatcaatcaaaccttgatgatgattttggaacattggagtttgatgatgaataa

SEQ ID NO: 51043 - DNA, 1365 bp, Acinetobacter baumannii
atgttggcttacgtcagcatttactttattaccgtaagtattgttcttggtgcaatctcacccacattacttattccacttatggtttggttagggttatttttattaagcgcatggttctttattccacgtttaagcaaagtatcacaacaacaagccgatgcacgcgctgtaatgactggtcgtgtaactgacgcctacactaatattcaaactgtaaagctctttgctcatgctgggcgtgaaagccaatatgcaaaagcgtcaatgaaagagtttatgaccacagtctatgcgcaaatgcgtctaggtactctttttgaagttagcattaatttactgtctgctgttttatttgttggggtaattggtaccgcagtttggttatggactcaaggtttagcagcgttaggcgtaattgctgctactactgccatgattttaaaacttaatagcatggctgagtttatgatgtggcatatgtcagcattatttgaaaatgttggtaccattcaagatggcatgcaaacacttggtaaaaaaatcaatattcaagacaagccagatgcaaaaccacttgcagtcacacaaggtgagatcgtatttaaagatgtgacctttgcttataacaataaaaatgtcatcgatcactttaatctacacattaaagcaggtgaaaagattggtatcgttggccgttcaggtgcaggtaaatctaccctcatccaattactgttacacttttatcatcttaaagaaggtgcaattttaattgatgggcagaatattgaagatgttacgcaagatagtttgagagcaaatattgctttagttactcaagacacttctctactacatcgctcagttgccgaaaatattaaatatggccgtccagatgcaactgatcaagatatgcaaagtgccgtgcataaggcaaaagcagctgaatttattcctcaacttgtcgacttaaaagggcgttcaggttatgaagcacaagttggtgaacgtggtgtcaaactgtcaggtggtcaaagacaacgtatcgctattgcgcgtgttttcttaaaagatgcaccaattttaatcttagatgaagcaactagcgctttagactcagaagttgaagcagctattcagtctagtttaaatgacctaatggtagataaaacagttattgcaattgctcaccgtttgtctaccattgctcaaatggaccgtttaattgttcttgatgaaggtaaaattgcagagcaaggtactcatgaagaattaattgctaaaaatggtatatacgcacaattatggaaacgtcaaacgggcggttttcttattgagcaaaaagtagtacagggtcaagattaa

SEQ ID NO: 51044 - DNA, 225 bp, Acinetobacter baumannii; identical to SEQ ID NO: 46246

SEQ ID NO: 51045 - DNA, 396 bp, Acinetobacter baumannii
atgtcatcagtcagcattgctgaataccgcaagttatttcccataaagaaaaataaaaagcgccgttcagcaaagcaagttgccagacaaccaagtgtgggtgaagtggttctggcaacgcatttaagagcatgcaagatcggttttgaacaggaatataagttccatccaaaacgcaaatggagagctgattttttaataacgggtacaaagattttgattgaggtggaaggcgggatctggagcggaggccgtcatacaagaggtaagggctacataggggatatggagaaatacaactccgcagcaatgatgggttttacagttttacggttcagtactgagcaagtgaaagcaggcgtggcgattaaacaaattgagcaattggtgggatga

SEQ ID NO: 51046 - DNA, 1104 bp, Acinetobacter baumannii
atggcaacagatatcaaaaaactatttgaagcactcactcagcaccaggcctatctttatcgtgcttcatcaaaaacggtaaatgagttattggctttattcaatgatgatacgagcaagatgctatctaagcttcgggatttattggatgagcttaatgagtcggagaaagttgctttagctggtggtaaatatacaacttcaaatttaagggaaattagggatttgattgcccaatggtttgccagtgttaatttagcattacctgaagcttttgccgtttctgctacggcgctggctgtttatgaggccaattacgtagctaagctctatggagcaaaaattaataagcctgatggggaaaaactattcttatccgctaaaaaagttccgttggcaggtggcgctcttgtcgatgatctgctttcaagaattgctgaaagtgcccgtcaaaaggttgagtatgcaattcgagatggtattaattcaggcaaaactaaccaagaaattgttcagcgtattcgagggagcaaacggcttaactatgaagatgggatcttaaatggtaccaaaactgatattgagcgaacggtaagaactgtgcgaagtcatgtagctaatcaagcctatctaaatagcttcaaccaaattggctttgaatatgtccgatttgttagtgttttagatggacgaacttctaagctttgcgcttcattagatggttcagtgtgggaaataaatgatccggcaaagcgagtgccgccgttacatcctaactgtcgcagtatcttggttccggtcgagaaggacggtcaacttgttggcgaacggccatttgtaatggacgaacgtagagttaaagacatccccaaagaagagcgaagccagttaataggacagttagatgcaaacaccacattcaaagagttctttaagaaaacagatgatttctttcaaagggagtggctagggccaaagcgctttaagctctataaagatgggaaatttgattttgaaaagttctttgatcctgaaggccgtttctatagcttagatgatttgagaaagttggatgaaaaagcttttaaaaagttgggtctgtaa

SEQ ID NO: 51047 - DNA, 1449 bp, Acinetobacter baumannii
atgagtgatgtaacttttcaacatgctgaatatgttaagaacttgccatactggcaaaaacttgatgatgtttgtgaaggtgaagatgcagttaaggctaaaggtgaaaaatatttgccgatgccaaatgcacatgataaatcacctgcaaataaaagcgcttatgaggcttatcttacccgtgcagtcttttatgaagtaacagggactacatcaaatagtttagttggtgcagcttttgcaaccgatccaagttttaaatttcctccggaacttgctcatttagaacgtaatgcaaatggtgctggtttaagtacttatcaattggctcaaaatggaattcgccatttattgaagcattatcgttgtgctttatatgtagattatcctgatgtgccgccagctcgtaatctagcggaatttaaagcacaaaaagcctatccgatgattcatttattgaatgctgttgatgtaattaactgggattcaatgatggttgggaaccagaaaaaactatgtttagtagttatccgagaggtagtttctacccgtggaagtgatggtttcagtaaagaggatcgtgagcagttccgtgttttgcgtttagagccagttgacaatggagaatatgcttattctgttcagatatataccaaaaatgacaagggcgaatatgaaggagggccaaaaaagtttccgactgatcacagtggcaaaacttggtcttatattccatttacttttgtcggtgcggtagataattctgaagaaattaagaaacctccattactcgcattagctaatctaaatttagctcattatcgtgacagtgcggactttcaagagtccgttttttatatggggcaacctcaatactatgttagcggtgtgaactggcaatggttcgatgaggcaaaagctcgaggcatttacgttggagcgaaggtacttttgcctttgcctgaaaatggcaaaatcggcattgaacaagcaaaccctaacactttgtcccgtgaagcaatgaaagataagtggaatcaaatgaaagaattaggcgcacgcttaattgaaaagggttctgctgctaaaacagccacagaagctaacaatgatgatgctgttcagcattccgttttatcgctatgtgtcgtgaacatgaatgaagccttgtctatggctttgcgatggtgtgccaaatacgtaatagctaatgttgatgctcttaataaagatgacctgatgttcgaaatcagtcaagaatttaacaaacagggttatttagctgagttagctcgacagttatttgaagcagctctacaaggccgatcttcatttaaatcatggtgggaatacaaccaaacaggtatgttccctaaacaaaaatatgaagaagaacttcagaatgttgaagcagagcaagatgggactttaaatcaaaaggtagagtga

SEQ ID NO: 51048 - DNA, 1029 bp, Acinetobacter baumannii
atgggctttactgcggaaaaagcaatttcttttgactttgaccgtggtgctcaccgtactggtgaattacgtcgaggtgcggttgtacaggttcaacaatggagtgatgttgcaaaccttacgccgcaggacttagcaccctataaaaccgtagtcattgataccgtgggtgcaatgcttgaatgcattaaaacccacctgttacttacggcaaataaccgtcaaaaagatggttctttaaagttaaaggctcaaggattagcgaaccaaacgttcaagcaatacatcaatactttgatcagtttaggtaaagacgttgttttcattgcacacgcttcagaagatcaaaacggtgatcaaattatttaccgaccagatctaggtggtaaaaaccgtaacgagctttaccgtatcgcagatgtgatgggttatctaacaactgttactacaggtgaaggtaaaaatgcccgcgttattaattttaaaccctcgcctacacatcatgcgaaaaactcaggtgctttaggtggtgaaactggtgaagtatgggtaccagatcttaaagcacatcctactttcttggctgacctgattactcaagctaaagatcacattaacaccttaacgcctgcacaacttgcagcagctaaagcccaagaagagctagaaaactggaaacaaagctgtgaagaagctgagcatgcaggtgaccttaatcaattaactgagtcgcttgataaagaacacatgtattaccagaacatgcgccaagcaatgttaatgagagctaaagcattgaattgcacgtttgataaacaacgtggcacttggattagtccaccagaatttaacggtatctcagatcaacaaagagatgaacttcaaaactttattgctgaacgtggcctcgatgtaaaaacagtttgtgagcacttcggcatagatgccctgatccaaattgaagcggcaaaactaactgcagttaaacaagaaattgaaaccttagcgaaaacggggatgacagcatga

SEQ ID NO: 51049 - DNA, 288 bp, Acinetobacter baumannii
atggaagtttatcactacggcgtaggtacgcctgatttaggcttaggagcatatagggcagccacaattgcaaatcaattggttggtgaagagttattcaaacttgatcattctcagtcattccaacaatttggagtgaatgtaccagcgcaagaagaagtttctgttcgcaatattgcagcctcaaaaataaccgagttttcaagacctttaaataaatcagggccaatgcatcattctgctttgggagcgtatgcacgaagtaaattatctgagcatattgaataa

SEQ ID NO: 51050 - DNA, 1314 bp, Acinetobacter baumannii
atgcacccagcgcctaaaagccggaatggttttgttcatgaagattggttgaagttttcacctgaacatgctggaaaaactcagttatattattggcttgttcatcagaattatattgctgaaggttgtgcaactgagcagccaatttcagatcaagttaaagacgcaatccgttggtatttgtccgaaagcgatttaaacctgttaaagactcatgttgaatttaaattattgccactacatccttggcaagctcgttatttacaaggtaaaccttggtttgagcaattaaaacaaacaggacagttaattgatatcggtttacgtggatggcaattttcaccgactacatcaattcggaccttggcaagttttaacgccccttggatggttaaaacttcactatcagtcatgatcactaattcaattcgagtgaatttggcaaaagagtgtcatcgtggcgaaatttcttatcgtttatggcacagtgatttaggtaaaaaaatattaaaacaatgcccaacattgaaagcagttaatgatccagcctggatagctctgcaaatagacggcgagattattaacgagacaatttgtattttccgtgatcaaccatttgcagtacagcaacaagtcacttgtattgcatctttatgtcaagaccatccaaataaagagttaaatcgttttaatgctttatttgaccaaattgctcagaaaaatcaacaaacgaattttaaagaaattgctttggattggtttgatcatttcttgaagattggcttggctccgttaatgtatgtttatcataaatacggtatggcttttgaatcgcatcaacaaaatgtattgcttgagctagaagatggtttaccgaaaaatctctggttacgtgacaaccaaggcttttattatattgaagagtttgcaactgaaattgtagaagcattaccagatttactagaaaaagctcatgcggttggtcctaaagattttgtggatgaacgctttagttattatttctttggcaacactttatttggtttgattaatgcaattggagcaactggctatatttctgaagatgaactgttaatccatttgcaacaaaatttacttcaattattagagcaatatccagatagcacattattacagggtttattgtttaacgattctttaccgtataaaggcaatttacttacacgtttacatgaattagatgagcttattgcaccattagaacatcagtctgtgtatgtgcagctaccaaatccactgtacgttgaacagaaggatgtgagctatgcttga

SEQ ID NO: 51051 - DNA, 975 bp, Acinetobacter baumannii
  misc_feature (710)..(719): n is a, c, g, or t
atgaaaattaagccattgccgccaatgaacagcttaattgtattcgaggcagccgcacgccacctcagttttacaaaagctgcaaatgaattgaatgttactcaaggcgctatcagtcgacaaattcgacagctcgaagaatacctaggtaaggaattattccttagagctaatcgaaatatttccctaactcctaccggattgcaatattatcaaacgatttatagtgctttattagatgttgctcaagctactgctgaaattaagaaatggcaaggagagcatcaaataactgtggctacgacaaatgctatggctgctctttggttactaccgaaagtagctgcttttcaacagaataatgaaggcgttgatttaagaattttaacgacagacaatatttcagatttgcacaaaatggacttcgatctggcattattttattgccgtgtccctccagcaggaatgagagttactactttatttcctgaagaggtttttcctgtttgtagtccaaattatcttgctcagtttaaggaagatagttctccagaagaaatttttggcaaagctttactatacttagatgacgctcaaaaggattggattacatgggcagagtggtttgaagctgtaaactatcctattgtaaaaccgaaaaatagggtgaatatcaataactatccaacgcttttacaagccgcaattannnnnnnnnntatcaataactatccaatgcttttacaagccgcaattaatggtcagggagtagctttggcatggggttcactcgtagacgattatttacaaagtggtgctttagttagacctgttgaaactgttcttcgtactcaagcaaatttcagtatgctagaaccagcagataggggagttattccttctagtgttaagcatttccgtagttggttattagatcaactaccaggacaagtgggacaaaaaggcttaagttaa

SEQ ID NO: 51052 - DNA, 438 bp, Acinetobacter baumannii; identical to SEQ ID NO: 50975

SEQ ID NO: 51053 - DNA, 1245 bp, Acinetobacter baumannii
atgccacatgttattgtgattggtgcaggaatcacaggggttacttcagcctatgaattatctcaattaggttaccaagtcacagtgattgatcgccatctttatccagccatggaaacatcatttgcaaatggagggcaattatctgcttgtaatgcagaagtctggaaccagaaagcgaccgttataaaaggttttaaatggatgaggcaaaaagatgctcctttattattgaatccttcctttagcctacataaatatagttggttggttgagtttttgtctcatattaaaaattatgaagccaatacaatagaaaccgttcgcttggcattgcttgcgcgtaagcgcttgtttgatgtagctgaaaaagagcagcttcaatttgatttggagaaacgcggtattcttcatatgtatcatactagggatgattatgacatcgccaagcgagttaatgatgtcctaaataaagggactttagaacgttactcggtttcacctgaggaaatgaaatcaatcgaaccttctttaacgggtgagtactttggtggctattacacaccaagcgatgcaaccggtgatatccataaatattcaacctctttagctgaaaagactaaacaatatggcgttcagtacaaattcggtttggaagttactgatattaagtgtcatgcagataaagtggtgctgaattgtcagccaagtgctgagcatccgcatctttcccaaacagacagctttcaattagaaggtgatgttttggtagtgtgtggtggtgtaggaagttatcagttagctgatatgattggtgaacgtgtaaatgtttatccggtcaaaggttattcaattaccgtccaattaaaagatgaaaaaagtataaaaaatgcaccgtgggtgagtttgttggatgagagcgctaaaattgtaacgtctcgtttaggaccagatcgtttacgtgtagcaggtacggccgagtttaatggttataatcgagatattcgagccgaccgtattcaacctttggtaaattgggtaaaccgtaattttgacatttcaactgagcatgttgtgccttgggcgggtttaagaccaatgatgcctaatatgttgccagttgtgaaacagtctaaacagtctcgagttttctataatacgggacatggtcatctaggctggactttgtcagcagctacagctgttttggtgagtcaggatattcaacaaaagtatcccgcataa

SEQ ID NO: 51054 - DNA, 972 bp, Acinetobacter baumannii
atggagaaaccagcaaccattgtaggttttaaaattggccacgccttgattgatgagcttgatgttatggccaaggtcaaagctcaacaggcttggcgtaagatcatcgctcgtatgcgttataagcaagctggtttgctcaacggtattgatgtggccacaacaccagaaggttttaagtttacatacgagcaatttgttaaagaggcaaataaatcagaggctaagcgtaagctctatggaatgattcaagcttcaacttatgacaatgaagctaatcttccagatgactacatatcatcactttatgagtcttatccgccgcaattaatttcagcttatttaagagggcagtttgtcaatttaaccagtggtgctgtttaccccgactttgatcgagttctaaaccacacggatgaagaaattaagaaaggtgagcctttactcattggtatggattttaacgtgcttaaaatggctgctgtggtttatgtcattagagaagggaagccaagagctttagatgaactggttggcgtgagagatacaccgacgatgtgtcaactgattaatgagcgctttccagatcacgatattactgtgattccagatgcttcaggtcaggcaacatcatcaaagaacttcagtgaatctgatcatgcaatcttaaagaaaaatggattcaaagttgaagttaatggtgtgaatcccggtattaaagatcgtatcactgcagttaatgcacaaattctgaatgctgagggtgaacgacacttaaaagtgaacacaaacaagtgtcctaactttacggctactttagaacagcaagtctatgatgattttggaatgccagataaaagcgctggtttggaccacgttggggacgctggtggatatccaatagctaagagattcccagtcatcattcagaaaatatttaaacggcgcgcaatcgctggtttttctcgttaa

SEQ ID NO: 51055 - DNA, 390 bp, Acinetobacter baumannii
atgagctttattactgtagatgacgcaaattcaattttgggcagcgattttgcaccagacagtgataaagctcgtctggttcaactggcaaatgtctggatgaaaaacagaataggttttgtaccagatcctattgacccacttcttaaggatgcagcttgtgaaattatcaaaggaattctggccaaggtaatttataacggcaaagatcagcagctgaagcgcaagaaagttaaagctgattctgttgagtcagaaaaagaatatcaagacggatctgaagcaatttctagctttgaacagatagcaattgattttattgactcacttgatttgaaagatccaaatgcaagttttaatggctttggcatacctctttacagggcatga

SEQ ID NO: 51056 - DNA, 324 bp, Acinetobacter baumannii
atgggattgaattttagaaaaagtataaaaattgctcctggaatccgtgtcaatgttagtaaaaaagggctatcaagtgtttccgtgggtgggaaaggtgcacgtgtaaatgtaagtaagaagggtactcgcacaacagtaggtattccaggtactggtttatcttattctaagttctctagtcatactaagaaaacgacacgtagaagagaacctgattttaataatccagataatgtatggggttaccctaaatctgaatggattatttgtgggattattttatttatagctttaatgatttttatttggatcattagctga

SEQ ID NO: 51057 - DNA, 966 bp, Acinetobacter baumannii
atggcaaatctagtctttaaatattcttgggatcatcggccttatccctataactcagctcaaggtaagcggcaatttatgctgccttttgcttcgggtattccaaatttgacacccgatatatctcaagtacaaggagcaggtacagcagcgcaaggtacattaaccattgctcgtgatgactctacacctggacgagtacttaaagttggagatttcggacttggtacgtctatattgcattctgaaggaaagatcttatataaaactggatttcagggtttagctggcagtgtgacaggcttaagctttccacttcaatgtgttgtgttcggttggagtaatttagtatctgtactagggattagtgctgcgactaaaagaatgtttttcaataatattccaatcaatgttgaccctcagattcttaattcagactggattgaagttcgaacaacagcaaatactacggttgatgcaaatggttttgttaaatcagcctcaccaattgttaaactttttgcaggatctattgaattaaatgattcagcaaaaaaacaaccagtcgaatttgaaaagattgatgtgggtaattacttactcaaagggtcattaggttttgctcaggaaggttggtatatcgaagtacctaaggatgccaacggtaatacggtagtagcagttgaatattcaaccttagaaaatggtgatctttctattaaaacttataaacgtaagtttgatattgaaaaagctgccattgttgctgatcacgacaatccgctagatattcctgaaggccgctggattgatatccgtttacatgaagagcctgaacccgtgcctgaagaaatattgagtgaaacaccagttgagttccagcctactaacttatctcaggcagtagctgcagccatgaatggcgtggaaccgccagaaatctcagacacagacgaaacactttaa

SEQ ID NO: 51058 - DNA, 1149 bp, Acinetobacter baumannii
atggcaaatcttgtatttaaatttaattgggaccatcgaccgttccagttgaactcagctcagggcaagcggcaatttatgctgccattcgcttccggcattcccaatttaagccctaacttttcacaagttcaaggaactgcagcaatctctcaaggtggtacaggggcaaccactgcagcagaagcgcgaaataatcttggtgctgctgaaaaaggtgtaaatactgacattactgaaatgaaaggtttagctactccactttcagttgcgcaaggtggaacgggtggaaactccgcaattagtgcgaaagttgcattaggtttgggtgatgcaggtgttttgggttattcagcaaacgttgtagcttctctttttgataaatcacaagtttcacaatgggtaacggttctgggtctaaatcgtttagtgaacatctcccatggtgactggcaagggggaagtacatcaaatcctctattaatgccaatgcgttacggaacccttatgggttaccaagcgaatgattcgattggtacttattcatggcaactatttaaaggtgtctctggtcatcaaatgtcttaccgttatggtgcgggatctgatgcttggtctacatgggggcatttaaagaccagcttcaatacatcagttgatgcaaacggattcttaaaatcagcctcaccagtagttaagttgtttaacgaccatatcgaactcaatagtgatgcagaaaaacagccgattgaatttaagaaagttgatgtaggcgattatttacttaaaggctctttaggctttgcccaagaaggttggtacatcgaagtacccaaagacgcaaatggaaacacgatcgtagctgtggtgtatgacacattggaaaacggtgatctatctattaagacttataaacgtaagtttgattttgaacttgctgcagttgttgcagacttggaattacctatagatattccagaaggtcgctggattgatattcgcttgcatgaagaacctgaaccagagcctgaaatttttcaaactgaaacacctgttgatttccagcccaataatttatctgaagctgtagctgctgcaatggttggggtagaaccgccagaaatctcagacacagacgaaacactttaa

SEQ ID NO: 51059 - DNA, 294 bp, Acinetobacter baumannii
ttggatgaagccctgcaatatccaccagatgatgtacgccgtgcaattgatctaactggttacacctttacttcacaggttaaaggtttagctgatggagcagctgtggctaccttgacttgtgcagcattaagccagagcacacaaaagggttggcttaatgtgaaatctggagcaagcacagcagcatggccacttggtttatgtcagatggatattaaagctgtggtgagtggcactacacagcacactgaaactttgactttccaagtgattgacggggtaacagcataa

SEQ ID NO: 51060 - DNA, 279 bp, Acinetobacter baumannii
atgcctactcaaaaacctagaatcgccttaactgttcctgatgaaattaatcaaactttagatcgtttgtacgaactcactggtacgcctaaatcgaagcttatcgtagagatgttggagcaatatgttcctattcttgagcaagtagtcgacaccttggaaaaaatcaaatctgacaaggaaaacggtaaggaaatagctaaaaaatttgctcaagatatgctttttgatggtcaggaaatgttaggcattatggctaaagaggctcgcgatttatga

SEQ ID NO: 51061 - DNA, 1509 bp, Acinetobacter baumannii
ttgctggaacagcaaaaacagcaagagttagggttattaaaactagctcaggaacagcggttgtttcaagcccgtttatctctgctttctgaaacgcaagccatgcaggaacgttacagactcgaacgggaggaaattcttaagaataccaagctttctatagaagagcggcaaaagctaatcgcattatctaaagccaatcaggataaagagacacgcgataaagtgaataatgctgctcaaaactggggtggtatccaagcggatatgaatggtaccggagaatttttcagacaggatcaggaacgatttagccgtttaaatgctgcaaatgatttagcagatagtcaatttgctgctaccgacctgaatgagcaaaactctttagatggtttgaatgctcaattcgaagctggactaattaagcagcaggatttcgaaaaccagaaaacagcaatcattcaagctgctcaggaccaacgcaatcagattgctgccgaatatgctcagaatgctcaggatattgaagataaatatcagcaagatcgtttgaacacccaaattgcatttggtggccaaatgatgggttctcttacatctatgtttggttcaatgtttggagagcaatctaaagcttacaaaatcatgttcgctgcagataaagcttatgcgattgcagctgctggtattgcgattcagcaaaatattgcagcagcttcaaaagctggttttcctcttaacttaccgttgattgctggggcagttgctcaaggggctagcattattgcaaacatccgtgcaatcaaagatcaaggctttgctgacggtggttacactggatctggtagaaaatatgaacctgcaggtattgtccataaaggagaggtggtctggtcccaagaagacattaaaagatggggcggagttggtttagttgagaaaatgcgtaagagtgcaaaccctgaagcttttctcaataacaatgcctcggctgatagtgtcatgcgccgtgcaatgatgagttctaatgcctttatagaaagccaaaagcaagctgacatctttaatcaaccggttcaagatactcagattatctataaaggtaatagagacacacctaagttggcgtcttcggcaaattctgacttattccatgatggcaaggtctacttctcatcaaatggtttagttcaggatcgttcaaatctggatgatgttcaggattttactttaggacgtacttcacgccctcaagctgagatgatgccttcaattgagcctgcttcaccgacaatcaatttcaaaattgaagtgattaatcaggtgagtggggcgacagttgaagccgaacaactggacgagcaaacagtccggatcattgttaaagatgaactggataagcagcttccaagaacggtacctaagcttgtaagtgatcaaatcgcaaatccaaactcaactattagtcggtctttgactgagaatacgacagcaagacggaatcgttaa

SEQ ID NO: 51062 - DNA, 375 bp, Acinetobacter baumannii
atgcttcctccagttcctaaaactaagtcatcagaagtaaccgatattattaactctgctgttcttactggatcgataagtgaatttcagtattttagatgcaaacggttgcttaatgatattaaagaaactgagccactagattggtttttattaagcaacagtattattgaaatgtattttgataatcctattcttgcgcatcaatacgctcgagaagtactgaaaattagcaatagtgtatcaattttatcgaatctttattttgtttttcttagctcagtagatttttctggcgctaatgaaaatattgataaaattataagttctgtctcttatacacatctgacgctgccgacgactccttacgtgtag

SEQ ID NO: 51063 - DNA, 252 bp, Acinetobacter baumannii
atggaaaaatacacaggaaataaatcagatcatcaacaatggtttgattatgaatataaaggtttccatttagttttaaatttagaagaagtacaaaactacgaataccctgagttggttgaagtgcttgaaaaaatgattcagcgcattaaagttcaacaaactttggttaatactcaaggtgttgctcagcttagacttgaggatgaagttaagcctataaatatcgatgaagaacaagatcaggtataa

SEQ ID NO: 51064 - DNA, 951 bp, Acinetobacter baumannii; identical to SEQ ID NO: 50929

SEQ ID NO: 51065 - DNA, 468 bp, Acinetobacter baumannii
atgttggttgcaggcgcattactatggcaaacaaagcgcatcaaagaacaaaagaaatttggatatagattagtaagacatttgaacttttttactttcttagggctgccttttgcctcagccttttatttaatggttaatcggattatacctgcttcatttgagccgagggaactatacgaggtttcagcattttatatagcatggctattaagcttattgattagctttagctgctcaataaggaagggaataatcatcatgctatatattacggctgctgttttattccttattccagttattagtgtcgttctggtgccagaagcctctttattaaatagtctaaagtctgtgcattggtctcttgtcggtgttgatctggcgctcatactgctcgggctattctatttagtagtactacgcttctaccaaaccaaatttattacgttaggagaggccaaatga

SEQ ID NO: 51066 - DNA, 723 bp, Acinetobacter baumannii
atgagtctgctcgctttctcctcatatgcattaaacggtgtagatgcacaaaagtttttacaaggtcaagtgactgtagatactgaacgtttagctgaaaatgaaacacgctatacagccatttgtgatcttaaaggccgcatccattttggcttgtggctaaaaaagaataatgcagaaagttttgaaattattgtcactcaagatcaagctgaagaattcgcgaagcacattaaaaaatatggtgctttttcaaaaatgaccttaagtgaacaaggtgctgtattcccaaaagttgtgaatgtccatactgagttcagctctacagaaactgatatttccgaatggcaaaaacaagccatcatgacaggtcaagcatggattgctcaagcgactgaacatgagtttcagccacaagaattacgtttacatcaacgcgaaggcgtcaattacgataaaggctgttacttaggtcaagaaattgtggcgcgcctttggtttaaggcaaaaccaaaacactggttgcatttagttcaaggtacgggtgattcacctgctccagcaactcaattgcacaatgacgtagaagtggttaatagtacccaaactactgacggttatattgccttagttgttgcgaaacctgccgcccttcaagagttaggtcttcaagttttagatttaccagaagctttaagtggtgatgttgctagaccacaataa

SEQ ID NO: 51067 - DNA, 450 bp, Acinetobacter baumannii; identical to SEQ ID NO: 45757

SEQ ID NO: 51068 - DNA, 1257 bp, Acinetobacter baumannii
atgggttatcagaagatcgtggttcctgccgacggtgataaaattacagtaaaagcagacctgtcactgaatgtaccaaatcatccaattattcctttcattgagggtgacggtattggtgtagatattacaccggcaatgaaaaaagttgttgatgcggcaattttaaaagcctatggcggcaaacgctctattgaatggatggaagtgtattgcggtgaaaaggccaataaaatttacggtacttatatgccggaagaaacctttgaagcgctgcgtgaatttgtagtttcaattaaaggccctttaactacaccagtcggtggtggcattcgttcacttaatgttgcactacgccaagaactggatttgtatgtatgtgtgcgtcctgtgcgttggttccaaggcgtcccttcacctgttcaacatcctgagttaactgacatggtgattttccgtgaaaactcggaagatatttatgcaggtattgaatggaaagcagattctgaagaagctaaaaaagttattaaattccttcaagaagaaatgggggtcacaaaaattcgtttccctgaaggatgtggtattggtattaaacccgtttccaaagaaggaacacagcgcttagttcgtaaggccattcagtttgcaatcgataatgacaaaccttcggtgactcttgttcataaaggcaacattatgaaatataccgaaggtgcctttaaagaatgggggtatgagttagcgctagatcgtttcggtggtgaattaatcgatggtggcccatgggttaaaattaagaatcctaaaaatggtaaagacatcattattaaagacgtgattgcagatgctttcttgcaacaaatcttgatgcgtcctgctgactactctgtaattgcaacccttaatttaaatggtgactatatttcagatgctttagcagcagaagtagggggaatcgggattgcgccaggtgcgaatattggtggagctattgcagtgtatgaagcaacgcatggcactgcacctaaatatgctgggcaagataaagtcaacccgggttcaattattctctctgctgaaatgatgctccgtgatatggggtggacagaagcagcggacctgattattaaaggtatttcaggagcgattgcagctaaaaccgtaacttacgattttgagcgtttaatgccgggagcgaccttgttacgttgctcagaatttggcgatgccataattcagcacatggaagattaa

SEQ ID NO: 51069 - DNA, 219 bp, Acinetobacter baumannii
atgctattcatagaagaaaagaatggaaacaaaatatacgcaaaaagtggttggggatgggatgtaaacccacaagtaggctggttaactggatgggttgttcagcctcaagggaatattgtagcgttctcccttaacttagaaatgaaaaaaggaatacctagctctgttcgaaaagagattacttataaaagcttagaacaattaggtattttatag

SEQ ID NO: 51070 - DNA, 987 bp, Acinetobacter baumannii
atgagtaaagaatttacatttacgattaagagtatttgtttcgatgagaactatcgtccagcagacaatacgcgtattacaaccaactttgctaacttggcgagagggatgagccgcgaagaaaatttgcgcaacacattacggatgatcgacaatcgtttcaacgccttagctcattgggacaaccctaagggcgaccgctatggggttgaacttgaaatcatttcagttgaaatgaatattgatgccgaaaaccgtactagcgggcttcctttaatcgaaatattgaaaaccaatattgttgataaaaagaccaatgaacgcatcgaaggtattgtaggcaacaacttctcttcttatgtacgtgactatgactttagtgtgctgttgttagaccacaacaaaaacaagtctacgtttagcacgccagaaaagtttggtgaactgcacggcaacttgtttaagagctttattaactctgagacttataaagccaactttaaaaaggcacctgtgatttgcttaagcgtttcaacaagtaaggtgtatcaccgtactgaaaacgaacatcctgttttgggtgttgaatacaagcaagaagactattcattaactgatgaatatttccaaaaaatgggcttaaaagttcgctatttcatgccgccgcatagcgttgcaccgttagcgttctactttactggcgatttgttgagtgattacaccaaccttgagttgattagtaccattagtacgatggaaaccttccaaaagatttaccgtcctgaaatttacaatgcaaattcagtggctggaaaatcttatcaaccaagcttgaagcaccaagattattcacttactcgaattgtgtatgaccgtgaagaacgtagccgtttggctatagagcaggggaagtttgttgaagagcaatttatcaaaccataccaagcgattcttgagcagtggtctgcgaattacgctcctaattaa

SEQ ID NO: 51071 - DNA, 768 bp, Acinetobacter baumannii
atgaaacttaaaacagtaacaatcgacggtaaagtttatgcggaagtagacggtgataagccgatctatattcatgatgacggcaaagaaatgccacatgatgcaccacactcggtagcaacaattgcacgcttaaacaatgaagctaaaacacatcgtgaagccaaagaagcagccgaaaaagcattaaaagcttttgaaggaattgaagacccagcggcagctaaaaaggcattacaaacaatccaaaatctcgacgataaaaagctggtggatgctggtgaagttgagaaagtgaaagctgaagctatcaaagcagttgaagaaaaatatgctccgattgttgagcaacgtgatgctctagaagcctctttgcacaaagaactaattggcggtggttttgctcgttctaagtacattcaagacaacattgcagtacctgtggatatggtgcaagcgacctttggtcatcactttaaaatcgaagagggcaaggtggttgcatacgatccgaacggcgaaaagatttattcacgtgtccgcccgggtgaacttgcaaatgttgatgaagctttagagtcattggttggtggataccagcataaagacttgattcttaaaggtggtaaaggaactggtggcggttttcaaggtgggggcaaaggtggagcacctaccggaatgaaacgcagcgaaatgtctgtttctcagaaagctgactacatcaaagaacatggcaatgatgccttcctaaaactaccgaactaa

SEQ ID NO: 51072 - DNA, 816 bp, Acinetobacter baumannii; identical to SEQ ID NO: 49371

SEQ ID NO: 51073 - DNA, 210 bp, Acinetobacter baumannii
atgactgctcaaatgaaaacaaatgcatcagcaaaaaaagctgtcaattcacctagccatatttacgatacctttattgtcggtgccggaatttccggtatcgccgcagcgattcgtctcgaccaagttggctataccaactataaaattattctctgtacacgacaaatttcacagaacccttatcctatcagggttctgccttcttaa

SEQ ID NO: 51074 - DNA, 1410 bp, Acinetobacter baumannii
atgacttcaatgtcgaacactacccaaaagcactttattgttgagcagtttcctttaccgacttgggtcagtgatgaaaaaggcttaattttatactgcaatacggagtgtacaaaatactggcgcgatacttctcctccattgtttcaacaatggctagatttcgtgtaccctgccgatttagaagaagttaaaaacaaatggttagatgcgatacggttccgatcaagaattgaatttaaatgccgtcttttgcataaaacccattattatcgatggtgtaaaatttctattcaattgtcgaaataccatgaatcttctcaagaaaatgaatggtttattagttttctagatattgaccaagatatacaagagcagcaaagcttacgaaaagatatcgatatacaaaatcaaatgctcgatatcagtgtcgattgtattaaggttttaaatacagatggcactgtatctcatatgaataaatcaggatgccttgcattaggtatacctgtagatgaaaaaaaattcggtatgcgatggttagatcttttacccccccatattcgtaaacgcggaagaattgccttaaaaaaagccttacagggtaaagtggcccgattcgctggcatgagttgcttaccaaatcaagatccagaatattgggataacatgcttaccccaattcaacatacaaacggcgaaattattcagatattgtgtgtttcgcgaaatgtcactcaacagtatcttactgaaaaccgattaagagatattagcgagagagatgaactcacaggtttatttaatagacgttcatttaagctacaactaaaacgcaccctagcttactcaagagaaacccaaaccagtgtagggctacttttaattgatctagatcatttcaagcatattaatgacactataggtcatagtgctggtgaccacttattaaaaatactttctaaacgttttaatcagtgcgtagaccctgaaagatgttcagttgccagattaggtggtgatgagtttgcagttattgttagccatttggaaaatgagaatgatgttcgtgaacttgctgaagtattgcttcaacaactcaatcaacccattacatatgctgggaatgtgctcaacggcggcatgagcatcggctgcgccatttaccctcaagatgcagttgatcaatcgagcttattaagttgtgccgatatggcattacatgacttaaaagcccgtggtcgtggcggcatacgtatgtataacccaagtatgatgcagttaaccgaggcaatcgcctctcaactcaacattgctcgccagcttattcgtcatcataccattcagccctactatcaacccaaagtcgatctaaagcaatgcgtactccatgctgttttagtttattga

SEQ ID NO: 51075 - DNA, 684 bp, Acinetobacter baumannii; identical to SEQ ID NO: 49392

SEQ ID NO: 51076 - DNA, 1344 bp, Acinetobacter baumannii
atgaaaacgatagatgcgaatacgattatcaatcgcgaaaaactgtctcccttacagtgggtggtttttattctaggcttttttgtctttttctgtgatggtctagacacaggaattattggttttgttgctccggcattactagatgactggggaattaccaagcctcaacttgcaccagttttaagtgcagccttagttggtatgtcaattggtgcaatcatttcgggacccttagccgataaatttggccgtaaaggtgttattgtttttacaagccttttgttttctatatttaccattttgtgtggctttgccaattcaactcaagacttaatgatttatcgctttattacaggtgtaggtctaggcgcggccatgccaaacatcagtactattgtctcagaatatatgcctgtaaaacgtaaagcatttcttacaggtcttgctggctgtggatttatgctgggtatttcttgtggtggtgtgctgtcagcttatctattagaaagctatggctgggctaaggttattattattggcgggagtattcccctaattttagtggttgctttattacttaaattacctgaatcaactcaatacttaattacacgtcatcaacaaggcaaagcacagcgtattttagaaaatattcaaggccattcttttcaagagccggtaaaacttgttttaactcaatcagaaactgcatcagatgaaaatccagttaaagtagttctaggaaaatatctgtggggttcaagcatgctttggctctgctgctttaccagtctgttggtgttttatcttttaacaagctggatgccaacgattttaaaaacagcaggttttagtactcaacagtttagtttaattgctgcgattttcccttttggtggtgtaattggtgcaactattatgggatggtacatggataaactgaacccaactacagtgattaaatattcatatctcattgcttttggactattcattattgctggtctggtgagctcaaatattttcttgttaggtcttactatcttcttaattggtgctttactcgctggtgcacagtcttcattactgccacttgcagctatgttctatccagcagtatgccgcgcggttggagtttcatggatgcatggtatcggtcgtatcggtgcaattttaggcgctttctttggttcgctcattttcactttcaacctaagcttaagcggtattttctttattctagcaataccaaccttcatctcatttattgcacttagcctgaaagtaatttatgagaaatctaaaaacaaacaagtgttaaagctagaagaaagtctataa

SEQ ID NO: 51077 - DNA, 369 bp, Acinetobacter baumannii
atgggcttacgtgacgaaattcaggcagatattgctgaagcatttaatgatgatttagcagatgccgttcatacctttacatgtgagcggatctcaaaaactaattgggatcctaaaactgaaacatatgttgaagttaaagaaaactattccggccgtggtgttctgtttggctcttacagtcaatatgagattcagacgcttggagtcctggccacagataagaaggctaccgtgcttcaaaatgaagtgtccatgacacctaaaattgatgatgaatggctaacagctttaggctcatttcgagttattcatattcagcaagatccggccagtacaatctggaaatgtcagttgaggaaggtttaa

SEQ ID NO: 51078 - DNA, 672 bp, Acinetobacter baumannii
  misc_feature (288)..(305): n is a, c, g, or t
atggccagtagaaaattagaagataaaattaaacgagtatgttatttcgttggtggtggagtaataggctatttgttaattagttttattattttaagttcatttccatggaatcattatttacttgataaaaagcaagcatacgatgttttaaaagatgcattcacaataggtgcagcatttcttgctccaattgcagcatttgttttattcaatgactggagagaacaacatgtagctgtgaaaaatgagaaattgagtgaggagatattaagaatagtaactacnnnnnnnnnnnnnnnnnnccttaaccccagattaaaagcagatgtagaaaagtttaatgaacagcaaatgcaattccatagagatgtagcaaatctcttcttaaaggtagatgaaattgatgcagtagatgatcaagctataagttttaaggaaaatattaagaagttagatggtgattttttgggtttgtatctgagtttatttaaacaaattgaaattgtaattgaatatgatgcaattgctgaatttttagatacagaatcactctctagaaaagaagaattaaaaactgatttggataaatacgcaaaagaaaatgaaatccactatacaagaattatggaagtatttagaaaacttaaaccgttacaagtttcatcatga

SEQ ID NO: 51079 - DNA, 711 bp, Acinetobacter baumannii
  misc_feature (651)..(660): n is a, c, g, or t
atgagtcaggcaaccggaccagaaggtttaccgttagtagaagtattaaagcaaatttcaaaaaatgctcatgaggcggttgaagagcaatataaaatcttaaactatactttgttaccgcaactccaaggctatggcgttcattttattcagcacggcgatatattagaaaagcataaagaatggattaaagaatacttttttaaagaagtacaacccgtagttacgccaatcagtctagatccagcacacccatttccaagattggtcaataaaagtctaaacttcattgtaactttagaaggtaaagacgcttttggacgtcaaattgatttagctattgtgccggcaccgcgttcgttaccaagacttgttaaaattccagaacatatttctggcggtgcggagcattacattctgctctcggccattatccatcaacatatttcggatttatttccgggtatgaaagcgacgggctgtcatcaatttcgtgtaactcgaaatgccgatttaaccgtttctgaagatgtagaggacttggctgctgctttaaaaggcgaattatcttcacgccgttttggccaagcagttcgtttggaagtagcaaaaaaatgtcctgaagaaattgctaactatttattagagcannnnnnnnnngcaattcgatttagatgcagaacatctttactacgtcgatggccccgttaa

SEQ ID NO: 51080 - DNA, 471 bp, Acinetobacter baumannii
atgaagtcgctgcataatcacaatgatcggcgtatctggcgagttagtacgcgactcaagggtgttttggaaccaatcaattaccccttctcgaattgttttagaagaagcttcatgcgctttgtgtgggtcatcgataatgatgcatccaccaaacccatcacgaagttttcctgcaccaaaaccggtaatcgtgccgcctgtaccagtcgcatagcagacaccgccttgagaagttctccagaagtctttagccttactatcatcacgcaatgtaagctcgggaaagacttttctatacgcctcttcttgcacaagggttcgaatctggaaggcgttatttgcggcaagcattgccgagtaactgatatgaataaactcacagtcaggcttctttccaaaacaccaagccataaaattaattacagcaatttcagttttagaatatcgtggtggaacgttaataattaa

SEQ ID NO: 51081 - DNA, 426 bp, Acinetobacter baumannii
atgtgtttctcttataataagcaggacaagttgaaaacctttaaatttaaaatgaacagtttaagtaatctacaaccggtttctaaagacttgatgatcaagatttatattttaagaaccatgatgtactgcggggttctgtggggactatttgatgaaggctgggccattaaatcagatcaggaagattttatttttccgttctggctaaatggagtacaagcacatcgatacgccaaaactcactggcccaattacaagccaagaaaaattaccccaaaagacttccatgaatctttattacctactttaacacggttaaaagtcactcctgctttatttaactcatctcatcgcaagttgaagttatctacacagcaaatgcatcatttcttttttaatcatccaaaatggcaggtagcttaa

SEQ ID NO: 51082 - DNA, 1386 bp, Acinetobacter baumannii
ttgaaacggcgtaatgcaattaatccaaatactcctaaatgtgatataccgacagaagtaatttctacaggcaatacgaatattgatataaaaaatgaagtttttagtaatttattagaacctttaaaagaagctaatgaaaataatggttttttaccaatttactatcctaaaaataatttttcagcgacagatttaattgatgttgatttggaaaataagggtacatgccaaactcaggaccaacgtggattatcgagattagtaagtaatacgtactattatcaaactctagaaaagagtaaaaatagttgtgatattggttcagttgaattaatgaagcttacagcaggtgacctagaaggtttaagtaatatttcatttacaacattattagaaacctatcaaaaaagttacgacttatatgatagtttgctcaaagatccaacaactccatcaaattttattgtttattataaagtccgtttagctgaatttaaggatttacttgataaatttaagaatgacagcgcgcatataaatacaaaatatcgagctatttatattgatttaaaaaactatggttttccactaccaactgaagattcaaatcatgtattaaagttttttaatacgacggattatagtgttaaagcagagccattaggtgtggggcagaaagtagaagatttaacttcagatactgagactaagaaaaatcaaagatgcgaatggaatcctacggtacagcaaattcttttttatcgtgttgatgatgatattacttcgagtacgacatatgagttttgtaaatatacaattaccactaaaacaggtgtagagcttagtagtggcctaattaaggcgaaatttggaaatataactcctgtttcaggggatggcacgataacattcaaatatttagctaatgaaattatcccattaaatttacttaaatatgcaaatgatgatggtgatggtcctgttggtacgcttgttactaaaccgaataaacctccattttgggtaaatgacaaaggtgtagagttaccaatttatttaccaagtaaaaactcaaaagatggaatttttacagtagtaaaagcagatcgcgaaggtccatgccctggtaaagatagtaaaaatacatgttatggtggcaatatctatattcaagcgaaaaatgtatttaatacctttaatgatacactaacatattatgtatatgatgcagatggaactatctcagctaaggccggaacaattaacttagtaagtacagcaactacaactgatgattcacgtggtggtgggggtggaagtattggaattctttctatcgcatcactactaagtttaattgcttatagacgttatcgtaagtga

SEQ ID NO: 51083 - DNA, 699 bp, Acinetobacter baumannii
  misc_feature (635)..(644): n is a, c, g, or t
gtgcatcattacttcgatactattgaaaaacagcaagctttaaatgcatttattagcacagataaagcttcagcaattcaacaagctcaatattgggataaatacctactgagtggaaaaccgtgtccagctttgatgggtattttaattgcggttaaagataatattcatgttgcaggttttccaaatagtgcaggtacgccagctttagctcactttaagcctcaaacttctgcccccgttattcaaaaactcattgatcaaggtgcaatcattgttggtaaagccaatatgcacgaattagcctttggggtaacaggttataatactgccatgcatatagaaggtgttgtgggtacacgaaatgccgtaaacccgttacacattgctggtgggtcttcttcgggtagtgcggtggctgttgcagtgggcatggttccgattgctatgggtacagacacaggtgcttctattcgactgccaagtgccttaaatggttgtgtgggttttcgtccaacggtaggacgatattcacaagaaggtattaccccaatttcacatactcgtgataccgctggcccaatagctcataccgtatctgatgttattttaattgatgagctcatcactcaagnnnnnnnnnnctcaagagccaagaaaagaatcattacagtctcatcaaattcggctcggtattaa

SEQ ID NO: 51084 - DNA, 1068 bp, Acinetobacter baumannii
atgttgactaaaactgttaaatctttcggtttagcgatgggcttattagcctgctctctcccactttacgcaaaaaacaatgttgttgttgtcgctactggcggtaccattgctggtgctggcgcaagctcagcaaatagtgcaacttatacggcggcaaaagttccagttgatgctttaatcaatgcagttcctcaaattcaagatttggcgaatgtatctggtatccaagcattacaagtagcttctgaaagtattactgacaaggaattattacaaattgctcgtcaagtaaatgaacttgttaaaaagccaactgtaaatggcgttgtgattacacacggtacagatactttagaagaaacagcatttttcttaaatcttgttgttcatactgataaaccaatcgtacttgttggctcaatgcgcccatcaactgctctttcagcagatggtccacttaacctttatagtgctgttgcattggccgcttctgatgatgcaaaaaataaaggcgttatggttctcatgaacgactctatttttgctgctcgtgatgtaactaaaggcatcaacattcatacaaatgcttttgtaagccaatggggtgctttgggtacacttgttgaaggcaaaccatattggtttagacaatctgttaaacgtcataccaatgcttcagaatttaatattgaaaatattaaaggtgatgctcttccaacagtacaaatcgtttatggttctgactctatgcttcctgatgcttatgaagcatatgcaaaagctggcgctaaagcgattattcatgcaggtacaggtaatggttctgtagcgaaatatatcgttccaacattacaaaaccttcatgacaaaaacggtattcaaattatccgctcatcacgcgttccacaaggttttgtgttacgtgatgcagaacaacctgactctaaatatggttgggtagcagctcatgatttaaatcctcaaaaagcgcgtattcttgcagcgttggcacttaccaaaaccaacgatgcgaaagaaattcaacgcatgttctggcagtactaa

SEQ ID NO: 51085 - DNA, 249 bp, Acinetobacter baumannii
atgccggatgagtttgaacgggtaatcgaaggccaatatcccgatgtaaagccaacagtaaattaccggatttacagttcagacaatctgaattctccaatgttttatttactcggactacaactctcaagtgtcgccatgaaccataaagctgtgacattcaaggctgaatcaccacgattaaataccactaaaactggggacatttttgcactggatcgctttagtggtttgaagggggctatatga

SEQ ID NO: 51086 - DNA, 363 bp, Acinetobacter baumannii
atgaaaagtcacgatcatttgctcgataggcaatatgacgatgaacactacaattgtgttcactttgttcatgaagctgcaatggacctatatggtatagatcgggcggaagcgcttgaactctttatgcagcctaagggcaaaattacttttttatcttcacggttaaaacttttaaatccgctgcccatgcccaaggaaggctgcatagtcgccttccatcccagacaaagaaataagcccccgcatgtggggctttttcgtgggcaaaagattcttcacctcatggaaagcggagtcacttatttgcctgaagaggttgtgatggaaatggggtttaatcgggtcagttattatgattaa

SEQ ID NO: 51087 - DNA, 1182 bp, Acinetobacter baumannii
ttggcaagtaacttcagaccgacttttgcccgtattaaagaaggggctttaatccgtgagcagcagcatattttgccgtatgagcaacttcagtggctcaaagatattggttttacacggttacgacttcctaaagctcatggtggttttgatgcaactattcctgaactatttgcattgctcattgaacttgcagaggccgactcaaacttaccgcaagctttgcgtgtgcattttggttttactgaagatgtcttggtaagtaaagataaggcattccagcagcgttggattagccgaattgcaaatggcgaaacagtgggtagtgcatggtctgaaggcgggaaagagtcaattgatcaattcgaaacgcacttatatcgagatagtgacggaaaaattcgcgttaaaggcaaaaaatactacaccacagggagcctatatgcagactgggtggatgttggggtaacagatttaaaaggagagtctggctcagttgttgttcgccgtgaagatgaaggcgttgaaattgtcgatgactggaatggttttggtcagcagcttactgcaagtggtacggcatatttccacgatgtattggtcgatgaagctgaaattttacctgacgatgaccgttttaaatattcggcggcttactatcaactggtccaactggcaatcattacaggtctagggcgtgctgcaacctatgatgtttctcaagctgttgcgaaacgtacccgaaactacacgcatgcaaatgcccaatttgtaaaacaggatccgcaaattttacaagtagtaggacaaattcgtggcgcggcttatagtgcaggagcgattgttgaaaaagttgcacaaagcttacagcgtgcttacttggctgcatttcaaaataatgagcagcttgaagaagaacaaaatgcacttgccgagcttgaaagtgcgcagtctcaaacggtcattaccgatctaattttaaatgcttccacgattttatttgacgctttaggtgcttctgcaacagacaaagatttaggtctagatcgatattggcgtaatgtaagaactttatcttcacataacccaagagtatttaaaaatcgaattgtaggtgattttagtgtgaacggaacattaccaccttatcaatggcgaattggtgaagttgctaaacaataa

SEQ ID NO: 51088 - DNA, 1155 bp, Acinetobacter baumannii
atgcgccatgtatggtcactagattttgcaaaccaaccttctctcgaagcacaatttgtagtttttgcatcaggtccgctacatattccacaaatccctcatattcaaggtattgaaaagttcaagggtaaagtttttcactcttcccaatgggaacatgactacagtctagaaggtaaatcagttgcttccatcggtactggtggtagtgcaattcaatatgttccagaaatcgcaaaagacgttaagcaattatatgtattccaacgtacagcagcttgggttatcccacgagatgagcgtaaatactctaatttgagcaaagctctatttaaaaaatcaaacttctatcgacaaattcatcgcagccgcctttattggagtaatgaatctcgcgttgttcctatagttcagccgcaaatcatgaaatatgggcaaaaattagctgaggcatttatacgtttccaagttaaagataaagatttagccaagaaacttacaccagactttgtgatgggctgtaaacgcattcttatttcaaataaatacttccctacttttaaccgtaaaaacgttgaattagtgaccgagggtattcaagaaattaaagagaacagtattattacaaaggatggaaaagaaagaccaattgactgtttaatctatggaactggttttgttaccgatccacgtatttatttaaaacattttacatgtattggtcgcaatcaaattgaattgaaacaggcttggaaaaacggtgcagaaagttattatggaattatgaccaagaattttcctaacctatttcaactggtcgggccaaataccgttttaggtcataattcgattatatttatgattgagtcacaagttaattatattttacagcttattgatctagttgaaaaatctggacagcacgctatagaaattaaaccggaagttcaggattccttcaatgaaagaatacaaacacaacttcaaggtactgtatggcaagctggtgggtgtagcagctggtatcaagctgccgatggaaagaacttttctttatggccaacttatacatggaaatattggctagacactcgtaaagttaatcctaaagattatttgttattaaataaatgctcacagagctatgcagcataa

SEQ ID NO: 51089 - DNA, 951 bp, Acinetobacter baumannii
  misc_feature (909)..(918): n is a, c, g, or t
atgtggggaatgcctgtgaaaaatatcaaaacattaattcttgcaatgagcactatcagcttaaccgctgtagttatgccagctcatgctgctactgatgcagaagtagatgctttacgcaaagaagttagtgagttaaagcaactggtccagcaattatcaaatcagcaaaaagcggtaactgtagtaaatactccaaaagtgccgtcaactacaattgcagcaagctcacccgttcctcagagcaaaccgggttggatgcaaatgcctgatggccaaacgcaagtcaagctttatgggaatgtccgtgtagatgcaacctatgactttaaagggtcaaatggcagcatttcaaatggtgctaactaccctttaaataaagatgacccaagacaggactcattaaatgtatctgcagcgactacacgcattgggttagatcttactcgacctacacaatacggcgatttaacaggcaaaattgaagccgattttatgggaggcaatggcgataatggcagtggaactttccgtgtacgccatgcctatatgtctttaggcaaatggttagctggtcaaaccacttcacctttcgtcaatacagatacttctccggaaacactagactttaccggtgcagtaggtacaggaaccacacgtactgtacaggttcgctatactcaaccaattaatgctcaacaaaaaatattagttgccttagaaggtggtgatgttgaaaaagtgagtaatgctgctggaggaagccgtttccctgctctaacaactcgttatgatttcaaaaccgcagataataaaggcttattacagcttcatggtcttgcccatgaaaatcgagtagcgcctaaaaatagttcatctgaagaaaaatttggctggggtgtaggcatnnnnnnnnnncggtggcaagtacgatatcacgcctcaggatag

SEQ ID NO: 51090 - DNA, 261 bp, Acinetobacter baumannii
atgccagaaggatgtcgtggttgcccagataaagaccgcgactttggtggctgtcgttgtcaagcttatatgttaacaggcgacgcaagtaacgcagaccctgtttgtggtaaatcgctgtatcatcaactcattgaacaggcacgtgccgagagcgaaattgattcctctctgggaaaattggtattccgtaatagccgaaattcaaagcaattcacggttcaacaaaacattccggttcaaaatattgtagatgattag

SEQ ID NO: 51091 - DNA, 669 bp, Acinetobacter baumannii
atgaaccaagccaactcccacgaactcaatggacgtcattttcaaaatgagtcgatctttactgatcataatttggtgttcgatcaccacgatttaagcgaaacctgccgcaatgtaggccaaatttttaaaccgcatgatcttaaaatctctcatcagaagcgagatttcagtgcaactatgcaccatgttaaaacaggcgcattgtctattagccgcttggaatatggcgcagatgttattattgaaccagatcatcttgataacttttacttaattcaaattccaactcaaggctatgcagaaatcgagtttggttcgcaaaagtttatttcttattctcaagttgcttctcttatttctcctcagcaatctttacgtatgcgctggcacgcgaactcaccccagcttattctaaaagtttcaaaggatgattttacttaccattgccgtcaacacattgctgattcagaaaataacttactcgtttttgaccctaaattagatttttctacccaaggtggagcctattttttacagctcgttagaacattgatggatgctttagcatgtgatcagcatccgctccatcatcctttagcctttaaacagtttgagtcaaatctattatgcactgatttatggtcagcccaacaatgcattacataa

SEQ ID NO: 51092 - DNA, 150 bp, Acinetobacter baumannii
atggcaaaagttccagcgattggttttaacgcgacaacttcgttcaatcgctctgactttggtttaggtaactatgtaccaaacgtgggtgataagatcactgtaaacattacaactgaagcaactgcggctagtgcagctaaaaaataa

SEQ ID NO: 51093 - DNA, 648 bp, Acinetobacter baumannii
atgaaaaatgaagtcggctttcatgtgcctgttcgtccaatgcctccagattggatttttgaaatgggtacgcctaactttgtgccagcgccagaattatgggaatggataagaaaggtttttctagatcctaaatctaaattatttaaccctgatcacatgcatttacggtcatttcgatatcccgatattgctgtgatgtgggctagatctggttttaaaaagcaaggccgtcaggtcattggtactactgaaaaagtcatgatcaatgctggtggctggaagaaagaacgacaagaagaacaattcatccagtggttcaattatttacctgaatacttaattacttttgatgcttcatattcacgtatagcaagtgatgtgaacttttgtgctttggttgaacacgagctttatcacattgcacataagaaggaccaatacgggacaccagcttataacagagaaactggtatgcctaagttagctattcaaggtcacgatgttgaagaatttactggcgttgttcgtcgatatggagcaagtgaggatgttatgcggatagttgaagcagctaataaaagaccgcagctgtcacgggcagatgttcattatgcttgcggcacttgtaacttgaaggtggtttaa

SEQ ID NO: 51094 - DNA, 585 bp, Acinetobacter baumannii; identical to SEQ ID NO: 50795

SEQ ID NO: 51095 - DNA, 504 bp, Acinetobacter baumannii
gtgaagcaagtaagggcatgggattttggcgctacagagaatgaaggcgactttacagcaggtgtgcgagaagctcttggtgcagatggttttacttacattgtcgatgttacaagaggacagcttggccctgacaatgtaaataaacgcttaaagcaaaccactgagcttgatggaaaaaacgtaactgttcgaattcctcaggaccctggtcaagcagggaaatctcaagctctggcatttacaaaacttctcagtggctaccatgtggttgcaaaaccagtatcgggtgacaagatcactcgggcacagccttttgccgctcaagtaaatgttgggaatgttcgaatgcttaaaggtgattggaacaaagcctttattgaagaacttcggaatttccctaatggaacaaatgacgatcaggtagacggtggatctgacgcttttaatgaattacatgaaggatttgaaaccttcttcgctgatatgggatttgcacgatga

SEQ ID NO: 51096 - DNA, 210 bp, Acinetobacter baumannii; identical to SEQ ID NO: 45893

SEQ ID NO: 51097 - DNA, 864 bp, Acinetobacter baumannii
atgtcaaaaaaatttgaagatttcgataatccaagacaaaaggcattactggggatgaagaatagtattcctacagaacagtgggaagaaaatctaaaatttctcaaacaattaagagcgagaattgctgaattaccagtatgtaaacatccggcgatcgaagttttaaataatggattgcttgataaattcactttaacaagaattcatttagaatatcgtcatgcgattgttcagatctttactgatgccttattaatggcccagttccagacaaaacaattggagcctaaactccattctggagctaaaatgtttccacgtgttttattaagtttaaatgtacttgatgaatttggttttagacccggaacagacctggacaattattatctaggtaatccggagtatgcacattatcctttatatgaagatttattgaatgattatggtttgagtgagaaggaccgtagagggtatcaaccttcaaaaattgcagatcaggtaagaaattttctagaatcatcttatgatagttatattaaagtagttgctttacttgcagtggccgaagaagaagtgattctttttagcccaccacttcgtgaagcgactaaggctattggtgtagatgttgaaggtggcggctattaccatgttcatggggtatctactgacgaaacctcagaagcagcagatgatgatcatgaagatgatctctggtttgcgttagcgcaagcaataactaaagaagactatgagagcttaacaacgctttgtatggattattgtgctttatggaatgagttttgggatgcacaaattgctgatattcactacttagaagcaaagaagttagcataa

SEQ ID NO: 51098 - DNA, 795 bp, Acinetobacter baumannii; identical to SEQ ID NO: 49319

SEQ ID NO: 51099 - DNA, 225 bp, Acinetobacter baumannii; identical to SEQ ID NO: 50257

SEQ ID NO: 51100 - DNA, 711 bp, Acinetobacter baumannii
atgaaaataggaacagatggcgtaaatagtttgaacgaaacgattgttggtaatgattctttagatgctgttgtacagcaggttaaaggtacaaaaatcgaatcattaaatggtgtaactttagctactcaaaatccatatttaagtgatcctaacgtaaaaattaaattgtttaatgatgatgtgaaaaatggcgatcgtaatgcttcatctaatattcaattagcgaacggagatactgtttgggttaaagtacgtgactatcatgcggctggtgttaaaccacttgcccaagcaatgaatgaagtaaaagctaaagtaattgatgagaaagcacgtaaagcagctcaagcgaaaatcgctacaatgctgacagaattcaaaactcagccagctgaacaagttgtcgcgaaaaataaagttgcttttgaatcagcgggtgtatttactcgttcacaaggtttaaaacgtgcaattgagcgtgcagcatttagtgttcctgcgccaaaaccaggtatgtggtctgtaactatcgcgaacttaccaaatgagttagtggttgtggctgtttctaatgtaaattcagctgctgttaacgctatgcctgctgatcagttgcaacaattaaaacagctttaccgccaatctcgtggtcaacagatacttgaagattacagcgaatacttaaagtcacacgctaaaatcaaataa

SEQ ID NO: 51101 - DNA, 678 bp, Acinetobacter baumannii; identical to SEQ ID NO: 46058

SEQ ID NO: 51102 - DNA, 240 bp, Acinetobacter baumannii
ttgaaccaagctacctctggtgcagctgccaatgtcaacatccaattattgggtagcaacaatgcagtaattcctgtaattgcgaaaggtgcttctggtgcacaagataactcacaatgggtaaatgtttctgctggagggaatgccgatcttaattattatgctgaatattatgcaactggagcatctacagcaggtactgtaacgtcacaagtgaaatacacgattatttatcaataa

SEQ ID NO: 51103 - DNA, 702 bp, Acinetobacter baumannii
atgccaccagatatactttatttattccagtcaattatttattgtgatccaagcattccttatgaatataataaagattataaaaaactaatttactctaaattaaggaaaggcgtaaggcaaggtatgcctatttctccactccttgcttctttctatttaaatgattttgatgaatggttaattaagaagaaatacaagcatgtacgttatgctgatgacctaattttttttcttgactcagaaaagcaatgtaaagaagtctatagagaagtttctcaagagttacttaaattaaatttaactttacccacacttgaagaaaatacaaagactcaaattatttctcctaaagaaacagtcaattttttaggtttagatctgcgttatgaaaatgaaaaatataattggtatattccaccccatgtaattgaaaatgtaaaatataatttattacatctaactaatattcaaaataatctcaaaatgaaattaaatttctccaaaactataagtcgtatggaacaaattatttctggttatcaacattgttatagtgatgccgattctttaaacttaaaagatttcaataaaatactaattttagaaaagcaaaaagctattaatttactttttaaaaatttaggaattgatattagcacagtacattcacaatatttaaaatatttattagacaattaa

SEQ ID NO: 51104 - DNA, 228 bp, Acinetobacter baumannii
atgcatgatttttcaaaaccgcctcatgtgacgagtccggaagagactgcaaaaaaaagaagattgccagtttatattttaattattgttgggctttttcttctcgcacttgtggtttatatggttgctgatcacagcaaaacgccaaaagaggaagccgcttttcaacatgagaccataccacaagtcatcagtggtacttctgatttgaagacctatgaagggtaa

SEQ ID NO: 51105 - DNA, 384 bp, Acinetobacter baumannii
atgttctcttgcttttgtcagcaagatagccagatcaatgtcgatcgtggctggctcgaagatacctgcaagaatgtcattgcgctgccattctccaaattgcagttcgcgcttagctggataacgccacggaatgatgtcgtcgtgcacaacaatggtgacttctacagcgcggagaatctcgctctctccaggggaagccgaagtttccaaaaggtcgttgatcaaagctcgccgcgttgtttcatcaagccttacggtcaccgtaaccagcaaatcaatatcactgtgtggcttcaggccgccatccactgcggagccgtacaaatgtacggccagcaacgtcggttcgagatggcgctcgatgacgccaactacctctga

SEQ ID NO: 51106 - DNA, 327 bp, Acinetobacter baumannii
atggatttgctatttgaggacatgaataaggtcgatcaattcttgtctattgaaggggctgcagctcaggttgatttctattccgaaggtgcatatgcagttgttcagcttggtgatacttcagaaagaaatcagattgaagtgtatggattgcttttacatgaagctgttcatgtctggcaaaagattaaaaagctcatgggtgaacgagaaccgagctctgagtttgaagcttattcaattcaggcgatcgctcaggatctttttaagatgtatgaggaaagcgaggttaaaagtcatggggtggaaggggaaaaagccgactag

SEQ ID NO: 51107 - DNA, 588 bp, Acinetobacter baumannii; identical to SEQ ID NO: 46161

SEQ ID NO: 51108 - DNA, 324 bp, Acinetobacter baumannii
atgtctaatttcaaaaagcaccctgacggctacaagtcttatttgggccgtgatgataaaggtctttattccgtacgtattaagtgggctatctatgctgcaaacgctaacggctcagtactttacgaaattaaagatggcgttaaaaagccacttaatgttgagcaatttaaagctaaggaaccaaagattttcgcttctcttatgcaagtaatcgacttccaacgcagaaagcagctcgcaataaaactgcgtgaaacaaacatccctacttatgaccgcaaagcatataagcaaaaacgcggcttcaccggctctagatga

SEQ ID NO: 51109 - DNA, 213 bp, Acinetobacter baumannii
atgactcctgagcaacaacaggctttatttgataatactgcacgcgcaatgggtgatgctcttgatttcattaaatatcgccacattcgtaactgttacgcatgtcatccagcttatggcgaaggtgtggctaaggcgcttggtttgacagttgaaaatgctcaagcagctagagaaactgaccctgcacgtggtttaccaagttttatttaa

SEQ ID NO: 51110 - DNA, 342 bp, Acinetobacter baumannii
atggtcaaagatgaaaatgccaagctttaccatgaattgttaatggatgcgtgtgctgcccacttaattgaagactggaaaggtgtggtatttgccgaaatcgtagacggtaaaacggttgaatctgaaaagccctatacacctgagaatgcctcaaagctccttaatctgggtgatattggtatttcaatctggctattcattaaagaacaggctcagaagattcaggaagacgcagacgaggacaaggctttaattctgggaaagtcatcgatctctacaaataccaaaaaacgtatgcgtcgaaaacgccgcacgaaatcgaacaaatcaagttcttag

SEQ ID NO: 51111 - DNA, 192 bp, Acinetobacter baumannii
atgtttgggtatttagccgcattaaaccaagcttcttcttggaactctttatctaaagcaggtacattggtattcacactgcttaaaggaatggtcacatttacagatgagtttgctggtttagcattgtcaactttaattacaccttggatgtccgagaagttagcacttggggttgaaaaaccgaagtga

SEQ ID NO: 51112 - DNA, 162 bp, Acinetobacter baumannii
atgtctgctgaaactgtgcctgtacctggcaatgaagtgttgcctgcagggtcagttgctgttgcagtaaccgtatcgccatccaccaggttacctgggtttggtactgaccagctgccatctgtgcctgctaccactgttgcagtggtgccatcaggataa

SEQ ID NO: 51113 - DNA, 237 bp, Acinetobacter baumannii
atgccggctcctgatccatccagtttcaaaactaacaactcggaaagcagttctactgataatgaaaaaagaaattataaaaaacagtacgcaacgcgtaataaagtgagtgcctctagaacatcaaataaacgagtagtaagtccagcaaaggccaccgcagtcaaacctaaaactgcacctgcagccactgtcaataaatcaaaaagttcgccttttgaccctttaattaaataa

SEQ ID NO: 51114 - DNA, 162 bp, Acinetobacter baumannii; identical to SEQ ID NO: 49509

SEQ ID NO: 51115 - DNA, 180 bp, Acinetobacter baumannii
atgaacactgaatttgatcctatagagtttgagtttgatagctccgaccatgaagcccaatacaatgcatggtttaaagacaaagttgaggcatcacaagcagatcaacgacttggaattccacaagatcaagtggttgcacgtctcaaaaaacgtcgtgaggaacgtaatcagctctaa

SEQ ID NO: 51116 - DNA, 174 bp, Acinetobacter baumannii
atgcctaagttagctattcaaggtcacgatgttgaagaatttacaggtgttgttcgccgatatggagcaactgaggatgttaaacgaatggtcgaagcagctaataaaaggcctcagctcacacgtgctgatgttcattacgcttgtggcacttgtaacttaaaggtggtttaa

SEQ ID NO: 51117 - DNA, 1317 bp, Acinetobacter baumannii
atgaaaaaattaattttagctgcagcttgtgctgcggcttcagggactatttttgcaaattcttcagatacgacagaacaaagaattaatttgctagaaactgagctgcaaaaattaaaagcagaacttgctgctcagaaacaaactcaaaataatttacaggtcaaacaggttaagatcgaagagaacattgaaaaaactaaagcaacggtaacagaaaagccagttgctccttcatgggtcacttggacggataacgtcaaggtttacggtattgcccgtattgatgcagcggtcgattttaaatcatcgcctgattcgggtggtagaacgaccagcagcctgtaccgaacaccttttgaaagtgaaaaacgttcaaaccatgcacgctctgatgccatgattaatgcaagccgattaggcgtttattttaatagcccaaataaagcggttacagggaatatcgaggccgatttctttgatagttctaacatgggaacgggggatggtaaattccgcatccgtcatgcttttttcacttataaagactggacctttggccaaacatggtcactcatgtccaacatggaaacccgtacagaagctgttgattacacccaatttgtgggaacctcttatacgcgtactcctcaaattcgttatgactggaaaattgatgccaataatgatttaaaagtagctttggaatatacaggttcgagagtatcggcatttccaactttaacgggtcgctatacctttaaacaaggtcctttaacggcacttgctcaaggctttattaatgaaaaatccacagatgtcgcaactgccacggtgaagaaagtaagttggggtgctggaggcggcttaaaatatcaactcacgccacagcaatcggtacaagcaaattatcaatatattgtcggtgatcaaaaatttatgccgtataccacccaaagtgggttggcaaattcaacaagtttaaatgccgcgggtgatttctctttaaacgaagataaaacagatttggttatgaataagttgaatagcatcaatattggctattcatataaatttaatgagcaatggcgtgcaaacttatcggcttcaatgtttgattatgatgatgacacggcgtatgccaaactcaacccagatgctaataaacgtttaacggactacgcagctaacgtcttttattcaccaattgagcaaatggatattggtatggaatatcatcaaggcaaacgagaagtgtttgatggcagaaccgctgatgtatcacgtgtaaactttgtttcgatgtataaattttaa

SEQ ID NO: 51118 - DNA, 126 bp, Acinetobacter baumannii
atgagcatgaacaatcaggatattcatagtgtctttactcttagtgtaattatgctatttttgttacatggagttatcaatgctttgaaacttgtaattcaaagcactgaaggcaacacagtttaa

SEQ ID NO: 51119 - DNA, 2580 bp, Acinetobacter baumannii
atgcgatttgaaaaatttacgaaccgcttgcagcaagccctctcagatgctcaatccttagcgatgggtaaagaccatacagctatagcaggtattcatattttgagtactttattggaagagccgtccaatattagtttgttgcaacaagcaggtgcacggttacctgaacttaaacaaaagctagagcaggctttaaaagatgctccgactattgctaacccgacgggcgatgtcaatttaaacccagaagcagttaaagcactcaacttggcagatcgatacgcgcaaaaagctggcgatgaatttttgtcaactgactgggttttattgggcttggcagaaactggtgaaacaaaaaatattttaagtgccgtaggtgtaactcccgacagcttacgcaaagtaattgaaaatattcgaggtagtgacaaagtcatgagtaataatcacgaagaccaacgtgactcacttaataaatatacgattgatttaaccgagcgggctttatcggggaaacttgatccggtgattggacgtgatgatgagatccgccgtaccattcaggtcttgtcacgccgtactaaaaataacccagtactcatcggtgaacctggggtaggtaaaaccgctattgttgaaggtttggcacaacgtattgttaatggtgaagtaccagaaggcttaaagaataaacgtgttttatcgttagatttaggttcattgcttgcaggtgctaagtatcgtggtgagtttgaagaacgtttaaaagctgttttaaaagatttggcgaaacacgaaggcgaaatcatcttattcattgacgagctacatacgctcgttggtgctggtaaaggtgacggcgcgatggatgcaggtaatatgttaaaacctgcgttggctcgtggtgagttgcgctgtgtgggtgcaactaccttagatgaatatcgccaatacattgaaaaagacgcagccttggagcgtcgtttccaaaaagtgctggtcgatgaaccaagtgtagaagataccattgcgattttacgtggtctgaaagaaaagtatgcgactcaccatggcgtacagattttagattcagcgattattgctgcggcgaaaatgtctcatcgttatattacagatcgtcaattaccggacaaggcgattgacttgattgatgaggcagcttctcgtattaagatggaaatcgattctaagccagaagcacttgataaacttgaccgccgtttaatccagttgaaaatgcaattggaagcggtgaaaaaagatgaagacgcaggcagtaaggccgaagttactcatcttgaaaaacagattgctgaagtcgagaaagaatacaacgatctggaagaagtgtggaaagctgagaaaacattggtagaaggcactaaacaagctcaggttgaacttgataaagcacgtattgcttttgaaaaagctcagcgcgaaggcgatttggcagaagcagcacgtttgcaatatggtgtaattccagagttgcaaaaacaacttgaacaagatgaagttgctgaagaaaacgaagagccaaaactcattcgtacaaaagtaactgaaaatgaaattgccgaagtcgttagtgctgcaacaggtattccggttgctaaaatgatgcaaggcgagcgtgaaaaacttcttcatatggaagagtttttacatgaccgtgttgttgggcaagatgaagcagttgttgcggtatcgaatgcagttcgtcgttcacgtgccggtttgtctgacccgaatcgtcctagcggatcattcttgttcttaggaccaacaggtgtaggtaaaactgagttaactaaagctttagctaacttcttgtttgacagtgatgatgccatgattcgtatcgatatgagtgaattcatggagaaacattctgtcagccgtttagttggtgcgcctccgggttacgtaggttacgaagagggcggtgttttaaccgaagctgttcgccgtaaaccatatagcgtagtgttgtttgatgaggttgaaaaagcgcatccagatgtcttcaatatcttgctacaagtgttagacgatggacgcttaaccgactcacaaggtcgtgtagtggactttaaaaacacggttattgtgatgacatcgaacttgggttcacaagatgtacgtgaacttggtgaaggtgcaactgatgatgaagtgcgtactattgtaatgaatgcggtaagtcagcatttccgtccggagtttattaaccggattgatgagttggtgattttccattcactcaaaaaagcacagattcgtggcattgccgatattcagttggaccgcttacgctcacgacttgttgatcgtgatatgagtttaactgtagatgacagtgcatttgacttattgattgacgctggttttgatcctgtatacggagcgcgtccattgaaacgtgcaattcaacaacaggttgaaaatacactagctcaaaaaatcttgtcaggtgactttgttgcgggtgataccattttagttaaaggcgaaaatggtcacttagtgtttgataagctgaaactcagctaa

SEQ ID NO: 51120 - DNA, 537 bp, Acinetobacter baumannii
ttggctactattgccaaagatgatgatcgtccgcgtttgattgttctgcatcaagtgggtagtcatggacctgcatattacaagcgtgcacctgaggcatatcaaccttttaaaccgacttgtgatactaatgcgatacagggctgttcgcaaactgaattgctaaatagttatgataatacaattgtatatacagaccatgtattaagccaaatgattaatactctaaaagaaatatcaaagtatcagacaggtttatggtatttatctgatcatggcgaatcaaccggagaacatggtttatatttacatggttcaccttatgcaatcgcaccgagccaacaaacacatgtaccaatgattatgtggttctctgaaagttggaaacaacataatcttgctcaagtgaattgtttaagccaaaaaactaaacaaaagttaagtcaggataatttattcccaagtttgttaagtttgctggatgtaaaaactcaggtagtaaataacaaacttgatatgttgagccaatgtaaataa

SEQ ID NO: 51121 - DNA, 963 bp, Acinetobacter baumannii
atgaaaaactatcaaaaagtactaggagtacttactgttatcgcagcaatgcctttaatggctcaaactactataaaagttacaacatttaatgatgaagataatgagaacatgaatacatgttctttacgtgaagctattacagctgcagaaatgagaaaatcttatggagggtgtgaggttccagcaattgatcaaaattatacaattcaacttgatgctggtacctataccttaaataaagagttaacacctaaaattgctttaaatattattggaaaagaggcgacagattgggagcgtaaaggagttttaactaatgactatcctgctcaaaaacctcttcaaactcgtataaatgctggtggaaaatcacgaatttttaatacagctgtttaccaacaatcgttaactttaaccaatatcattttggaaaatggtaaaagtgctgagcaaggtggagcaatttacgctggtgctgatgtaactttaaaaaatagccagatcttaaactctcaagcctctaaaggcggggcaatttatcttggcggaagtactgctagtttaacaatgaatcattcattagttcaaggtaatggtaaggcttcgactgaaggtagtattttggcaatgagttgcatgtttaataattcatacagtggacgtatcttttcatttgattcaaatagttttattgataatggtggaataaactctataagtatttttgatttttgcggtagtcctacggcgaaatttactaataatacaattgctaaaaatttagcgagtcttactaatggtaatattattaaatttactggagatgctgatccattaaaaaatcaaactagtaagttaagctcatctagtagtttaacattgcaaaataatacaatcgttgagaactctgcatacaccacatttttatacgataaatggctttgttgcacaaagatttaa

SEQ ID NO: 51122 - DNA, 597 bp, Acinetobacter baumannii
atgatcgtgaagaatcaatattcaaagataattaaaatcggtttatatctatttataactttagctatcttagttctagttacatttatttggtttaaacggatacgtgttattttcgcccatcacctttcattgttacattgtgatggtcaagtctgtgtagatgatccaaagacacagcctcttgcaaagacactttataatcaggcattaaaagagacccaaaataaagtaggtgcttttcatcaacaacccactatggttttttgctcaactccacaatgtgcaaatacctttggtatggaaaaagcagccgctaaagcgattggtaatttggggttattggttgcaccgcgaggctggaaagatttctatatcactcatgagcttattcatcatcgacaagcagaagaatggggaaatatagcaatgctaactaaacctaaatggctggtagaaggcatggcttatagcttaagtgatgacccacgacctactttatcggttccttttcaacaatggcgagctcaattcaagctttggcatcaacaaaatcctgattcaaatatttggcttaccacagaaaaaattaaataa

SEQ ID NO: 51123 - DNA, 2706 bp, Acinetobacter baumannii
  misc_feature (686)..(695): n is a, c, g, or t
atgatcaatacatcgccattgctgaactatgtctcaagtcatcatgatattaaagccattaatcagtggcgaacggatgtagaaaagcaattgcaagattcatacgaaaatgggcaatctattcgagaaatcattaaagctcgttcagacttagtagatgaagcgctcgtctttttatggaaacatgcagaacttgaccagtcaaaactaggtctttttgcagtaggtggttacgggcgccgtgaaatgctgccctattctgatgtagatatcatgattttgtctgaagatgaaatcagtgaagaaaatgaaaaacgtatctctacatttatttcctctttatgggatgtaggaaatttcaaaccaggtattagtgttcgtaccattcaaagctgtgttgaacaagccgctaccgatttaactgttgccactacattaattgaggcgcgtttaatcacgggtaatacgcaacttgcgaaatggcctcgccgtattgtttcacagacctggacagacaaaacattttatgacgcaaaaatggccgaacaagccaagcgttaccaccaacacaacaatactgaaagtaatttagaacctgacattaaaaatgcaccgggcggtattcgtgacattaatcaaattggttggattgccaaacgccacttccgagtgcaccgtatctatgnnnnnnnnnncaaacgccacttccgagtgaaccgtatctatgacttagtgcatttaggtttcatttcagagttcgaattggctgttttagaagaagctgaaagctttctttgggaaattcgacatcatttacaccgtttagccaaacgtgatgaaaaccgtttactctttgaccatcaaagagaaattgctgctaaatttggttacgttcgtcaagaaggccaacctgtaaattacggcgttgagcaattcatgaaacgctactaccgtacggcgcagcaggtttcaacactcaatgaaatgttgctggcgtattttagtgagtcagtcattactcctcgactccccaactatgaacgcaaaattgaagttgttaacgatcactttaaaattgtcgataataaacttgccgtacagcatcacaaaatattcgcagagcatccaagcgcgattttagagttgttctatattttagccaatcgaccagatattgaaggtattcgcgctcggactttacgcttacttattcttgctgcgaaacgaattaaccaaagttatcgtgataatccagagcatcaagcactatttatgtcgattattcgctcaccatatcgactatacgacaccttggtcgcgatgaaacgttatggtgtgttaggaaactatattcctgcttttggccaaattatgggtcttatgcaatatgacctattccatatctatacggttgatgctcatacattattattgctgcgtaatttaaatcgttttagagaacctgaatttgccaaagaattccctgtggtaagttcggttttccaacgtcttgctcgtcaagatattgtctttattgctgctttattccacgacattgcaaaaggccgtggtggtgaccatagtgaacttggcgcagaagacgcgattgagtttggacgtgcacatggctttactgagcgtgaatgcaaattaattgcatggcttattcaaaaccatttgctcatgtcacttacagctcagaaaaaagatatttctgatccagatgtcgtgaaagattttgcagaaaaacttggcgacatggagcatcttgattatctctatactttaacagttgcagatattaacgccacaaatccaaaactttggaacacatggcgcgcttctctcatgcgtcagctttatacgcatgctcgtgatgtaatccgtaccggtttaggtcgtcctgttgattatcaaatgctaattgaagacaccaaatttgcagcaagtgaattactggtaaataactttgcattggctgatgtcgaaaaagtatggcaagaacttggtgatgaatacttcattaaagagtcggcagatgaaattgcatggcatacacaagcaattttaaaacatggtgataatccagagccattagtcctcttgcgtgctcaccgtaaagcagctcaagatgcggtgcaaatctttatttatacacgtgaccaacctaacctgtttgctactactgttgctgttttagaccgcatgaacctagacgttcaggacgcaaaaattatcacagcaagtaccgcatttagcttagacacttatgttgtactcgatcgtttcggtacattgcttaccgacccagagcgtgaagaaaccgttaaaaatgcattagtgaaggcgcttagccaaccagaccaatacccgggactcatgcaacgccgtattccgcgtcaattacgtcacttcgatatcgaaaatacagtcgatgtaacattgaatgaagccttacagcaaaatatggtcgaaatttcaacactcgatcatcctggcctacttgcacgcgtgggtggtttatttatgatgcaaggtttagacatccattcagcccgaattgcaactttaggtgaacgtgccgaagatattttctttgtcaccaaaaaagatgggaaaccgctgaataacgaagaggtcaaactcttctcggaaaaactgaaagcagcattagatgaagcatctaatcaaatttgtcagcactga

SEQ ID NO: 51124 - DNA, 633 bp, Acinetobacter baumannii; identical to SEQ ID NO: 50776

SEQ ID NO: 51125 - DNA, 1491 bp, Acinetobacter baumannii; identical to SEQ ID NO: 46679

SEQ ID NO: 51126 - DNA, 1530 bp, Acinetobacter baumannii; identical to SEQ ID NO: 50773

SEQ ID NO: 51127 - DNA, 876 bp, Acinetobacter baumannii; identical to SEQ ID NO: 45932

SEQ ID NO: 51128 - DNA, 351 bp, Acinetobacter baumannii; identical to SEQ ID NO: 49347

SEQ ID NO: 51129 - DNA, 966 bp, Acinetobacter baumannii; identical to SEQ ID NO: 51057

SEQ ID NO: 51130 - DNA, 516 bp, Acinetobacter baumannii
atggctttaaaagtcggaattattaaaagctcggacgtatcaaaatggtgtgaatacaagggggctgatggcgaagtacaggcagagttcaaagtccgtggtatcgcttataagccttttcaggtagctattgaacgagcaggaaatcagatctcgtctaaaggctatgatgtgatggtcaaagatgaagatgccaagctttatcacgagttgttaatggatgcatgtgctgcccatttaattgaagactggaaaggtgtggtatttgccgaaatcgtagacggtaaaactgttgagtctgaaaagccatatacccctgagaatgcctcaaagcttcttaatcttggtgatattggtatttcgatctggctatttattaaagaacaggcccagaagattcaggaagaagccgataaggataaggctttaattctgggaaagtcatcgagctctataagtaccaaaagacctatgcgtcaaaaacgccgcacgaaatcgaacaaatcaagttcttag

SEQ ID NO: 51131 - DNA, 516 bp, Acinetobacter baumannii
atggctttaaaagtcggaattattaaaagctcggatgtatcaaaatggtgtgaatacaagggttctgatggcgaggtacaggcagagttcaaagtccgtggtatcgcttataagccttttcaggtagcaattgaacgagcaggtaaccagatttcatccaaaggctatgatgtgatggtcaaagatgaaaatgccaagctttaccatgaattgttaatggatgcgtgtgctgcccacttaattgaagactggaaaggtgtggtatttgccgaaatcgtagacggtaaaacggttgaatctgaaaagccctatacacctgagaatgcctcaaagctccttaatctgggtgatattggtatttcaatctggctattcattaaagaacaggctcagaagattcaggaagacgcagacgaggacaaggctttaattctgggaaagtcatcgatctctacaaataccaaaaaacgtatgcgtcgaaaacgccgcacgaaatcgaacaaatcaagttcttag

SEQ ID NO: 51132 - DNA, 1149 bp, Acinetobacter baumannii; identical to SEQ ID NO: 51058

SEQ ID NO: 51133 - DNA, 1179 bp, Acinetobacter baumannii; identical to SEQ ID NO: 51037

SEQ ID NO: 51134 - DNA, 1098 bp, Acinetobacter baumannii; identical to SEQ ID NO: 46069

SEQ ID NO: 51135 - DNA, 156 bp, Acinetobacter baumannii
atgaatagtggtttacgaccaaagcgatctgaaaaatatccaccaattggagcaccaaagaaaattccaatgagtgaggctgcaccaattaagccttgccatgtagttgataaatgcaaatcggctgtaatagagggcattaatgcacctaaataa

SEQ ID NO: 51136 - DNA, 1293 bp, Acinetobacter baumannii
atgacaaatatgatcaataaagcccaagggttgggtttatcgctgatcacaaaactagctggaagcgatgtacttgatcaactcaaactacgtaaatttcttgaaaggtctctttaccaaggttcaaaagctggttttagagcattaagtcagactcagaaagcatttaaacctaagcaaattccccaacaacgcctgcgtcaacagaagaaaaacctatttgatttaagcctaactgaagaacaacaaatgacttcagaggcaatgtctcaatttgctcaagaagttttattgggattagctcatgatgctgatcagacagctcaatttccagaaagcctttggcaatatgtagaagatttaggattaaactattacgctcttccagaagcactaggtggtgtcgccgctgaacaaaatattgtaagtaacttattgattgctgaaaaactagctgaaggtgattttagtcttacagcagggctcttaagtacgtttagtgttattaataccattacacgttggggttctactgaagttcagtcaatgtatttaccttgctttgcagaagactccgacattaccgccactttcgctgtacaagaagctactccagcatttaacccttatgttttaaaaacaaaagcttctcttgaaaatgatcaatattttatagagggtgaaaaaacattagtcattttaggagatttggctgatgtgttcttggtgagtgcggactttaatggcaagccggatgtatttgtagtacaagctggcgataccatttctattaaaagtacccctgctatgggcctcaaagcaacagagacagctactttaaaattcagccatacacccgctctacgactaggtgcaacagattttgattacaccgcctttttagatttaggcaacttaatgtggtgtgcaatggcagtaggaacctgtgaagctgtaaaagcatattgtattaaatatgccaatgagcgaacggctttcggagaaccaatttcacatcgtcaaagtgtcgcattcatgattgcagatatggcaattgaaattgatgctatgcgcatgctaattctaaatgctgcaagtcttgccgaagcaggtaaaccattccatcgtgaagcatatttagctcgcattctttgcgcagaaaaatccatgaaaataggaacagatggcgtacaaattttaggtggtcatgggtttacaaaagaacaccctgttgaacgttggtatcgtgatttacgtgcaaccgcaattttacattctggcctacatgcttaa

SEQ ID NO: 51137 - DNA, 1089 bp, Acinetobacter baumannii; identical to SEQ ID NO: 46036

SEQ ID NO: 51138 - DNA, 1203 bp, Acinetobacter baumannii; identical to SEQ ID NO: 46194

SEQ ID NO: 51139 - DNA, 681 bp, Acinetobacter baumannii
atgccatttcaaagtttaccaaactggttccaacttggcgccttcttactggcaataaatgccggaatgattaatgtattagggcttatcacccttttacatcaatcggtgtcgcatatgactggtaatgtcagtatgctagccatgagtttggtaaactggcagtttgaacacatcatatatttagtactagttatattatgttatgtatgtggatcattttacagtggttttattctaggcaatagccatttcaaattaggccgccggtatggccttcctttaagtctagtttcactatttatttttctctgttggttactgctgccttattttccaaaatatggactattatgggcttgtgtcgccatggggctacaaaatgcaatggtaagtcactataaaggaaccattattaggactactcacttatcgggtgtcttaacagatcttgggcttgcacttggttatatagcacgaggtttaaaagtagagaatcgccgcattattttgcatctacttatttttataggttttctatctggcggtataattgctgctttagttcacccttatttaaaattgcaatcatttttgcttccagcaattttaagcttaactctcagtatttcgtattgggcagtttactttcatagttcttcctcttcaaattcggattaa

SEQ ID NO: 51140 - DNA, 306 bp, Acinetobacter baumannii
atgcttcctccaacattaagcggtgatgctacaatttttccatacgcaacacttgatcttgtgcataacaatcaaagcttaggaaaaacacgtttggaaaagggaaaaggcgtatggtcaacagaaaactctaaggagcctgtaggtcagtgtaaggtaactctacctaaacctgatttatcaactattgaagcaactttaactatgggttacaccgcaaaatttgatggcggtactgttcgaccaaacccacctcacactcgcttctcttttactttaaattcagcatcaagacgtaaatcatga

SEQ ID NO: 51141 - DNA, 465 bp, Acinetobacter baumannii
atgaatttggattttacaactatcgaaaaacaggccaaattgctaaaagaagagcaagagaaactagaacagcaagatcatgattttcagttagctttagacaagcatagagaatcattaaaaaatttatttaaagaactttttcatgatcgagaaattaaaacagaaaatggaggacagttttgtgtagtatttggtgattttaaaatatctctactcattgaaacagccaaattcgagaatggtgttcctgttaaattaaattccgttaatcctattattgttaaatttaaaaaggataagcccgttgcaaaagcccaattttctgatgcaacccaatatcttgatagtggttttgaaacaccccactatcagtactattacaaacacgctgataaaacacaattagttcaattttcggagttacctgtattttttcaagcaatccttgatgcagaagtctga

SEQ ID NO: 51142 - DNA, 1224 bp, Acinetobacter baumannii; identical to SEQ ID NO: 45777

SEQ ID NO: 51143 - DNA, 153 bp, Acinetobacter baumannii
atgcctactcaaaaacctagaatcgccttaactgttcctgatgaaattaatcaaactttagatcgtttgtacgaactcactggtacgcctaaatcgaagcttatcgtagagatgttggagcaatatgttcctattcttgagcaagttttttag

SEQ ID NO: 51144 - DNA, 774 bp, Acinetobacter baumannii
atgaataattcaagtcatgaaatgagtgagtatataactaaagtcccccaagttacccttctattctggattactaaaatcttcgcaactacttttggtgaaactggcggagatagtttttcaatgtcattgaaacttgggtatttaactagtacttttatttttgccatagtttttattatcttattgatctgtcaaattaaggcaaaaagttataaaccatatttatattggtttaccattattgcgagtacaactgttggtacaacattagcagactttgtcactcgatctttaggtattggttatagtggaggaagtagcttactcctcggcttagtcatcttctcattattgggttggtataaagttgaaggcagcgtctcccctcataccgttaataaacctaaatcagaagtcttttattggttaacaattacctttagccaaactttgggtacagctcttggtgactggtcagcagatacgattggattaggctatagtggcgggattgctcttttctcagcactcattttattgatggtgtttttgtataaattcacttctgtttcacgaacatttttattctggagcacttttattttaactcgtcctttgggtgctgtagttggagactttctagataagcccctttccgctggaggtttagacttaagccgttttgcagcatcaggagtaatattagttgctattttaatatgtatttattttagtaaaaataatcagttaggtaatgtaaaaaatgcataa

SEQ ID NO: 51145 - DNA, 897 bp, Acinetobacter baumannii
atgaatttagaagtccgttgggtagaggatctcctcacattagaacgtgaacgttcaatctcaaaagcagcagagaaaagatttattagccagtctgcatttactcgaagaattcaacaaattgaagaaatgattggtgctgaagtcattattaggaacaacaaaaacaacatcgaatttacagacattggtcgaattttattagtgatgtctaaaaatattgaaaaacaggtagaggagaccgcaaaactcattaaaaatattaaaaatgaaactgaatcgaccattcgtttctgcgttgttcattctttagcttctggatttttaactacttttttaaagaaatttcctacacttattcgtgatttaaaaattgaaattgtcgcaacgaatagtggagaaggcctgtctttgttaaaagaaggtgcttgtgactttatgatttgctatgcagataaaagcaatattagaaaggttggggatgatattttaagtggtatcaaaattgctgaaacggttattgtaccggtttctgcaactgaacccgaccatagcccgaaacatacaatacaaagtaactttgctctgctagcgtatagtaaacacgcgtacttaagaaaattggtagatcaactgattgaaggtaagcttgtatataaaacgttatatgaaacagataatgccaccaatttaaaagagctggttttacaaggtctaggggtggcttggattccaaaaattaatgttgaagaagatcttgcagccggaaaattagtcattttagaccaacaagaatattgccttgctcaagatatttatatcttcaaaaataatttgagtgataataagtcggtacagaaaatatggaatggttttaaaggccagcaagacctataa

SEQ ID NO: 51146 - DNA, 315 bp, Acinetobacter baumannii
  misc_feature (289)..(298): n is a, c, g, or t
ttgtttgatctagacagtagattattaaatattttttatcatatttatcggttcaaaagtgtttcaatggctgcagatgccattggtttgacacagccgagcgttagtaatggtctaaacaaaatccgccaacattttaatgatcctttgtttattcgagtcggtaatgaaatgattccgactgaactggcaaagcaaatttttccactcattagtgaagttattgataaggttgaaagtattaataattttaatgtgaactttgaccccttgacctcagatcagttgnnnnnnnnnngtttacgattgcgatga

SEQ ID NO: 51147 - DNA, 489 bp, Acinetobacter baumannii
atgactgatgtgtctcatttggttttgttgccgcaattaaccaattatttaaaagtaaaagcacctttgattcgtttaaatattaggcctattactccagaaactagctatcaaatggcaaacggcgaaattgatctagccataggttttttaccgcaattagaagaaggtttttatcagcagaagttttttcggcaacactatgtcgtaattagctcaaaaagccatccacgtttagacccaaataatttcactttagaggattatatgcgtgaatctcacatcgatattgatgcgggtattgggcattatcacattaaaaatgagctgcaaaataaagggctggatcgaaatattttaattcgcttaccaagttatttaggggtgggattggtcgttcaggaaacagatgctattgccactgtgccatattatttaagtcctgtctcttatacacatctgacgctgccgacgactccttacgtgtag

SEQ ID NO: 51148 - DNA, 345 bp, Acinetobacter baumannii
  misc_feature (289)..(298): n is a, c, g, or t
atgtcaaaaaaatttgaagatttcgataatccaagacaaaaggcattactggggatgaagaatagtattcctacagaacagtgggaagaaaatctaaaatttctcaaacaattaagagcgagaattgctgaattaccagtatgtaaacatccggcgatcgaagttttaaataatggattgcttgataaattcactttaacaagaattcatttagaatatcgtcatgcgattgttcagatctttactgatgccttattaatggcccagttccagacaaaacaattggagnnnnnnnnnngcctaaactccattctggagctaaaatgtttccacgtgttttattaa

SEQ ID NO: 51149 - DNA, 1338 bp, Acinetobacter baumannii; identical to SEQ ID NO: 50817

SEQ ID NO: 51150 - DNA, 1347 bp, Acinetobacter baumannii
atgtcttcaaatattaatttagatgcaaaaaaagcgactgaaattaaattattcagtttttcaaccccagctatgcgtgctttccacatgacttggctcgcgttctttgtctgcttcttcgcatggtttgcttgcgctccattaatgcccgttattaaaggtgagttcggcttaaccaaagatcaaattgccaatattaatattgccgccgttgcaattacaattttagtgcggcttgctgtcggaccactttgtgataaatatggtccgcgtattacttacaccacccttctcttacttggcagtattcctgtatttggtgttgccgctgccaacagctatgaatcttttcttttcttccgtttactcatcggtgcaattggcgcaagctttgtcattacgcaatatcataccagtatcatgtttgcaccaaatgtcgtaggcacagcaaatgcagctgctgcgggttggggtaatgctggcggtggtgcaacacaagctctaatgcctttattactcggtgcaattgtaatgttcggtgtcgagcaaactatgggttggcgcgttgcattaatcgtaccaggcgtaatgatggtaattgttggggttctttactggaaacttacccaagattgtcctcaaggaaactttaaagaagttcgtgcacaaggtattgaggtgggtagcggtaaaaagggtggcatggcaatcttaatgcaagcggctcgtaactaccgtgtctggattttattcctcgcttatggtgcttgctttggtattgaaattttcatccataatgttgcggcaatgtactatgttgaccaattcaaaatggatttaaaaacagcagggttaaccgcaggtatatttggtcttcttgccttatttgcacgtgcattaggtggtattatttccgataaagtcgcacttaaaaaaggtttagacggacgtactaaagtgcttgtactgatgattttaggcgaaggtttattcttaatactcttctctcaaatgaacgtcgtagctcttgcaattatttccatgacagtttttgcattgtttacccatatggcttgcggagcaacatatgcactagtcccttttattgaccgaaatgcattaggcggcgtcgcaggtattattggcgcaggtggaaatgtgggcgcagtagcagctggtttcttactaaaaggcgtacttgatattcaaacttgtctatttattttaggtggactggttatggttgcaggctgtagtgtaattttgattcgcttcacaaccgagcacaaagaaaaagaaaaagtactttttgaacaggctctacttgaacgcaattccgcagcctaa

SEQ ID NO: 51151 - DNA, 855 bp, Acinetobacter baumannii
atggctacttatggtcgccaagcgatcagttttgttcgaggccgaggggcgtatctttatacacaagatggtacagaatatttagatgcactcactggtattgctgtatgtggtttagggcactctcatccagctattgcagaagccattgcagagcaagcagctacactcgtgcatacgagtaatttgtttgaaattccttggcaaactgcggctgctcaaaagcttgctgaagtttcaggtatggaagaaattttcttttcaaacagtggcgccgagtcaaatgaaggagcaattaaaattgctcgtaaatttggtactcaacaaggtataagcttgccaaagattattgttgctgagcagtcctttcatggtcgtactttggcgacactttctgcaacaggtaacaagaaagtacaagacggttttgcacctttagtggaaggctttattcgagtgccatttggtgatattgaagcgattcaagaggctgccttacagcatccagatatcgttgctattttaattgaaccaatccaaggtgaaggtggtattaatactgctccacaaggatttagctatttagaagaagttcgccaaatttgtaaccagcataactggttaatgatgctagatgaaattcaaactggtaatggtcgtactggtaaatactttgcgtatcaacatacgaatattattccggatgttttgaccacagcaaaaggtttgggtaatggttttccggtgggtgctgtaatgactcaaggtaaagcagtaggcttgttagggcctggcagtcatggttctacttatggtggcacagttagaagaagttgctcgtgctggtcacggtaa

SEQ ID NO: 51152 - DNA, 927 bp, Acinetobacter baumannii; identical to SEQ ID NO: 46217

SEQ ID NO: 51153 - DNA, 522 bp, Acinetobacter baumannii; identical to SEQ ID NO: 46238

SEQ ID NO: 51154 - DNA, 759 bp, Acinetobacter baumannii; identical to SEQ ID NO: 45897

SEQ ID NO: 51155 - DNA, 951 bp, Acinetobacter baumannii
atgaaaaaaataggtatagttactgttggtgcagtgacattatgttgggctatgtatgaggtatcttctgataataccaatacagtaacgcataatgaggctagccaaaaagtcacatttaaaaacttttcatcaactgcaaagaatgaaaaattagcgcctcaaatacttttggctcaaacgaactctcttaattctgccccagtttgccaatacaattttgacgcgactcaagaagattatgatctatttaatacccaatatcctgatcgaccacctacaatgagatttcctctaattaatgggcaaaaatttggctttaaagtagagcctgtcactgaagacaagtatggttatttagtttatacagcaaaaagtaaagtaaaaatgaattcaaccagttatgagggggatttcttattacccaataaaggcattattgcttttgaaatgcaacttaaagtacccacactttcttcaagcacttcttcttattcagccgagattagttttaatggtataactgataataactatacaattagatcaaattatcattttgatattggtgttcatgattttgaatttggtgaaaatcctccccgtttatatcatagcgtatcatctgagatgggagattatcagttttttgataattactttaaagacaaaaaaatgacggataacacaaatgaatatcaacgcctaggtgtttatattaatcaggatacgaaccaagtcggatttatttctaatggtgttgatgaaggatatcaatttaaactaccgggtgcactacagaaaatagcttttacagttgagggaattgcatatattgaatctacaaatttatttggatatgaattttctaatgaactgattacagaccgtaatgcgctaaagtttaactatcctcagggcacaacagatatgtgtggtaatgctatttaa

SEQ ID NO: 51156 - DNA, 972 bp, Acinetobacter baumannii
atggagaaaccagcaacaattgtaggttttaaaattggccacgccttgattgatgaacttgatgtcatggcgatgactaaagcacaacaagcttggcgtaaaatcattgctcgtatgcgctttaaacaagctggtttgctcaatggtattgatgtggcaacaacaccagaaggctttaaattcacttatgagcaatttgtaaaagaagctaattcatcccctgagaaacgggcactttacggcatgattcaggcatcgacttatgataacgaagccaatctgccagacgattatatttcatcactgtatgaatcctacccacctcaattgatatcagcctatttgaaagggcagttcgtcaacttaactagtggagcggtttatccagactttgaccgggttttaaatcatacggatgaggaaattaagcaaggtgagcctttactcattggaatggactttaacgtacttaaaatggctgctgtggtttatgtcattagagaaggtaagccgagagctttagatgaactggttggagtaagagatacaccaactatgtgttatctgatcaaagagcgttttcctgatcatgatattaccgtgataccagacgcttcagggcaagcaacttcatcaaagggatttagcgaatccgatcatgcaattttaaagaaaaatggctttaaggttgaagtgaatggtgtgaacccgggcattaaagaccgaatcaatgcagttaatgcccagatcctgaatgccgatggggaaagacacctcaaagtaaacacaaataaatgtccaaacttcacggctactttagaacagcaagtctatgatgattttggaatgccagataaaagcgctggtttagaccacgttggcgatgctggtggatatccaatagccaagagattcccgatcatcattcagaaagtatttaaacggcgcacaatcgctggtttttcccgttaa

SEQ ID NO: 51157 - DNA, 1008 bp, Acinetobacter baumannii
atgattcatttactaaatgcccttgatgtagtgaattgggattcagtaatgatcgataaccagaaaaagctttgcttagtggttatacgtgaatttaagtctgagcgcggtgctgatggatttagtaaaaccgaacaagagcaatatcgtgtacttcgtttagagcaagagggtaatggggaatatatttattccgttcaggtgtatacaaagggtgaaaagggtaactgggttggcggagataagaagtttccaacagattacaacgggaatttctggacctatataccttttacatttgtaggtgcaattgataattcagaagagattaaaaagcctccattacttcctttggccaatctcaatttagcccattatcgtgacagtgcggactttcaagagtccgttttttatatggggcaacctcaatactttgcgaagggtgttacatgggaatggtacgaccaagccaagaaacgtggcatctacattggtgcgaaagtacttttgcctttacctgaaaatggtggtctaggtattgttcaagctgatcctaatacgcttgcccgggaagccatgaaagacaagtgggaaaaaatgaaagaaatgggtgctcgacttattgaaaaaggttccgcagctaaaaagactgctactgaatctaacagtgatgatgccgtgcagcattccgttctttcactttgtgttgtgaatatgaatgaagctttttctatggctttacgttgggctgctaaatttgtagtacccaatgttgatgttctgactaaagatgaactgatgttcgaaattagtcaggaatttaacaagcaaggttatttagctgagttagctagacagttatttgaagcagctctacaaggccgatcttcatttaaatcgtggtgggaatacaaccaaacaggtatgttccctaaacaaaaatatgaagaagagctacagaatgttgaagcagagcaagatgggactttaaatcaaaaggtagagtga

SEQ ID NO: 51158 - DNA, 1005 bp, Acinetobacter baumannii
atgattcatttattgaatgctgttgatgtaattaactgggattcaatgatggttgggaaccagaaaaaactatgtttagtagttatccgagaggtagtttctacccgtggaagtgatggtttcagtaaagaggatcgtgagcagttccgtgttttgcgtttagagccagttgacaatggagaatatgcttattctgttcagatatataccaaaaatgacaagggcgaatatgaaggagggccaaaaaagtttccgactgatcacagtggcaaaacttggtcttatattccatttacttttgtcggtgcggtagataattctgaagaaattaagaaacctccattactcgcattagctaatctaaatttagctcattatcgtgacagtgcggactttcaagagtccgttttttatatggggcaacctcaatactatgttagcggtgtgaactggcaatggttcgatgaggcaaaagctcgaggcatttacgttggagcgaaggtacttttgcctttgcctgaaaatggcaaaatcggcattgaacaagcaaaccctaacactttgtcccgtgaagcaatgaaagataagtggaatcaaatgaaagaattaggcgcacgcttaattgaaaagggttctgctgctaaaacagccacagaagctaacaatgatgatgctgttcagcattccgttttatcgctatgtgtcgtgaacatgaatgaagccttgtctatggctttgcgatggtgtgccaaatacgtaatagctaatgttgatgctcttaataaagatgacctgatgttcgaaatcagtcaagaatttaacaaacagggttatttagctgagttagctcgacagttatttgaagcagctctacaaggccgatcttcatttaaatcatggtgggaatacaaccaaacaggtatgttccctaaacaaaaatatgaagaagaacttcagaatgttgaagcagagcaagatgggactttaaatcaaaaggtagagtga

SEQ ID NO: 51159 - DNA, 864 bp, Acinetobacter baumannii
atgcctaaaaaatttgaggactttaataatcctaggaaaaaagcacttgcagggatgaaacaaagcatttcagctgaactttgggacaaaaatcttaattttttaactcaattaagagccaagattgcgaaacatccagtatctcatcatcctgcaatagaaactttaaataacggtgaaattaataaagaaaacttaaagcgtattcatttagagtatcgccatgcaatcgtacaaacatttacagacgctttattaatggctcaataccagacaaagcagttagaacctaggttgcatgcaggtgcaaagatgtttccgcgttgtcttttgagtcttaatatatttgatgagtttgggtttcgacctgggaccgacaaagacggttattatcaaggtaacccagaatatgcacattatcctttatttgaagatgtccttgatgattttggagtgacggaggaagagcgccggagttatcaaccaacagaaattgcacatcagctgagagagtttctagaaaattcctataaagactataaagccgtttctgctttattagctgtagctgaagaagaagttattttgtacagtccacctttacgaaaagcaaccagtgctgtaggtatagcggtggagggtggtggctattaccatgtgcatggagtatctgaagatgaaactgctgaggcagcagatgacgatcatgaagaagatctatggtttattttaatgcaagcttgtacagaagaagactacacttatttagaaaacctatgcctcgaatattgtgatttatgggaaaagttttgggatgttcaaatagaaagctcaaaatcaatcctgaaacaaaatttagcttaa

SEQ ID NO: 51160 - DNA, 450 bp, Acinetobacter baumannii
  misc_feature (427)..(436): n is a, c, g, or t
gtggcagaaaaagatgcttttccaacagatatttacattattgaaggtttcattgacttaattcaaaagggctatcaggttgaattaattgatggcgtagaagacttatctcgtgctttagagaaagatgttgctgtagtagtactttcccatgtgaattaccgcactggttatttttatgatatggcaactattaatgaacaaattcactctaaagatgctttggtgatttgggatttatgccactcagtcggtgcggttcctatgcaccttaatcaaactgatagtgattttgcgattggttgtacctataaatatttaaatggtggccctggttctcctgcattgctctgggtcaatgaaaagcatcgtgatcagttctggcagcctttatctggttggtggagtcataaaaaaccatttgatnnnnnnnnnngcacagcattatga

SEQ ID NO: 51161 - DNA, 423 bp, Acinetobacter baumannii
ttggatggaagaacatctaagctttgtgctcatttagacggtactgtctggaggattgatgatccggcaaaacgtgtaccgccgttgcatcctaattgtcgcagcgaactagtaccagttaaaaaagatggtcaacttgttggcgaacggccatttgtaatggacgaacgtagagttaaagacatccccaaagaagagcgaagccagttaataggacagttagatgcaaacaccacattcaaagagttctttaagaagacagacgatttctttcaaagagaatggttaggaccaaagcgctacaagctttataaagaaggaaagtttgattttgaaaagttcttcgatcctgaaggacgattgtacacattagaccaacttcgtaagttggatgagcaaacctttaaggagttgggcttatga

SEQ ID NO: 51162 - DNA, 225 bp, Acinetobacter baumannii; identical to SEQ ID NO: 50257

SEQ ID NO: 51163 - DNA, 399 bp, Acinetobacter baumannii
atgtacaagttaaagctaaatcctcagaccagcggctatggcgtaacaccgggtgatgatgtgaaacgtcagcagatggatggcggtcgtggtcgctattacatcgatgtaaaacgtaatagccacattgttgatgtgaactggaatttaagtaaaaccgatttcaataaaatgatggcgttctggcgggtctaccagaataaaccagcctcattttatgcggatctggtgattgatcagggaacacgtcagcaatacctgtgtaacttcattccgaactcgttcaagaccaatgaggtgaatggcaacctttaccgggtaaatgctcagctagaagttgttcaaaaccagcctaacctgaatgccgatatagcattaattaaagattgggaggtctaa

SEQ ID NO: 51164 - DNA, 540 bp, Acinetobacter baumannii
atggatgaaacctacgtcaaggtgcggggcaagtggacctacctgtaccgggcagtcgacaagcggggcgacacgatcgatttctacctgtcgccgacccgcagcgccaaggcagcgaagcggttcctgggcaaggccctgcgaggcctgaagcactgggaaaagcctgccacgctcaataccgacaaagcgccgagctatggtgcagcgatcaccgaattgaagcgcgaaggaaagctggaccgggagacggcccaccggcaggtgaagtatctcaataacgtgatcgaggccgatcacggaaagctcaagatactgatcaagccggtgcgcggtttcaaatcgatccccacggcctatgccacgatcaagggattcgaagtcatgcgagccctgcgcaaaggacaggctcgcccctggtgcctgcagcccggcatcaggggcgaggtgcgccttgtggagagagcttttggcattgggccctcggcgctgacggaggccatgggcatgctcaaccaccatttcgcagcagccgcctga

SEQ ID NO: 51165 - DNA, 195 bp, Acinetobacter baumannii
atgagtgctagcgttaaagtctttttaagtgatactggtgagattgagcaaattatttttctagataaagaagaccaaaagtttaagtcgagtattgaaaaggcgatatggcgtgcaagtccctttgttttaccttttaatccggaagttagaaaacaagtaagaaagttcaatattaaatttactgcaaagtaa

SEQ ID NO: 51166 - DNA, 513 bp, Acinetobacter baumannii; identical to SEQ ID NO: 50974

SEQ ID NO: 51167 - DNA, 381 bp, Acinetobacter baumannii
ttgtttaagcattctcaaattttgacaaaaacattaattacaacgtctttgcttacattcagcctctcaagtcatgcagcccttacctttggcaatgctgaagaaggtcaacttaaagtaagcggtactgttcgagccaaatatgtttatgatttcgactctgaaccgtctaccagtaaattttcctttaatgacgcggtcttatggctggactacaactccccaaaatggattggccgcctagattatcgggtttatgaatattatggacgtttaggcgatgccaattggctcaccgatgcgtggttgggttataaaattaatctctgtacacgacaaatttcacagaacccttatcctatcagggttctgccttcttaa

SEQ ID NO: 51168 - DNA, 639 bp, Acinetobacter baumannii
atgaatataatttttaaaattactagcgtactctcagtaatattacttgtagcctgcggtgatgaaaatagcaacagtgtcagtgaagaaaaaattgcacaatctacccaaaatcaagttacttataaactaatctctggtactgcattttcaacttctgttttaaatggtgcaaatgtaacagcaatttgtaaagatgggcttggtttcaaaaataaagtaattgttaatgcacaagggcaatggcaaggggaaatagacaccagtaaatttccttgtcgtttagaggcaaaagctgaggggcaaacttatcatagttatatcgaccatgagggaagggtaaatattaacccgctcacagatatggttgttgcttatgcaagtaatcaggttcctgtaacatggtatcaatctggaagtatgactacagaaaagttaaattcggcaaattctgctttggtcgctgaacttattaaaaaggggtacggtattaataatgatatggatctatttactgctgagatgaaagcaaataaccctattcatcaagctattcaagagttgttggaagctattcagaataatagaaatattaaagattatgattcactattaatgctgtctcttatacacatctga

SEQ ID NO: 51169 - DNA, 300 bp, Acinetobacter baumannii
gtgaccactgtatttgctgcatctgccggaacgtttttcaatacgcctgtaacagtaacgttgcctgacgcttctgatgcattaatcacattgtcagctgttactgaatcaaccgtgaagttaacgccatcggtatttggaccaactgcatcaacaatagctgtacctggtaaagatgggttgcctgctggatctgtagcaattgcctcaacttcgtcaccatcatttaaacctgggtttggtactgaccagctgccatcaggtcctgctacaactgttgctgtgtcaccattaggatag

SEQ ID NO: 51170 - DNA, 504 bp, Acinetobacter baumannii; identical to SEQ ID NO: 51095

SEQ ID NO: 51171 - DNA, 318 bp, Acinetobacter baumannii
atgttatgtgtggcattgctcagcgcatgtacgaaacaggcagaatctgaggcacctcaaattgattataaagctcaatttgaagagtcggaccgaaaaattggtgaatttttagatcagttagataatccaaatacccctcaagaagttaaagttaaaattttatgtcatgactatcctgatgtgtataaaaaacaatacatgcctgcattaataaaagtttcaccaaaaccgtatactgaagaaaaattattgtcagatttgaaaagtgcaactgactactataaagggactttggggataaaatgtaatgaataa

SEQ ID NO: 51172 - DNA, 393 bp, Acinetobacter baumannii
atggcgggtattgaacattttacggcggtacttgccgaatacatgatgaagcacgaaaagaatttctactattcagatgatgccaaaagccgtgctttatggatgtggcatatgcttgaagaatccgagcataaagatattgcctatgatgtatatcaattactcaatggtagctacccactacgagcttctggcttcttcttagcattcttcactattttaggtctaatccctgcgactaccttgtttattccggttttaagaaaaccgcaggaaatgttgactagaaaattctggaaagacgcgcgccgtggtgtaggacttatttttggtccaaaagatggtgtattcggtagcaccattggccagattttggcactgttgcaaagttag

SEQ ID NO: 51173 - DNA, 312 bp, Acinetobacter baumannii
atgattcagacatttaccacctataaattatcgggcaaattagaaaacataaccgtgggtggcggggtgaattggcaaagcagtacctatattaatgccgaaaatcccaaagaagttattgagaaagtcgagcaaggagattatgcacttgtaaaccttatggctcgttatcaaattacaaaagatttttcggctcagcttaatattaataacgtatttgataaaaaatattacggtgttttcccggcgtatggccaaattactttaggtgcccctcgaaatgcggcgctaacactacaatataagttttaa

SEQ ID NO: 51174 - DNA, 270 bp, Acinetobacter baumannii
gtgattgagcttcgtttaaatgccattaccgcttataaagataaaaattttgcaaatgagctaattaaacaagctcaagcgaaacgtaaaaaagtagcacaaaaaaatcatcaactttctctagttgcattggattatatttttatgcacgaaattcatgcactcattgatgctgaactgttcacaataggcgagaaattttatttgccaaccttgcgggagcaatggaaaggtaccgtttcggaccaagtgcttaatggaaagctctaa

SEQ ID NO: 51175 - DNA, 210 bp, Acinetobacter baumannii
gtgactgcaacagatgcagcaggtaacgtaggtaacgatactgcagtggtgaccattgatacggttgcaccaaatgcaccggtgcttgatccgatcaatgcaacagacccagtgagcggtcaggcagagcctggttcaaccgtgactgtgacttatcctgatggcacaactgcaacagtggtagcaggcacagaatgcaccggtgcttga

SEQ ID NO: 51176 - DNA, 174 bp, Acinetobacter baumannii; identical to SEQ ID NO: 51116

SEQ ID NO: 51177 - DNA, 873 bp, Acinetobacter baumannii
atgattgaaagaatatcgctgaattcactaaaatttttctattttgtagcgaagtatggcagcgtgactttagctgcaaagaaattatttgtgacgcaaagtgcggtcagtaaacagatttataatttagaagaagctttaaatacgactttgttcgaccgaaaaaataaaacgcttgtgatgacggagcagggtgaaactttattgagttgttgccatcaggtgtttggtcaactcgatgaatgtttaatacaactcagccagcctaaaactcaaaacaagcaactggttttgtcctgtgaaccgactctttctatgaaatggctcattccgcggttatcaaaatttaaaaagctcgggcatgattttgaggttgtgctactcacagcaggcggtgtggttgattttgaaaaagataatattgatattgcgattcgtcgaaatgactttgattggggagagcatatctatagcgaaaagattgccgatgaatatatcgctctagttcaagcaaccaagccatcggaaacaaacgacttactcatttcgacttctagaccaaattttttcaaaaacatgagccgcattgctgagttaaagcagagcttaaaaggctacaccaaagttgaactcgagcatttttatttatgtttagaaggttgtttggcgggactcggcgcgacggtcatttcaatttatatgattgaaaaagagcttgaatggaacttattgcaaaaaaattcaccaatcgttcaagatggttcagcctattttctactttctcatcgtgcttttgaggaagatccacgcaaaaccctatttttagaatggctaaaagcagagatgaatgagagtcagcacacattactttaa

SEQ ID NO: 51178 - DNA, 441 bp, Acinetobacter baumannii
gtgttggctcacttaggcgaaaaattaccaatttctcgctggcagcgtgacttaactgactcaactgtacttcgtaacatgggtgttggttttgctcaaagcttaattgcttttgatgcttgcttaaaaggtattggtaaacttgaactcaatgcaaaccgcttaaatgaagatcttgaccaagctcaagaagttcttgcagagccaattcaaacagttatgcgtcgttataatgttgaaaaaccatatgagaagttaaaagcattaactcgtggtcaagcaatgacgcgtgacatgatggttgacttcgtaaatggtaacgaacttgctcaagtaccaagtgaagagcgtgcccgcttagctgagcttacacctgcaacttacacaggtaatgctgctgaacaagctaaacaaattaacgaattaattagcaaaatctaa

SEQ ID NO: 51179 - DNA, 909 bp, Acinetobacter baumannii
  misc_feature (896)..(905): n is a, c, g, or t
atgcaaaggatgcagaaaaagatagggtggtgtgtgctcggattttttattttgagcctcatcgcatgtgtgtattggctaagcccagactcggaaaatacttcacctcagccaaatcaggatgaagctaaaagtttggtagctacttcgcaatctactttaaattcatcattaaacgaaaatacttatttgagtaaaagtcagcaagatactcaagttaactgccaattaaaaattgatagttcacagcatttagttgtgaatagccaaacccgtgactgctttgaatattttattacgcagtatggcgagagcaatttacaacaagttaaaactcattttaagaaatttatacaagatcaatatttagagccagcccgctcacagattattgatttgtggacgcgttatttaaaataccgtgagcagcttgcacaaattcaaccgcctcaatctaaaaaacaagatcaaaattattttcaaaagatcttcagctcaattcaagatataagaaaacgtttcttctctgcctctgaaattgaagggttattttcaacagaagacatttatcagaactacacattagatcgcatgaagattttagaagattcatctttaagcgaaattgaaaaagctaaaaaacttaaagagcgctttgaacaactaccagaagactggcaagaaaacctacaagaactttcaaagcttgatgatttacacacactgaccaaacaaattaaagctcgcaacggttcagcagaggaacttcggcaaatgcgtacagcacttgttggagccgaggcaactcaacgattagaaactttagatatacagcgtaatgcgtggcaacagcgagtgactggctacttaaatcagcgtgatgaagtcctgcatannnnnnnnnngtga

SEQ ID NO: 51180 - DNA, 417 bp, Acinetobacter baumannii
ttgaaacagcaaattaatcagccttatcccatttctactgaaactattcctgccagtgtaaatacatgttttcctaagcgcactgcaagtaaagaagtcattgtctttatttatgatgcctactcaacaaaatggaaatttgaagatgtaacaagcagagcatttcgtaataatggcaaaccttttattttattagattggaaccgtctaaattataatattcaggctggtagtgtgcatgagatggggcatgtatttggtctaaaacatgtttgtgcaccgaaggctacaaaacgtactccaaccaatattatgacaagtgccgaatgtaaattaggcagtggtggcttaagaaatttagggtttactccagtacaactgcaaaccattttatcgacttacaaccaatatccttaa

SEQ ID NO: 51181 - DNA, 1725 bp, Acinetobacter baumannii; identical to SEQ ID NO: 45837

SEQ ID NO: 51182 - DNA, 291 bp, Acinetobacter baumannii
atgctaatggcagcctataaaatggtaaatcgtttaaaagagcaaggccataatgcactttttgaacaagcatatatgtctgagttaaaaaaactcattacatttcgagccgaatttcaaaccacaggttttttctatccagaaatagccatgtatatggctcgaccagataaaatattgcatgctttttatgtacggcatgatcgctttagagtaagaattgatgatcaggaacacaacctttctggttatattgcctacgtaaaagatttcgaaggaggggagatatga

SEQ ID NO: 51183 - DNA, 375 bp, Acinetobacter baumannii
  misc_feature (360)..(369): n is a, c, g, or t
atggccgttagttacaaacaccaacagggtgttgctttactgactatacttattatggttgccttggctacaattttagcggcttctattgccaagcatcaaaataatactatggaaaatacagcctacttaatgcgccaaaatcaatctttgctttatgcaaaaagtgcagaagcctttttttcagaattattaattcaagatgcaaataatgcaggtggagtagatcatttaaaagagacatgggcacaacctatgccgccgttttctattgaagagggttcagtatctggtcgtttgcttgatgagtctggtaaatttaatttaaataatctaactaacggggaaggcattgtaaannnnnnnnnngtttga

SEQ ID NO: 51184 - DNA, 2781 bp, Acinetobacter baumannii
atgaatagtattccaagcgttgaaatcgatagctccgaccatgttgcaaaaatcactaaaacaacatgtccatattgcggtgtaggttgtggtgttagtgtaaacgttcaacaaaaacctcaaggacctgtggtgcaagttgagggggatgctgagcacccttccaactttgggcgcttatgtattaaaggtagccgacttgcggatactttggggttagaaacacgtttacttcaaccgatgtttggtcgtaagccacttcggactgtaaccacatgggatgcagcaatcaataaaattgccgataaattccagtcttgtatcgacaaatatggtcgtgacagcattgcattttatgtttcaggtcagcttttgactgaagactattatgtggtgaacaagtttgtaaaaggctatttgggcactgcaaatatcgataccaactcacgcctttgcatgtcatctgcagtggcaggtcacaaacgtagtttcggtgaagatattgtgcctgcaagttatgaagattttgaacatgcagatatggtggttttggttggttccaataccgcatggtgccatcctgtgctgtatcagcggattatgcaggctaaaagccacaatccagatatgtttgttgtggtgattgacccacgttttaccagtacttgtgagcaagcggatttacatttaccgattttaccgggccaagatgtcgcattgtttaatggtctattccaatatttatatcaaaatggtcatgccgatcaggtttttgtggatgcctatactgaaggtttgcaagaggttttggcaagtagtcagcaagaaacggatattgcctatgttgccaaacgcagtggtatttctttagacaaattacagcagttctttgagaagtttgcgcagactgaaaaggtaatcacgctattttcaatgggtgtgaatcaatcaagtcagggtgtgaataaggccaacagcattattaactgtcatttattaacaggcaaaattggaaagctcggcgctgcaccattttcaatgacaggccagcccaatgctatgggtggtcgagaagtgagtggcttagctaatatgttggctgcccatatggatttagataatcccttgcaccaaaaagtagtgcaaaccttttgggacagcccatttattgcaactcaagctggcttaaaagctgttgatttgttccatgctgttgaagctgggaaaattaaagccatctggattatggcaaccaatccagtggtaagtttaccagatgccgatcaggtgaaacgtgctttagagaaatgcgaattggtcgttgtgtcagatatctgtgtcgataccgatactacggcttacgccgatattttgcttccagctttaggttggggtgaaaaagatggaaccgttactaactctgagcgtcgtatttcacgtcaacgtgcttttttacctgcgccgggtgaagcaaaagcggattggtgggcaatgagtcaagttgcgaaaaaattaggctttaaaggttttgactttaataatgctgttgatatcttcaatgaacatgctgctttgtcagcacaagataatgcggacattgaagcacgtgagcaaactgatacgttccgttatttcaacttaaaaggtttaatgaacctaagtactgctgagtatgacgctctacaaccagtgcaatggccagtatgggataaaaaacaagacgctaaagccgttcaccaactgttttgcaagggccagtttagccataaaaatgctaaggcaaaactaattccgactgttgctattaatccggtacatgcaatttcagaagattatccgctcattttaaatacggggcgtattcgtgatcaatggcataccatgacccgtactggtttgtcgccaaatttaaccagtcaccgtgctgaaccattctgtgagattcatccaagtgatgcattaaagtttggtgtacgtgatcaaggcctggtagaagttcgttcgaaatggggcagttgtgtactgcgcgtgacattctcatcaggtgtccgtcgtgggcaaatttttgcaccgattcactggactgaacaggtcgcatccgacgcgcgtattggtaaagtcgttaatccggaagttgatgcaatttcaggtgagcccgagttcaaacatacgcctgtaactattcagccgttctataccacttggcaaggtgtgctctatattcgtgaaggatacgattcgcatattcaagaatcgctacatcactgtgcatggtggactaaagttaaaatggtgaaaaccaatcgctatgaacttgcagaccgccaaacttttcatgatactcaaaagaatctgaaaagctttttgccatttgccgatgaaacctttgaatggttaagcatagaagatatttcttcacaactgagccatagtattattttgaaagatggcattgtaattgcaagtctatatattgcaccgccagatttattgccagaccgtgactgggtagcaagtctgtttaaacgagaacgtttgagcgccttgcaccgtaaagctttactagcaggtatgccaatgtcggctaccaataatgatgggcctttggtgtgtagttgttttaaagtaggtaagaataaaattatcgaagcaataaaaacacaaaacattacccatgaaaaacaggtcactgcttgtttaaaagctggtggcaattgtggatcatgtttacctgaaatccgtggcttaattaaagcttgccagcaagaggtagaagtgtga

SEQ ID NO: 51185 - DNA, 606 bp, Acinetobacter baumannii
  misc_feature (582)..(591): n is a, c, g, or t
gtgggtgagttcgagctgaatcgaaaccctgaaaatttcttcttagatgttgaacaatccgcttttgcaccaagtaatctggttcctggcattagcgcttccccagaccgcatgctgcaagcccgtttatttaactatgcagatgctcagcgttatcgtttaggtgtgaattatcagcaaatacctgtaaatgcggcacgttgcccagttcatagtaatcaccgtgacggtcaaggacgcatcgatgccaattatggtggtcttccacattatgagccaaatagttttggacaatggcaagagcagcctcagtacaaagaaccaccgttaaaaattaatggggatgctgatttctggaattatcgtgaagatgacaacgattatttcagtcaacctcgtgctttgtttgaacttatgactcctgagcaacaacaggctttatttgataatactgcacgcgcaatgggtgatgctcttgatttcattaaatatcgccacattcgtaactgttacgcatgtcatccagcttatggcgaaggtgtggctaaggcgcttggtttgacagttgaaaatgctcaagcnnnnnnnnnntgctcaagcagctag

SEQ ID NO: 51186 - DNA, 906 bp, Acinetobacter baumannii
  misc_feature (865)..(874): n is a, c, g, or t
atgaatgacgatactaaaaaatgtcctttttcccaacttactactgattttggggctccagttgtagataaccagaatagtatgacggcaggtgcaagagggcctctacttgctcaagatttatggttaaacgagaaattagctaactttgttcgtgaagtaattccagaacgtcgtatgcatgcaaaaggttcaggtgcattcggcactttcacggtgactcatgatattactcaatatacccgcgctaaaatctttagtgaaattggtaaaaaaacagaaatgtttgcccgatttaccactgtagctggtgaacgtggagcagcagatgctgaacgtgatattcgcggctttgctttaaaattttatacagaagaaggtaactgggacatggtggggaacaatacaccagtgttcttcttacgtgatccacgtaaatttccagatttaaataaagcagtaaaacgcgatcctaaaactaacttgcgtagcgcaacgaataactgggatttctggactttattacctgaagctttacatcaggtcactattgtcatgtctgatcgaggtattcctgcttcctaccgtcatatgcacggttttagtagccatacctatagtttcatcaatagtgcgaatgaacgtttctgggtgaaatttcatttccggacccaacagggaattaaaaatttaacagatgccgaagctggtgaattagtggggcatgatcgtgaaagtcatcaacgtgatttattcgatgcgattgaacgaaaagatttccctaagtggactttgtatgtacaggtaatgcctgagcaagatgctgaaaaggttccatatcatccatttgatttaacaaaagtcnnnnnnnnnncatggagattatccattaatcgaagtgggtga

SEQ ID NO: 51187 - DNA, 1236 bp, Acinetobacter baumannii; identical to SEQ ID NO: 45754

SEQ ID NO: 51188 - DNA, 360 bp, Acinetobacter baumannii
gtggtgggccaagaaaaagcagccaaagttcttcatacgctgaacttaaatgaattaccgcagtatgagggagatgagccatacgtacttattctttcagaccagacagatataaaaacagcgaagcaattacagcagcagtttgcacaaacatctgttgaaccacatcactatatttatgtgaaatcttcattggggcatacccagcatttagttgatatttatggctttatgcttagtatgcattttcctgaacatatcgttccttttgtctttggagaaaatacagtgtcagcacatacatttgtgcagagtgtcactgaaaattcagaagatgatgcgatggtgttgaatagctaa

SEQ ID NO: 51189 - DNA, 285 bp, Acinetobacter baumannii; identical to SEQ ID NO: 50888

SEQ ID NO: 51190 - DNA, 258 bp, Acinetobacter baumannii
atgaaagaccaattcaagaaagtgaataacaagcacttacttggttttactaattacttgcacttgctgggctttgtaatagtccagcaagggttaaaccaagcaatgcttttaacgaaacattatgccgtaccagtagcttggcgccgcataacaatagactacaacaaccggttaaataaacccgctcagcagctttataaagagtttgttgagtggactaaagaagaatatttgagggctcaaaaatggaagtaa

SEQ ID NO: 51191 - DNA, 324 bp, Acinetobacter baumannii
atgtctaatttcaaaaagcaccctgacggctacaagtcatttttaggccgtgatgataagggcctctactctgttcgcattggctggcaagtgtacgcatctaatgctaatggctcagttctttacaaagttaaagacggatttaagacgcctttaaatgtgttcaggttccaaactgactatccaaaagtttggaatgaactcacacaagaaattgattttcagcgcagaaagcagctcgctataaaactgcgtgaaacaaacatccctacttatgaccgcaaggcttataaaactaagcgcggcttcactggctcaagatga

SEQ ID NO: 51192 - DNA, 291 bp, Acinetobacter baumannii; identical to SEQ ID NO: 46180

SEQ ID NO: 51193 - DNA, 444 bp, Acinetobacter baumannii
atgaacgtaaaagctacccctttcaactcatttgcatttgtcagcatggctgctcttgcaatctctggtggttctttagttgcttgccaattgcaaccagctttccaaacaaaagaagccccttctctatttacccctaagactcaaccaagtacttacggtgtcttaaccgcaaaaatcacaggtaaacattctggcgttgccgtaatcaaattagatagcttccgtttaaacgttagctttgattttgaagctcatccagacagttacggcgttccgggttctgaattcaccgctgttgatattactcaactcacggtaaatgaaatcactgacattaatggtaagtcatataacgatttcaccgaatttgaagacatccgcaacatcaatggccttctaaaaggcttcatcgaacgtaacaagttggtggaggcagcctaa

SEQ ID NO: 51194 - DNA, 315 bp, Acinetobacter baumannii; identical to SEQ ID NO: 46705

SEQ ID NO: 51195 - DNA, 288 bp, Acinetobacter baumannii; identical to SEQ ID NO: 46706

SEQ ID NO: 51196 - DNA, 774 bp, Acinetobacter baumannii
atgaatattctagaagaaactataaaattgggtggtaaatctatattttttaaacgatggattgtccctgcttctcataaaactcccattattttgcttcatgaatctttaggaagcgttgagctttggaaaagctttcctcaacgtttagctgaatttctccagagagaagttattgcttatgatcgcttaggatttggaaactcctcacccttagaaaaattatctcttaattttattactgaggaagcagaaacaacttttgctgctgtaatacaacatctagaaatagatcaatttattgttatgggccatagtgttggtggtgggatgactgctgtaatagctgctttatatccagatcgttgcaaagcagcaattactatatccgcacagtctatggttgaagaaattactcgacagggtataaaagatgcggaagcgaatttttgtaatgaacaattcattaagaaattagctaagtttcatggagataaagctgaatgggtattaagagcatggatcgatacttggttatcaccagcattccgtaattggaatatagatgcctatatatcgaaaataaaaagtcctcttttagtaatacatggggaaaatgatgaatatgcaactttgattcaaccagaacgccttattcagctttctaatggatataaagagctagaaattctaaaagattgtggtcatttccctcacaaagaaaaggaaacagaggtactaacaactatccaaagtttcttagagaaaatttag

SEQ ID NO: 51197 - DNA, 462 bp, Acinetobacter baumannii; identical to SEQ ID NO: 46703

SEQ ID NO: 51198 - DNA, 939 bp, Acinetobacter baumannii
ttgtcgtgtacagagaaatataacagtccttatgtagaaaaaaataataaaatcagggctcaaaatttaaaatctattttagaagctgttcaacctaacaaagaaacagctttttcttatgcaggtacagtccactggagatttgctccaaattatatcttatcattaacaggtacacatcaagaaagattacctaatgcacaagaaatgtatactcatggtatgcatctcgctactaattcttttgaaataggtaaccgctttctaagaaaagagaaatccaataatttagaaatcagtctggcctataaggatgatttacttgattatcaaatcagtacttactattatgattttgataactatatatatttacagacactcaatgaagttttaggaactacaaaagttagagatcagcatacactacgtattaatcattatagccagtctgctgctaatttttatggattagagggcaacatagggtatcaatttaattctgtttatcacggctctctttttggagattatgtgaaaggccgtttaacaaatttacctgatgctgtaattgcatacgatatctggaatagagaaccgactttagctccccaaaaggatcgttacactcctagattacctcctgctcgtttgggtacacgactaaaagctgattttgatgaatcgcttaaaggtgaaatagaatattatcgagtctttaaacaagataatatttctaaatttgagcaggttacatcaggttataatatgcttaatatgactttagcatataaaaataagctatctcacacagaatatgatttattctttaaagcgaataatttacttgatcagaaagtctatgcccatgaaacatttttgccatatattccccaaattggaagaaattttagtttaggcttaaatcttaatttctag

SEQ ID NO: 51199 - DNA, 828 bp, Acinetobacter baumannii
gtggattttgattttaatttaattcttgttcctgttacgctgattttatttgcagtgtggttgctagataagcttgtttttaaacagcgtgcaaataaagggcgagagaacgaaaattttgttattacatgggcctatgacttttggccggttttagctgttgtgcttgtacttcgctcatttctttatgaaccatttaatattccatcagactctatggttccgaccttagagactggcgattttattttagttaataaatttgactatggtgtccgtttacctatcgtcaataaaaaagtgattgatatcggtgaaccgaaacgtggtgacgtcattgtattccgttatccgccacaacctactattagttatattaaacgtgtaattggcttacctggtgaccatattgtttatgatcatggacaattgattattaatggtcaaaaaattcctaaagtaccaacacagtttagtcgcgaaaaagatgctttagatacaccaacttctatttatcataaagaaacaattggtgatcatacttttacgatgcgtgagcttgaaggcgtaaatgttgcgcgtcaggcaccatttatcaactatgttgataatggtaaatatgcaaaccaagacggtttatattgggaagtaacagttccgaaaggacattactttgcaatgggggataaccgtgatcaaagtgctgacagtcgtttctggggctttgtacctgaagaaaatttaacaggccgagctttctatgtctggatgcataaagaacctggtttccacctgccaagctttaaccgaaatgggaaaatagattaa

SEQ ID NO: 51200 - DNA, 771 bp, Acinetobacter baumannii
atgaaatcaaaaccaataattccatggcaaggtggtaaaacccgtttggctaaggatttgttgtgtaggttcccagaacattcatgttatgtggaattattttgtggtggagcagcattatttttcttaagggaagaaccagcaagaactgaagtaataaatgatctgaatggtgaactcgtaaacctttacagggttgttcagaaccatttagaagaatttgtgcgtcaattcaaatggtgcatttcaagtcgccagatttttgaatgggaaaaactaaaagtaccagacacactaacggatattcagcgagctgcaagattttattaccttcagcaacatgcgtttggtggtaaggtttctgggcagacatttggatatgcaacaacaggccgctctttaaatctcttgcggatagaggaaagtttaagtgcagcacatttgcgtttgaatggagtctatattgaaaacctgtcctgggatatttgctttgataagtatgaccgagaacatacatttttttatgctgatccgccgtatctagatacagcaggttatggagtggattttccattagatcagtatgaacttctttctgaaaagatgaagacttgcaaagggaaggtaatgctttcaattaatgatcatgaaaagattcgtgaaatctttaaaggttttaattttgcatgtacttcaattaattattctgttggtcgtgatttggccgctaagagtaagaaaagtaatgaactgataattatgaattattga

SEQ ID NO: 51201 - DNA, 1344 bp, Acinetobacter baumannii; identical to SEQ ID NO: 51076

SEQ ID NO: 51202 - DNA, 531 bp, Acinetobacter baumannii
atggacacaattgaaactttagctttacaagcgattaatactgaaaacccaagagaaattcgtaatttgcttggtcagtttgcaactggcgttaccgtgattacaactcgtggtaaagatggccggaaaataggtatgacagccaattcattttcatctctgtctttagatccgccattaattttatggagcctttcaaaaacggcgccaagtttgcctgattttgtagaagctgaatattttgccattcacatgttggcacaagagcatcatcagctttcagggcattttgctcgaggtgccgaagacaaatttgcaggcattgctcatcaacaatgcaatgcaggcgttccaattttgacggatgcactcgcaaccttggtttgtcgcaatgtaaatcagtatgaaggcggagatcacctgatttttattggtcaaattgaacaataccaacagcgtcaaggtgaaccattggtattccacgcaggaaaatatcggattgccgctgagcatccagaattagcacattaa

SEQ ID NO: 51203 - DNA, 411 bp, Acinetobacter baumannii
  misc_feature (7)..(16): n is a, c, g, or t
atgattnnnnnnnnnntaaaagccgatcgagatcagctcattcaagtcatgctcaatattagcgttaatgcaattcaagctattacagaaaataaatcattttttacagatcaagagcctgaattaattttacgtacccgtattcaacgtctagtcactattaatggagtacttaaccgctctgctgtacgagtcgatattgaagacaatggaccgggtattcccgaaagcattttagagtctgtgttctatcctttggttacaggacgagcaaaaggcacagggcttggcctgagtattgcacagaacatcatgcatcaacataacggaatgattgaatgccaatcagttcctggaaaaacaatgtttagcttatatttaccttgggagtcagaccgtgtcgcgaaataa

SEQ ID NO: 51204 - DNA, 2040 bp, Acinetobacter baumannii
atgtcatctgccagtcaactgaacaacaagcaagaagaagccatgaaatatactcaaggccctttattggtgcttgctggcgctggttcaggtaaaacatcggtaattacgcgtaaaattgcttatttggtgcaacattgccgtattcctgcgcatcgtattacagcgatgacctttaccaataaagctgcacgtgaaatgaaagagcgtgtcactaagcttttatcacgtgaagaagcaaaaggtttgtccgtttcgaccttccatacttttggtttaaatcttttacgtttagaacttaaaaatttacctttaaaagctaatttttcgattttggatgcagatgactgtaaacgtattttgatggatttgatgcatcgcgataatttatcgggtgcagagagtaaagaactaattgccaaggcaatgaagaaaatttcagattggaaaaacgatctgattttgcctgaacaagcacattcgacgtgtgaaactcctgaagatgtccagtttgcccatctttatcaactttatgaacgtaatttacgtgcttacaatgcagttgactttgatgacctcattgttatgcctacccgcttattgcaagaaaatgcagaagtacgtgacaaatggcaaaaccgtgttcgttacttgctagtggatgagtatcaagataccaacaccgcgcaatatattttggtgaaactactagttggcgtaatggggcagtttactgccgtaggtgatgatgaccagtcgatttatgcatggcgtggggctaaacctgaaaacatggctttgcttaaacaggatttcccaaatctacatattattaaacttgagcaaaattaccgctcgaccagccgtattttgaaagctgcgaactgtgtaattcaaaataacccgcatatttttgataaaaaattgtggagtgataaagggcatggtgaggtcatcagaattattacctgtcgtaatgatgatgatgaagcagaacgtgtagtcaaagacttactgactcacaaacttatgaatggtaagaactggaaagattacgctgtattgtaccgtggtaacttccaggcgcgtgtattggaaacacaacttcgccaaatgcagattccgtacaaactctctggcggtacatcgttcttcgctcgtgcagaaattaaagatgtaatgagttatttacgtcttattattaacccagaagatgacagtgctttcttacgtattattaatacgcctaaacgtgcgattggcccagttactcttgagaagttaggcctatttgcacaagaaaataatttgtctttacttggtgcttcttctgaccagcgcttaagtatggtacttcctaaaaaggcagaaactcaattgcatgagtttgctgactttatctcgacgtttacacgtgagttgttggaagatgatgagcctgtgcctaaagttcgtcaaatgatgaatgaagcgggttatatcgactatattcgtgagcaatccgcaacgcctgctcaagagaaaagtaagctcgataatatcgagaacttgtttagcagtattcaaaacttaattaatcgtgctgaagatgttgatgaaaagaacattgaaagtgtgattcgaaaactagtcttgcttgatatgttagagcaacagcaagaggaagaagacactgataaagtgaacttacttactctacatgccgctaaaggtttggaattcccatatgtctatattatgggtcttgaagaagagctgttgccgcataagaactcaattgctgctgaaactattgaagaagaacgccgtcttatgtacgtgggaattacccgtgcacgtcaaggcttaactttgactttggcagagcagcgtaaaaatggtggtcaaatgaaacagatgaccccaagccgtttcctcgatgagcttccgcaagatgagctcgaatggttagggcgtaaaaagaaaattgcagcaaatgttgatcctaaagaacaggctcaacaatatttggcaaatttaaaagctttattaaagcgttaa

SEQ ID NO: 51205 - DNA, 459 bp, Acinetobacter baumannii; identical to SEQ ID NO: 46002

SEQ ID NO: 51206 - DNA, 1344 bp, Acinetobacter baumannii; identical to SEQ ID NO: 46005

SEQ ID NO: 51207 - DNA, 468 bp, Acinetobacter baumannii
atggattctacagaatacttttggcttactcggaaaaaagaacctaaaaccaagcctaaatccagaccgctacctaaagctactcaaaagtacttagaggcagaggaagaatttactgaagctttagacaatctggaaattaagtacgaaaagaaattccagtttaagtctactaagcattggcgttttgattttcatttaattgaacatcacatattagttgaaattgctggtggcccttggtctggtggtcgaaagggtaagctaaaaaacaaagcttggagtcttgatcgttacgatgtggctgaagagatgggttacacagtaattcgcatagaggcagcaccaagatttaagattaatgaatctggtccattacagatccaagctcatttcgctagccaatggcttaaaaatttaaagaggcaaatatttaatggatcagatcagaccatttcctccaactga

SEQ ID NO: 51208 - DNA, 534 bp, Acinetobacter baumannii
atgttaaaaaaaacgcctcatatcatcttaatgtctttgctcagctctagcctattattgacggcttgtaaaaaagcagatgagccagcaaagactgaacaatctcatacaagttcatctaccgatcaggtcttagaaaaactcaatgaaagaccagtgaagaaattcccagctactgcggatgacgctcatgatattgcactactagaagattacgatcaccgctttactgaaatgagtgacgagatggaaaatgagttagcaaaattgcatgaggctggcacactcaccgcagaatttgaacaaaaacgtacacttgataacgtgcgttcatcattaaccatgttaaaagatctcgatttaaaaactgaacaaggtcgttatattcagggcttactctatcaatattgggaaaaccaagaaaagaactttagtgataagcaggcaagtaaagatgagcaggtcaaacagcttgctgactatttacaagcacaaaatcagttaaagtactggaaagcctcacagcagcattaa

SEQ ID NO: 51209 - DNA, 2055 bp, Acinetobacter baumannii; identical to SEQ ID NO: 49415

SEQ ID NO: 51210 - DNA, 393 bp, Acinetobacter baumannii; identical to SEQ ID NO: 45786

SEQ ID NO: 51211 - DNA, 801 bp, Acinetobacter baumannii
atgcaccaagaccatggtacaagccctgatgtatgccaacgttctattcaacttggttttagctcagtgatgatggacggttcattgggcgctgatggtaaaactcctacaacttacgattacaacgtagatgtaactcgtcaagtggtagcaatggctcatgcttgtggtgtatctgttgaaggtgagatcggttgcttaggtagccttgaaacaggtatggctggagaagaagacggtgtgggtgcagaaggtgtactagaccattctcagcttttaacctctgttgaagaagcaaaacaattcgttgctgatacaaatgttgatgctttagcaattgctgtaggtacttcacacggtgcttataaatttacacgtccacctacaggggatattttagcaattgaccgtattaaagaaattcatgcggcattgccaaatactcaccttgtaatgcacggttcaagctctgtaccacaagaatggttaaaagtaattaacgagtttggtggtaatattggtgagacttatggtgtaccagttgaacagcttgtagaagcgattaaacatggtgtacgtaaaatcaatatcgatactgacttgcgtttagcttcaacaggtgcaattcgtcgtttcatggcggaaaacccagctgaatttgacccacgtaagtatttcgctaaaactgtcgattcaatgaaacaaatttgtatcgatcgttatgaagctttcggtacagctggtaatgctgacaagattcgcccaatttctttagagaaaatggttgatcgttataaataa

SEQ ID NO: 51212 - DNA, 303 bp, Acinetobacter baumannii
atgggatttaccaccgctcaaagttatcgttatgtgattttgccagttgcgtaccgtacggtatggccaacgattacgtcagaagcaatgaacgtctttaaaaactcggcagttttatatgccttaagtgttttaaatttctttgcttataccaaaaccatgcgtgaagagacttcacaggacattatcattcttattctgtctacacctgtctatttaatcattacatacaccattaaatttataatggcatggattgaaaaacgcatggctgtaccaggtttaggctcgggaggaaaataa

SEQ ID NO: 51213 - DNA, 900 bp, Acinetobacter baumannii
atgcgttggagagatcgtcgagtcagtaccaatgttgaagaccgtcgaggcggaggcggtgttagggcaggtggtattagtattattggtttggttgtggcatttgttgcatggaaattttttggcgttgacccccaacaagcatatcaggcaacgcagcaggttactgcttcgcaacaatcaaatgcaactgcacccgaaagtttaacagccgagcaaaaggaagcttctgattttgttggaacagtattagccgatacagaggatacgtggacacctatttttaaacagttaggtaaaacttatacgccaccaaaattagtcttgtttagtgggatgattcagtcaggctgtggtacagctcagtctgcaatggggcccttttattgcccagcagatcagaaggtttatatcgatacagaattcttcaaagatatgcgtgagcagatgggaatatctggcgaacaaaatcagacagaattatcgagacaagatcaggcaggggactttgcccaagcttatgtggttgcccatgaagtaggacatcatgttcaaactttgcttggtatctcatctcaagtacaacaggctcgtgcacaagtcagtcaaagagaaggtaatcagttatctgtacgtcaagaattacaagctgactgtttagcgggtatctgggccaatcataatcaacagcgtactcagtttttagagcagggggacgttgaggaggcaatggatgccgcgcaaaaaattggagatgactacttacaaaaacgagcaacaggacaagtcgttccggatagctttactcatggtagtagtgaacagcgaatgcactggttccaagtcggtttaaaaaccggtgatattagccaatgcgatacttttaataattctatctaa

SEQ ID NO: 51214 - DNA, 1008 bp, Acinetobacter baumannii
atgagtaaaacagtagtaaaagacaaaacagtacactacaaaaaagtagattttctaaaaggcgccaatctaggtcaattactaaaagcacaattgctggataaggattctttttactataaagccataaatcgtcaacaatttgtctccgcaacaaaagatgattttattctaattaatcatgctagttcacaccaaagcatgttctttggcgagttgattattgttgagtcaggcaaagctcaggctgtattaaagatagacagtgatgatgctactgaatttcccattaaaacctatttaacagatgatctgccagatgatgaagatggcgttgacgctacagaggttgtaagaaaagagtttattgatagtgttctttactttggtgttattgataaccatgtcgcaatcattcaatcaagatcacttaccgctagaaccttggagtcatatttgggctggcttttgggtgaagcagccaaagcattgccagagaatagtgcattaatattaaaagatgctccaaatcccactgttaagcaaaagcttgaatcaactccagctaaaactatttcaatctcatctggcattgggtcaacagaacttcaacctgttcatactgtcgaatcaagcatacctgcgaaaattgactataaaattgaagataatgtggttgatgtgcttaagtcagcttttggagttgatttagaaaatttaaaactagaggatgggcttgatgacgcaaacctaaagttaaaattaacacttacatacaaccgcaaaacctcaaaaagtgggcaaaaagttattgatactgtagcttcatccatgcgacataatgatgattatgttattactcttgaggatgggaccaaggttacggctgataatctaaaaatgagcggcaagatttcagttgaaacaatcaataataaagtttataacgacggcctaaaagttcaattgtataattggatgactaccaatattaattttggtgattaa

SEQ ID NO: 51215 - DNA, 216 bp, Acinetobacter baumannii; identical to SEQ ID NO: 48566

SEQ ID NO: 51216 - DNA, 753 bp, Acinetobacter baumannii
atgtctttacacactcgaattaggcaaaaacttgaagaaaaaaaattaagagccgctgatttagcaagagcaactaaaaaatctcctgttgcagcaaagaaatggctagatggaactagcgtacctacagcagaaaatttgaaagtcattgcgaaatttttaggtgtgagtgacgattggttgctttatggtggatcggatgaacaagaatcgagtaacaatttagctcaattaaatgttattgatattgaagcatttaagcagaagtacaatattccagatagtgaagatgccgttaagtttgttcaagcgccagctaagcctttccctatacaaaaaagatatgttccagttaaagcctattcaaaaatgggaatggatgggtatttcacagatatgggatacgatggaaatgctggggatggctatgttccaactcatacagcaggtccacgagcctatggcattaaaggcactggcgactcaatgtttccagcaattcgtaatggctggtatgttgtatgcgaccctgatgcagatcttgtgccgaatgagtttgttcaggtatgcttgaaggatggaagatgcacaattaaagaatttgtcggcatcaatggtggggttttaagtttgctttctgtgaatggtggtgagcgatttttctttgaaatggacgaggttgaaagtattaccgctattacagatatcgtgccgccaagtcagcacagacaagaacatccttattcgcattaa

SEQ ID NO: 51217 - DNA, 1167 bp, Acinetobacter baumannii; identical to SEQ ID NO: 50958

SEQ ID NO: 51218 - DNA, 1506 bp, Acinetobacter baumannii
  misc_feature (1492)..(1501): n is a, c, g, or t
atgaatgtaaacaataagattggggttaaagcacgtaatcacatacgttcaaaacaagtactttttaagatgacaccttgttgtcttgccatatcggctatttttgcacagcaggcttatgcagaaaccgtaactcaaacggctgaggtaagcgaaaatgcaacacaaaaaccagtaacccaattgcaaaagattgtagtaactgcgactcgtacaccaaaaaatattgcagagattgcaggtacagttcaatctattgatcagaaacaaattatccagcaagctacggcgggtcgtaaagttgccgacattcttgcacaacttgtaccatctcttgcatcaagtagtggaacaacaagtaattatggtcagacaatgcgtggacgaaacgtattagtcatgatcgatggcgtttcgcaaacaggttctcgcgatgtttcgcgtcaattaaatagtattagtcctggtatgattgaacgcattgaagtaatttcgggtgcgactagtatttatgggtcaggtgctactggcggtattattaatattattactaaaagagcagatacatctaaaccacttagctttgaaacaaaagtaggcattacatcttcagatacattccgtagtgacggcttagcttatgaagtcggacaatctgtctcatttaataaaggcaatatggatggtttcttaggagctaattttacaagtagagggtctcaatttgatggaaatggcgatagaatttccttaagcccttggcaaggtagtacgatggacactgatactatcgatgtaaatgggcgtttaaatttcaatttaaatgatactcagacattgagctttggtgcccagtactataaagataagcaggatactgactacggaccggattactcttatttaccgacaacctctaagagtaatgatgctacaacgccaacttataaggcaattaaaggtttaaagcttagtaatccattatttaccgagcgttatgctgttaattcacagtatcaaaatcaagactttttaggccaaatactaaatgttgaagcatattatagaaatgaaaaatcacgtttcttcccatatggcctatcaaataaatccgtgacttttgtaaaccagtctcaatcagaaattgaagtagctggattacgttcaactatgcaaaccgatcttaatatcgccaatcgggatatgaaaataacctatggccttgattatgattgggaaaaagataagcaatttgttgatattttagcaactcaatatccttatttagtgtatacgccaacaggccaacgtaaaggttatgggccaaatactgaaattcaaaatattggagcatttgttcaaagcgattatgcagttacggataaattgaacttgcaagcaggtattcgttaccaatatattcaagcggataccgatgcttatattcctagccgagagacaacaatggttccggcaggatcaacacatgatnnnnnnnnnngatga

SEQ ID NO: 51219 - DNA, 852 bp, Acinetobacter baumannii
atgtctgctgatacccaacattttaccggtacagatcaatatatcgcgactgatagtcttaaacttgctgtaaaagcagctcgtgctttgcaaaagcctttattggttaaaggtgagccgggtacaggtaagactttacttgccgagcaagtggcagaaagtcttggtttaaaactcattacttggcacatcaagtcaacgactaaggcacagcaaggcttatatgaatacgatgctgtgtctcgtttgcgtgatagccaactgggtgatgatcgtgtttacgatattaagaactatattaagcccggtaaattgtgggaagctttcaccagtgaagagcgctgtgtgcttttaattgatgaaattgataaggcagacattgaatttccaaatgacctgttacatgaacttgataaaatgtctttttatgtttatgaaacaggcgaaacaattacagctactcaacgtccaatcgtaattattacttcaaataatgaaaaagaattaccagatgctttcttgcgtcgctgtttcttccattacattgagttcccagatgaagcaacgatgcgcgaaattatctcggtacatttcccgaatatctctgcaactttggtaaatgaagcgcttcaagttttcttcaagctccgtgaaattcctaacttgaagaaaccaccatctacatctgaactgatcgattggttgagtctgcttatggcagatgatatgcctgaagatgtactacgtaatcgagatacatcaaaagctattccacctttgtatggcgcactcattaaaaacgaacaagatgtgcaactgcttgaacgtttggctttcatgtcgcgacgttaa

SEQ ID NO: 51220 - DNA, 1170 bp, Acinetobacter baumannii
atgcaacatcaaattaatggtattgctttaccaaatgaacaaggattttttggtgagtatggaggtcagtttattcctccgcatttaaaagaagcaatggatgaaattaatgttgcttatgaagaaattcgccatacaccagaatttcaaaatgaattagcagacctctttgcaaattatgtcggccgtccaagtcctttattttatgcaaaacgcctttcagaacagttaggtggcgcacaaatttatttaaagcgtgaagacttaaatcatacgggtgcccataaaattaatcactgtttaggtgaggctctacttgctaaatatatgggcaaaaagaaagttattgccgaaacgggtgcgggtcaacatggggttgctttagcaacagcttgtgctctagtgggtattccatgtgaaatccacatggggcaagttgatattgaaaaagaacatccaaatgtggtcaaaatgaaaattttgggcgctcatttggtgtcagtaactcgcggtacagcaaccttaaaagatgctgtagatagcgcgtttgaagttggttctgtggttggtccccatccatttcctaaaatggttcgagattttcaatcaattattggtaaggaaattaaagagcagacgcatcaacgatttggtaaaaacccagattatgttgtcgcatgtgtcggtggcggttcaaatgcaatcggtgcctttacagcttttttaaatgattcagatgtgaaacttgtaggagttgaacctgctgggcatgggctagatacaaatatgcattcggcaaccctaacattaggtaaaccaagccaaattcatggtatggcatgttatgttcttgaaaatgaggctggtgaacctttacctgtgcattctatcgcttcaggattggactatcctggtgttgggccacaacatagtttcttaaaagatttaggccgtgtggaatatagcattgcaactgaccaagaatgtttagatgcgtttatgaccttatcacgagttgaaggtattgttcctgcgcttgaaagctcacatgctgtcgcatgggcaatacgtgaagcgccaaaactgtcgaaagaaaccatgatcgtggtaaatctgtcgggtcgtggcgataaagattctgattatgtggcagaaaaacttaagctttaa

SEQ ID NO: 51221 - DNA, 306 bp, Acinetobacter baumannii
  misc_feature (11)..(20): n is a, c, g, or t
gtgactagccnnnnnnnnnncgaacaaattggttacgcaaaagaagacatccaattctggaaagagttgcaacgcttgcatcattttgcgccagaaagcactatttttttagatgacacacttcctgttttaaaaactgcagaaaaatttggtataagacacttgtttactatcttacagccctcaagtcttaagagtataagacagccacaagatttagagtataaagctctagatcagcttacagagctactgtctattttgaatcaaattgatagaaaggataatgatgtcaaaattgcgtga

SEQ ID NO: 51222 - DNA, 1431 bp, Acinetobacter baumannii
atgtctcagaaaaaaagtgtgcttttccagcaactattaccagttatcaaacagtatcagcaatcgggctttacccatgaaaaaattgttgaattacttaaagatcaacatgatctgaatttggtaacagtcaaaacatttaaaagttatttataccgatatgcaaaagtgaatccagctatgtctaaaaatactgctactctccaatccatgccaacttcccgagaaattaaaaaatcatcgaagcttgagcatgtttgttatgacattcgcggaccagtattacgagccgccaatgaaatggaagagcaaggacataaaatcattaagctgaatatcggcaaccctgccccatttggttttgaagcaccacaagaaattattaatgacgttgctttaaacctaccaaatgcaattggttatgtagattcaaaaggtatctttccggcacgtaaagcaatctgccagtactaccagcaaaaaggcatcttaaatatgcacgttaatgacgtgtatatcggtaatggtgtatctgaactcattgtcatggctatgcaaggcctactcgatgatggtgatgaaatgctcattccgatgccggactatccgctatggacagctgccgttaacctgtcgggcggtacagccattcattataagtgtgatgaagaaaacagttggtatcctgatattgccgatattgaaagtaaaattacttcaaacacacgtggtattgtcattatcaatccgaacaacccaactggttcggtatatccacgtcatgtgcttgagcaaattgtggcacttgcaaagaaacatgacctgattttatttgctgacgaaatttacgacaaaatcgtttacgatggcattgaacatgttgctgttgcttctttagcaggcgaccaattatgtatttctttcaatggactatcaaaagcatatcgtattgctggtttccgttcaggctggatggcaatcacaggcgataaaagccgtgcagcagactatatcgaaggtctggatatgttagcttcaatgcgtttatgtgcaaacgtacaagctcagtatgcaattcaaacggcgcttggtggctatcagtctattaatgatttgatccgaccaggtggacgtttatatgaacagcgtaatatcgcatgggaaatgttaaatgaaattcctggtgtaagctgtgttaaaccagaaggcgcaatgtattgtttcccgcgtcttgaccctaacatttacccaatcgaagatgatgaaaagttaatgttagatttacttcgtgctgaaaaagtactattagttcaaggaacaggttttaactggccaacaccagaccatttccgtgttgttttcttaccggcagaaaacgaattacgtgaagcaattggtcgtttaggccgtttcttggccaatcgccgttaa

SEQ ID NO: 51223 - DNA, 1596 bp, Acinetobacter baumannii; identical to SEQ ID NO: 50890

SEQ ID NO: 51224 - DNA, 456 bp, Acinetobacter baumannii
atgcatgggcctatgagagaaacaattgtcgtagatgatccagcgtcaattaaacatcaccgtgcattaaatgcgattttaactgaacataatggaattgcacccgaaaacctacaagaactgattaatgaatggcaaccaaaaactaaagaagatcaagaacctgtaacggttgatttttctaaaatggttgcatatttatatggagaaaatcttggtcaagaagatgaagcttggttccaaggtaatattgtcggtaaaacttcaatgtcatttatgggtgcagaatataccctttatgatgtcactttagttttagaagacaaccttcctgccatattagtgcgcattgctacaaaaaatgatttgtacaaaaactttaatattggcgaatatattcgtggcaatatctggattcaggcgaatatttatgctaaaaatagtgaaactaattga

SEQ ID NO: 51225 - DNA, 339 bp, Acinetobacter baumannii
  misc_feature (307)..(316): n is a, c, g, or t
atgaagttgcaaggttccaatatattgggacaggaacaaatagatttattaaccacacgcggattaaatttcgtatggtttccaaagcaacttgaaacgatatatcgttttcaatatcaaaatggtgcagcctatgagtttcgctatagagcacctattattttaatattatatttatttttaagctttggtatataccaagtcttaccaaccgaacaagttttatcctggttaagctattattcttgggtaggcataattgttttaatcgcctggattttatcatttattaaaaaattaaatcagnnnnnnnnnnctcttccgctgccgttgccataa

SEQ ID NO: 51226 - DNA, 1011 bp, Acinetobacter baumannii
atgtctttagcccagctgatccaaaatgcatggaataagcaatcaagttggttgattgttttacgtcctttgtcttgcttgtatcgtgctgggtttttactaaatcgttatctttatagttcaggctttaaaaaagtttataccgcacctgtgccggtcatggtaattggcaatattacggtggggggaagtggaaaaactccattattaatagagctggtcaattatctaaagcagcataatgtaaaggtaggggtaattagtagaggctatggtggagctggcccttttcctatgttggtaacatcggccagtcaagcagctgaagcaggagatgaacctgctttgattgtacagtcaactggcgtacctatggcagtaggacccaatagacaagtagcaatcgagttattattagcatcgactaaactagatttaattattagtgatgatgggttgcaacattgggcattaggtcgccaaatagaatggatcgtacttgatcaaaatcgtggccttggaaatagaaagttattaccagaaggatatttacgtgaacctgcggaacgtttaaaaactagtacggtaatcgagcatattttcacaccaacaactacattgcatatgcatcttgatgcaggccagccttacttgttgaatccttcttcggcaactgaattatcattcaatattcaaaataattaccatgcagtagtcggcattggttttcctcagcgcttttaccaaacacttaaaggtttaggggtgaaacaatttcaagagcatgcttttcgtgatcatcatgattacagtattgatgatctcatttttaatgatgatttgccgatcattacaacagaaaaagatgctgttaaatttttaccattacttgaaaaacatccagactttaaacgttctatctgggtcgtacctgttaaagctgttttgtctacagagtgctatcagattttaaatcaacaattgcaaaagcttgatattcaaatatcttag

SEQ ID NO: 51227 - DNA, 1638 bp, Acinetobacter baumannii
atgaactcagcgacggaggtttctgttgctaagctcattaaatttattattgatgcaattcaaagtgccagtagagcggatctagattggttccctttattaatcattttattggtattcttccgtggccttggcctatttatgggagggtactatacggctgtgatctcgcgcagtttggtttttagtattcgccaagaagtttatgcaaaacttctaagactgccggctcaatattatctcgataactcttcgggtcatattactgccaaaattatgtataacgtcgagcaacttacagctgcttcatctgaatcattaaaaaccattgttcgagatggcatgattacgttggggttgttaggttatttgttctataccaattggcgtttaacaatttgtattatggtgttcttacctgtaattgggattttggtgcgtaaagcttcaaaaagaatgcgcaaactctcgatgcaagttcaggatactatgggtgatgttaaccatgtagtgcaagaaagtattaatggtaatgcagttgttaaaagtttcgctggtgaagagtcagaacaagagcgtttctataagtcatcggaagaaaacttaaaacgtggtttaaaaatggtgattgtgcaaaacctaaatagtcctgttgttcaagtggtaatggcttgtgcaatggctctaattgtatggttagcattaagaccacaaattttagggaatacaactgctggtgagtttgttgcatatattacggcagcagggttactttcaaagcctgttaaaaacttgacagatgtgaatgaaaagttacagcggggtttagcagctgcacactcagtttttgaattattagatttacctgaagagcaaaatagtggtgaacttaaaccgcagttgcaaggtgcaattcgttttgaccatgttgtacttaactatgctgacggtacgcaagcgattaaagacttttctttagatattcgtccaggcgaaactgttgcattggtagggcgctctggtgctggtaaaacttctttagtgaacatgttggtacgtttccaagaagtctcaagtggtcaaatttatttagatgatttgccaatacgtgatattgagctttcaagtttgcgtacacaaattgcaatggtaaatcagcaagttgttttgtttaaccgaactgtacgtgaaaacattgcttatggtcagttacataatgcaagtgatgaagacgtaatagctgcagcaaaggctgcttatgcccacgactttattatgaacttaccaaatggctacgatactgttttgggtgctcaaggtctaaatttatcgggtggtcaacgtcaacgtattgcaattgctcgtgcaattttgaaaaatgccccaattctgattttggatgaggcgacaagtgcgcttgataatgaatctgaacactttattcaacaagcatttgatgaagctatgcaagatcgtacaacgattgtgattgctcaccgtctatcaaccattgaaaatgcggatcgtattgttgtgatggaccgcggacaaattgttgaacaaggtactcatcaagaattacttgctaagcacggtgcttattatcaattacatcagcgtaattttgaggaccattaa

SEQ ID NO: 51228 - DNA, 1953 bp, Acinetobacter baumannii
gtgagtgttaaatcaattttcattcaaacacacgcaccacatcaaagccgattagtacatggttttgactccatggtgaatagtggtgcttgttcaattgggtttattaagggtgattaccgtcaaattaatgctttagtcactgaagattacacggaaaatgatttctggcgtgttgtaaatttaaaaggtaaaaagggtgggatagatgcgtttgattctgttgcggtattaggcgctatcgatgaccagcatgcagctgatttagctatactgcaatttggccgaatgtttgatgctagtgttacagatgttattgaaacaaatcaatttggacttaagcgccatttatcatcacaacaatttaatttgacgggttcaaaaccgattcaaagatggcaactagaacaattacaaaatgttgtagcagctgaaaaacctgaatgggatggaatcaatttaatttctcatgagggtgatacttctaagttgttattagatatgcaacgaaatgatgatcacagccaattattaagtaaatttgatgggttacctacgcttttatctagtctaggcgtagaagaagctcattatgactctattatcgttgattaccagcatttagagcagctgtctgcaattttgcatcactctatggatcagttttcaaaaactggcgtcaaaatcgtaaacgttacggaaagtaagccctttaagcataaaaaagtccttcaaattgctcttacttatgattttgatgacggccaaaacttcacaatcctttttcataagccagatcgattatcaaaaaaaattagtccagcagattcattaatttcatggaagattttaatgaacaatcgggatattacggctgcaattcagcctaatcagggagaaggaatatcaattccagttctcgctggtcgaattatgaagttgattaaccaaaatagtaatcgttttaagcggttacaatctaaaaaagcagaaaaggccaaggctttagcagatgctgaactacgcctcgagcaaaaacaaagtcaattaaattctttaagtgcagaaatttccaatttattaaatgaattggatcagttgcaaaatacattgttaaccaagcaatctgaagaaaatgaagtaatcattaaagagaatagtctcgataatgagttaccagatagtatttctgatgaagaagccgaacgtttaaaagccgacttaaagcgtttaaatgctgatcctgaatgggcaggtgaagatggtttacgttaccaagcattctttgaacgtatcaataaggctctagagggggattctgatgcagtagtttgggcacgtgaatggatttctgatctagatgaccaggctttggctcaacagcaagcaggattagaagcaaaaaaacttattgatgccgaaaatgaagctaaacaaaaaagagatgaagaagtattagcagcacgtacagctggtatagctgaaaacaaaatgatgcaagcatggttagacactttggaaaatcctgaagattctaacaacatagactttatggcttgggtttcagatcgccgtggtgaattcttaaaaaactggaatggggccgaaggttcaccagaatatttaacagcattttatgaatattcaagagcatgggcagatgaacatttagcggatcgcctcagtaataaagagccagcccaaaattcagataatgatgaatctaaagaactcaatgctccgacagaagttgaaggtcttcagcctagtacgacaaatgatgaaggtaatcaactttaccgttcagtaattgaagggcaggttaaagttaatcttgagttattagagcaaattcgagatgaagcagaaaaagacttaaatgatccacttcttattccagcggtgacagaactcttgaatcaagtgcaaaaaatggaagcggagaatatctaa

SEQ ID NO: 51229 - DNA, 342 bp, Acinetobacter baumannii
ttgacgggtgtactactttccgcacttttcttagccaataaacttgaaaatgatatacaggtaataagttcattagaaggcaacgctcgtttatatgatttaagaggacaaatcttttttagttcttcagatagattcatgcaaagctttaactttaaagaggaagtaaaagaagtcattattgatctgactcattcacatatttgggatgtcacttcggttgcaatgcttgattcagcagtagaaaagttccaaaagaatggcatacaagttactgtacgtggtttaaatgaagccagttcaatcatgattgacaagtatggtacacatgcaaaaatttaa

SEQ ID NO: 51230 - DNA, 900 bp, Acinetobacter baumannii
gtggatatccgccaagtttcacttgcatttgaacagtctggccgtattcagaaacttttagttcaagagggcgataaagttcaagcaggtcaagtactggcgacccttaataccaatgcattacaaattcaggcaaagcaagctcaagcacaacttaaagctcaacaagaggcaattgttaaacaagaggttggagctcgccctgaagaaatcacccaagcaaaagctcaacttgcgtctgcccaagctgagcttgataaaaccaataaaaacttgcaacgcttacaaattttggtaagtagtaccgatggtcgagcaattagccaacaagaactcgactatgccaaaagtaatcaacatagtgctgaggcagcggtccgtgaaagacaagccaatttagaattattaattaaaggtgcacgaaaagaagatcgtgaagcaaccagagcacagtatgaagtgactaaggctaatttagatttaattaactataaccttactcaagcagaactaaggtctcctgtaaatgcagtggtacgagctcggttgcaagaagttggcgacatgacaactgctcaaaaggccgtttatacattagccttgaccaatccaaaatggattcgtgtttatgtaaatgaacaagatttaagttcaattaaaatgggagacacggctcaagtcattcgtgatgcttatccgaatcagcctatgaatggaaaaattggctatatatcttcagtggctgagttcacacctaaaacagtacagacagaagagattagaacaacacttgtttacgaagttcgggtgtatgtacatgatccgaatgatcaattaaaaatgggtcaacctgtgacagtaaatgtcccacttgctttaagtgagaaagcctatgattga

SEQ ID NO: 51231 - DNA, 2580 bp, Acinetobacter baumannii; identical to SEQ ID NO: 51119

SEQ ID NO: 51232 - DNA, 1515 bp, Acinetobacter baumannii
atggctgtaccatgctgccttggtgttttaatttatactgcatttgtaggtttcgaaattcctgcactacgaacattattatcagcatttatatttattggatttctattattaaaacaacctattaaaccttttacattactcgtatatagcgcaagtctactgttgctaattgacccgtttagtgtgctttctgcaggtttttggctgtcttatggggcatgctttattttattaagaatttaccaaactatagcgcagctacctgagcaacagtttttaagtctgagctcaaaaatgatttttatgggtaaggtgttaattgagtctcaaggcaaaatatttattgcattgagtcccttaaccttacttttctttcaacaaatttcttgggttgctccattaaccaatattattgccgtgcctattgttggtggtgttattgtccctttaaacatcatggctgcttgcgcatggtttatagtaaaaccgtttggaaatatgctttttcatttcaatgatatgttgctcagcatattgctgagttgtttgggcttattagaaaaactctctttaccattacaaggtataagcttgacgccactgtctttattagcgattagttttgccataattattttatttttacctaaaggaattctgcccaaaacttgggggatattatgttgtttacccttagttattatgaacaaaacgagtcaacaaattcagcttaatattttagatgttggacaggggcaagccatttttttacaacattccgaacaaaactggttaattgatacaggcggttcttacgatgaaaaaatatttagtattggacaaaatgttgtagtgccttttctacgtcagcaaggcgtaagacaattagatcatgttgtgctatcccatcttgatcaagaccatagtggcgcgtttcctcttattcaacaagagattcctgtaaagcagcttatttcgaatgaacaattaccaaatgatttaaagcaaccattccaatattgccatcaagggcaacaatggcattatcctgagttagatattcaaattttatggcctaaagaaaaagatctggcttttgttgcttctaaccagaatcaatattcttgtgttgtatatcttcaatttaaaaaagttggtggttaccaaaattttcttattatgggcgatgcaggatgggaagccgaatacgagttattaaaagattatcctaacttgaagatagatgtgttggtgctagggcatcatggaagtaagcacagttcggcttatgatttcttggcgaccttaaaacctaaactggccattgcatcggcagggtttgataaccgttatggccatcctagccaacaagttatagcacgtttaaaagctctacatattccgctaaaaagcactgtggaacaagggaccttaagttttgtgttggaaaatcacaaaatagttttacatgaccgacgtttggataggctctggttgagtagaggtttttaa

SEQ ID NO: 51233 - DNA, 960 bp, Acinetobacter baumannii; identical to SEQ ID NO: 50999

SEQ ID NO: 51234 - DNA, 546 bp, Acinetobacter baumannii
atgaatattgagcaatatttagatgcactaataaaacgcgaaggtggctatgtaaatgatccacttgatcatgggcatgcgactaaatttggaattacacaagccgttgctcgtagttatggttatcaaggtacaatggagaatttaaccttagagacagccagagaaatttataggaatcaatattggcttgagccgcgatttgatcaagttaatttgatcagcgcacttgttgctgaagagttattcgacacgggtgtgaattgtggtattagtttcacgaaaccacttttacaacgtgcattaaatttattgaataggcagggcaaagaagactgggtagaccttaaggtagatggtgaatatgggccagccactttgcaggctttaataaaatatattaaaaaccgtggtaaggaaggtgaaaaagtgctggtacggcttcttaatattatgcaaggccagcgctatattgaaattacggaaacaaatccgaagcatgagcaattcttttatggatggcttgctaatcgtatcagcttataa

SEQ ID NO: 51235 - DNA, 1158 bp, Acinetobacter baumannii
atgctgccattcgcttcaggcattcctaatctggcaccaaacttttcgcaggtccaaggtactgctgcagtctctcaaggtggtactggggcgacaactgcactagatgctcgaactaacttagggcttggtagtgccgcgactagaaatgttggtactacagctggtaatttgatagaagttggcggttttggaattggtggagtaggccaaacttttgaaagaaaaatgattacgggagtaaacctagattctgtcgttagctatgtattgttatttccttattctgtcagaagctcacccaatcgaaacatgtttggtgagctagtgttttcgaggggtgattcaggctcagcaaatcaacattcgagaactttagtatcaattcagcaagcatatgatcgtgttacagctcggtttattagtattggtgtaacaactcatatttcaggtatggctgtagttaaatatcaaaatgtagactatgttgccattcgaagaacagcaagttcttcaacatcggcatttagatatttttccggtatttccaatattacatctgataattatttagttactgttcatacagatgacgttgttattgtcagtgagatacctgttgtaattgagcagctaagaacatctgcgaatacttctgtggattccaacggtttcataaaagcagcatcaccagtagttaagctatttaacgaccatatcgagctcaataatgatgcaaaaaaacagccgattgaatttaagagaattgatgttggtgattatttactagaaggttctttaggctttgctcaggaaggctggtatatcgaagtacctaaagatgcaaacggcaacacaatcgtcgcagtagtgtatgacaccctagaaaatggtgacatctcaattaaaacttacaagcgtaagtttgattttgaacttgctgctgttgtggcagatcacgagaacccaatggacattccagaaggccgctggattgatatccgtctgcatgaagaacctgaaccagaacctgaggttgaagaaactttgagtgaaacaccagtggatttccagcctactaacttatctcaggcagttgctgcagccatgaatggcgtggaaccgccagaaatctcagacacagacgaaacactttaa

SEQ ID NO: 51236 - DNA, 918 bp, Acinetobacter baumannii
atgagttcaggcgcaaaaattcgattatatgcttgtgaagaagcagttttaggaacaactccagcaaacccgatctggtacacagttcgccgtgtaagtgatggtttatctgaaaatgtttctactgaagaaagcagtgaagtggttgattcacgttttcgacaaggtggggtagttactgaagcagaagtagcaggtcagttagagtttgaattatcacttggaacatttgatctattcctaagtgctttagccttcaataattgggcgggtaacgctttaagttttggtggtacggtacgtaagtcattaacgttagttaaagtttttgaagatgttggccaagtctttatttaccgtggagtacaggttaattctggtgaaattactatccagaccactggaaaaattactggtaactttggtcttgtaggtagctcgtttactcgtcagcaaactaaccctgtagtgaatccggttgcagcttcgacacgtccgcttgtcagtatgccaaacgtggaaaacttgcttgtaaacggccagtcaattcaaggcaaagcatgtctacagtctttgaccatttctattaacaataaccttgaagcaatccgttgtatcggatctggtaaatacactccagagttttatttagagaagatgatggatatcgaagcgaatgcttcattcatgttctcggccacagctgctggttggattgatgcaatcaaaacccgtgatgtgtttacactgaccttcgacatcagagacagcaaaggaagtaaatattcgttcaacttcccgcaattggaagtcatggaagccaatcacccggatggtggtggtgatgacatcattactgtagatatcaactttgcccaagttcgtacagcgccaacaattgtacgcgctcttgtgtaa

SEQ ID NO: 51237 - DNA, 885 bp, Acinetobacter baumannii
atggtgattgatgaatggtctttaaatacgattatggctgaccttgcgcatgcttatcttgctcgctcaaatgctcaagccccaaactggaaggcacctgcccaatccattcttgatttttctttactccagcaaaaacaaggtatcaaccaagaccatctaaattattggactaacctattaagaggagcaaccaaaggactaaaccttcctgtttcggaacatgaattaaatgctgaaaaggaaaaacctccagtccaatggctcgaacttaaatttgcaccagaaatgcatgaaaagcttctcgcattttcgagacaacacagctcttctattttcacggttctctatactgctatcgcccatgcattacagcaacaaggtaatttaaaagatattgtgattggtacttctgcctctggacgaactgatcctgagttctttgatacggtgggttactttacgaccatggtggcgcatcgcacacagtttagcccttcagattcattccaatcattgctccacaatatcagcacaatgattaatacctcgatggcctatgcagatattccaatcaaccatattcaaaatgcgttagggatgcgtgccgatgaagggctattatttgatgtgtttattcatatccattcaaataacgctttaaacggcgcgctcaaaacacctcagggacaaaaccttccttatcgtcagattttgccggaacgtgatgaatcgatgttcgggttacattttgaaattatggaaaatgtgattgatggacaacatcagttaagcatgattattacttatcaagcccaccgcttcccgactgcaacagtgcaaagtatctgtgaaaaaattaaggcaaccttagctcaaatctag

SEQ ID NO: 51238 - DNA, 726 bp, Acinetobacter baumannii
  misc_feature (678)..(687): n is a, c, g, or t
atgttggaacaattttccaaatcgccctctctcctttcggttactgattacgaagaacatatctggatgttgcaattacaacagcctgaacaagttaaccgacgttttaatctatggaaacttaatcaagatttagacattcaactgctcattaaagcaattcaagacatcattaaaactacacctgacttaaatgtccgctatacatttagtgtcgaaggtgatttatacaaatatccatttgatgaccattcagcttgcctagaagtaaaaaagagtaatacagaacacgtatttgagcaggtaaataccttaaaagcacaagcatggaatgcagaatttcatccccctttttttacaagtcttgtagaaactgaacaagactattttcttattttagcgctccacccgattctcgatgaaagctatcaaaagtcagattttattcagactatacaaaatcgatatcaacaatattcaccacataatatgccattggtgctgacagaaattgatatatcaaatcaactcgatgcaaattctacaaaagcgtcagaacaatctaaccaaaattatgtgtcagaaattattttagaagagtttcgaaatacgctcgctgaaccagaaatgagtcaacatgatgacttttttgattttggcggccattcactattagcnnnnnnnnnnactattagcaacgcgaattattgggaacctactcaataa

SEQ ID NO: 51239 - DNA, 1179 bp, Acinetobacter baumannii; identical to SEQ ID NO: 46091

SEQ ID NO: 51240 - DNA, 1374 bp, Acinetobacter baumannii
atgaataatattccacatgcaaataagtcattctggctagcccactcaggcgaatatattccatcaccacctcttagaggtagcattgatgtagatgtggtgattattggaggagggtttactggattatctactgcttatcacataagaaaagtggattctgctgcatcagtggctgttcttgaaggcgaatgtgtagcatttggtgcttcaggccgtacctctggctgggttgtgccagttccagtacttgatcccactactgcaaaagtactttatggaaaagaaagattaactgaacttcaaaatttcgcatggaatggtctggactatgtgcaggacttaatcaaacgcgaaaatatggatagcgattttgaaatgcctggtgtgacatttactacacttcgcggccatgaaaaaagattagagcactttactaaatattggcaagatcaacctcgctctaaagacagcgtctatatggatagagctacggtaagccaagccctaaatagtgatgcattttctggtggatgccgaatgccacattctgggcaagtcaatcctgtaaagcattctcgagaactaaagcgaattgcagaacaggctggtgcacaaatttttgagcaaacgccagtattggatatagaagataaggaaacgttctttattctcaaaactccagaaggagaggttagagctaaacatattgtattaggtaccaatggttttactcatttattgccaccagaattggggctaaaacgcgcccaactccccatgtttgtatatcagttaattaccgaacctttaactgatgaagattggaaagcgcttggatggaaacatcgtggtcagttttatgacaaaacaacctattgtcctccaacctgtagaacgactgtagatggaagattgcaatttaacctatgtgatatctatgtaggagaagggcgttctatggacgaagctcagaaagtgcaattttatgatgccgctgagcgaatgtataaaaaggtatttcctgcatttcagaaattaaaaattgctcaacgttggagtggcgcttgttctattccttttgacgtaaggtctcaagtgggcacactccataatggtcgtatttcttatgcctatggatacagtggtgcaggcgtcatgatgtcacaaaattatggccgaattttagctgatcttgcattgcaacgtaaaacggagcttaccgagcattggtttgttgccaatggagaaaaaggacacgctaaatttaaacgtttcccactaattccgggtctcatcgctgcgctacgtacttatttcgaatacgaacgagtatcagcactttctaggagaagacgccttggactcgattaa

SEQ ID NO: 51241 - DNA, 237 bp, Acinetobacter baumannii
atgtctaatattgagcaagatacacgttttattgttaacaataatttgattaacaagggctggatcttggacattcaagatccaaacaaaaatgtcttttttgaatcagatatcttaagaattgttaataatgagtttctcaagaaaagtaaaaaaagacccgattatgttcttttcgattcacaaaattttctgcgaaacacggcatttgtatacccaaaaaccattatttattga

SEQ ID NO: 51242 - DNA, 1734 bp, Acinetobacter baumannii
atggccttattggtaggctgtaatgataatgatgacaatgattcaagcacaccagcaccgcgaagtaaccaaactgtaaatattttagctttcaatgactttcacggaaatttagaaccacctaaacgttacgttgaagcagcgaatccaaatgatgcatctcaaactgtacgtattcctgtcggtggtgtgagttactttgcagatgcaattaagaaacttaaagctcaaaatcccaataatgctgttgtgtcagcaggtgacttaattagtgcttccccactcacttcttcgttatttctagatgagcctactattgaagtcatgaatgatattcaaattgacttcaatgcggttggaaatcatgagtttgaccgtggtacagatgaattgcgtcgtttacaaaatggcggttgtcaacaatataccagcactgccccatgccaaattaataaaaactttagcggcgcaaaattcaatttccttgcagctaacgtggcaatgaaaaatgatacaagtaaaacgatttttcctgcctataaagtcaaaacttatggcgggattcctgtagcttttattggtttaacactcaaagcgactccaagtattgtttcagcggtgggtattaaagatgttgaattccgtgatgaagcagatacggtaaatgctttaattcctgaactccaaaaacaaggtattgaagcgattgtcgtcgttgtccatgaaggtgcagcgccaagtacgaaactcaatcaaaaaacatgtgatggcttaagtggaccaattttaggtattttagatcggttaaatccggcagttgatattgttgtttcggggcatacacatcagtcttatatttgtgattatgcaaccaagaatccagctaaaccatttttactaacctcagctggccaatatggcactcttattaccgatattaaggtggagttggatggtaaaactggcgatatcattaaaaaggatgctaaacaaattccggttcaaagtgaggcctatacttcgggtacaaccactgtaagtctgacagacctctatcaaaaatttagtaagacaccaagtatcgaagcgattttagataaataccgtcaagcagtaaccacaatttctgggcgtgttgttggaacttctactgccgttgtgagccgtacgcaagtcgaaagtggtgaaagcccactaggtgatatgattgccgatgcgcagcaagctgccgctcttcaagcaagtaatcaaggttcggattttacgttaatgaacccgggtggtgtacgtgctgacctactgattaacagcaataaccagattacgtttggtgatatttttgcagttcaacctttcggtaactcgattgtgactttgagcttaaccggtaaacagattagagatgtgcttgaacaacaatggtctggtgcaaatgcaaattcgcctagaattttacagccgtctaaagagttgagttatcaatatgcggcaaatacatctgtttcaccacgagcaagtaacatcatggttgctggttcaccattagttgacactaaagtatatcgcgtgacggtaaatagtttcttggcagatggtggtgacaactttacggtattaaaagaaggccaaaaccgtgtcggtggtggtcaagatatcgatgcgcttgaaagctatgttgctaagaactcaccgttaattattccggctacgactcgtattaaagtcattaaataa

SEQ ID NO: 51243 - DNA, 1218 bp, Acinetobacter baumannii
atggtcgaatctgcgcagtggaaacgccgttatgaaacccgttcagatttaaatcagatatatcctctaagccagcagattgaaagcgcaagaaaagtcatgcctgcaactgcaaaaattacagaagtcagaccatcaccaagccctgtgcaaactacgcgggttattttttccgatcatacacaccatctaaataatgaagccatttttattgatccttatacgctttctgtaaaaggacaacttgctgtgtatggaaccagtggcgtattaccgttacgtacattcttagatcaattacacagcaatttattattaggaaaatggggacgtttttatagtgaacttgctgcaagttggcttggttttttaactttaagtgggctatacagttggtggaagcgtcgctcaaacttcaaaaacagacaaacaaataaaaatcacttattaaaatggcatagttctattgggttagctttactaccacttttattcttcattgcgattactggtcttacatggtctcaatgggctggtgataatattcgtattgcccgtcaatggttaaactggcaaacaccaatattgaccacctcactaaatcagatttcattgccagaaatggctcatcatgaacatcacgaaatgatcatggaaacgccaaatttagacatcatgccagctgaattcgattctgtattagcaattgctcgagcaaatgggattaattcaacagaaatacaaatcaaaccgccagttgctgcgaaccaagcttggactgttgcggaaatacagcgcaaatggcccacacaagcagatagtattgcgattgatatgcatgaacacaaggtaatcgataaactcgcttttaaagattattcattagttgcaaaacttacacgctggggagttgatgcacatattggggtactattcggttgggtcaatcaattaattctggttctgtatgcgctcgggctatgtataatgattgtttatgcgtataaagcttggtttaaaacctccaatgtaaagcttacgacccatcattttattaaccaaactttgttcgtatggaaacatgcaactacacaacaaagaataattacgacattaatgcttgctattctagggctgagtttacctatttttggatttagcttagtcatcaccttatttattttgctcataaaaaaacagctccctcttaaagcttaa

SEQ ID NO: 51244 - DNA, 399 bp, Acinetobacter baumannii; identical to SEQ ID NO: 45732

SEQ ID NO: 51245 - DNA, 1281 bp, Acinetobacter baumannii
atgaacacttctctttttccatcaatgaccttggatttagaaggtatgtttaaaccaatctcactgtatatagggttgagatatactcgcgctcgacgcagtaatcattttatttcttttattgcattggtttcgatggtcggtttgacacttggtgtcgctgtactaattacggtactttctgtaatgaacggtttcgaccgcgaattaaaaaatcgtgttttgggaatggtaccgcaagcgacagtttcatcgacgcaaatccttacggattggcctgaactggttaaacgagttgaaaatcatccccacgtgacaggagttgcaccttttacccaattgcaaggtatgttaactgctcaagggcaagtggcaggtattatggtgacgggtattgaccctaaatatgaaaagaatgtctctatcattcaaaaccatattgttgccggtagtctagactcacttaaaaaaggtgaattcggtatcgtacttggtaaagacatggccgattcgcttggcttacgtttaaacgatagcgtgacattggttttacctgaagcgactccatctccagctggtgttgtacctcgttttaaacgctttaaagtggtgggtattttcagtgtaggtgctgaagttgactcgatggttggatacattgctttatatgatgcttcaaccttattgcgtttacctgatggcgctcaaggcgttcgtctaaaattagatgacatttttgccgctcctcaagttgccgatgacattgtgaaaaatttgccaagcaatttctacgcaaccaactggacttatacacatggcaacttatttaatgccatccaaatggaaaaaacattagttggtttattgcttgtactaattattgtagttgctgcatttaacattgtttcgtctttggttatggtcgtgactgacaaaaaatcagacattgcaattttacgtactttaggtgcatcgccatctatgattactaaaatctttatggtgcaaggtacggttattggtgtgatcggtacagttgcgggtacggttttaggggtaattctggcacttacgatcagcgatattatttcttggtttaataatgttctcgggcttaatctgttcgatgcctattttgtacattacttaccttcttacttaagatggcaagacgtgacaattattgtgattgtttctttactcttaagtttcttggcaactatttatccggcgcttcgtgcagccaaagttcaacctgccgaggcattgcgttatgagtaa

SEQ ID NO: 51246 - DNA, 555 bp, Acinetobacter baumannii
  misc_feature (496)..(505): n is a, c, g, or t
ttgttaggtttggcgtttgcttcatctgttgctgctcctgccgctcaagcagaaattgtaattcatggcacccgtgtaatttatccgtcggatgctagagaagttacgctacaagttagcaataacggttcaaagccagcacttgtccaagcttggattgatgaaggtgatccaaaaagtactccggatcaatcaaaagttccttttatgattgctcctccaatttctcgtgttgaagcgacaaaaagtcagacgctccgtattactgcccttccaaatgcttctcaatttaaccagaagcaagaaactgttttgtggttaaacgttttggatattccaccaagacctacctcaaaaaatgcagatacgacacctgataacttcttacaacttgcaattcgttcccggatcaaattcttctatcgtccggcttcaattaaagaagatgcgaatttagcagcagataagcttcaatgggttaaatctggtcagaatnnnnnnnnnnactcctttccacattacgatgacttctgtttatcaaaaggttggagataa

SEQ ID NO: 51247 - DNA, 273 bp, Acinetobacter baumannii
gtggcagttgatgaaaacggggaagtagtcattggtaaagacggccaaacaccgatgaccccaaaagaatgggttgaatctctacgcgagcaaaaaccgtattactggcctaaacctaatggcatgggcgcacctggtagcaacaattcaaaaggtcagccagacattctcaaagcagatggctcggtaaatatgaccaaattggcgcaattacgaaatgaaaacccgcaactagctaaagagctagcggcaaaacacggtattaaactttaa

SEQ ID NO: 51248 - DNA, 951 bp, Acinetobacter baumannii
atggctgagacaaaaattgctgatgtaatcgtacctgagttatttactccgtacgtattaaataagactgccgaaaagtctgcattatggcagtcaggcattgttggggagctagatgaaaaagttgcttttggtacagaaggcggtactacagtaaatattcctttctggaatgatttaagcggtgagtcagaagtactttcagatggtaaagctcttggggtaaataacatcacggctggtaaagatattgctattttgcatgcccgtggtaaggcttggggtgcaaatgatttatctaaagcattatctggtgatgacccattgggtgcgattgctgatcttgtagcagattactgggctcgtgaatttcaggggtttaccgtaaatacacttaaaggtgtatttgggtctgcaagcatggcaggtaatacccatgacatttcggctggtactggagcagcagccgtaattgatggtcattcatttatcgatgcatcttataaattgggagatgctgttgataaattaacagcgatttcaatgcactcattcacaatggcagcactagccaagcaaggtttaattgaaactgtgcgtgatgctgatggtgtggtgctttacaaaacttttatggatcgccgtgtgattgtcgatgacggtatgccagtggatggtgatgtatttacctctttcttgtttggccaaggtgcgattggtttccaagatattggtgcaccagttggtgtagagactgaccgtgacagcctagcaggtacagatattcttattaaccgccgtcactttgtattgcatcctcgtggcattaagtgggcaggtgatacaggtattgcacctaataatgctggtctagcaacagccgcaaactgggaacgtgtctacgatcctaaacagatccgtattgtggcattcaagcacaagatcaaataa

SEQ ID NO: 51249 - DNA, 336 bp, Acinetobacter baumannii; identical to SEQ ID NO: 46142

SEQ ID NO: 51250 - DNA, 894 bp, Acinetobacter baumannii
atgcaaatcaccattgtatctgcgggtaaaattattccagcgtctgagctgattagtgcaactttaagaactgatctcgtacctattcccgcatctattgagttcacagttcaatctactactgaattagactcccttttaaaagaaggggagctacttactgtaaatgacatatctcatcctttcgaacttatcaaagttacccctctaaaaactcagactattaaacaagatcggcgagtaggtggcatctcatgtattggtattttggctggttgtaaaagacttatcgaatattcaaagcaagcaattattagtaatgaaacttcttttaattcagtaattcgagcttgtggtgcaacgatcagtctgggcagtgatttacctttgcctaaatttgtttgtttaaagggtagtatgcctacacagcgcttggctcattatctgcaacaagaagcagctgtaatttgctttcaaaataataaagtgtctgctcaaaaaattgattctttcttcaaaaaggaacctatcacaaaactagatcctagcagtgtcgtttggatatcaagtaaacctttggaactgatgcaaaaatcatcttttgtcacagttgagaataacggttcaacggttgttggtgatgactcaataaccccaggccacactgtgacgcaaagagctggtttagatgcccgacaagtcaaaaacttggaaaaagttttgattatgcgtgggaccattattagaccactaaatttgaactggaatgcaggcgatatatttgaaatagatagtaagaagtatgtcgttttaactgctgcacatcatatagatacaggcgcaatcgggggatcaatggggacttcatcaaagttctggattgctaatttgtag

SEQ ID NO: 51251 - DNA, 384 bp, Acinetobacter baumannii
atgcattatcctcatagtgaagaagaggtgaagcaatatattgaaaagcaggtttcacgtgcttttgaaaatattcagcatgagtttagacgccgtcatcttgaggtgtcgattagtgaagtggaagatggtatgcagcttcgagtcgatcatcatcatgaaattaattttatttataaagttgtttcacgtgaaacagtacctccaagttttttaattggtcgtacagaagcagaagacggtcagtattttcaagctgaggtatttttgagagaaggcggacaaaactatgatgtaatggactggactcaggaagatttgattcaggatattattgatcagtacgaacgtcatttacatttcttaaatatcgtacgcagttaa

SEQ ID NO: 51252 - DNA, 1269 bp, Acinetobacter baumannii
atgaatcttccaatgacaatgtcattacaaaccgtatcttttgaagagtttattaccactattgcggctgcattaggctgcggcttattggtaggtctggagcgcgaacgaagtaagttaaaacacgaatataaaactttcgcgggttttcgctcttttgcaattagttccttactcggagcagtttgttttttatttggtaccgcaatcgggattgtaggcgctctacttataggcgcgatcagtattgtatctcttaaaaatcagccaaatgaccccggtgtcaccacagaacttgcctttattatgacttactttattggggcactttgtatctggaatatttcgttagctgcgggactcgccgtcatcatgacgattattttattagcaaaacaatcaatgcacggcattgccagtcaatggattaccgaatcggaattgcgcgacgggatttttttacttgctctacttctaattgctttacccttagttcccaataaacctttttggggacccgttctaaaccctcatgtgattttaaagttactgacgttgattttatttgtacaagccctcgcacatattgcaaagcggcttttatcctctaaaaatgccttattactttcttctttagcctcgggttttgtttcaagtactgccaccatcgcgagtctaggcttagaagtacgctctggtcgcgcgaatgcaaaaacaaatgcaggtgcagcattaatgtcatgcgtttccacattggtacaaaccttaattattgtcgtcggtataagtttggcatggttcaaactcattatatttccaacactcattgcattggcttttttagcggtatgggctttcatcttattacgtaaggcagaactaagtacgacttcatctgaactcgataccagaatgttcagcttaaaagaagcgattattattgctgggacacttacgctcattcaggcaggggtttatggcctaagtctatatttaggcaatgcaggcttaatcgcggggacactacttgcttctttattcgaaatacatgccgctattgcagcagtgattgtacaaggtgaaccaaataactctcagacttcgttattaatcgcgttcatgggtggctttgctgttcatgcaattgccaagagcattaactctgccatttctggtggactgcattatgcccttgctttcatacctgcccaaattttgcatatgacaatatttattagcttgctatggatgaacatacattggttctaa

SEQ ID NO: 51253 - DNA, 807 bp, Acinetobacter baumannii; identical to SEQ ID NO: 45907

SEQ ID NO: 51254 - DNA, 234 bp, Acinetobacter baumannii; identical to SEQ ID NO: 45970

SEQ ID NO: 51255 - DNA, 378 bp, Acinetobacter baumannii
gtgaaatttgtcgtgtacagagatttaatccaaactctcatccgtttttataaacacattattcaacctgaacacattgcctttttacgtttggttattgaacaaactcaatgtaatgcaactttgagccaatacttatatgaaaaatgtgctctggatgtccaaaatacaattgctcaagccttactcatatctcatcaatcaggtgaaattacctgtacatctcctgatcattcctctcttatgtattttggaattttacgtgatattgaatggcgaatgattatgggaatgcctcttccacccaatgagacagaagttattgattatattaactattgtgttgatattttcttaaagggccatcataaagtctaa

SEQ ID NO: 51256 - DNA, 411 bp, Acinetobacter baumannii
atgcgagatttacctctggatgtggccaaagcaatttaccgcaaaaactattggacagctccgcgatttgaccaagtaaatacaatcagctcagcagtggccgaagagcttctagacactggtgtgaattgcggtaccggctttgcaaaacctcttttacaacgagctttgaatctcctaaataacaatggtaaagcagggtggccagatttatcagtagatgggatatatggtccggcaactcttaatgcactcaaaacttatttggtcaaacgcgggaaagaaggagaaaaagttttagttcgagttctgaatattatgcaaggtcagcgttacattgaaatctgtgagcgcaatccaagccaagaacaatttttctatggctggattgctaatcgagtatcaatgtga

SEQ ID NO: 51257 - DNA, 471 bp, Acinetobacter baumannii
atggagttagaccgttttgataaacaaattctggaaattttgtctcatgaagacctgaatttgaatgagctttcagaacggattaatctttcagttagttctgttcatcgccgaattaaacacttgattgaagctaatatcatggggcaactcaaaagagaaattaactttagcaaattgggttttactttgcatattttgctacaagtctctttaagcaagcatgatagtgagacatttgataaatttctttctgaaattgaagccattcctgaagtaacaaatgcttttttggtgactggtcaaagcgccgattttattcttgaattagttgcacgtaatatggacgactacagcgaaattttattaagacggattggtaaaattgataatgtcgttgctctgcattcgagctttgtcattaaagaatacaatgtatttaactgttataacttattaaataaagtataa

SEQ ID NO: 51258 - DNA, 750 bp, Acinetobacter baumannii; identical to SEQ ID NO: 46199

SEQ ID NO: 51259 - DNA, 900 bp, Acinetobacter baumannii
atgtctggtgcttttgaatttatcttggcaggtatgttagttggcttctgtgtaggtattacaggagttggtggtggatcattaatgacaccaattttaattggtctttttaggattgaaccgcatatcgcaattggtactgatttactttacgccgcgatctctaagttctgtggatcgatggttcacgcaaaaaaacttaatatcgtctggccgattgttttatggctagcggtcggtagtattcctgcatcttttggtactgcgtgggtacttgagcattatttaagtcagtcaactcattataaagctgtattaaccatggtattaggctttatgttgaccttaactggtgtttctatcattttccgtactcggattgaaaagttctttaataaattccgaaataaagagaatactcaaactgaaaatgagcaattagctgttcaaaataaacgcacctatattgtgattatggggattattttgggcgtattcgtaacactatcatcagtcggcgctggtgcctttggaattatggcacttgtaatcatgttccctaacttaccaatgattcgtattattggttccgatgtcgtacatgcagtattactaaccttagttgctggtctgggacatatgagtgccggtaacgtcgactttatgctacttatgtggttgttggtaggttctattccggcaattattattggaacattaattagctcacgtatgccagaacgtttaatccgtaaaattttgggtattacactatttgctcttggtgttaactttatggtccaccagctgacaaaaccaattgaaaaaccatattttttgatgagaataaacccgctcaacgcaaataataaaaaggccaatatcctcaacaatgaataa

SEQ ID NO: 51260 - DNA, 927 bp, Acinetobacter baumannii; identical to SEQ ID NO: 46217

SEQ ID NO: 51261 - DNA, 222 bp, Acinetobacter baumannii
atgctttttattattcttgtttttagtatgtatatacttaatttattaggcttactttcagctaagcatcttttagctctaatactttctgttggactcacctcaatttttagcttcttcttagcttggtctgacttaagagaaatctctttgcttgaaaaaacattaaaagatcgcaaagaatcaagagaggcaaaagcaaaagtattgagcaataagtaa

SEQ ID NO: 51262 - DNA, 204 bp, Acinetobacter baumannii; identical to SEQ ID NO: 46177

SEQ ID NO: 51263 - DNA, 243 bp, Acinetobacter baumannii; identical to SEQ ID NO: 46178

SEQ ID NO: 51264 - DNA, 831 bp, Acinetobacter baumannii
atgaaaactcttattttgttgcctttacttagttgcttgagcctgacagcctgtagcttgcctgtttcaaattcgtcctctcaaatcacttcaactcaatctattcaaaccattgccaaattatttgatcaggcacaaagctctggcgttttagtaattcaacggggcccacatctacaggtctatggcaatgatttgagtcgtgcacataccgaatatattcctgcttcaacctttaaaatactcaatgccctgattggcctgcaacatggtaaagccacgaccaatgaaatctttaaatgggatggcaagaagcgcagttttgcagcctgggaaaaagacatgactctcggccaagccatgcaagcttctgctgtacccgtctatcaggaactggcacgtcgcattggtctggaactaatgcaacaggaagtgcaacgcattcgatttggtaatcagcagattggtcagcatatcgacaacttctggttagtcggacctttgaaaatcaccccggaacaagaagtcgaatttgcctctgcgcttgctcaagagcaacttgcctttgatcctcaagtccagcaacaagtcaaagccatgttactgttacaggagcgacaaggttatcgactatatgccaaatctggttggggtatggatgtggagccgcaagtcggctggctcaccggctggatcgaaacacctcaggacgaaatcgtggcattttcactgaatatgcagatgcaaagtaatatggatccggcgatccgtcttaaaattttgcagcaggccttggccgaattagcgctttatccgaaagctgaagggtaa

SEQ ID NO: 51265 - DNA, 738 bp, Acinetobacter baumannii; identical to SEQ ID NO: 45901

SEQ ID NO: 51266 - DNA, 672 bp, Acinetobacter baumannii
atggctcttaaagaccgtttaaaagattcaaggattaaagctaaaagaacacaggcagaggttgctgaagcagtaaagatgtctcagcctgcttatcaagctttagaatcggggaagaatttaaaatctgcttttcttccactcattgcacagtttttaggtgtagatgcttattggcttactacaggaaactcagaagactcttttagagaaagtgatgtatttaatcctactgttgtgagtaacgatgcagcagaccaatatgtctggatcgaagtagttgaagcgagtttttcttgtggtacaggcgaatcaattgaatttcattttgatgcaattaacggaaaaattcctttccccgcttcattctttaaagaaaaacgtgttgctcaggaatgcatgcgtattatcaaagctaagggcgatagtatgaccgattacattaaagatggtgatctggtcggtattgatatttctcaaacagaagtaattgatggtgaaatctatgccgtttattttgctggtgaaggcatgattaaacaaatttttaaagaggcagatggctctttaattttgcatagtttaaatgaaaaatttagggaccgacgtgtcaccgaagagaacgggaaaaactttaaagtcatggggcgtcagttctggagagcaggctaa

SEQ ID NO: 51267 - DNA, 387 bp, Acinetobacter baumannii
gtgatttcttgggtagcagcgggttcatttacagatgtacaaactgtgttaaaggatacggaagtaatagaatggcttccaccaatgaaaaaggctggtaagaatggttatggccttatagtcactggatactcaatgtatccaaagtttgaacctggtgatcgaatatatgtaaatcctgattatcctgtgtttgatctaaaaaccaatgatcttgtaattgttgcatgtgcaggtgaatcagaggctacttttaaaaagttaattattgaaggaaatgaaaaatatctagaaccgcttaatacaaaatggcctgagcagattattaaattaactgagggttgtaagttggtaggtaaagtagttggtatgcatagggagttttaa

SEQ ID NO: 51268 - DNA, 288 bp, Acinetobacter baumannii
atggaaagaccagataaagatatttttaaatttcaaggaattaacacctttttaactgtgtttgctgaggaagttattaaaagccaacccaatttagcagctaatattttactaaatataaaaaatttagctgatgagaaccatcctttagtggagcaagcttttatacttgataattttgaaaatcctgaactagctaaagatacggtttttcaagcacttagtggctttaataatgaattagcacgcctacttttaatgacaaaaaattcattaatggatagttaa

SEQ ID NO: 51269 - DNA, 441 bp, Acinetobacter baumannii
atgcttaagaatggtattgaactgtatgagtttaaacctgttctggaacgacgacgtagaacgtggtacgaaatcgtaacaggcagcgttataccagcaaaaggaaaaaataagtcgagcttgcatgccaagttttttgatgtagatggcaaagtctttatcggatcatttaactttgacccccgctctacctatttaaacaccgaagtaggtttggtgattgagtccagtcaattacaaactcagatttctgtcatgttagatcaacatttacctcaagtagcatatcaacttaagctaaatagccaaggccaaattacttggctagattaccaagccaacggacaagtcattgaatatgataaagacccgggaaccagccgttttcagagaacaatgattaaagctgtctcttatttgccaattgagtggatgatgtaa

SEQ ID NO: 51270 - DNA, 549 bp, Acinetobacter baumannii
atgctgtttgttgctctagtgattaacccaattctagtaggtttaacaattcgcggtaatccctacccattagtatttaaatgcttaaaagaaagtggtatcacagcgttctttacacgcagctcagcagctaatattcctgtaaaccttgatttagctgaacgtttaggcgtaaatccttcaactgcgagcgtttcaattcctttaggtgctactgttaacatggctggtgcagcagttacgattactgtacttactttagcaactgtgcatacgttaggaattcatgttgatttggcaacaatgattattttatctattgtagctacaatatcagcatgtggtgcatctggtgttgcaggtggttccctacttctaattccagtcgcatgtagcttatttggtatttcatcagaaattgcaatgcaagttgttgcagtaggtatgattattagtgtattacaagattcaacagaaacggcgcttaactcatctaccgatgttttatttacagccgcagttgatattcgctcaagacaaaactcatag

SEQ ID NO: 51271 - DNA, 684 bp, Acinetobacter baumannii
atggtacataaagaattatcgtatctttatttttcgcataaaaatcaaggacacatacatgataatgattggtacatgtaccttatggaccaaaatatactaaacttggaaactcaaaaaatattaaaaaaaatgactcataggaaaaagaaggttaatggaattacgactttagttcctaaaacacaaaacattccaactccaggtaaagttatagcaaatcagacatttggtttttggattaaacttattgaattacatccttctattgattggcctgaagttttctttaagggttttaaagatcattttgctgtaaataaaagttattgggatacaaatgctatagacgatttgattattcggttaagacaggttctatctttaagaaatcgtattgctcaccacgagccattatggaaatttactgagattcttcatgaaaaatcaaaagtagtgatctatgaatctgctactaccccaagtgaaagcatttcaagaatgttgaccttgaatcatcgtttatgccggttaataggttggatatcaaaagatagaagggatgactatttatcatcaagttataaaagacattttgattggttctgccaagaatcaactatcgaaatatataaaaattattcctatatgagagaactgccactgtctcttatacacatctga

SEQ ID NO: 51272 - DNA, 474 bp, Acinetobacter baumannii; identical to SEQ ID NO: 46678

SEQ ID NO: 51273 - DNA, 582 bp, Acinetobacter baumannii
atgcttgaattcttttctcgattaagcttagtcactaaaattattatcgccattattttagggataggcgtcgcactattatttccaaccgttacgccgtacttaagcttgtttggtgaactatttattaaagcattaaaatcggttgctcctattttagtctttgtactggttctctcatctattgccaacttccaagtcggtcatagtgcaaatttacgcccagtattactactctatgtagtaggtatgttattagctgcttttagtgctgtgatcgctagcttatcttttcctagtacgctttatctcaacactgtttctcataataatttgcaagcgcctggtagtctcgctgatatattaaaaaatctgcttttaagttttattgcaaaccctgttcaagcaatcagtgaagcgaactttattggtattcttgcgtgggcaattggtctcggcttagcaatgcgtcatagctcggatacaaccaaacaagtaatgcaggatgtttcacatgctgtaagcgctattattcctgtctcttatacacatctgacgctgccgacgaagaggatagtgtag

SEQ ID NO: 51274 - DNA, 609 bp, Acinetobacter baumannii
atgtttaagattattctattggggtggattggcggtattgcattgatgggaatagatttccctttaatcatgcaatatgaaaaagtgggcgaggctctactgttacttgcctttattttttatctttataaacgaccaatgttcgttgatcgaccatttttaaaggcagtgttttgcttattatgtacaacaagtctttttatggttggttaccactatgctgaaaaagcactgattgaacgattagaacaaagagaaacggatacccgaaatctcgacattattgtttatataaaccgtttaagtgaagaaaaagataataaggttcaacaaactgcacaagttctaaatttttctaaagaaccggtgaattggttgctatatttaaaaagtaataatcaaaatttattaaagaataatcagaatcttgaattaggtcactattatcgaatatctggaaaaacaagacctgcgcatagttatgccaccccaggagcttttgatcaggaaaaatggtttattcagcgaaatattatgtctggttttaatgtgagatatattgctgtctcttatacacatctgacgctgccgacgaagaggatagtgtag

SEQ ID NO: 51275 - DNA, 279 bp, Acinetobacter baumannii
  misc_feature (23)..(32): n is a, c, g, or t
gtgaagcgactaaggctattggnnnnnnnnnnggctattggtgtagatgttgaaggtggcggctattaccatgttcatggggtatctactgacgaaacctcagaagcagcagatgatgatcatgaagatgatctctggtttgcgttagcgcaagcaataactaaagaagactatgagagcttaacaacgctttgtatggattattgtgctttatggaatgagttttgggatgcacaaattgctgatattcactacttagaagcaaagaagttagcataa

SEQ ID NO: 51276 - DNA, 345 bp, Acinetobacter baumannii
  misc_feature (315)..(324): n is a, c, g, or t
atgtttccacgtgttttattaagtttaaatgtacttgatgaatttggttttagacccggaacagacctggacaattattatctaggtaatccggagtatgcacattatcctttatatgaagatttattgaatgattatggtttgagtgagaaggaccgtagagggtatcaaccttcaaaaattgcagatcaggtaagaaattttctagaatcatcttatgatagttatattaaagtagttgctttacttgcagtggccgaagaagaagtgattctttttagcccaccacttcgtgaagcgactaaggctattggnnnnnnnnnnggctattggtgtagatgttga

SEQ ID NO: 51277 - DNA, 312 bp, Acinetobacter baumannii
atgattactactattgcggtaacgtggaactttatctacaacattctttatgaaaaatgggaggctcgccaagaaagtaagtcgcgtacggttaaacgaagaattgcgcatgcgatcggatttcaaattactttagtaatgttcttaattccgcttattgcgtggtggatgaatatttctcttgttgccgcattttggttagatgttgcatttattattatcattccaatttatacgttcatatttaattggacattcgataagttatttggattgcctgcctctgcacaaccaagtactgctcaacagtag

SEQ ID NO: 51278 - DNA, 456 bp, Acinetobacter baumannii; identical to SEQ ID NO: 46252

SEQ ID NO: 51279 - DNA, 132 bp, Acinetobacter baumannii
atgatgccctcttttaattataaacgtttacgtttagcggcagcaatttgtgattggcgcatacggaaaccagctttttgtttttcagtagttttatcaatacaatacaagcaagaaacaccatgttcatag

SEQ ID NO: 51280 - DNA, 741 bp, Acinetobacter baumannii
gtgttttttgcagtcattacgctttttcctgaaatgtttgaagcgattacagcctatgggattagcgggcgtgcagcaaaacgtgacatagtacaagtcacttgtattaatccacgtgattttgctgaagggaattaccgaagagtggatgaacgtccatttggtggtggccctggtatggtgatgatggcggagcctttggcaaaagcaattaaccatgccaaacaacttgcttcgcaagcaggatgtgttcatgtacctgtggtgtatatgtctccacaaggcaaaactttaaatgaacaggcagtacagcagtttgtcgattatgatggcttaattgtattgtgtgggcgttatgaaggcgtcgatgagcgtttgatccagcattatgttgatcaggaatggtcaattggagattatgtcttatctggtggtgaactacctgccatggtgttgcttgatagtattattcgccgtttgccgaatgtaatgtcagatgagcaatcagcgatacaggattcttttgtagatggtcttttggattgtccgcaatacactaagccagaccagtttgaaggtttagatgttcctgaaattttaaagtcgggacatcatgccaatattgagaaatggcgttttttgcagcgttatcaacgaactttagagcgtcgacctgagttgattgaacaggttacgttgactaagcagcaaaaaaaatggctgtcagatgaacaagggtaa

SEQ ID NO: 51281 - DNA, 2265 bp, Acinetobacter baumannii
atgtcgaagcgtattatccagtcagtgctttctgtttcagtactggcaagtatgatgtctatggcttttgctgcacaaaatgagcaagaacaagctgaacaaacattagaaaagcctgctgaacctgtgaaattggaaacaatttttgtaacagcagaagagcaagtgaagcaatcgctcggtgtatcggttattaccaaagaagatttagaaaaactaccagttcgtaatgatatttctgactatgtacgtcgtatgccaggtgtcaacctgacaggcaatagtgctactgggcagcgtggtaataatagacaaattgatattcgcggaatgggccctgaaaacacgcttattttagtggatggtaagccaattaactctcgtaattcagtccgttatggctggaaaggagagcgtgatacacgaggcgactcaaactgggtaccagcagaagccatcgagtcaatcgaagttttacgcggaccagcagctgctcgatatggttctggtgcggcaggtggggtggttaacatcattactaaaaaagtgactaatgaaactcatggttcagtagagttctatacttcacagcctgaagactccaaagaaggttcatcaaatcgtgttggttttaacgtaagtgggccactaattaaggacgttttatcttatcgtttatatggtaattataataaaacagaagctgacgatgttgatattaataaatcaattggtagtaccgcagctggccgtgaaggtgttaaaaataaagatatttcaggccgtttagcttggcaggcaacagaccagcaaactgtcttgctcgatatttcttctagcaaacaaggtaatatttattctggtgactctcagttaaatgcaaatgctgaagcggatgcgattctttcacagctgattggtaaagaaaccaataccatgtatcgtgatagctatgcattaacgcacgaaggtgattggtcttggggtaagagtaagttagttgctcaatatgataagacccataacaaacgtctacctgaaggcttggcgggaagtgtagaaggaaaaattaataatcttgatgataaagccacttcgcgtttagaaactcttcgctttaacggcgaggctaatattccttttgaatactatttaccccaagtattaactgtaggtaccgaatgggttgaagacagatttaaagataatgtctcgacaactcaaggtaaagacagcagtggttcaggttatggcgatcaattagcgaaaggtgatcgtagtaaaatggagtcacgtattgcttctgcatatattgaagataacctgaaagttacagacagcacagatgttgtattaggtttacgttttgatgaccatagtaaatctggttctaattggagcccaagcttaaatattactcaaaaactcaatgattatttcactttaaaaggtggggtagcaaaagcttataaagcaccaaatatgtatcaaaatgccgaagggtatttattaagtacaaatggcaatggctgccctgctaatattgagtcgcgttgtttattacaaggtaatggtgatttaaaacctgaaacatcggtaaacaaagagctcggtattcagttccaaaaagatatcgtgaatgcgagcttaacttggttccgtaatgattataaagataagattgttgcgggtactcatgttgttggaacagttgatggctcaagtacaaatgcaaatacaggagctgtgaccaatacgaagtggaatattttgcgttgggaaaatacgcctaaagccttaattcaaggttttgaaggaagtttgggattagatttcggtgatattcgctggactaataactttacctacatgatggactcgaaagacaagcaaactgggaatccattatctttagttccaatctatacaattaactcaatttttgattatgacattactgatcaattggatgtaaattttgtatttactcaatatggtcgtcaaaaatcacgtcaatttgcagagaatagacttgaatccggtataggttcaggaggtgcgaattctgcgcttaagccaagtacggtaaaaagttatagtaccgctggtattaatgttggttataagttttcagaccaaattagtacgcgtgttggtgtgagtaatctgtttgataaacaaattttaagagacagcaattctattagccaaacttataatgagccaggtcgagcttattacgcatctttaaaatattctttttaa

SEQ ID NO: 51282 - DNA, 396 bp, Acinetobacter baumannii
atgtttatgaaaaaaagtttagttcaatcactttctgttgttttactcatgacaatggcaacagtgggttatgctgctgacaagaaaaaaacagctgaaaagaaaactgaaaatgaaaatgttgttgaagttacaccgtccaaaggtactacaccggaagaattagcagcaattcaagtactttctgaaatttgcccaagtttaattggtaaaaaagatgccgaatttgctcaaggttatgaccgtaagactattcactgcttaggctatttaactccaagcggaaattatgatgaagatctcgccaagatttttgaacgttatgaaggaaaaatatcaccgaaaaatcgtaattggcttgcagagcctttacaaaatcttgtgaaaaaaacctag

SEQ ID NO: 51283 - DNA, 312 bp, Acinetobacter baumannii
  misc_feature (259)..(268): n is a, c, g, or t
atgtctgaaaaaatcgaaatcgaaaaatttctaggtttagctaaacctgtaattccacttgagcgtggtcagcttgtagctttgcatcatgactatagtgttatagctgctgaaaaatttatggatgctcgattccgtcctcatggtgaatttactacaccaacatttaatgactttaaggattttgtagttgcagaaggcggtaaagatacaccaatttttgttaatcaaaatgacgtaaaagctattgcagttcttnnnnnnnnnncttccatggtgaaggaaaaacccaaggccattgtgactatttag

SEQ ID NO: 51284 - DNA, 2523 bp, Acinetobacter baumannii
atggatcaacctattcttgctccagaagagctatttatttctccaaatcatctgctaagtgctctaaaccagtttccacgaatgcttgtgagcgcagaaactattgaagaaaaagctggtgcacttaatcttaaaactgaacaaccacccaagttgccagtcgatccgaaaaaagaaaaaccatttagtgccgtaaaaaaatatattgatgaagcaaatcatcctgttctattggttgcggaaagtgcaggacgtcgtgaaagcttaaaagatgcgttgcgttcaagtttaggtgagattccgaatgtagagaattttgagcaattccaaattagtcagtttgcaattgctattactaatgcgcctctagatcgtggcttacttttaactgatcaattaacggttatttcagaaaatcagctttacgagcaccgagttgtacagcgtcgtcgcaagcgtcaacaggaagtttccgaagagtttctgattcgaagcttaactgagctaagcattggtgctcctgttgtacatatcgatcatggtgtggggcgttatgctggcttaattacactcgcgattgagggacaagactatgagttcttacaactagattatgccgaagatgcaaaagtctatgttccagtaacgaacttgcatctaattagccgttatagtggtggcgacccggatttagcaccgttacataaaatcggaactgatgcttggagtaaagctaagcgtaaagcattagaacaaattcatgacgttgcagctgagcttttacatattcaggcacgtcgtcagtcaaaacctggctttgcttttgaactggatcagtcgctctatatgcaatttgcaagcggttttgcgtatgaagaaacccttgatcaggctaatgcaattgaagccacgctctatgatatgcagcaagcaaaaccaatggataggttggtgtgtggtgatgtgggttttgggaaaaccgaggtggccatgcgtgcagcatttgtcgcagtacaaaatggcaaacaggttgctgttttagttcctacgactttactagctcaacaacattatgagtcttttaaagaccgttttgctgattggccagtacgtattgaagtgctctcacgttttggttcaaacaaaacacatttgaaaaatattgaagacttggcaaatggtaaagtcgacattgtggtaggtacacataagcttctacaagagaatgttcagtttaaagatttaggcttaatggttgtagacgaggagcatcgctttggtgtgcgtgataaggagcgtatcaaagctttacgtgccgatgttgatatgttgacacttacagcaacgccaattcctcgtacgcttaatatggctttttcgggtatgcgtgatttgtcgattattgcgactccgccagcccgtcgattagcagtaaaaacctttgtgcaagagcatacagatgcttcaatcaaggaagcgattttgcgtgagttacttcgtggtggacaagtttatttcttacataatgaagtagagaccattgagcgagctgccgaaaatattcgtgtgcttgtacccgaagcacgtgtagcggtagcacatggacaaatgcgtgaacgcgaacttgagcaagttatgcagcagttctatcacaaagaatataatgtgctggtgtgctcaaccattattgagacaggtatcgatgttccaaatgccaatacaattttgattgaacgtgcggataaacttggtttagcgcaattacaccagttacgtggccgtgtaggtcgttcgcatcaccaagcatacgcgtatttattagtaccttcgattaaacacttaaaaggtgatgccgaaaaacgccttgatgcgattcaacgtgcttcgacattaggtgcaggctttatgctcgctacggaagatttggaaattcgtggagcaggcgaattgttaggcgagcaacaaagtggctcaatgcaggcgataggatatagcttgtatatggaaatgcttgagaaagcgactaaagcaattcaacagggtaaaaccccgaattttgatgctccattgtcgttaactgccgaaattaacttacatattcctgcacttattccagatgattatctgggtgatgttcatcaacgtctattattctataaacgtattagtaataccgatacacaggaaaaactagataacatccgtatggagcttattgaccgtttcggtattccaccgcagtcggttaagcacttatttagcgtgcatcaaatccgtttgaaagcagaacatttaggtattacgaaaattgatattaatactcaaggtggaaatattgagttttcaccagatacgccagttcaggccattagtattattcagttaatgcaaaaaaatccgacttattaccgtatggaaggcggacaacgtttgaaggtgatggtgcagcttgaagagtatgaaaaacgaattcaatttatcaatgatttattgcaaaaattgatgagtgaactacatgcctga

SEQ ID NO: 51285 - DNA, 846 bp, Acinetobacter baumannii
atgaaaacagctttaaaccgtacaccagcctcttttcctgtccgccgcatggactacaattttgaagatactccgcgctattggtgcaatcatgagccttctctcacccactatttcacgggtctttcgactttatttcctgaaggtgaatcatactttgttagatctgtccgtgctttacgagctaaagctaaagagaatgaaattctagacagagaaataggcgcatttattggtcaagaagcaatgcattctaaagaacatcatgctttccatgtcagtgcacaacaatatggtttaaatccagaatcactagagaaagctacaggtattgttcttaaagctattgagaaagtttttagtaaaaaatggaatttattggtaactgttggattagaacactatacagctgttctggtagtcagcatgatgcaatcagtaaatgagcttatgaccgacaacactattcgcaacctatggttatggcacagtgtagaagaaaccgagcataaagctgttgcattcgatttatatcaacatctatatggcaacggattagatgcatatattccacgtgttgcagtttttacattcagtttagttctgattacagccttttcaactatttaccatattgctctaatgaaacgagataagcaactgaccaatttcaaaacttggcgcaacttttttaactttgcgagcaaacaatataaagtgttgattcctaaatttcttgaatactaccgttttgattttcaccccaaccagacagatgaaaaagctttagttgccgctacaaaagtaaaacttggaataagtgatagatcatccctcttatcttaa

SEQ ID NO: 51286 - DNA, 1095 bp, Acinetobacter baumannii
atgggcatatctgtttttaataaaattaaagatttcggttcggagctgttcgatttagtgttgggcgctgagcatccaaaagtctattatcatcctcaaggaaaaataaaagatattttggataagttgccacaacttaaacagaaatatcgtcctacgccttggctcacaaatagtcatgttcacttactttattttgatcttattagaaaacaaacaataaagttggcatatgatcgaattgatcaactcactatgagtgatggtggtattaccgcaattgcttggtatggctataacttaccgccagatacaccaacagttgtaattatgcataccattacaggtacacctgagagtatgcgtgaattggtacgcgatttaaatcaatacacaggctggcgaattgcattatgcctgcgccgtggtcacgcaggtttgccaatgcctgtgccgcaaatttctctatttggttctacgagtgatttaaaagaacaacttaaccatattcaaagtttatttccggcatcggatttatatgcggtaggttcttcggcgggtacagggttgctagttcgttatttgggtgaacaaggcgaagacacaccttttaaagctgcgtttgcgatgtgtccgggctataacacggaaattggttttaaaaatgtccaccctttttacagcaaaatgatgactaaaaagctcttcaagtattttatttatccgtaccaaaatacatggagccagattgcatctttagagaaagttttatcagcaaccaatttggaagaatttgaaaaagaatacttcgagatggcgggttttgaagattatgagacttactgtaaatctattaacccgatttatgtgttcgaaaatattaaaattcctttaatgattttgaatgctgaagatgaccctgtgtgttctattaaaaatttagagccatataaagagccgattcagcagatgagcaatgttgctgtggtgacaacgaaaaaaggaagtcattgtgcattttatgaaggatggcgcagtacatcgtgggcagcacgtctcatggctgattattttttaattgaacataataaatag

SEQ ID NO: 51287 - DNA, 717 bp, Acinetobacter baumannii
atgtggttaaaactttcaacattttttttattacccgtattgttcatacaaggtcataaagttcgaaagaacacaccacgtttagcagaagccaaaggtgaacgagaaggtagagctggtcaaggtaaatctttatctctgcttattttgggggattctgccgcagcaggtgttggtgtagaaaatcagaaagatgctttgtctggtgctattattcaagaactgcaaaatgaattttccctacagtggaaacttcatgctaaaactggcgatacaactcgacaagtttttaatgctttgcagcatttagaagagcagaagtatgatgtgattgtgacatctattggtgtaaatgatgtcacaaagttgatctctgctaaatcatggattaaacaacagaagcaattatttgagcatatacagaaacgttttcagccaaagttgattatcgtttccggtgtgcctccaatgcaacatttcccggctttaccgaatccactagcttggttgtttgggcaatatgcagtgcaaatgaatcaaaaattacaacaatggttagcaccacaaagccattttaagtttcttgaatatgatattgaaacttttcaagccatgaacttgcctatggcaagtgacggttttcatccaagtaaagaagtttacgcagtttggggacggcaggttgcagccatagtgcggcaatcatttaactcatag

SEQ ID NO: 51288 - DNA, 1056 bp, Acinetobacter baumannii; identical to SEQ ID NO: 50851

SEQ ID NO: 51289 - DNA, 828 bp, Acinetobacter baumannii
atgacttcgacatccaacctcattgaacaggtgattgaagcttggcaaaacatgcaggcaaaaacgccgctggtacaatgtattaccaacagcgttgctgccaactatacagccaatgtattacttgcttccggtgcttcacctgccatgattgataatccttatgaagcagaaagctttaccaaaatttcatcggctttaagcattaatttgggtacaccgacttcagagcaaatgcaagccatgcaaatctctgccaaaacagcacagcttaacaatattccttgggtacttgatccggtaggctatggcccaattttagcttggcgcagtcaaatgacagacgagcttttacaattcaagccaagtgttattcgtggtaatgcttcagaaatcagtacgcttgcaggcaatcaagttcaatctaaaggtgtggatagtaccttaagtagtgatcaggcctatcaacaggcttatgcactattagcacatgcagactgtatcgctatttcaggtgagtcagattatatattgtctaatgaaatagatgctgtgattcaagtaaacggcggaagtcctttacaacctaaaattactgcaacaggctgtgctttgggtgcattaattgcagcatatagcgctgtggcaacaccaaccattgcggctctttcagctcatgttcattttgcaattgcaggtaaacttgcagcaaatcaggcgcaaactatgggaagctttagtagcatctttatggattatatccatatgttagatgacaacctgattgaacaatatgcagatatcaaacttttaaacatacaggcataa

SEQ ID NO: 51290 - DNA, 192 bp, Acinetobacter baumannii; identical to SEQ ID NO: 45978

SEQ ID NO: 51291 - DNA, 333 bp, Acinetobacter baumannii
atgagattaattgaaacatataaagagataaattttattgaacacttctatgaattacaccttaatttccatcaaataagatttcgtcaatacgctctaaataggagcggagagcgaagtgaagctgctaagctttgtgactatcttgattatcatgtttactcttttaatggaaattcatctttatttgatttatttttttactatatagagcacattaaatcgtcaagaaatgattataaagaatgtaagaatgcttattaccctactaataaatgctccgaagatttaattgatgagtggcataaatatgtacatatgattgagggataa

SEQ ID NO: 51292 - DNA, 285 bp, Acinetobacter baumannii
  misc_feature (241)..(250): n is a, c, g, or t
atgatgacagcagaagcctttccatttccaattttaggtttagtgcatatccgtaaccagattaaacagaccagaccgattggcgtaactgaaaaactcactctgtcatgtaaatttggggaactaaaaccacatgataaaggtgttcagtttgactttattaccacggcaaaagttggcaacgaagtggtgatggaaggcttaacaacttatttatctcgccaaaaagttgagaaaagannnnnnnnnnatcttatgttccaaaggcagagtggaatattttag

SEQ ID NO: 51293 - DNA, 1134 bp, Acinetobacter baumannii
atgtcagatgatcaaaataaaccggaacaaacccctgctcaaacatctaataatgagccaacgcctgcacctgcacctgcacctgcacctgcaagtaaactgattccgacaaaacgctcaaccctattatggatgttgggtgtgcttattatcggtattttagtgattttgtgggcatggagaattgggccttttgccacaagtgtgcagcaaactgacaatagttatgttaaaggtaaaactaccattttatcctcgcaaattaatggctatgttaaagatgtattggtaaaagactttgaccatgttaaaaagggtcaagtattaatgcatattgatgccaccacttatgaccaaaaagtagcacaagcggcttcaggggtagaacaggccaaaaatactttagccaatcaaactcagtcaattgctcaaaaacaagcagatattgtggctgcgcaggctaaagtagaacaagtcagggctcaatatgaactttctttagcacagcttagacgctatcaacagctagggaatagtggagcagcttctaaatctgagcaagataaagccgctgctgatgccgaaaataatcttgcagcccttaaacaggcagaggccaatgttctagttgccaaagaagcacttaaaacagctcaagtcgcagaagcaggcttagaagcacaagtttccagtgctaaagcacagttagaccaagctcaaaccaccaaagactatagtgttattgttgctccaatggatggacaacttggtgaagtaaaccctcgtgttgggcaatatgtggccgcaggatcacagttactctatctgattccacagcaaacttgggtgattgccaactttaaagaaacccaaattgccaatatgcgaattggacaaaaagcgtggtttacagtcgatgcaatgaaacataaaaaatttacaggtcatgttgaacaaatctctccggccgcgggttccgagttcagtgtactaaaaccggataatgcaacaggaaactttaccaaagtcgttcaacggattgccgtgcgtattaccattgacccaaatcaggaaggaatggaacacttacgccctggtatgtcagtgattacttctgtcgacacaagctcttaa

SEQ ID NO: 51294 - DNA, 738 bp, Acinetobacter baumannii; identical to SEQ ID NO: 45901

SEQ ID NO: 51295 - DNA, 138 bp, Acinetobacter baumannii
atgagtctttctattggtcaattatcaaaaaaagcagatgtcccgatcgatactattcgttattacgaaaaagtaggtgtgttggaccgcattcagcgctcagaaaataattatcgtgtttacactgccgtgaattag
